United States Patent Application Publication US 2026/0337666 A1 - sequence listing, part 12

SEQ ID NO: 16682 - DNA, 735 bp, Homo sapiens
  source 1..735: mol_type = unassigned DNA
cagacctcagccaaggtcgcagagcagaggagacccgtgggctgggattccacctgtgcccaccctggcagcatcccacctcctgagtcctctcggcacccagcaaggttgaagttcatgagttcgcccagcctcagtgacctgggcaagagagagccggccgccgccgcggacgagcggggcacgcagcagcgccgggcctgcgccaacgccacctggaacagcatccacaacggggtgatcgccgtcttccagcgcaaggggctgcccgaccaggagctcttcagcctcaacgagggcgtccggcagctgttgaagacagagctggggtccttcttcacggagtacctgcagaaccagctgctgacaaaaggcatggtgatccttcgggacaagattcgcttctatgaggagactcacctgtcaagatgtgtccccataccactacgtctggcaagcccagctcctatagccagcttggatgctcttcctccaggaagccctccctgcctgaccctctgcaccctcttcttccttcgacgtggtgctgctattggaaggggtctccgtggatccccagacctgaccacaggcagagctggcctggccctgggtcctctgggccactgactgtggtgcaccctttcctcggaggctcagcctctgtctgcttggtggggggtcgatcacccctggctactgcccttatgatcctgctcagtgtcccacttccct

SEQ ID NO: 16683 - DNA, 1878 bp, Homo sapiens
  source 1..1878: mol_type = unassigned DNA
gcccccggcctccgtttgcgccgggtctgtgctggccgcgcgcctggcgctccacgctgagcctctccgtgcaatgattaacccggcggggcggccggcgcgggacccgagacggaggcgcggggccggggcgggaccccgcaggaccgctcggcttcctgctctcgccggagtttccgcgtagagggcgcatcgccggcccggggcccttggtgcggcgtggcgcagggcgcggcgtggggcgcgcgtgggcgcggcgcaggcggcccgggtcaccatgaggactctccgcaggttgaagttcatgagttcgcccagcctcagtgacctgggcaagagagagccggccgccgccgcggacgagcggggcacgcagcagcgccgggcctgcgccaacgccacctggaacagcatccacaacggggtgatcgccgtcttccagcgcaaggggctgcccgaccaggagctcttcagcctcaacgagggcgtccggcagctgttgaagacagagctggggtccttcttcacggagtacctgcagaaccagctgctgacaaaaggcatggtgatccttcgggacaagattcgcttctatgagggacagaagctgctggactcactggcagagacctgggacttcttcttcagtgacgtgctgcccatgctgcaggccatcttctacccggtgcagggcaaggagccatcggtgcgccagctggccctgctgcacttccggaatgccatcaccctcagtgtgaagctagaggatgcgctggcccgggcccatgcccgtgtgccccctgccatcgtgcagatgctgctggtgctgcagggggtacatgagtccaggggcgtgactgaggactacctgcgcctggagacgctggtccagaaggtggtgtcgccatacctgggcacctacggcctccactccagcgaggggcccttcacccattcctgcatcctggaaaagcgcctcctccgccgctcccgctcgggggacgtgctggccaagaaccctgtggtgcgctccaagagctacaacacgcctctgctgaaccccgtgcaggagcacgaggcggagggcgcggcggccggcggtaccagcatccgcaggcactctgtgtcggagatgacgtcctgccccgagcctcagggcttctccgacccgcccggccagggccccaccgggaccttcaggtcctccccggcgccccactcagggccctgccccagcagactgtaccccacgacccagccccctgagcagggcttggatcccacccgcagctccctgccccgctccagcccggagaacctggtggaccagatcctggagtccgtggactcggattctgaagggattttcattgactttggccggggccggggctctggcatgtccgacttggagggctctgggggccggcagagtgtcgtgtgaggcctcacagctggccttgagtttttactgacacgtccctgtgtgcgggggtgtccatgtggcgtgtgtgtgagtgagacttttttactgcgtcccgtcccgccagccctatcggcctcgtcactggccttggtcactttgtatttctgtcttggttggaaataccatcagccttccttgctcggcccaggtctgtttcaggcatctgagtcggcgtttacccaggggccgggccagagacgggggtcggccgctcgctcccacgctcctcctgccccagccctctggtgtccacacctgcccacagagaatgtaaacccagtgggctctgcccacgccgggccccaaagtgaccagactccagcacacctgtctcctcctgcctggggtggccatggggatggaagggggtggaataaaacctgtcaacctgg

SEQ ID NO: 16684 - DNA, 789 bp, Homo sapiens
  source 1..789: mol_type = unassigned DNA
ccgggtctgtgctggccgcgcgcctggcgctccacgctgagcctctccgtgcaatgattaacccggcggggcggccggcgcgggacccgagacggaggcgcggggccggggcgggaccccgcaggaccgctcggcttcctgctctcgccggagtttccgcgtagagggcgcatcgccggcccggggcccttggtgcggcgtggcgcagggcgcggcgtggggcgcgcgtgggcgcggcgcaggcggcccgggtcaccatgaggactctccgcaggttgaagttcatgagttcgcccagcctcagtgacctgggcaagagagagccggccgccgccgcggacgagcggggcacgcagcagcgccgggcctgcgccaacgccacctggaacagcatccacaacggggtgatcgccgtcttccagcgcaaggggctgcccgaccaggagctcttcagcctcaacgagggcgtccggcagctgttgaagacagagctggggtccttcttcacggagtacctgcagaaccagctgctgacaaaaggcatggtgatccttcgggacaagattcgcttctatgagggcatctgcccgcgccagtcaggcccagtggtgatggcccccatgcccacaggacagaagctgctggactcactggcagagacctgggacttcttcttcagtgacgtgctgcccatgctgcaggccatcttctacccggtgcagggcaaggagccatcggtgcgccagctggccctgctgcacttccggaatgccatcaccctcagtgtga

SEQ ID NO: 16685 - DNA, 881 bp, Homo sapiens
  source 1..881: mol_type = unassigned DNA
ccgggtctgtgctggccgcgcgcctggcgctccacgctgagcctctccgtgcaatgattaacccggcggggcggccggcgcgggacccgagacggaggcgcggggccggggcgggaccccgcaggaccgctcggcttcctgctctcgccggagtttccgcgtagagggcgcatcgccggcccggggcccttggttgaagttcatgagttcgcccagcctcagtgacctgggcaagagagagccggccgccgccgcggacgagcggggcacgcagcagcgccgggcctgcgccaacgccacctggaacagcatccacaacggggtgatcgccgtcttccagcgcaaggggctgcccgaccaggagctcttcagcctcaacgagggcgtccggcagctgttgaagacagagctggggtccttcttcacggagtacctgcagaaccagctgctgacaaaaggcatggtgatccttcgggacaagattcgcttctatgagggacagaagctgctggactcactggcagagacctgggacttcttcttcagtgacgtgctgcccatgctgcaggccatcttctacccggtgcagggcaaggagccatcggtgcgccagctggccctgctgcacttccggaatgccatcaccctcagtgtgaagctagaggatgcgctggcccgggcccatgcccgtgtgccccctgccatcgtgcagatgctgctggtgctgcagggggtacatgagtccaggggcgtgactgaggactacctgcgcctggagacgctggtccagaaggtggtgtcgccatacctgggcacctacggcctccactccagcgaggggcccttcacccattcctgcatcctggaaaagcgcctcctcc

SEQ ID NO: 16686 - DNA, 1612 bp, Homo sapiens
  source 1..1612: mol_type = unassigned DNA
cgggtctgtgctggccgcgcgcctggcgctccacgctgagcctctccgtgcaatgattaacccggcggggcggccggcgcgggacccgagacggaggcgcggggccggggcgggaccccgcaggaccgctcggcttcctgctctcgccggagtttccgcgtagagggcgcatcgccggcccggggcccttggtgcggcgtggcgcagggcgcggcgtggggcgcgcgtgggcgcggcgcaggcggcccgggtcaccatgaggactctccgcaggttgaagttcatgagttcgcccagcctcagtgacctgggcaagagagagccggccgccgccgcggacgagcggggcacgcagcagcgccgggcctgcgccaacgccacctggaacagcatccacaacggggtgatcgccgtcttccagcgcaaggggctgcccgaccaggagctcttcagcctcaacgagggcgtccggcagctgttgaagacagagctggggtccttcttcacggagtacctgcagaaccagctgctgacaaaaggcatggtgatccttcgggacaagattcgcttctatgaggaagctgctggactcactggcagagacctgggacttcttcttcagtgacgtgctgcccatgctgcaggccatcttctacccggtgcagggcaaggagccatcggtgcgccagctggccctgctgcacttccggaatgccatcaccctcagtgtgaagctagaggatgcgctggcccgggcccatgcccgtgtgccccctgccatcgtgcagatgctgctggtgctgcagggggtacatgagtccaggggcgtgactgaggactacctgcgcctggagacgctggtccagaaggtggtgtcgccatacctgggcacctacggcctccactccagcgaggggcccttcacccattcctgcatcctggaaaagcgcctcctccgccgctcccgctcgggggacgtgctggccaagaaccctgtggtgcgctccaagagctacaacacgcctctgctgaaccccgtgcaggagcacgaggcggagggcgcggcggccggcggtaccagcatccgcaggcactctgtgtcggagatgacgtcctgccccgagcctcagggcttctccgacccgcccggccagggccccaccgggaccttcaggtcctccccggcgccccactcagggccctgccccagcagactgtaccccacgacccagccccctgagcagggcttggatcccacccgcagctccctgccccgctccagcccggagaacctggtggaccagatcctggagtccgtggactcggattctgaagggattttcattgactttggccggggccggggctctggcatgtccgacttggagggctctgggggccggcagagtgtcgtgtgaggcctcacagctggccttgagtttttactgacacgtccctgtgtgcgggggtgtccatgtggcgtgtgtgtgagtgagacttttttactgcgtcccgtcccgccagccctatcggcctcgtcactggccttggtcactttgtatttctgtcttggttggaaataccatcagccttccttgctcggcccaggtct

SEQ ID NO: 16687 - DNA, 1430 bp, Homo sapiens
  source 1..1430: mol_type = unassigned DNA
ccgcaggttgaagttcatgagttcgcccagcctcagtgacctgggcaagagagagccggccgccgccgcggacgagcggggcacgcagcagcgccgggcctgcgccaacgccacctggaacagcatccacaacggggtgatcgccgtcttccagcgcaaggggctgcccgaccaggagctcttcagcctcaacgagggcgtccggcagctgttgaagacagagctggggtccttcttcacggagtacctgcagaaccagctgctgacaaaaggcatggtgatccttcgggacaagattcgcttctatgaggaagctgctggactcactggcagagacctgggacttcttcttcagtgacgtgctgcccatgctgcaggccatcttctacccggtgcagggcaaggagccatcggtgcgccagctggccctgctgcacttccggaatgccatcaccctcagtgtgaagctagaggatgcgctggcccgggcccatgcccgtgtgccccctgccatcgtgcagatgctgctggtgctgcagaaaagcgcctcctccgccgctcccgctcgggggacgtgctggccaagaaccctgtggtgcgctccaagagctacaacacgcctctgctgaaccccgtgcaggagcacgaggcggagggcgcggcggccggcggtaccagcatccgcaggcactctgtgtcggagatgacgtcctgccccgagcctcagggcttctccgacccgcccggccagggccccaccgggaccttcaggtcctccccggcgccccactcagggccctgccccagcagactgtaccccacgacccagccccctgagcagggcttggatcccacccgcagctccctgccccgctccagcccggagaacctggtggaccagatcctggagtccgtggactcggattctgaagggattttcattgactttggccggggccggggctctggcatgtccgacttggagggctctgggggccggcagagtgtcgtgtgaggcctcacagctggccttgagtttttactgacacgtccctgtgtgcgggggtgtccatgtggcgtgtgtgtgagtgagacttttttactgcgtcccgtcccgccagccctatcggcctcgtcactggccttggtcactttgtatttctgtcttggttggaaataccatcagccttccttgctcggcccaggtctgtttcaggcatctgagtcggcgtttacccaggggccgggccagagacgggggtcggccgctcgctcccacgctcctcctgccccagccctctggtgtccacacctgcccacagagaatgtaaacccagtgggctctgcccacgccgggccccaaagtgaccagactccagcacacctgtctcctcctgcctggggtggccatggggatggaagggggtgga

SEQ ID NO: 16688 - DNA, 1041 bp, Homo sapiens
  source 1..1041: mol_type = unassigned DNA
agtgacctgggcaagagagagccggccgccgccgcggacgagcggggcacgcagcagcgccgggcctgcgccaacgccacctggaacagcatccacaacggggtgatcgccgtcttccagcgcaaggggctgcccgaccaggagctcttcagcctcaacgagggcgtccgaaccagctgctgacaaaaggcatggtgatccttcgggacaagattcgcttctatgagggacagaagctgctggactcactggcagagacctgggacttcttcttcagtgacgtgctgcccatgctgcaggccatcttctacccggtgcagggcaaggagccatcggtgcgccagctggccctgctgcacttccggaatgccatcaccctcagtgtgaagctagaggatgcgctggcccgggcccatgcccgtgtgccccctgccatcgtgcagatgctgctggtgctgcagggggtacatgagtccaggggcgtgactgaggactacctgcgcctggagacgctggtccagaaggtggtgtcgccatacctgggcacctacggcctccactccagcgaggggcccttcacccattcctgcatcctggaaaagcgcctcctccgccgctcccgctcgggggacgtgctggccaagaaccctgtggtgcgctccaagagctacaacacgcctctgctgaaccccgtgcaggagcacgaggcggagggcgcggcggccggcggtaccagcatccgcaggcactctgtgtcggagatgacgtcctgccccgagcctcagggcttctccgacccgcccggccagggccccaccgggaccttcaggtcctccccggcgccccactcagggccctgccccagcagactgtaccccacgacccagccccctgagcagggcttggatcccacccgcagctccctgccccgctccagcccggagaacctggtggaccagatcctggagtccgtggactcggattctgaagggattttcattgactttggccggggccggggctctggcatgtccgacttgg

SEQ ID NO: 16689 - DNA, 1431 bp, Homo sapiens
  source 1..1431: mol_type = unassigned DNA
gccctgggtcctctgggccactgactgtggtgcaccctttcctcggaggctcagcctctgtctgcttggtggggggtcgatcacccctggctactgcccttatgatcctgctcagtgtcccacttccctgtcatgtgatggatgggcagctgtttggggctcagctgggtccccagtgcccagcatcagcgccagcacacagacagaagctgctggactcactggcagagacctgggacttcttcttcagtgacgtgctgcccatgctgcaggccatcttctacccggtgcagggcaaggagccatcggtgcgccagctggccctgctgcacttccggaatgccatcaccctcagtgtgaagctagaggatgcgctggcccgggcccatgcccgtgtgccccctgccatcgtgcagatgctgctggtgctgcagggggtacatgagtccaggggcgtgactgaggactacctgcgcctggagacgctggtccagaaggtggtgtcgccatacctgggcacctacggcctccactccagcgaggggcccttcacccattcctgcatcctggaaaagcgcctcctccgccgctcccgctcgggggacgtgctggccaagaaccctgtggtgcgctccaagagctacaacacgcctctgctgaaccccgtgcaggagcacgaggcggagggcgcggcggccggcggtaccagcatccgcaggcactctgtgtcggagatgacgtcctgccccgagcctcagggcttctccgacccgcccggccagggccccaccgggaccttcaggtcctccccggcgccccactcagggccctgccccagcagactgtaccccacgacccagccccctgagcagggcttggatcccacccgcagctccctgccccgctccagcccggagaacctggtggaccagatcctggagtccgtggactcggattctgaagggattttcattgactttggccggggccggggctctggcatgtccgacttggagggctctgggggccggcagagtgtcgtgtgaggcctcacagctggccttgagtttttactgacacgtccctgtgtgcgggggtgtccatgtggcgtgtgtgtgagtgagacttttttactgcgtcccgtcccgccagccctatcggcctcgtcactggccttggtcactttgtatttctgtcttggttggaaataccatcagccttccttgctcggcccaggtctgtttcaggcatctgagtcggcgtttacccaggggccgggccagagacgggggtcggccgctcgctcccacgctcctcctgccccagccctctggtgtccacacctgcccacagagaatgtaaacccagtgggctctgcccacgccgggccccaaagtgaccagactccagcacacctgtctcctcctgcct

SEQ ID NO: 16690 - DNA, 2125 bp, Homo sapiens
  source 1..2125: mol_type = unassigned DNA
tcacccctggctactgcccttatgatcctgctcagtgtcccacttccctgtcatgtgatggatgggcagctgtttggggctcagctgggtccccagtgcccagcatcagcgccagcacacagtaggtgttctgtgtttgttggaggggcagatagtgtgggggaaggagggaggaggtcggtgggtagaagaaatcaactgcttagccgggttgttaggaggatctgatgagactaggatgtgagttgaaactgctgtgccaggcacacctgtgtgggtctcacttgtgccaggcatacctgcgtgggtctcacctgtgtaggtctcacctgtgccaggtgtacctgtgtgggtcttacctgtgcaggtctcctgatgcaggtctcacctgtgccgagtgtacctacctgtgcgggtctcacctgtgtcaggcgtacgtgtaggggtctcacctgtgaacgtctcacctgtgccaggtgtatacctgtgtggctctcacttgtgtgggtctggtatgtgacaaaggcctgggaattggcagctgtcatctgccaggagcagaccctgagccaagttccctgtgccttaggctcatttcatgccctcagctctgggaggccaatccctttactgccacattttataaatggaagactgaggttaagcagtgggcccagggccatagaacagctgagctgtggagctggacatcgaccttgggcaggtgctgccaggggcctgagcccaggccctccactcccgcatcctctgatgacccatcctgggtgagtggaggcatctgcccgcgccagtcaggcccagtggtgatggcccccatgcccacaggacagaagctgctggactcactggcagagacctgggacttcttcttcagtgacgtgctgcccatgctgcaggccatcttctacccggtgcagggcaaggagccatcggtgcgccagctggccctgctgcacttccggaatgccatcaccctcagtgtgaagctagaggatgcgctggcccgggcccatgcccgtgtgccccctgccatcgtgcagatgctgctggtgctgcagggggtacatgagtccaggggcgtgactgaggactacctgcgcctggagacgctggtccagaaggtggtgtcgccatacctgggcacctacggcctccactccagcgaggggcccttcacccattcctgcatcctggaaaagcgcctcctccgccgctcccgctcgggggacgtgctggccaagaaccctgtggtgcgctccaagagctacaacacgcctctgctgaaccccgtgcaggagcacgaggcggagggcgcggcggccggcggtaccagcatccgcaggcactctgtgtcggagatgacgtcctgccccgagcctcagggcttctccgacccgcccggccagggccccaccgggaccttcaggtcctccccggcgccccactcagggccctgccccagcagactgtaccccacgacccagccccctgagcagggcttggatcccacccgcagctccctgccccgctccagcccggagaacctggtggaccagatcctggagtccgtggactcggattctgaagggattttcattgactttggccggggccggggctctggcatgtccgacttggagggctctgggggccggcagagtgtcgtgtgaggcctcacagctggccttgagtttttactgacacgtccctgtgtgcgggggtgtccatgtggcgtgtgtgtgagtgagacttttttactgcgtcccgtcccgccagccctatcggcctcgtcactggccttggtcactttgtatttctgtcttggttggaaataccatcagccttccttgctcggcccaggtctgtttcaggcatctgagtcggcgtttacccaggggccgggccagagacgggggtcggccgctcgctcccacgctcctcctgccccagccctctggtgtccacacctgcccacagagaatgtaaacccagtgggctctgcccacgccgggccccaaagtgaccagactccagcacacctgtctcctcctgcctggggtggccatggggatggaagggggtggaataaaacctgtcaacctgg

SEQ ID NO: 16691 - DNA, 1965 bp, Homo sapiens
  source 1..1965: mol_type = unassigned DNA
ctaaaaatacaaaaattagccgggcatggtgatgcatgcctgtagtcccagctactcgggaggctgaggcaggagaatcacttgaacctgggaggcggaggttgcagtgagccaagatcgcaccactgcactccagcctggtgacagagcgaaactctgtctcaaaaaaaaaaattctacccccgtgtatcttgtccctgaaccccctgacagccccttgaggcctgctgtcttccattcattcacttatttaatgagtgcaagcactcgttataagtcagctttctcccagccctctttgctgggtgctgaggtcccagagcttttgtcccagctcagcgcacagctgggtgagcagcctcatctcccgggccttggctcaaatacacctggaggtagcggtgagcccttcagagctccggatgaggggagatgatggcgtgagccagtgatgggaagaagagagtggggcttgtgaggtggtccctgatggatgtggactgcacctggccccatggggcagggagccccaggtgagcagcttggccctccctgcgtggggtcagccagtgtctctggagagactgtccaaagcctctaggactcttgagtacagggcccctccgaggggtggaaggtgcagaacacccatctcatctggccacagggcctttttccagggcacaccatggtctcccagatcccgacgctgctgtgagcagcagagtgactcaggccacatgctctgagaggggctgggaggccaccgtgggccctgccatggggacagagagcctgtgggaatggggaggcgggaggcagaggacaggctgtctggtgggtgggacatatggttgagagcctggagccaccaagctcgggtgcatgaccccctaccccctgccccactctcctgcagggggtacatgagtccaggggcgtgactgaggactacctgcgcctggagacgctggtccagaaggtggtgtcgccatacctgggcacctacggcctccactccagcgaggggcccttcacccattcctgcatcctggaaaagcgcctcctccgccgctcccgctcgggggacgtgctggccaagaaccctgtggtgcgctccaagagctacaacacgcctctgctgaaccccgtgcaggagcacgaggcggagggcgcggcggccggcggtaccagcatccgcaggcactctgtgtcggagatgacgtcctgccccgagcctcagggcttctccgacccgcccggccagggccccaccgggaccttcaggtcctccccggcgccccactcagggccctgccccagcagactgtaccccacgacccagccccctgagcagggcttggatcccacccgcagctccctgccccgctccagcccggagaacctggtggaccagatcctggagtccgtggactcggattctgaagggattttcattgactttggccggggccggggctctggcatgtccgacttggagggctctgggggccggcagagtgtcgtgtgaggcctcacagctggccttgagtttttactgacacgtccctgtgtgcgggggtgtccatgtggcgtgtgtgtgagtgagacttttttactgcgtcccgtcccgccagccctatcggcctcgtcactggccttggtcactttgtatttctgtcttggttggaaataccatcagccttccttgctcggcccaggtctgtttcaggcatctgagtcggcgtttacccaggggccgggccagagacgggggtcggccgctcgctcccacgctcctcctgccccagccctctggtgtccacacctgcccacagagaatgtaaacccagtgggctctgcccacgccgggccccaaagtgaccagactccagcacacctgtctcctcctgcctggggtggccatggggatggaagggggtggaataaaacctgtcaacctgg

SEQ ID NO: 16692 - DNA, 1843 bp, Homo sapiens
  source 1..1843: mol_type = unassigned DNA
agccccccagctccggcggacccgggtgggcgtgcccgcggacccgcttgccgcacttaggcgagtctcccctgcagcgccccgagtccctgggggctgcggcggctgcgggcgcccccgcgcgggcccgaggggcgggacgcggcggagcggggcggggcggggcctccgcggccccctcccccggccccgggctccggctccggctccggctctggctctgcgcggtggcagcggcggcggcggcgcggggaccgaggttgaagttcatgagttcgcccagcctcagtgacctgggcaagagagagccggccgccgccgcggacgagcggggcacgcagcagcgccgggcctgcgccaacgccacctggaacagcatccacaacggggtgatcgccgtcttccagcgcaaggggctgcccgaccaggagctcttcagcctcaacgagggcgtccggcagctgttgaagacagagctggggtccttcttcacggagtacctgcagaaccagctgctgacaaaaggcatggtgatccttcgggacaagattcgcttctatgagggacagaagctgctggactcactggcagagacctgggacttcttcttcagtgacgtgctgcccatgctgcaggccatcttctacccggtgcagggcaaggagccatcggtgcgccagctggccctgctgcacttccggaatgccatcaccctcagtgtgaagctagaggatgcgctggcccgggcccatgcccgtgtgccccctgccatcgtgcagatgctgctggtgctgcagggggtacatgagtccaggggcgtgactgaggactacctgcgcctggagacgctggtccagaaggtggtgtcgccatacctgggcacctacggcctccactccagcgaggggcccttcacccattcctgcatcctggaaaagcgcctcctccgccgctcccgctcgggggacgtgctggccaagaaccctgtggtgcgctccaagagctacaacacgcctctgctgaaccccgtgcaggagcacgaggcggagggcgcggcggccggcggtaccagcatccgcaggcactctgtgtcggagatgacgtcctgccccgagcctcagggcttctccgacccgcccggccagggccccaccgggaccttcaggtcctccccggcgccccactcagggccctgccccagcagactgtaccccacgacccagccccctgagcagggcttggatcccacccgcagctccctgccccgctccagcccggagaacctggtggaccagatcctggagtccgtggactcggattctgaagggattttcattgactttggccggggccggggctctggcatgtccgacttggagggctctgggggccggcagagtgtcgtgtgaggcctcacagctggccttgagtttttactgacacgtccctgtgtgcgggggtgtccatgtggcgtgtgtgtgagtgagacttttttactgcgtcccgtcccgccagccctatcggcctcgtcactggccttggtcactttgtatttctgtcttggttggaaataccatcagccttccttgctcggcccaggtctgtttcaggcatctgagtcggcgtttacccaggggccgggccagagacgggggtcggccgctcgctcccacgctcctcctgccccagccctctggtgtccacacctgcccacagagaatgtaaacccagtgggctctgcccacgccgggccccaaagtgaccagactccagcacacctgtctcctcctgcctggggtggccatggggatggaagggggtggaataaaacctgtcaacctgg

SEQ ID NO: 16693 - DNA, 1900 bp, Homo sapiens
  source 1..1900: mol_type = unassigned DNA
caggaaggggtgctctgtgggcttggaggatgcaggcgccttcctggggactgctctgtgagcagtgataaaatatttatcagccagcagctgggcttccctgcatagggtgcagtcgggggcagctcccacccgagcctgcagcctgagttctgctgagtcatgggggagcccagtgagccgcctgccctcaagctcctgggccccctctgccctttggccatgtgaacgcctcctaatgtgtaagccattcggctgcccccaaggccaggcatccagtgtgcttagtgctgagcagggtttcagagctcacccccaggagggtgcagacctcagccaaggtcgcagagcagaggagacccgtgggctgggattccacctgtgcccaccctggcagcatcccacctcctgagtcctctcggcacccagcaagcatccacaacggggtgatcgccgtcttccagcgcaaggggctgcccgaccaggagctcttcagcctcaacgagggcgtccggcagctgttgaagacagagctggggtccttcttcacggagtacctgcagaaccagctgctgacaaaaggcatggtgatccttcgggacaagattcgcttctatgagggacagaagctgctggactcactggcagagacctgggacttcttcttcagtgacgtgctgcccatgctgcaggccatcttctacccggtgcagggcaaggagccatcggtgcgccagctggccctgctgcacttccggaatgccatcaccctcagtgtgaagctagaggatgcgctggcccgggcccatgcccgtgtgccccctgccatcgtgcagatgctgctggtgctgcagggggtacatgagtccaggggcgtgactgaggactacctgcgcctggagacgctggtccagaaggtggtgtcgccatacctgggcacctacggcctccactccagcgaggggcccttcacccattcctgcatcctggaaaagcgcctcctccgccgctcccgctcgggggacgtgctggccaagaaccctgtggtgcgctccaagagctacaacacgcctctgctgaaccccgtgcaggagcacgaggcggagggcgcggcggccggcggtaccagcatccgcaggcactctgtgtcggagatgacgtcctgccccgagcctcagggcttctccgacccgcccggccagggccccaccgggaccttcaggtcctccccggcgccccactcagggccctgccccagcagactgtaccccacgacccagccccctgagcagggcttggatcccacccgcagctccctgccccgctccagcccggagaacctggtggaccagatcctggagtccgtggactcggattctgaagggattttcattgactttggccggggccggggctctggcatgtccgacttggagggctctgggggccggcagagtgtcgtgtgaggcctcacagctggccttgagtttttactgacacgtccctgtgtgcgggggtgtccatgtggcgtgtgtgtgagtgagacttttttactgcgtcccgtcccgccagccctatcggcctcgtcactggccttggtcactttgtatttctgtcttggttggaaataccatcagccttccttgctcggcccaggtctgtttcaggcatctgagtcggcgtttacccaggggccgggccagagacgggggtcggccgctcgctcccacgctcctcctgccccagccctctggtgtccacacctgcccacagagaatgtaaacccagtgggctctgcccacgccgggccccaaagtgaccagactccagcacacctgtctcctcctgcctggggtggccatggggatggaagggggtggaataaaacctgtcaacctgg

SEQ ID NO: 16694 - DNA, 1726 bp, Homo sapiens
  source 1..1726: mol_type = unassigned DNA
agccccccagctccggcggacccgggtgggcgtgcccgcggacccgcttgccgcacttaggcgagtctcccctgcagcgccccgagtccctgggggctgcggcggctgcgggcgcccccgcgcgggcccgaggggcgggacgcggcggagcggggcggggcggggcctccgcggccccctcccccggccccgggctccggctccggctccggctctggctctgcgcggtggcagcggcggcggcggcgcggggaccgagcatccacaacggggtgatcgccgtcttccagcgcaaggggctgcccgaccaggagctcttcagcctcaacgagggcgtccggcagctgttgaagacagagctggggtccttcttcacggagtacctgcagaaccagctgctgacaaaaggcatggtgatccttcgggacaagattcgcttctatgagggacagaagctgctggactcactggcagagacctgggacttcttcttcagtgacgtgctgcccatgctgcaggccatcttctacccggtgcagggcaaggagccatcggtgcgccagctggccctgctgcacttccggaatgccatcaccctcagtgtgaagctagaggatgcgctggcccgggcccatgcccgtgtgccccctgccatcgtgcagatgctgctggtgctgcagggggtacatgagtccaggggcgtgactgaggactacctgcgcctggagacgctggtccagaaggtggtgtcgccatacctgggcacctacggcctccactccagcgaggggcccttcacccattcctgcatcctggaaaagcgcctcctccgccgctcccgctcgggggacgtgctggccaagaaccctgtggtgcgctccaagagctacaacacgcctctgctgaaccccgtgcaggagcacgaggcggagggcgcggcggccggcggtaccagcatccgcaggcactctgtgtcggagatgacgtcctgccccgagcctcagggcttctccgacccgcccggccagggccccaccgggaccttcaggtcctccccggcgccccactcagggccctgccccagcagactgtaccccacgacccagccccctgagcagggcttggatcccacccgcagctccctgccccgctccagcccggagaacctggtggaccagatcctggagtccgtggactcggattctgaagggattttcattgactttggccggggccggggctctggcatgtccgacttggagggctctgggggccggcagagtgtcgtgtgaggcctcacagctggccttgagtttttactgacacgtccctgtgtgcgggggtgtccatgtggcgtgtgtgtgagtgagacttttttactgcgtcccgtcccgccagccctatcggcctcgtcactggccttggtcactttgtatttctgtcttggttggaaataccatcagccttccttgctcggcccaggtctgtttcaggcatctgagtcggcgtttacccaggggccgggccagagacgggggtcggccgctcgctcccacgctcctcctgccccagccctctggtgtccacacctgcccacagagaatgtaaacccagtgggctctgcccacgccgggccccaaagtgaccagactccagcacacctgtctcctcctgcctggggtggccatggggatggaagggggtggaataaaacctgtcaacctgg

SEQ ID NO: 16695 - DNA, 436 bp, Homo sapiens
  source 1..436: mol_type = unassigned DNA
agtcttcaggccccaggtcagtgagtggcaagccaggcccagagatctctgcgcccgttggaacatccccttctcgggaggctggaaggccatggtcattcacctctccccagcaaggtgggacctgccctggaagaagaaaccagaccagcttttgtcttgcttgaagaagatggaattgctcaatgacgacagtgaaggaatttgaaaggtctagagtgcagccagtcaagaagatttctagaaattgggcccaaagtgtctttggatgatgaaatgaggatgacagtggcaatgttatcgtcatggttatttccttgagcatggcatggaagatgaggtgttctagtgaactttctcactggaccaaactgttgtgataaatcctttgaagttatatcaatccatccagtttcaacttccagagcttcgggaa

SEQ ID NO: 16696 - DNA, 562 bp, Homo sapiens
  source 1..562: mol_type = unassigned DNA
agtcttcaggccccaggtcagtgagtggcaagccaggcccagagatctctgcgcccgttggaacatccccttctcgggaggctggaaggccatggtcattcacctctccccagcaaggtgggacctgccctggaagaagaaaccagaccaggtgttggctacgtttgtggttttaagaaagcctgagggcctgaaggcagcccctggagaagccctttccgagggcattcggaaccttctggtcctagaggtgaagctgaactgtcaccaggacttatgacccgcggcttcgctcccattctgcccgtcgagttccacaagatgggctccttccgcaggcctagaccgcgcttcatgagctcccccgtgctcagcgaccttccccgattccaagcagctcggcaggctctgcagctgagctccagctcagcctggaacagcgttcagactgctgtgatcaacgttttcaaagggggtggcttgcaaagcaacgagctctatgccctgaacgaaaacatcagaaccagcttcttgcaaaaggactgttctttgtggaggagaa

SEQ ID NO: 16697 - DNA, 2291 bp, Homo sapiens
  source 1..2291: mol_type = unassigned DNA
agtcttcaggccccaggtcagtgagtggcaagccaggcccagagatctctgcgcccgttggaacatccccttctcgggaggctggaaggccatggtcattcacctctccccagcaaggtgggacctgccctggaagaagaaaccagaccaggtgttggctacgtttgtggttttaagaaagcctgagggcctgaaggcagcccctggagaagccctttccgagggcattcggaaccttctggtcctagaggtgaagctgaactgtcaccaggacttatgacccgcggcttcgctcccattctgcccgtcgagttccacaagatgggctccttccgcaggcctagaccgcgcttcatgagctcccccgtgctcagcgaccttccccgattccaagcagctcggcaggctctgcagctgagctccagctcagcctggaacagcgttcagactgctgtgatcaacgttttcaaagggggtggcttgcaaagcaacgagctctatgccctgaacgaaaacatcaggcggctgttgaagagtgaacttggatcattcattacagactattttcagaaccagcttcttgcaaaaggactgttctttgtggaggagaagatcaagctgtgtgaaggtgaaaatcgcattgaggttctggctgaagtctgggaccacttcttcactgagactctccctaccctgcaggcaatattttatccagttcagggccaggagctgactatccgccagatctccctgctgggcttccgagacctagtcttgctgaaggtgaagctgggtgacctgctgctgctggcccagtccaagctgccctcgtccattgtccagatgttgctcatcctgcagagtgttcacgagcccacaggcccaagtgagagttatttgcaactggaggagctggtgaagcaagtggtttctcctttcctcggcatcagcggggaccgtagcttctcaggccccacgtacacgctggccaggcggcactccagggtccggcccaaggtgactgtcctgaactatgcctccccgataaccgcagtcagccggccactgaatgagatggtcttgaccccactgacagagcaggagggggaagcctacctggagaagtgtggcagcgtgcggcggcacacggtggccaatgcccactcggacatccagctgctggccatggccaccatgatgcactcgggcctgggggaggaggccagcagtgagaacaagtgcctgctcctgccacccagcttccccccgccccaccggcagtgctccagtgagcccaacatcactgacaaccctgacggactggaggagggggccaggggcagccaggagggctcggagctgaactgtgcttccctcagctgagtcgccacccctgggcctttccatctcctgttttgcaaccaggatgaggacccctccatctccgtggattactgaggggggctcttgctttatgcgatgctgccttatttcctttagggtactgtcctggtcaaaatgacctaaggggaaaccgttgttgtaaacctctttattttggtgactgtgaccacttctttgtagccaccaattgtagtgaccagttgcctaatggtcactttctgactccagccttgccagcctgactcagatcctcatctctgggcctttctccctccgatgttggactgcctgatgctcccaatgacatatccaatgctcctggcatttctggagcaggaggttgtcaggacaacacatataaccaccaaggatgtgttggcctttggagttcccctttaggttcctagtgatgtggaggtttatgggtgaaaaattagtggagagggaactcctctcccccattttgtgtagagtgaaaatagcctgaagcccctactcagcagggctctgggaatgtgccttccttattttagtttcagaattgctgggaaagttaccccactggtgggtgaggatctatcctcaacctacatccagatcctatgtgctgcttgcacagaggcctttggcttttgacccaggagggccgcgaggctggagctgccctgtctttcattgagccttagcatttccctctcaggcttcctctcaagctcaaggaactcacccccagataagaagctggtgcctcttgtctctctcatttcagaaacggactttctcatcatgctttcctatggtgggtatgaggggccagctgataccaaccaactggcctgtatctatctatctggatttgacttgaatttttaaaatgtgtatcgttt

SEQ ID NO: 16698 - DNA, 544 bp, Homo sapiens
  source 1..544: mol_type = unassigned DNA
acatttattgtgcccaagacttttgtgggctctctgccaggaaagggcaggtcattgaatgggccctgggaaaaatgatgtctgagcttctctccagttctcagagaaagaagaggcaattcggacataaagagaaacatcaagggcatgagtgcacagaggaaagaccatgtgacggcatggctacaaggcagccatctgtaaaccaaggagagagaccccaaaggaaatcaaccctgctgacaccttgatcgtggacttctagcctccagaactgtgttggctacgtttgtggttttaagaaagcctgagggcctgaaggcagcccctggagaagccctttccgagggcattcggaaccttctggtcctagaggtgaagctgaactgtcaccaggacttatgacccgcggcttcgctcccattctgcccgtcgagttccacaagatgggctccttccgcaggcctagaccgcgcttcatgagctcccccgtgctcagcgaccttccccgattccaagcagctcggcaggctctgcagctgag

SEQ ID NO: 16699 - DNA, 572 bp, Homo sapiens
  source 1..572: mol_type = unassigned DNA
ggaacctggcactagaatgtgagcaaaaaagaggcaattctgctgacttcagagaagcttccttgcagaaggaatctgaaacacgagcaactctctggggaggatgagaagctcttctacaaggaggaggaaaacataccttaggctatatggctgctgggaatccaggttaaaatgtttaaccctggagaaaaagaggtgttggctacgtttgtggttttaagaaagcctgagggcctgaaggcagcccctggagaagccctttccgagggcattcggaaccttctggtcctagaggtgaagctgaactgtcaccaggacttatgacccgcggcttcgctcccattctgcccgtcgagttccacaagatgggctccttccgcaggcctagaccgcgcttcatgagctcccccgtgctcagcgaccttccccgattccaagcagctcggcaggctctgcagctgagctccagctcagcctggaacagcgttcagactgctgtgatcaacgttttcaaagggggtggcttgcaaagcaacgagctctatgccctgaacgaaaacatcaggcgg

SEQ ID NO: 16700 - DNA, 592 bp, Homo sapiens
  source 1..592: mol_type = unassigned DNA
accagagactcctgccttccattggcgaaccggtcaccggctccgtcctgaaaacagaacttgctccgagtgataagaggcaattcggacataaagagaaacatcaagggcatgagtgcacagaggaaagaccatgtgacggcatggctacaaggcagccatctgtaaaccaaggagagagaccccaaaggaaatcaaccctgctgacaccttgatcgtggacttctagcctccagaactgtgttggctacgtttgtggttttaagaaagcctgagggcctgaaggcagcccctggagaagccctttccgagggcattcggaaccttctggtcctagaggtgaagctgaactgtcaccaggacttatgacccgcggcttcgctcccattctgcccgtcgagttccacaagatgggctccttccgcaggcctagaccgcgcttcatgagctcccccgtgctcagcgaccttccccgattccaagcagctcggcaggctctgcagctgagctccagctcagcctggaacagcgttcagactgctgtgatcaacgttttcaaagggggtggcttgcaaagcaacgagctctatgc

SEQ ID NO: 16701 - DNA, 3930 bp, Homo sapiens
  source 1..3930: mol_type = unassigned DNA
ggggcagctgggccgggggcgggggtcggctgcagatctcccgttgtgtgagagaaacgcaagcacggagctcccttgacctgctgcatcctcctcggcaattttttttttttaagtcaaaaagcttggatttcctgaaattgttgaactggatgcgcgcggagtctggggcggaggcgagcggcgggtgtgcgcgactcggggtgattcacgccggggaccccaaggaggtgttggctacgtttgtggttttaagaaagcctgagggcctgaaggcagcccctggagaagccctttccgagggcattcggaaccttctggtcctagaggtgaagctgaactgtcaccaggacttatgacccgcggcttcgctcccattctgcccgtcgagttccacaagatgggctccttccgcaggcctagaccgcgcttcatgagctcccccgtgctcagcgaccttccccgattccaagcagctcggcaggctctgcagctgagctccagctcagcctggaacagcgttcagactgctgtgatcaacgttttcaaagggggtggcttgcaaagcaacgagctctatgccctgaacgaaaacatcaggcggctgttgaagagtgaacttggatcattcattacagactattttcagaaccagcttcttgcaaaaggactgttctttgtggaggagaagatcaagctgtgtgaaggtgaaaatcgcattgaggttctggctgaagtctgggaccacttcttcactgagactctccctaccctgcaggcaatattttatccagttcagggccaggagctgactatccgccagatctccctgctgggcttccgagacctagtcttgctgaaggtgaagctgggtgacctgctgctgctggcccagtccaagctgccctcgtccattgtccagatgttgctcatcctgcagagtgttcacgagcccacaggcccaagtgagagttatttgcaactggaggagctggtgaagcaagtggtttctcctttcctcggcatcagcggggaccgtagcttctcaggccccacgtacacgctggccaggcggcactccagggtccggcccaaggtgactgtcctgaactatgcctccccgataaccgcagtcagccggccactgaatgagatggtcttgaccccactgacagagcaggagggggaagcctacctggagaagtgtggcagcgtgcggcggcacacggtggccaatgcccactcggacatccagctgctggccatggccaccatgatgcactcgggcctgggggaggaggccagcagtgagaacaagtgcctgctcctgccacccagcttccccccgccccaccggcagtgctccagtgagcccaacatcactgacaaccctgacggactggaggagggggccaggggcagccaggagggctcggagctgaactgtgcttccctcagctgagtcgccacccctgggcctttccatctcctgttttgcaaccaggatgaggacccctccatctccgtggattactgaggggggctcttgctttatgcgatgctgccttatttcctttagggtactgtcctggtcaaaatgacctaaggggaaaccgttgttgtaaacctctttattttggtgactgtgaccacttctttgtagccaccaattgtagtgaccagttgcctaatggtcactttctgactccagccttgccagcctgactcagatcctcatctctgggcctttctccctccgatgttggactgcctgatgctcccaatgacatatccaatgctcctggcatttctggagcaggaggttgtcaggacaacacatataaccaccaaggatgtgttggcctttggagttcccctttaggttcctagtgatgtggaggtttatgggtgaaaaattagtggagagggaactcctctcccccattttgtgtagagtgaaaatagcctgaagcccctactcagcagggctctgggaatgtgccttccttattttagtttcagaattgctgggaaagttaccccactggtgggtgaggatctatcctcaacctacatccagatcctatgtgctgcttgcacagaggcctttggcttttgacccaggagggccgcgaggctggagctgccctgtctttcattgagccttagcatttccctctcaggcttcctctcaagctcaaggaactcacccccagataagaagctggtgcctcttgtctctctcatttcagaaacggactttctcatcatgctttcctatggtgggtatgaggggccagctgataccaaccaactggcctgtatctatctatctggatttgacttgaatttttaaaatgtgtatcgtttaaaaaaaaaaatgtttgcaaattttgcacataggatcttgcactgttcattttcagtggggtgagtcttcacactaaaaacacaagcagagctcctgggaaaagagactggaagtggttcaggataaagagatccatggtgggcagggctgttaggtcacagagctctagaagcagctggacttgaacccacaatggcttgtgtaaattcgtaaatttcatggtttctaggaaaagctgcattggggtggggagacccagtttgcctcataggcagaggattctccaggaagcatggaaaatggaatgtttccatgctttacagtgctgggagagaggggagatgtgggcaggaccttttggaaggatgtttattctctgtggttaaagaaatgctgagaatttctagcatgtgaagcacttgggggcagcaggccttggcacggtgctgcatccttctactgctccctccaggtctgggggcttttatccaccttgaatccctatcctcctctttgtagttgtcggtctcactgataacagctccagaaaaaaagacaaggctccccctctgacccttcctgttggtatttatgaaatctcaaagagatgagccaccttggcttccaatatggcaagagggtgctgggagaaggtgaagatcagtctaagctgccacggtgatgagaccttctcattatgtaactcttgatggcatttcccttctgagtgaagatttgaaatatgattgattagaattgtgctcttgatggctgggaatttagaaattttattttaagagttatttcattttcatcctaagagtgatgggagagaaatgtccaaaagagatctgctgatctgctgagagtttcaaacaaacaaaaaaataatctctatgtatgtgttggataaagtctacagactgactaacatgcattagcaaatggagcatcagtaggtagcaacatgataatttatgtaactgatagcttctgtccttattagtacacttaacatttgagactagtatttattgatccaggcaaagtaattaattaatcatgcttgggcttactttttcagtttgtaaggttaagcatatgtgcatgcgtgcgtgtgtatataaatgccttttccatatcttaaatgtccctgatgaggagagcagtcatcaattaaatatataagctcttaaaatgagaatggaagtgtcagtatagacccagtgtacttaagtgctgatgactgttagccagtttacaactttttaccatcgatgtacacatttgatatttgtgcagtaaatagactgtacctataaaaaattttattgatgtttatggtcatgttagctatcagagagctattggagtgagagctgaggtgtccttaaccactttttctctcctagattcattttcattatttatgctaggattttcttatggttgacatttgatgacaggaagcaatcatgactcttcaagtgagctcacagaaacctttcatgttgtctgtttccaaaatggattcaataaacaacattttgtccatgtta

SEQ ID NO: 16702 - DNA, 3071 bp, Homo sapiens
  source 1..3071: mol_type = unassigned DNA
agatctcccgttgtgtgagagaaacgcaagcacggagctcccttgacctgctgcatcctcctcggcaattttttttttttaagtcaaaaagcttggatttcctgaaattgttgaactggatgcggctgttgaagagtgaacttggatcattcattacagactattttcagaaccagcttcttgcaaaaggactgttctttgtggaggagaagatcaagctgtgtgaaggtgaaaatcgcattgaggttctggctgaagtctgggaccacttcttcactgagactctccctaccctgcaggcaatattttatccagttcagagtgttcacgagcccacaggcccaagtgagagttatttgcaactggaggagctggtgaagcaagtggtttctcctttcctcggcatcagcggggaccgtagcttctcaggccccacgtacacgctggccaggcggcactccagggtccggcccaaggtgactgtcctgaactatgcctccccgataaccgcagtcagccggccactgaatgagatggtcttgaccccactgacagagcaggagggggaagcctacctggagaagtgtggcagcgtgcggcggcacacggtggccaatgcccactcggacatccagctgctggccatggccaccatgatgcactcgggcctgggggaggaggccagcagtgagaacaagtgcctgctcctgccacccagcttccccccgccccaccggcagtgctccagtgagcccaacatcactgacaaccctgacggactggaggagggggccaggggcagccaggagggctcggagctgaactgtgcttccctcagctgagtcgccacccctgggcctttccatctcctgttttgcaaccaggatgaggacccctccatctccgtggattactgaggggggctcttgctttatgcgatgctgccttatttcctttagggtactgtcctggtcaaaatgacctaaggggaaaccgttgttgtaaacctctttattttggtgactgtgaccacttctttgtagccaccaattgtagtgaccagttgcctaatggtcactttctgactccagccttgccagcctgactcagatcctcatctctgggcctttctccctccgatgttggactgcctgatgctcccaatgacatatccaatgctcctggcatttctggagcaggaggttgtcaggacaacacatataaccaccaaggatgtgttggcctttggagttcccctttaggttcctagtgatgtggaggtttatgggtgaaaaattagtggagagggaactcctctcccccattttgtgtagagtgaaaatagcctgaagcccctactcagcagggctctgggaatgtgccttccttattttagtttcagaattgctgggaaagttaccccactggtgggtgaggatctatcctcaacctacatccagatcctatgtgctgcttgcacagaggcctttggcttttgacccaggagggccgcgaggctggagctgccctgtctttcattgagccttagcatttccctctcaggcttcctctcaagctcaaggaactcacccccagataagaagctggtgcctcttgtctctctcatttcagaaacggactttctcatcatgctttcctatggtgggtatgaggggccagctgataccaaccaactggcctgtatctatctatctggatttgacttgaatttttaaaatgtgtatcgtttaaaaaaaaaaatgtttgcaaattttgcacataggatcttgcactgttcattttcagtggggtgagtcttcacactaaaaacacaagcagagctcctgggaaaagagactggaagtggttcaggataaagagatccatggtgggcagggctgttaggtcacagagctctagaagcagctggacttgaacccacaatggcttgtgtaaattcgtaaatttcatggtttctaggaaaagctgcattggggtggggagacccagtttgcctcataggcagaggattctccaggaagcatggaaaatggaatgtttccatgctttacagtgctgggagagaggggagatgtgggcaggaccttttggaaggatgtttattctctgtggttaaagaaatgctgagaatttctagcatgtgaagcacttgggggcagcaggccttggcacggtgctgcatccttctactgctccctccaggtctgggggcttttatccaccttgaatccctatcctcctctttgtagttgtcggtctcactgataacagctccagaaaaaaagacaaggctccccctctgacccttcctgttggtatttatgaaatctcaaagagatgagccaccttggcttccaatatggcaagagggtgctgggagaaggtgaagatcagtctaagctgccacggtgatgagaccttctcattatgtaactcttgatggcatttcccttctgagtgaagatttgaaatatgattgattagaattgtgctcttgatggctgggaatttagaaattttattttaagagttatttcattttcatcctaagagtgatgggagagaaatgtccaaaagagatctgctgatctgctgagagtttcaaacaaacaaaaaaataatctctatgtatgtgttggataaagtctacagactgactaacatgcattagcaaatggagcatcagtaggtagcaacatgataatttatgtaactgatagcttctgtccttattagtacacttaacatttgagactagtatttattgatccaggcaaagtaattaattaatcatgcttgggcttactttttcagtttgtaaggttaagcatatgtgcatgcgtgcgtgtgtatataaatgccttttccatatcttaaatgtccctgatgaggagagcagtcatcaattaaatatataagctcttaaaatgagaatggaagtgtcagtatagacccagtgtacttaagtgctgatgactgttagccagtttacaactttttaccatcgatgtacacatttgatatttgtgcagtaaatagactgtacctat

SEQ ID NO: 16703 - DNA, 548 bp, Homo sapiens
  source 1..548: mol_type = unassigned DNA
agttgctgaaggggaggaggagtgagatggggtgaagcgcgcggagtctggggcggaggcgagcggcgggtgtgcgcgactcggggtgattcacgccggggaccccaaggagaagaggcaattcggacataaagagaaacatcaagggcatgagtgcacagaggaaagaccatgtgacggcatggctacaaggcagccatctgtaaaccaaggagagagaccccaaaggaaatcaaccctgctgacaccttgatcgtggacttctagcctccagaactgtgttggctacgtttgtggttttaagaaagcctgagggcctgaaggcagcccctggagaagccctttccgagggcattcggaaccttctggtcctagaggtgaagctgaactgtcaccaggacttatgacccgcggcttcgctcccattctgcccgtcgagttccacaagatgggctccttccgcaggcctagaccgcgcttcatgagctcccccgtgctcagcgaccttccccgattccaagcagctcggcaggctctgcagctgagct

SEQ ID NO: 16704 - DNA, 805 bp, Homo sapiens
  source 1..805: mol_type = unassigned DNA
cgtaagatgagagaggagggaaacgtgtcaccagcccggctgtgggagctccgcggccgaagcgtttgttgactcgcgctggagaggaaccgaggctggacgggaccccatctgagggcagagctgggggaggagggagggacggagggagggagagctgggcagagcgcgacggggagaaccatccaggtcgctcatttctctccggtgagaaaacttcctcgggaagaccggaaactttttcctaggcgcgcggagtctggggcggaggcgagcggcgggtgtgcgcgactcggggtgattcacgccggggaccccaaggagaagaggcaattcggacataaagagaaacatcaagggcatgagtgcacagaggaaagaccatgtgacggcatggctacaaggcagccatctgtaaaccaaggagagagaccccaaaggaaatcaaccctgctgacaccttgatcgtggacttctagcctccagaactgtgttggctacgtttgtggttttaagaaagcctgagggcctgaaggcagcccctggagaagccctttccgagggcattcggaaccttctggtcctagaggtgaagctgaactgtcaccaggacttatgacccgcggcttcgctcccattctgcccgtcgagttccacaagatgggctccttccgcaggcctagaccgcgcttcatgagctcccccgtgctcagcgaccttccccgattccaagcagctcggcaggctctgcagctgagctccagctcagcctggaacagcgttcagactgctgtgatcaacgttt

SEQ ID NO: 16705 - DNA, 535 bp, Homo sapiens
  source 1..535: mol_type = unassigned DNA
gtaagatgagagaggagggaaacgtgtcaccagcccggctgtgggagctccgcggccgaagcgtttgttgactcgcgctggagaggaaccgaggctggacgggaccccatctgagggcagagctgggggaggagggagggacggagggagggagagctgggcagagcgcgacggggagaaccatccaggtcgctcatttctctccggtgagaaaacttcctcgggaagaccggaaactttttcctaggcgcgcggagtctggggcggaggcgagcggcgggtgtgcgcgactcggggtgattcacgccggggaccccaaggagagctagacccaatacagaattgatttgaaaaacagtgtgtgagttcctctgaaagatccttacaatgtctaatgttcatcattaaagtttatggcctttgtagattaatcctcggatttcatgtacgggagagagaaagagagaaaaaaagcaaagatgtctttgaggagaccacatcgactgctgccatcattttggagaactgtttcatc

SEQ ID NO: 16706 - DNA, 553 bp, Homo sapiens
  source 1..553: mol_type = unassigned DNA
aaacgtgtcaccagcccggctgtgggagctccgcggccgaagcgtttgttgactcgcgctggagaggaaccgaggctggacgggaccccatctgagggcagagctgggggaggagggagggacggagggagggagagctgggcagagcgcgacggggagaaccatccaggtcgctcatttctctccggtgagaaaacttcctcgggaagaccggaaactttttcctaggcgcgcggagtctggggcggaggcgagcggcgggtgtgcgcgactcggggtgattcacgccggggaccccaaggagaagaggcaattcggacataaagagaaacatcaagggcatgagtgcacagaggaaagaccatgtgacggcatggctacaaggcagccatctgtaaaccaaggagagagaccccaaaggaaatcaaccctgctgacaccttgatcgtggacttctagcctccagaactgaaaaaagaaaaaaggaatctcctggcaggctcaacagtgagccaggcgtgagtctgggacacttccggccggggctgaagcc

SEQ ID NO: 16707 - DNA, 577 bp, Homo sapiens
  source 1..577: mol_type = unassigned DNA
aacgtgtcaccagcccggctgtgggagctccgcggccgaagcgtttgttgactcgcgctggagaggaaccgaggctggacgggaccccatctgagggcagagctgggggaggagggagggacggagggagggagagctgggcagagcgcgacggggagaaccatccaggtcgctcatttctctccggtgagaaaacttcctcgggaagaccggaaactttttcctaggcgcgcggagtctggggcggaggcgagcggcgggtgtgcgcgactcggggtgattcacgccggggaccccaaggaggtgttggctacgtttgtggttttaagaaagcctgagggcctgaaggcagcccctggagaagccctttccgagggcattcggaaccttctggtcctagaggtgaagctgaactgtcaccaggacttatgacccgcggcttcgctcccattctgcccgtcgagttccacaagatgggctccttccgcaggcctagaccgcgcttcatgagctcccccgtgctcagcgaccttccccgattccaagcagctcggcaggctctgcagctgagctccag

SEQ ID NO: 16708 - DNA, 366 bp, Homo sapiens
  source 1..366: mol_type = unassigned DNA
agagcgcgacggggagaaccatccaggtcgctcatttctctccggtgagaaaacttcctcgggaagaccggaaactttttcctaggcgcgcggagtctggggcggaggcgagcggcgggtgtgcgcgactcggggtgattcacgccggggaccccaaggagaagaggcaattcggacataaagagaaacatcaagggcatgagtgcacagaggaaagaccatgtgacggcatggctacaaggcagccatctgtaaaccaaggagagagaccccaaaggaaatcaaccctgctgacaccttgatcgtggacttctagcctccagaactatgtagaaactgcagctcagagatgtccaaggtcacact

SEQ ID NO: 16709 - DNA, 554 bp, Homo sapiens
  source 1..554: mol_type = unassigned DNA
attttccttgaggccgccgcccggggtgggaccaggctgtgtgcttgctaactgtgcttcaggaatccgctctgggatgccttcctgtctggcaaaaggggttacccccagttctacccagtccctgtcctcggtcacatgctgccgccgcctcttcccccgcggtgccgggagcccgcgttttgtttgtcagcagttaggcggtgttggctacgtttgtggttttaagaaagcctgagggcctgaaggcagcccctggagaagccctttccgagggcattcggaaccttctggtcctagaggtgaagctgaactgtcaccaggacttatgacccgcggcttcgctcccattctgcccgtcgagttccacaagatgggctccttccgcaggcctagaccgcgcttcatgagctcccccgtgctcagcgaccttccccgattccaagcagctcggcaggctctgcagctgagctccagctcagcctggaacagcgttcagactgctgtgatcaacgttttcaaagggggtggcttgcaaagcaacgagctctatg

SEQ ID NO: 16710 - DNA, 783 bp, Homo sapiens
  source 1..783: mol_type = unassigned DNA
tttccctttaggccactcttgtcaatgctcccaacggcctcctccttcctccctgtgctgctctggggaggtctcttggctctgcccggcagtaggaacagtggagacaaagacagcttcacattctcttcagctgtcaggattgagagtggcggattcgggaggagaaaaatgagtcagtggcaactcgttgtgtgtgactgtgcagtttatctgagtccgcgggagccatagtcgtaggctgaaaatgacccttatttaagagaggctgagtgcgtggttgtggctgcccaggcgctttgctggactaggcagcctgggaacactaactgagaagtggacggggacaggagccagcctgcggtcctcagtgtcttacagtttcctggagaagtggatgtttcggcaggaagatggtgttggctacgtttgtggttttaagaaagcctgagggcctgaaggcagcccctggagaagccctttccgagggcattcggaaccttctggtcctagaggtgaagctgaactgtcaccaggacttatgacccgcggcttcgctcccattctgcccgtcgagttccacaagatgggctccttccgcaggcctagaccgcgcttcatgagctcccccgtgctcagcgaccttccccgattccaagcagctcggcaggctctgcagctgagctccagctcagcctggaacagcgttcagactgctgtgatcaacgttttcaaagggggtggcttgcaaagcaacgagctctatgccctgaacgaaaacat

SEQ ID NO: 16711 - DNA, 740 bp, Homo sapiens
  source 1..740: mol_type = unassigned DNA
cgagggcattcggaaccttctggtcctagaggtgaagctgaactgtcaccaggacttatgacccgcggcttcgctcccattctgcccgtcgagttccacaagatgggctccttccgcaggcctagaccgcgcttcatgagctcccccgtgctcagcgaccttccccgattccaagcagctcggcaggctctgcagctgagctccagctcagcctggaacagcgttcagactgctgtgatcaacgttttcaaagggggtggcttgcaaagcaacgagctctatgccctgaacgaaaacatcaggcggctgttgaagagtgaacttggatcattcattacagactattttcagaaccagcttcttgcaaaaggactgttctttgtggaggagaagatcaagctgtgtgaaggtgaaaatcgcattgaggttctggctgaagtctgggaccacttcttcactgagactctccctaccctgcaggcaatattttatccagttcagggccaggagctgactatccgccagatctccctgctgggcttccgagacctagtcttgctgaaggtgaagctgggtgacctgctgctgctggcccagtccaagctgccctcgtccattgtccagatgttgctcatcctgcagccaggcggcactccagggtccggcccaaggtgactgtcctgaactatgcctccccgataaccgcagtcagccggccactgaatgagatggtcttgacc

SEQ ID NO: 16712 - DNA, 597 bp, Homo sapiens
  source 1..597: mol_type = unassigned DNA
gaactgaaagggcttcagagttgcaaggaagctgatggcaaggggagctactggacacagacctcgtcctgggtatggtgctgggggtgctggatgctggaccatggagcagacactgctgttcccaggtttacaggggaagcaagtgaggattaagccaggcggcactccagggtccggcccaaggtgactgtcctgaactatgcctccccgataaccgcagtcagccggccactgaatgagatggtcttgaccccactgacagagcaggagggggaagcctacctggagaagtgtggcagcgtgcggcggcacacggtggccaatgcccactcggacatccagctgctggccatggccaccatgatgcactcgggcctgggggaggaggccagcagtgagaacaagtgcctgctcctgccacccagcttccccccgccccaccggcagtgctccagtgagcccaacatcactgacaaccctgacggactggaggagggggccaggggcagccaggagggctcggagctgaactgtgcttccctcagctgagtcgccacccctgggcctttccatctcctgttttgcaaccaggat

SEQ ID NO: 16713 - DNA, 485 bp, Homo sapiens
  source 1..485: mol_type = unassigned DNA
gggcttcagagttgcaaggaagctgatggcaaggggagctactggacacagacctcgtcctggtctccaggtcacccgcagggtaggtgaccagagccagagaagcggtttattcccggggctccgcactgcacccacgcgcccgcgcctgtgtttgactgcacgaggattctccggaggtgtcccttcctgccagccaggcctcacccctggccaggcggcactccagggtccggcccaaggtgactgtcctgaactatgcctccccgataaccgcagtcagccggccactgaatgagatggtcttgaccccactgacagagcaggagggggaagcctacctggagaagtgtggcagcgtgcggcggcacacggtggccaatgcccactcggacatccagctgctggccatggccaccatgatgcactcgggcctgggggaggaggccagcagtgagaacaagtgcctgctcctgccacccagc

SEQ ID NO: 16714 - DNA, 1493 bp, Homo sapiens
  source 1..1493: mol_type = unassigned DNA
gggagatcaaaagcctgggaaccaagtccccaacaaaggacccgaggacggccttatccaggctttgcatctctctgggggtttgaaaggagctgctcttgctggctccggtgcaggggatgaatgccagtgaatgccagtgttcagcagggctcctgccaggcggcactccagggtccggcccaaggtgactgtcctgaactatgcctccccgataaccgcagtcagccggccactgaatgagatggtcttgaccccactgacagagcaggagggggaagcctacctggagaagtgtggcagcgtgcggcggcacacggtggccaatgcccactcggacatccagctgctggccatggccaccatgatgcactcgggcctgggggaggaggccagcagtgagaacaagtgcctgctcctgccacccagcttccccccgccccaccggcagtgctccagtgagcccaacatcactgacaaccctgacggactggaggagggggccaggggcagccaggagggctcggagctgaactgtgcttccctcagctgagtcgccacccctgggcctttccatctcctgttttgcaaccaggatgaggacccctccatctccgtggattactgaggggggctcttgctttatgcgatgctgccttatttcctttagggtactgtcctggtcaaaatgacctaaggggaaaccgttgttgtaaacctctttattttggtgactgtgaccacttctttgtagccaccaattgtagtgaccagttgcctaatggtcactttctgactccagccttgccagcctgactcagatcctcatctctgggcctttctccctccgatgttggactgcctgatgctcccaatgacatatccaatgctcctggcatttctggagcaggaggttgtcaggacaacacatataaccaccaaggatgtgttggcctttggagttcccctttaggttcctagtgatgtggaggtttatgggtgaaaaattagtggagagggaactcctctcccccattttgtgtagagtgaaaatagcctgaagcccctactcagcagggctctgggaatgtgccttccttattttagtttcagaattgctgggaaagttaccccactggtgggtgaggatctatcctcaacctacatccagatcctatgtgctgcttgcacagaggcctttggcttttgacccaggagggccgcgaggctggagctgccctgtctttcattgagccttagcatttccctctcaggcttcctctcaagctcaaggaactcacccccagataagaagctggtgcctcttgtctctctcatttcagaaacggactttctcatcatgctttcctatggtgggtatgaggggccagctgataccaaccaactggcctgtatctatctatctggatttgacttgaatttttaaaatgtgtatcgtttaaaaaaaaaaatgtttgcaaattttgcacata

SEQ ID NO: 16715 - DNA, 4699 bp, Homo sapiens
  source 1..4699: mol_type = unassigned DNA
gcagccgcaggagcatgcgccgcccgtggccatcttgtaggcggggacacgccgaggtaacttccagggtgcgccttcgttgtcttctccaagctgtagttctacgtcccgacctccctatcataccacactcttcagcgaccacgcaggcactttcccggtccccagtataccataattgaagaaaaatgatggaagagagtggaatagagacaacaccacctgggactcctccaccaaatcctgcagggctggctgctactgctatgtcttctacccctgttccattagcggcaaccagttctttttcttctccaaatgtatcctccatggagtccttcccaccactcgcatactctactcctcagccgccccttcctcctgtgaggccttcagcaccattaccttttgtgcctcctcctgcagttccttctgtcccaccacttgttacttctatgccacctcctgtttctccatcaactgctgctgccttcggtaatcctcctgtatctcacttcccaccttcaacttctgccccaaacactcttttacctgcacccccttcgggtcctcctatatcaggattttctgttggttcaacttatgacattacaaggggacatgctgggagagctccccagacacccctgatgccatcattttctgcaccttcaggaacaggtcttttgccaactcctattactcagcaagccagtttgacatctctggcacagggaactggaaccacatcagccattactttcccagaggagcaagaagaccctagaattactagaggtcaggatgaagcatctgctggtggaatctggggttttattaagggtgtggctgggaatcctatggtgaagtctgtgcttgataagacaaaacattcagtagaaagcatgattacaacgctggaccctggcatggctccctatatcaaatctggaggtgaactggatattgtagtgacctcaaataaagaagtaaaagttgctgctgtccgagatgccttccaggaggtctttggcttagctgtggttgtaggggaagctggacagtccaatattgccccacaaccagtgggctatgcagctggattaaaaggtgctcaggaacggatagatagcttgcgtcgaactggggtgatccatgaaaaacagacagctgtgtcagtagaaaacttcattgcagaattgctgcctgacaaatggtttgacattggttgtttggtggttgaagatcctgtccatggcattcatctagaaacatttacacaagccacaccagtgcctttggaatttgtacagcaggctcaaagtctaactccccaggactataatctgaggtggtcaggccttttggtgacagtgggtgaagtcctggaaaagagtttactgaatgtcagccggactgattggcacatggcatttactgggatgtcccgtcggcagatgatctacagtgcagccagagcgatagcgggcatgtataaacagcgcctgccacccaggacagtgtgagaggagacctacctgggagactgagactttcccccacttttagcttgatgttaaagaagtggttgtaccttcctaaatcgaatagtctaaatgaatccagtagtttttatcattttcctgtagcctgcaatttttctttctctagaaaggcatcatgtcattccaggagacaaaaagaaacaaatcctttttatagtcataccatttcacctatcatagtactcaaaaaagaaaatatacaaatctatttacagcacaatttaatataccagatttataaggtggaaattcatgtgcagagacatttaacttaatgccatgtacttgattattttgttctttaaagaagacattattaaagaacatgttggttgaatgtttataaaagcatgatttgctttggcttcatctcttttctgtcagtctttgactacttttgtatgtgcacacgatctcagggctggtgctgagcagcctgctcaacagtcactataagacacctacttgtcgggagatgttccacatttctgtgcatgttttcagtaatatgggccaaaataatggaattgattattttcctttttggccatcacgtacacatgtaatctggaaaatcatacctttgtcaattttaaacataacttttggcatttcccagatttatactatgaacattggggtaatacattttattttttcattgctatatgacagctaaggggcaaatgattcaagtatattttaaatcagaagtattcaaattatttttgtataatactgttcagtacttccaagaataagctctgacaacagccattgtttctgcttccactcatattctctacacattttaatacagaaatttttgagagggggttactttattgcttgtgggttagtatgtctcttacttcaattaaggttacttatttggtttgccttaagcattacttttttaactttgtgccatttggtctttactttttatggatgttttcaaagaaactattttatattcaatctagtttatttagtctactgtatttctatttcgtggaagccttttcccctcaaataatatattatatcatttttggacttatataaatgataattaaataaatttttttcttaatactgttggactttgtatatacaagttcaaataactttttcgaagatagtttcttatataaatgtaatttaatttttttactcttctatacagttctttagatgtaaaagaattagcacaatctctggcagttttataaaagctgttgaagctcttgtcctgcactgtctttaggtatcataggtatcaggtttgctttgtgttaatgccacttcaagtcattatttggtttctgctatttttttacctgaggataagaagaatgaatattaaatttgaatattaaatatatgttactttccaagcactgtataatgactgttcagtgaatatcagacttccgtgtcattaaaagtcatgagagacagcacagagaggttataggttgccttggtgtacttttgtccaggagtaacagggacagaatactttctttctttccttcaagtacaagaaggctttctctaccatttgcgtctacactttattttaaaagctatccttttctagtagtattttatcatggcaatggcatgatgacaacaacagtctttcattacagactgaagggaagcatgtccttacttaaaatagttctgctactttccctcctattataaggaaatcttacagattctaaaaataccttaatttttctttgatttttattttaccaagtcacaaatgtctttttgatgttttgagaattgttctcatagaatcacaaatactgacatttcattagatgattattttcctagaatccccaaagagcagtggcagtccatggcttggttgaagctagaaattttcctgcccctggtgacctggtaagcctcctgctcggaaccgtgtgagtgggtgaggaagatgagagatggtcagatggaagagagaaatacatgaactgctctggcctctctggttctgttcttggcccagagtttttgaaaagcagcggagcatgactgacttcacatgctcagctttctcagccttttgtttattttgttgtccttagatttccctgttgtaaaaggggcaagaaaagtaactcatcatctctaacacaccatggcagcttagccaggtagtcttagtggtggtgtttaggcataagatatgctgatcatcagtctcaggccacagtttccttcactaatcgtccagcttgagtgttctgttctcttcctgcccatttccttgaacctcctgctctagccttggcggagggagagtgctatttgcttttgttctccctctgtcttaggaaaagccatctttaatatagttcttcaccactgttggggttgttttgtgattttttttttcttccgaagaactcctggttgttattggattttgtattttaatacaaattattgaattttataagcttgtacacaatatttaattagtgtgaaaggaaacaaagaatgcaggaaaaataatttaatatcaacctcagttgacaaggtgctcagattattcaattcgggatcctccttttgttaggtttttgagacaaccctagacctaaactgtgtcacagacttctgaatgtttaggcagtgctagtaatttcctcgtaatgattctgttattactttcctattctttattcctctttcttctgaagattaatgaagttgaaaattgaggtggataaatacaaaaaggtagtgtgatagtataagtatctaagtgcagatgaaagtgtgttatatacatccattcaaaattatgcaagttagtaattactcagggttaactaaattactttaatatgctgttgaatctactctgttccttggctagaaaaaattataaacaggactttgtagtttgggaagccaaattgataatattctatgttctaaaagttgggctatacataaattattaagaaatatggatttttattcccaggatatggtgttcattttatgatattacgcaggatgatgtattgagtaaaatcagttttgtaaatatgtaaatatgtcataaataaacaatgctttgacttatttccaaa

SEQ ID NO: 16716 - DNA, 703 bp, Homo sapiens
  source 1..703: mol_type = unassigned DNA
atcttgtaggcggggacacgccgaggtaacttccagggtgcgccttcgttgtcttctccaagctgtagttctacgtcccgacctccctatcataccacactcttcagcgaccacgcaggcactttcccggtccccagtataccataattgaagaaaaatgatggaagagagtggaatagagacaacaccacctgggactcctccaccaaatcctgcagggctggctgctactgctatgtcttctacccctgttccattaggtacatgtagttgtctaacatctcgtgtgttttgagaatagtgaagatactatcatcttttctcagagtcaattaagaaaagaatgcatatattaaaacttctctattatttttcaggatgaaaggaaatagcctttttaatttaaagaatagaaagaaagtcttgtgtatttaaagtaagaaaacatcagtgttttgctttaggtggacttttgttctttatgttcataattttaccatcatttatattatggcagaaatatcctaaaaagcatgtgttagctttgtcttctgttctttttcttttttttgagacggagtttcacttgtcacccaggctggagtgcagtggtgcgatctcatctcactgcaacctccgcctcccaggttcaagtgattctcctgcctcagcctcccaagtagctgcaattacagcactcacc

SEQ ID NO: 16717 - DNA, 5504 bp, Homo sapiens
  source 1..5504: mol_type = unassigned DNA
ggggacacgccgaggtaacttccagggtgcgccttcgttgtcttctccaagctgtagttctacgtcccgacctccctatcataccacactcttcagcgaccacgcaggcactttcccggtccccagtataccataattgaagaaaaatgatggaagagagtggaatagagacaacaccacctgggactcctccaccaaatcctgcagggctggctgctactgctatgtcttctacccctgttccattagcggcaaccagttctttttcttctccaaatgtatcctccatggagtccttcccaccactcgcatactctactcctcagccgccccttcctcctgtgaggccttcagcaccattaccttttgtgcctcctcctgcagttccttctgtcccaccacttgttacttctatgccacctcctgtttctccatcaactgctgctgccttcggtaatcctcctgtatctcacttcccaccttcaacttctgccccaaacactcttttacctgcacccccttcgggtcctcctatatcaggattttctgttggttcaacttatgacattacaaggggacatgctgggagagctccccagacacccctgatgccatcattttctgcaccttcaggaacaggtcttttgccaactcctattactcagcaagccagtttgacatctctggcacagggaactggaaccacatcagccattactttcccagaggagcaagaagaccctagaattactagaggtcaggatgaagcatctgctggtggaatctggggttttattaagggtgtggctgggaatcctatggtgaagtctgtgcttgataagacaaaacattcagtagaaagcatgattacaacgctggaccctggcatggctccctatatcaaatctggaggtgaactggatattgtagtgacctcaaataaagaagtaaaagttgctgctgtccgagatgccttccaggaggtctttggcttagctgtggttgtaggggaagctggacagtccaatattgccccacaaccagtgggctatgcagctggattaaaaggtgctcaggaacggatagatagcttgcgtcgaactggggtgatccatgaaaaacagacagctgtgtcagtagaaaacttcattgcagaattgctgcctgacaaatggtttgacattggttgtttggtggttgaagatcctgtccatggcattcatctagaaacatttacacaagccacaccagtgcctttggaatttgtacagcaggttggttttctcctttgctttttcattatgctccagagaaacttacactattgttttcagaataaaaatttgttcggtttttttgttagaaatatgttcttgattttgtttcagtcatttttcttttagtatttttctttgctttttaatttcctgatccttccatgttgttttagtaccttcctccttttgttttccaggtgtctttgaaaggtaatacattacatggttaatcattatttctctcatttttttctttgtttttactctgagttctggaaaagatttaccttttctagttgttttatgtccgcctttcgtttgctttcccttttatctcacatttcatttccactgttatctccatttcccttttccttgattgattgtcctcctgttcatctttagtgaaatcaacattagaaaccttataggcacgtgtctttaggtttttggctgaaaaatggacctaatagtgtacctatccacacagtttccaggagaatgtaagtataaatgataatccttattcctctttttttttttttttggtgtgttttctctaatcctttcatgaacaaaatggaatataaatatatacttgcattggaatctctgtgctcttaagtggtattctattgacttttttctgtcaatttcataaaatttttgttacagttgtagtttgtacattgttaaatatcatttcaaaactgcctttcaaacttatttgggacatgaagacatttgagaatctaagaaaactattgggctgtctcccaagaaaaatgcgtgtatgtgtactttcatagaactttggcatatgtgttcacataatccctaaaagtaacctctggcctacttattacagtttagaaagggggctaagaattgatgcttggaatttgaaattttactgaaacttttatttataccgtaatttcttttcataagttcaagaaaacctttttatagatattaacattacactcatttcaatatgaaggtgattaaaagactgtaagtgaatactatgcatactgttatgccaataaattagaaaaattaggtgaaagagtggattttctaggaaaatagaagttttgccatagttaagagtattaggttgaaccaaatgacgttgttgcctttgatggtcagaaatagttatatattgtcagtttcatatgattcagcttaattgaagcattaaaatggaagaactttatgtaactaaaaaaaaaaaaatcactgagtaccaatggtgttacaagtgagttctacaaaatgttcagagatgatttgctgtatgaggtatcaaaaatagaggtagagagttttccagttcattctgtgagactagcctcttttaactttaaatgaaattatagtccaaagaactaaatgtcaaaaccattggtaaaattaataaataaaattcagaaatgtattagatgaacattgtatcctgaccatgaaaaatttgtcccaagaacagcagaatggttcaacaatagtaaatttatgtaattcagtacatgaacatctgcattgaaaggagaaaaaagattttgataagagttgaaggtatttgctagaaataatcatactaatagctcttagtattagacgggtatgtgtgtactacaaaatcaaagcaaacttcagatctaataaataaaacactgaaaacgttataattatgaggatgctcctgtcactgccactgttaacattgctgtagatctggggtcagcaaacagtggctcacagccaaatctggcctgtcatctttttgtaattaagtttattggaacacacccatgccagtttgcttacttattgtttatagctgcttttgtactatagcagcagaaatgaatagttgcaacagagaatgtctggcccacaaagcctaaaatatttaccatctggctcttttcagaaaaagtttgctgacccctgtgttagatatctgaccattgcaaaggacaatttttatgttgtttttaggaatatatactggaaagaagtagacatgaaagaatgaagtggactcgtgtgtaccagtaccaaaagatagctattacatattgctgagtaaaagtcaaaaacagcacatctagtatgatcccatttactagcaggcgtgtgtatgtgtgtgctttaaaattttaataagaatagggaaaaaggcctggaaagataacacagcaaactgttaatagtggttaattctgaataatggtatttaaagggtgttatttgctttttactttgctttttattctgtttgttttattttgtgtcatttggttttaaaatttagaagatacaaaactgtgtgcattgaaatgtcttctttttatcctcagctattcagctctcctccctgtttctttttattcattctaaaatgttttatgcttttttattgttggaattttttaatttaaggtaatggaaatcagcccttcaggtaattagaattatcagtatatattagtaaaaatctggaaataaatttcatacaatttgtacttgttaaacttaaatataaatgattcctcacccccataaaaaaccccagctgttctggatttttgccaataatatagaataccttgtttctaaaaagtgtggtccttggcttaacatcataagcagcacctagaaatttgttaaaatgcagattctcgggtcctaacacaggactagtgaatcaggagctgcattttaacaagatattcaggggattcataggcatgccataatttgagaagcacagtgttactggtgtctctgaggacgttagtagtatatctgctgtttctctttgaaatatagtgaaatactgatactgtagtatacacattggaagagagtacttagagcaggggttcccaagtgctggactgtttgcatcagattgacttggaagctattttacgtacgtaatactgtactgtttctcttggaaccagctgtagagtttccaattcagttatcttggtgtctcagttatcttagtgggatgtgagaaactggatatcgttaaaaaagaaaaaagaaacaagagctcctcaggtgattgtaatacatggcacatttggtagtcatgtataactgtatagatccgttctagatgtggctatacttctctggactatacctaacaccctaaaacagaaaaaccacatcagtcttggatatcaagcaatgagtttattcttctgtcattcctttgtagatgaataaatgatttgaataggagcaaatatgagttgggtcaattaggaatgttgcatcagtggttgatgttgtccaggactggatattacttgatacatattaacatgtgaatcacatttccagagagaatttccataattgagcaattcttttctgaatggatttaagccttaattttcagttttcctctttctggttgaaattttactactataaaagataactttagcactgattttagtaccaatcttattattaacctgaagtgacacttaatttagaactagaactcaaaccttccgactgttagcctcgttaatggggatattttttaaaaaatagatgtgtgtaatgttacattgattgtgttctagccttgtaagttgatatagttggcagcctagctgtatttctcagagtttgtcataatctatatttaaaataacatgaaacactttgaaatgtcacttatagctagttccaatgatatttttaaatgtattataagtaatatcaatttcatctttccacaggctcaaagtctaactccccaggactataatctgaggtggtcaggccttttggtgacagtgggtgaagtcctggaaaagagtttactgaatgtcagccggactgattggcacatggcatttactgggatgtcccgtcggcagatgatctacagtgcagccagagcgatagcgggcatgtataaacagcgcctgccacccaggacagtgtgagaggagacctacctgggagactgagactttcccccacttttagcttgatgttaaagaagtggttgtaccttcctaaatcgaatagtctaaatgaatccagtagtttttatcattttcctgtagcctgcaatttttctttctctagaaaggcatcatgtcattccaggagacaaaaagaaacaaatcctttttatagtcataccatttcacctatcatagtactcaaaaaagaaaa

SEQ ID NO: 16718 - DNA, 2726 bp, Homo sapiens
  source 1..2726: mol_type = unassigned DNA
cacgccgaggtaacttccagggtgcgccttcgttgtcttctccaagctgtagttctacgtcccgacctccctatcataccacactcttcagcgaccacgcaggcactttcccggtccccagtataccataattgaagaaaaatgatggaagagagtggaatagagacaacaccacctgggactcctccaccaaatcctgcagggctggctgctactgctatgtcttctacccctgttccattagcggcaaccagttctttttcttctccaaatgtatcctccatggagtccttcccaccactcgcatactctactcctcagccgccccttcctcctgtgaggccttcagcaccattaccttttgtgcctcctcctgcagttccttctgtcccaccacttgttacttctatgccacctcctgtttctccatcaactgctgctgccttcggtaatcctcctgtatctcacttcccaccttcaacttctgccccaaacactcttttacctgcacccccttcgggtcctcctatatcaggattttctgttggttcaacttatgacattacaaggggacatgctgggagagctccccagacacccctgatgccatcattttctgcaccttcaggaacaggtcttttgccaactcctattactcagcaagccagtttgacatctctggcacagggaactggaaccacatcagccattactttcccagaggagcaagaagaccctagaattactagaggtcaggatgaagcatctgctggtggaatctggggttttattaagggtgtggctgggaatcctatggtgaagtctgtgcttgataagacaaaacattcagtagaaagcatgattacaacgctggaccctggcatggctccctatatcaaatctggaggtgaactggatattgtagtgacctcaaataaagaagtaaaagttgctgctgtccgagatgccttccaggaggtctttggcttagctgtggttgtaggggaagctggacagtccaatattgccccacaaccagtgggctatgcagctggattaaaaggtgctcaggaacggatagatagcttgcgtcgaactggggtgatccatgaaaaacagacagctgtgtcagtagaaaacttcattgcagaattgctgcctgacaaatggtttgacattggttgtttggtggttgaagatcctgtccatggcattcatctagaaacatttacacaagccacaccagtgcctttggaatttgtacagcaggctcaaagtctaactccccaggactataatctgaggtggtcaggccttttggtgacagtgggtgaagtcctggaaaagagtttactgaatgtcagccggactgattggcacatggcatttactgggatgtcccgtcggcagatgatctacagtgcagccagagcgatagcggatgattattttcctagaatccccaaagagcagtggcagtccatggcttggttgaagctagaaattttcctgcccctggtgacctggtaagcctcctgctcggaaccgtgtgagtgggtgaggaagatgagagatggtcagatggaagagagaaatacatgaactgctctggcctctctggttctgttcttggcccagagtttttgaaaagcagcggagcatgactgacttcacatgctcagctttctcagccttttgtttattttgttgtccttagatttccctgttgtaaaaggggcaagaaaagtaactcatcatctctaacacaccatggcagcttagccaggtagtcttagtggtggtgtttaggcataagatatgctgatcatcagtctcaggccacagtttccttcactaatcgtccagcttgagtgttctgttctcttcctgcccatttccttgaacctcctgctctagccttggcggagggagagtgctatttgcttttgttctccctctgtcttaggaaaagccatctttaatatagttcttcaccactgttggggttgttttgtgattttttttttcttccgaagaactcctggttgttattggattttgtattttaatacaaattattgaattttataagcttgtacacaatatttaattagtgtgaaaggaaacaaagaatgcaggaaaaataatttaatatcaacctcagttgacaaggtgctcagattattcaattcgggatcctccttttgttaggtttttgagacaaccctagacctaaactgtgtcacagacttctgaatgtttaggcagtgctagtaatttcctcgtaatgattctgttattactttcctattctttattcctctttcttctgaagattaatgaagttgaaaattgaggtggataaatacaaaaaggtagtgtgatagtataagtatctaagtgcagatgaaagtgtgttatatacatccattcaaaattatgcaagttagtaattactcagggttaactaaattactttaatatgctgttgaatctactctgttccttggctagaaaaaattataaacaggactttgtagtttgggaagccaaattgataatattctatgttctaaaagttgggctatacataaattattaagaaatatggatttttattcccaggatatggtgttcattttatgatattacgcaggatgatgtattgagtaaaatcagttttgtaaatatgtaaatatgtcataaataaacaatgctttgactta

SEQ ID NO: 16719 - DNA, 703 bp, Homo sapiens
  source 1..703: mol_type = unassigned DNA
aggctcagctgtggcggcgtgcggggtgcagcaggcaggagtgcacatcgcaagtataccataattgaagaaaaatgatggaagagagtggaatagagacaacaccacctgggactcctccaccaaatcctgcagggctggctgctactgctatgtcttctacccctgttccattaggtacatgtagttgtctaacatctcgtgtgttttgagaatagtgaagatactatcatcttttctcagagtcaattaagaaaagaatgcatatattaaaacttctctattatttttcaggatgaaaggaaatagcctttttaatttaaagaatagaaagaaagtcttgtgtatttaaagtaagaaaacatcagtgttttgctttaggtggacttttgttctttatgttcataattttaccatcatttatattatggcagaaatatcctaaaaagcatgtgttagctttgtcttctgttctttttcttttttttgagacggagtttcacttgtcacccaggctggagtgcagtggtgcgatctcatctcactgcaacctccgcctcccaggttcaagtgattctcctgcctcagcctcccaagtagctgcaattacagcactcaccaccatgctcagctaatttttgtatttttagtagaaatgggatttcacaattttggccaggctggtctcaaactcctgacctca

SEQ ID NO: 16720 - DNA, 837 bp, Homo sapiens
  source 1..837: mol_type = unassigned DNA
tgtttggtggttgaagatcctgtccatggcattcatctagaaacatttacacaagccacaccagtgcctttggaatttgtacagcaggctcaaagtctaactccccaggactataatctgaggtggtcaggccttttggtgacagtgggtgaagtcctggaaaagagtttactgaatgtcagccggactgattggcacatggcatttactgggatgtcccgtcggcagatgatctacagtgcagccagagcgatagcgggcatgtataaacagcgcctgccacccaggacagtgtgagaggagacctacctgggagactgagactttcccccacttttagcttgatgttaaagaagtggttgtaccttcctaaatcgaatagtctaaatgaatccagtagtttttatcattttcctgtagcctgcaatttttctttctctagaaaggcatcatgtcattccaggagacaaaaagaaacaaatcctttttatagtcataccatttcacctatcatagtactcaaaaaagaaaatatacaaatctatttacagcacaatttaatataccagatttataaggtggaaattcatgtgcagagacatttaacttaatgccatgtacttgattattttgttctttaaagaagacattattaaagaacatgttggttgaatgtttataaaagcatgatttgctttggcttcatctcttttctgtcagtctttgactacttttgtatgtgcacacgatctcagggctggtgctgagcagcctgctcaacagtcactataagacacctacttgtcgggagatgttccacatttctgtgcatgtttt

SEQ ID NO: 16721 - DNA, 339 bp, Homo sapiens
  source 1..339: mol_type = unassigned DNA
gcagcgcgacgattgcggcctggcgatcggggcactgcggtcgtggcgcgcgaggcgcggggcgcgaggccagccctggaacggcggggtgtggggggcgggcagctgcggagcccccagaggaaagcaggggcaggcaggggggtgccgagagaagtgagaccctgcagctgagggagcatcatggcagtgtttctggaggccaaggatgcccattcggtcctgaaacgattccctcgtgccaatgagttcctggaggagctgcgccagggcaccatcgagcgagagtgcatggaggagatctgcagctacgaggaggtcaaggaagtgtttgagaac

SEQ ID NO: 16722 - DNA, 650 bp, Homo sapiens
  source 1..650: mol_type = unassigned DNA
ggcgcagcagcgaggtggcgggctgcgtgcgcaaacagggcggccgccttctgggcccggagaacgagaagtgagaccctgcagctgagggagcatcatggcaggcctcagtagggctctctcctcagtgtttctggaggccaaggatgcccattcggtcctgaaacgattccctcgtgccaatgagttcctggaggagctgcgccagggcaccatcgagcgagagtgcatggaggagatctgcagctacgaggaggtcaaggaagtgtttgagaacaaagagaaaacggcatgtaccaccctggggctggttctgggagtaggagtagcctcaggaatagcaagaacaggccctggtaatgcagaccaatcagaagcaaggaaagacacccagcctaaggcatagccactagggccatcacggagcagataaaatggagttctggaaagggtacccaaatgcagtctactctgtccgagacccctcgcagagctcagatgccatgtatgtggtggtaccccttctgggggtggcactgctgattgtcatcgccttgttcatcatctggaggtgccagctgcagaaagcgacccgtcaccacccctcctatgctcagaaccggtacctagccagtcgcgccgggcacacc

SEQ ID NO: 16723 - DNA, 5977 bp, Homo sapiens
  source 1..5977: mol_type = unassigned DNA
tagttgtgaattctggtcctgccactgtcactgttgatttgcttaaccttgtctgagcccgtctctctgggctgtatctcctcatctatctctgaggtcctttccaattggaagttgcaaagattcattgaggggagcaaggaaggaggagcctcagcctttaggagctttcctttttaaaagaaaaaggtcaacccttggttcttatagatgctcagaacatgttcttgggggaaaacgctgaaaggtttgctttgggccctactgggcctggggaggtctctggagaagagcttggggcagaatgagaagcagcggaagccatgggtggctgcatggaggacgacgcaccccacaagagaagtgagaccctgcagctgagggagcatcatggcagtgtttctggaggccaaggatgcccattcggtcctgaaacgattccctcgtgccaatgagttcctggaggagctgcgccagggcaccatcgagcgagagtgcatggaggagatctgcagctacgaggaggtcaaggaagtgtttgagaacaaagagaaaacgatggagttctggaaagggtacccaaatgcagtctactctgtccgagacccctcgcagagctcagatgccatgtatgtggtggtaccccttctgggggtggcactgctgattgtcatcgccttgttcatcatctggaggtgccagctgcagaaagcgacccgtcaccacccctcctatgctcagaaccggtacctagccagtcgcgccgggcacaccctcccccgggtcatggtgtaccggggtactgtgcatagccaaggggagccttctgggcaccgagaggcagcgaacagcccccaggtggtgctggggcccagtcgggggggcaggaccacagtccggctagagagcaccctctacctccctgagctctctctctccagactgtccagcaccacccctcccccctcctacgaggaggtgactgcgccccaagagagcagcagtgaggaggccagcgtgtcttacagtgacccacccccaaagtacgaggagatagtggccgccaaccctggcgctgacaagtagtgggacgtttgtgccctgtcctggatgaacgcctctttccgaggtctcctattttctttttaactttttaaagactgtgccaccacaaaacagccttagcctccttgttgccaaataattccctaactgtggagttttaggaagtcagttgtcagagacaggtggggagggtgggggtagggaccacgcatgagtcgaagcccccgggaagagccaaaggccaaagtgcccaactctttgggatgacccccaagcctccaacatcctgtctttccatcaggaactggcttctcttatgccaaaggaataaccccattgagttgattgtggccagaatgtccacaggcctggcctgggggctgtgggactggctggaggcctgcctgtgtctagagctctgggcctcaggggtaagggaaggaagccagcctttcagcaccccttaccctccacagttctgtgatttctgtccttgcttacatttggaggacagggacaaggactgagcaaaaacaaaatgaaaaaatcatgacaaataaataattaacacaatagaacaaaactctagcacccgggccgttcataggaggccaagggaaatttatcacatggatctgtgatgtccgcctcccctaaaacctgtccccacactcctggaaggaggacagggtgtgtgaaggatgagggccagagggctgggtggcagagtttcctcttccacattgaccaaggggcccacgtggactctgccattcagtttctagtgtgcttgtctctccagacatgtggaccagctgtgttcaaaccactacccactggcatgagcctactttttgcgaatggtgcattgaaattgaacttcagattgaggatttctccttaacgatggtgcgcatctcaggagaagatcctaaagtgtcccttttaaaacatttatttgtggagaagcccgtggcctggggttgaaggcccatatggggtttgctctgctgttgccaggtgccagtctgttttcagtgaggctttggacagcagtggggcagaaggcacctgccctttaactgtcagtgaccatgctagacactgttgataccacctccccctacttccgtctccatcctcctgacctcaacaccaaaccatttctcctctgtggtgctttaaaaattgtagcaaatttttgtgtggtgcaagaatgcatggcctgcgtctattggcaaccacagcaatttaaaatccactgagctgacaagcttttttctgtcaaaatatctctctaaggcagacattgggactcatttccttgaatgcagccctgccttcaggccacagaggacttctggaggctgctctagccctgaggacttgccctgggacgtgcttccagttagaaggcttgtgtccctaccccagtgaggccaccagcttggaccactccaccctgtggctggggttttccatccttccccctacctcacaggcccgttggaggctgactgagcaaatgcctgcgaagtgcttgaattgccggggagccagcgaggtttgccttaggaagagtcttctagaaaggtgtaggttataagggagcagtcttagctgaggccctcatatgcctctgatgttgagtctccacttggagagtcaatctcccgtcagttgaccctttccatcctctcgtcctccctttccagagctccctgatgccagagatgctggtgaatgcaggtgacattctacctttcgtttccttgtctttccctcccctgggccttcagcattgcactcctgcccttcatcacaaaggggtttttggcttaagaggcccctgctttttccatgttgggggacctggggaagcctgaagctcggggctagccctggctctcccagtatttcttcaagtaggtgccagagtgtgacctgggagcaggtgagaagaaacttatcccaatatgtctactcagttagcacagagccaggcatgagctccactgatcagagccaaagggagtttgccaagaaatgcccgctgcctttggcatctgagttgcagctgggtggtaatgggagagagcaggaagaggcccaaggcctggcccatggagggcaacatgtgtccttcaggggctgaggacaggccgtgggaagagtcacaggaggttgcttaaggcctgtgatgttcggttcagatgcttcatggtgttctgccaggtggggttgcaccacggtctctgggatggtttctgcagcacattgtagaaaaaagactgtacagcacacagcaggcatcactccttgcgatgcacacttggattttatgaatgccctgtacatatcttttcaaactctgtgtttgtatggaggtggatttgatacaatgctgactctttcgtggctacatttttgctgtttttggacttctatgtgtgtgtgtgtgtgtgtgtgtgtgtgtatctatgtgtgcacgttgccttttctcattgcttatctgaaacaatagccggtgtgcagctatatttgtaccaggagggatccggtctgaaaagaggaatgtcacctcccctcgcagggctgagtagcctgatgacagggccctgagcaaggaaacgtggcattaactatattggacacccaacccccaaagttgtcactgtttgcctccttgaaaaaggctttggaagaagacaaagcagctccattctgcaggtctccaccctatgcaacccccgctcacacgcccttttggcatggtgcccctggcccaggcttctgttctgtgggtgtcagcagctgaaagaaatctgagtactcctgggcatggttttttttttttttttttttttttttttttttttttttttttttttttttttttttgtgtgtgtgtgtgtgtgtgtgtgtgtgtgtgtgtgtgtgtatggaaagatgtgtgactattgactttgggtatcgcgggactagttaattagatgtttttcatttttcaaaaagaaaaggttttaaaaattttcttgaaatgtgactgtcacttgttttcaaccaaaaactttttaagattttttaaaagaaaaatcgaaatcctgtccctcccccgcttcccatcgcctccggttttcaaaatgaaagcacaagtgcaagagtggggtgcacaggtgcctggcgtgtacacaccacccacacagctgcgtccagccctggctgagggagacgcagtgctgagcagtcagccccgggaggcctctttttcaacttccaatcccactgccatgaatgtgaattccttagggtgcttccaaaaacaggagtctgcctgatctgttggacattgcctttttggtagcccgaatatgaggaattcaggacaggaaagtgtctttttgtcaagtagtcagagccggatgcttcccctctcccagtgggtggagcatcgcaacccccagccagagttgatcttttgacaacccagtgacatcccatgagaaggaagaaaaaaaattcaacactgcctctagattgttattttgtccaagagagagatcatggagagagtctctctcgctcacggaggctctgtctttctaggagtatgtgtgtgtgctgtctcatgtgtggacactcacagttgaggctgagatggatatcttggcagcagagctgctggtctaggtggcttttcagcttgacaagtaatgaagctccatttcaggacttcatcgattccgaaacaagcacagccccccaccccccgccacggaactctactaatactaatcactataattagctaatttaaaagtacggtaatcagactgcttgcaactattttaaaagcccattaatttgaagcccactacttcagaacttcgagaaaatcacaacttaagacaattcacagtagctgtgattctggctacataaaaatatttgaaatattcttccctttagtcaatgttcagggtcttttgtgtaagagaaatccagtttaaaatgagtacccttttcaaagaaaaggctcaagatattaaggatcccttcaccgtgccttcagctttgcagttcagcacttctcgtatgtacagggtgatctcttgttctctctccatcacagggatgttggatattgcagcctttcactctactccgttatttatcctgtgaataacatagtttgtgaactagactgcaatttaaactaatacacatgatgtatctttctaaatattctgtaaagcagatgcttcgctgtcagactggccgctccatcattcgcctccaaatattcaaacgtgggagcttttcctttcagactgtgggcagcgagtctctctctagcaagaatttatctgacaaacatacccaaatagcacaccctctcaagctcaatgcctcaacagttgtttcactgtactgatatctgactgctgaacagtgcctgcccttcacccacccccagcccgagcattaacacagatcttcaggattgggacaaatcccccagctgcttttgcctctcaatccatctcccctcatcgataccaatttcccaggcctgaacacatctgttattttgctctgacattgtgaatttgtgacagtggaaaccctgatatgtgcaactgagcttatagaaataattactgtgaaatggattaattttgataccactttaaactgtgcttgtattcatgtgttgacccttgtcagctgggaaatctgtacattcagtatatgtcagcatttcattggagcctgggggcaacagacaaacttgcttctgatttctctctctctctctttctttttataattgttgaatttggctgttacattttgtctccttctttacaagaaaacaataataataaagagcaaatggcatccacttgaa

SEQ ID NO: 16724 - DNA, 379 bp, Homo sapiens
  source 1..379: mol_type = unassigned DNA
gacccctcgcagagctcagatgccatgtatgtggtggtaccccttctgggggtggcactgctgattgtcatcgccttgttcatcatctggaggtgccagctgcagaaagcgacccgtcaccacccctcctatgctcagaaccgcagatgcttcgctgtcagactggccgctccatcattcgcctccaaatattcaaacgtgggagcttttcctttcagactgtgggcagcgagtctctctctagcaagaatttatctgacaaacatacccaaatagcacaccctctcaagctcaatgcctcaacagttgtttcactgtactgatatctgactgctgaacagtgcctgcccttcacccacccccagcccgagcattaaca

SEQ ID NO: 16725 - DNA, 1303 bp, Homo sapiens
  source 1..1303: mol_type = unassigned DNA
aggcaggggggtgccgagagaagtgagaccctgcagctgagggagcatcatggcagtgtttctggaggccaaggatgcccattcggtcctgaaacgattccctcgtgccaatgagttcctggaggagctgcgccagggcaccatcgagcgagagtgcatggaggagatctgcagctacgaggaggtcaaggaagtgtttgagaacaaagagaaaacgatggagttctggaaagggtacccaaatgcagtctactctgtccgagacccctcgcagagctcagatgccatgtatgtggtggtaccccttctgggggtggcactgctgattgtcatcgccttgttcatcatctggaggtgccagctgcagaaagcgacccgtcaccacccctcctatgctcagaaccggtacctagccagtcgcgccgggcacaccctcccccgggtcatggtgtaccggggtactgtgcatagccaaggggagccttctgggcaccgagaggcagcgaacagcccccaggtggtgctggggcccagtcgggggggcaggaccacagtccggctagagagcaccctctacctccctgagctctctctctccagactgtccagcaccacccctcccccctcctacgaggaggtgactgcgccccaagagagcagcagtgaggaggccagcgtgtcttacagtgacccacccccaaagtacgaggagatagtggccgccaaccctggcgctgacaagtagtgggacgtttgtgccctgtcctggatgaacgcctctttccgaggtctcctattttctttttaactttttaaagactgtgccaccacaaaacagccttagcctccttgttgccaaataattccctaactgtggagttttaggaagtcagttgtcagagacaggtggggagggtgggggtagggaccacgcatgagtcgaagcccccgggaagagccaaaggccaaagtgcccaactctttgggatgacccccaagcctccaacatcctgtctttccatcaggaactggcttctcttatgccaaaggaataaccccattgagttgattgtggccagaatgtccacaggcctggcctgggggctgtgggactggctggaggcctgcctgtgtctagagctctgggcctcaggggtaagggaaggaagccagcctttcagcaccccttaccctccacagttctgtgatttctgtccttgcttacatttggaggacagggacaaggactgagcaaaaacaaaatgaaaaaatcatgacaaataaataattaacacaatagaac

SEQ ID NO: 16726 - DNA, 534 bp, Homo sapiens
  source 1..534: mol_type = unassigned DNA
ggaattcccaactcggacaggcccagaatagcccctggaggtttgaagaggccccgtcagaaacccaaacagagctgccagacgggaatgccgccctcccccgtccacactcatggccgctgctcagcccccagccgcatccctccccacgcgcgtcacggccctgaggccatggaatcccggtgaccgttggcgggaggggccggggacttaagaaggaggcgtctctcctggaggcgcgcgtgagaaggggcagggagggggcgcgagtggtccccgggccggttgcctgggtaacgcgtggctcccttgggctggcgggaggggccggaggctcgcgaggggcgggggcggcgacggcggcggagcgtaggggaggggaccggagaggaggggatgagcacacgggagaggagaagagggagacccgccgcctccctccctccctagctgacttgctccctcccgggctgcggctgctgcaaaagccagcagcggcagcgggagctgtccggaggccggcgtcgaggtgag

SEQ ID NO: 16727 - DNA, 520 bp, Homo sapiens
  source 1..520: mol_type = unassigned DNA
gaggccatggtgggtggatgcggctgcggaaaggctggggagtccgagccctaggactgggagcagcgagggtttgccgctgtctctgctattccatcctccccataggggctctctcccctctcccatctcaagatggcagccagcagctctgagatctctgagatgaagggggttgaggagagtcccaaggttccaggcgaagggcctggccattctgaagctgaaactggccctccccaggtcctagcaggggtaccagaccagccagaggccccgcagccaggtccaaacaccactgcggcccctgtggactcagggcccaaggctgggctggctccagaaaccacagagaccccggctggggcctcagaaacagcccaggccacagacctcagcttaagcccaggaggggaatcaaaggccaactgcagccccgaagacccatgccaagaaacagtgtccaaaccagaagtgagcaaagaggccactgcagaccaggggtccaggctggagtctg

SEQ ID NO: 16728 - DNA, 564 bp, Homo sapiens
  source 1..564: mol_type = unassigned DNA
atcttccttgccctcctgctcgtagagacgcctccacccggtcctgcctgtctcactggtcccgtctcctcgcagaaccctctccgtttcccccaaatccccgtctcttccaggaatcccggtgaccgttggcgggaggggccggggacttaagaaggaggcgtctctcctggaggcgcgcggtttgccgctgtctctgctattccatcctccccataggggctctctcccctctcccatctcaagatggcagccagcagctctgagatctctgagatgaagggggttgaggagagtcccaaggttccaggcgaagggcctggccattctgaagctgaaactggccctccccaggtcctagcaggggtaccagaccagccagaggccccgcagccaggtccaaacaccactgcggcccctgtggactcagggcccaaggctgggctggctccagaaaccacagagaccccggctggggcctcagaaacagcccaggccacagacctcagcttaagcccaggaggggaatcaaaggccaactgcagccccgaagacccatgccaa

SEQ ID NO: 16729 - DNA, 100 bp, Homo sapiens
  source 1..100: mol_type = unassigned DNA
cgcagaaccctctccgtttcccccaaatccccgtctcttccaggaatcccgggtttgccgctgtctctgctattccatcctccccataggggctctctcc

SEQ ID NO: 16730 - DNA, 100 bp, Homo sapiens
  source 1..100: mol_type = unassigned DNA
cgcgagtggtccccgggccggttgcctggccagcagcggcagcgggagctgtccggaggccggcgtcgagggtttgccgctgtctctgctattccatcct

SEQ ID NO: 16731 - DNA, 2567 bp, Homo sapiens
  source 1..2567: mol_type = unassigned DNA
gtaacgcgtggctcccttgggctggcgggaggggccggaggctcgcgaggggcgggggcggcgacggcggcggagcgtaggggaggggaccggagaggaggggatgagcacacgggagaggagaagagggagacccgccgcctccctccctccctagctgacttgctccctcccgggctgcggctgctgcaaaagccagcagcggcagcgggagctgtccggaggccggcgtcgagggtttgccgctgtctctgctattccatcctccccataggggctctctcccctctcccatctcaagatggcagccagcagctctgagatctctgagatgaagggggttgaggagagtcccaaggttccaggcgaagggcctggccattctgaagctgaaactggccctccccaggtcctagcaggggtaccagaccagccagaggccccgcagccaggtccaaacaccactgcggcccctgtggactcagggcccaaggctgggctggctccagaaaccacagagaccccggctggggcctcagaaacagcccaggccacagacctcagcttaagcccaggaggggaatcaaaggccaactgcagccccgaagacccatgccaagaaacagtgtccaaaccagaagtgagcaaagaggccactgcagaccaggggtccaggctggagtctgcagccccacctgaaccagccccagagcctgctccccaaccagacccccggccagattcccagcctacccccaagccagcccttcaaccagagctccctacccaggaggaccccacccctgagattctgtctgagagtgtaggggaaaagcaagagaatggggcagtggtgcccctgcaggctggtgatggggaagagggcccagcccctgagcctcactcaccaccctcaaaaaaatcccccccagccaatggggcccccccccgagtgctgcagcagctggttgaggaggatcgaatgagaagggcacacagtgggcatccaggatctccccgaggtagcctgagccgccaccccagctcccagttggcaggtcctggggtggaggggggtgaaggcacccagaaacctcgggactacatcatccttgccatcctgtcctgcttctgccccatgtggcctgtcaacatcgtggccttcgcttatgctgtcatgtcccggaacagcctgcagcagggggacgtggacggggcccagcgtctgggccgggtagccaagctcttaagcatcgtggcgctggtggggggagtcctcatcatcatcgcctcctgcgtcatcaacttaggcgtgtataagtgaggggctctgccccgcatcccaagacttttcttcctgttgggagctgccttgggcccatccctcccctggggggagcccaactgatggccctggcccccacccctaaggaccaagggagcctgagcggccttgtttacagcttctgtcctgctcctgcatcttgccaggctcctctgccaactgtaggcctgcctcatccctgcactggttccaacctccctgcactaatgcctgcatcccctccggcctcttggccccctatccctgcacttctggaaacctccctgcactctggaaacctccctgaacacctccccaactctgcgctctcagcctccctgcatctctcctggcctccctgcacttcttccagccccccaaattctctggacctccaccctggccgcctcctcccaactttcattgtcttggcatctctcaaccctcagtcctctcttccttcccttctttatcatctcccctttcctctccacgtcccgcccccttcctcttcctgcctcctcatctcccttaagcatcctcttctccaacctcccgtcaccgtttactctgcaaaattgacagcacttagacgaggcttgggggcagggagcagtgttgggagagggctccccaaccccaggctcggactgttctctgctgggaccacccagggtcggacacccaagggtgcctggcaggtcgcagagttggcaagccgggcctcgtatggggactcgggtgagggtggcgagtactggttccgaacgcacgcaggggagaagggagggacgcggcgctgacccttccaggtcagctggagttgacccgcccacctgggcttttcaaccccagtccgcgagtttctttcttgaaggtgtgggggctagattcattcacgtgcttcgtaatgaaataatccaaaaaataggaccaaagcgcccactggcaggagcgagggcggggcgccgcgctctataattattttctaagatgatgggggaggtttgttgcacgcgacagcccgctgaggaggcggggaccgagctacaacgcggttcggatttggcgggggtttttttccttaaaaaaaaaaaaaaaaaaaaaaaaaaagtctgggggaagaaaaaaactaaaattcttaaaaaaaaaaaaaaaaggctattatcaaactgatttctccctttttgtatgccggatgctgcatgagtctgaaacaccaataaacggagactgcatgaga

SEQ ID NO: 16732 - DNA, 2365 bp, Homo sapiens
  source 1..2365: mol_type = unassigned DNA
ggagaggaggggatgagcacacgggagaggagaagagggagacccgccgcctccctccctccctagctgacttgctccctcccgggctgcggctgctgcaaaagccagcagcggcagcgggagctgtccggaggccggcgtcgagggtttgccgctgtctctgctattccatcctccccataggggctctctcccctctcccatctcaagatggcagccagcagctctgagatctctgagatgaagggggttgaggagagtcccaaggttccaggcgaagggcctggccattctgaagctgaaactggccctccccaggtcctagcaggggtaccagaccagccagaggccccgcagccaggtccaaacaccactgcggcccctgtggactcagggcccaaggctgggctggctccagaaaccacagagaccccggctggggcctcagaaacagcccaggccacagacctcagcttaagcccaggaggggaatcaaaggccaactgcagccccgaagacccatgccaagaaacagtgtccaaaccagaagtgagcaaagaggccactgcagaccaggggtccaggctggagtctgcagccccacctgaaccagccccagagcctgctccccaaccagacccccggccagattcccagcctacccccaagccagcccttcaaccagagctccctacccaggaggaccccacccctgagattctgtctgagagtgtaggggaaaagcaagagaatggggcagtggtgcccctgcaggctggtgatggggaagagggcccagcccctgagcctcactcaccaccctcaaaaaaatcccccccagccaatggggcccccccccgagtgctgcagcagctggttgaggaggatcgaatgagaagggcacacagtgggcatccaggatctccccgaggtagcctgagccgccaccccagctcccagttggcaggtcctggggtggaggggggtgaaggcacccagaaacctcgggactacatcatccttgccatcctgtcctgcttctgccccatgtggcctgtcaacatcgtggccttcgcttatgctgtcatggtgagccccatgggaccctagcccaggcctgctgtggctcccagcttcccgccagcgctgcaatagagcctctggatcccggaacagcctgcagcagggggacgtggacggggcccagcgtctgggccgggtagccaagctcttaagcatcgtggcgctggtggggggagtcctcatcatcatcgcctcctgcgtcatcaacttaggcgtgtataagtgaggggctctgccccgcatcccaagacttttcttcctgttgggagctgccttgggcccatccctcccctggggggagcccaactgatggccctggcccccacccctaaggaccaagggagcctgagcggccttgtttacagcttctgtcctgctcctgcatcttgccaggctcctctgccaactgtaggcctgcctcatccctgcactggttccaacctccctgcactaatgcctgcatcccctccggcctcttggccccctatccctgcacttctggaaacctccctgcactctggaaacctccctgaacacctccccaactctgcgctctcagcctccctgcatctctcctggcctccctgcacttcttccagccccccaaattctctggacctccaccctggccgcctcctcccaactttcattgtcttggcatctctcaaccctcagtcctctcttccttcccttctttatcatctcccctttcctctccacgtcccgcccccttcctcttcctgcctcctcatctcccttaagcatcctcttctccaacctcccgtcaccgtttactctgcaaaattgacagcacttagacgaggcttgggggcagggagcagtgttgggagagggctccccaaccccaggctcggactgttctctgctgggaccacccagggtcggacacccaagggtgcctggcaggtcgcagagttggcaagccgggcctcgtatggggactcgggtgagggtggcgagtactggttccgaacgcacgcaggggagaagggagggacgcggcgctgacccttccaggtcagctggagttgacccgcccacctgggcttttcaaccccagtccgcgagtttctttcttgaaggtgtgggggctagattcattcacgtgcttcgtaatgaaataatccaaaaaataggaccaaagcgcccactggcaggagcgagggcggggcgccgcgctctataattattttctaagatgatgggggaggtttgttgcacgcgacagcccgctgaggaggcggggaccgagctacaacgc

SEQ ID NO: 16733 - DNA, 644 bp, Homo sapiens
  source 1..644: mol_type = unassigned DNA
agaggaggggatgagcacacgggagaggagaagagggagacccgccgcctccctccctccctagctgacttgctccctcccgggctgcggctgctgcaaaagccagcagcggcagcgggagctgtccggaggccggcgtcgagggtttgccgctgtctctgctattccatcctccccataggggctctctcccctctcccatctcaagatggcagccagcagctctgagatctctgagatgaagggggttgaggagagtcccaaggttccaggcgaagggcctggccattctgaagctgaaactggccctccccaggtcctagcaggggtaccagaccagccagaggccccgcagccaggtccaaacaccactgcggcccctgtggactcagggcccaaggctgggctggctccagaaaccacagagaccccggctggggcctcagaaacagcccaggccacagacctcagcttaagcccaggaggggaatcaaaggccaactgcagccccgaagacccatgccaagaaacagtgtccaaaccagaatcccggaacagcctgcagcagggggacgtggacggggcccagcgtctgggccgggtagccaagctcttaagcatcgtggcgctggtggggggagtcc

SEQ ID NO: 16734 - DNA, 2009 bp, Homo sapiens
  source 1..2009: mol_type = unassigned DNA
ggaggggatgagcacacgggagaggagaagagggagacccgccgcctccctccctccctagctgacttgctccctcccgggctgcggctgctgcaaaagccagcagcggcagcgggagctgtccggaggccggcgtcgagggtttgccgctgtctctgctattccatcctccccataggggctctctcccctctcccatctcaagatggcagccagcagctctgagatctctgagatgaagggggttgaggagagtcccaaggttccaggcgaagggcctggccattctgaagctgaaactggccctccccaggtcctagcaggggtaccagaccagccagaggccccgcagccaggtccaaacaccactgcggcccctgtggactcagggcccaaggctgggctggctccagaaaccacagagaccccggctggggcctcagaaacagcccaggccacagacctcagcttaagcccaggaggggaatcaaaggccaactgcagccccgaagacccatgccaagaaacagtgtccaaaccagaaccaatggggcccccccccgagtgctgcagcagctggttgaggaggatcgaatgagaagggcacacagtgggcatccaggatctccccgaggtagcctgagccgccaccccagctcccagttggcaggtcctggggtggaggggggtgaaggcacccagaaacctcgggactacatcatccttgccatcctgtcctgcttctgccccatgtggcctgtcaacatcgtggccttcgcttatgctgtcatgtcccggaacagcctgcagcagggggacgtggacggggcccagcgtctgggccgggtagccaagctcttaagcatcgtggcgctggtggggggagtcctcatcatcatcgcctcctgcgtcatcaacttaggcgtgtataagtgaggggctctgccccgcatcccaagacttttcttcctgttgggagctgccttgggcccatccctcccctggggggagcccaactgatggccctggcccccacccctaaggaccaagggagcctgagcggccttgtttacagcttctgtcctgctcctgcatcttgccaggctcctctgccaactgtaggcctgcctcatccctgcactggttccaacctccctgcactaatgcctgcatcccctccggcctcttggccccctatccctgcacttctggaaacctccctgcactctggaaacctccctgaacacctccccaactctgcgctctcagcctccctgcatctctcctggcctccctgcacttcttccagccccccaaattctctggacctccaccctggccgcctcctcccaactttcattgtcttggcatctctcaaccctcagtcctctcttccttcccttctttatcatctcccctttcctctccacgtcccgcccccttcctcttcctgcctcctcatctcccttaagcatcctcttctccaacctcccgtcaccgtttactctgcaaaattgacagcacttagacgaggcttgggggcagggagcagtgttgggagagggctccccaaccccaggctcggactgttctctgctgggaccacccagggtcggacacccaagggtgcctggcaggtcgcagagttggcaagccgggcctcgtatggggactcgggtgagggtggcgagtactggttccgaacgcacgcaggggagaagggagggacgcggcgctgacccttccaggtcagctggagttgacccgcccacctgggcttttcaaccccagtccgcgagtttctttcttgaaggtgtgggggctagattcattcacgtgcttcgtaatgaaataatccaaaaaataggaccaaagcgcccactggcaggagcgagggcggggcgccgcgctctataattattttctaagatgatgggggaggtttgttgcacgcgacagcccgctgaggaggcggggaccgagctacaacgcggttcggatttggcggg

SEQ ID NO: 16735 - DNA, 1470 bp, Homo sapiens
  source 1..1470: mol_type = unassigned DNA
atgagcacacgggagaggagaagagggagacccgccgcctccctccctccctagctgacttgctccctcccgggctgcggctgctgcaaaagccagcagcggcagcgggagctgtccggaggccggcgtcgagggtttgccgctgtctctgctattccatcctccccataggggctctctcccctctcccatctcaagatggcagccagcagctctgagatctctgagatgaagggggttgaggagagtcccaaggttccaggcgaagggcctggccattctgaagctgaaactggccctccccaggtcctagcaggggtaccagaccagccagaggccccgcagccaggtccaaacaccactgcggcccctgtggactcagggcccaaggctgggctggctccagaaaccacagagaccccggctggggcctcagaaacagcccaggccacagacctcagcttaagcccaggaggggaatcaaaggccaactgcagccccgaagacccatgccaagaaacagtgtccaaaccagaagtgagcaaagaggccactgcagaccaggggtccaggctggagtctgcagccccacctgaaccagccccagagcctgctccccaaccagacccccggccagattcccagcctacccccaagccagcccttcaaccagagctccctacccaggaggaccccacccctgagattctgtctgagagtgtaggggaaaagcaagagaatggggcagtggtgcccctgcaggctggtgatggggaagagggcccagcccctgagcctcactcaccaccctcaaaaaaatcccccccagccaatggggcccccccccgagtgctgcagcagctggttgaggaggatcgaatgagaagggcacacagtgggcatccaggatctccccgaggtagcctgagccgccaccccagctcccagttggcaggtcctggggtggaggggggtgaaggcacccagaaacctcgggactacatcatccttgccatcctgtcctgcttctgccccatgtggcctgtcaacatcgtggccttcgcttatgctgtcatgtcccggaacagcctgcagcagggggacgtggacggggcccagcgtctgggccgggtagccaagctcttaagcatcgtggcgctggtggggggagtcctcatcatcatcgcctcctgcgtcatcaacttaggcggtgagtgggggcttgggacaggcaggggaggaatggaagggttggcaagggcagctttactaacccctgcccctgctctctcctgtctgtcctccttacctctcctttgtctctccttgtctccccctccccccgtctgtccttccctctcctctcccacagtgtataagtgaggggctctgccccgcatcccaagacttttcttcctgttgggagctgccttgggcccatccctcccctggggggagcccaactgatgg

SEQ ID NO: 16736 - DNA, 1733 bp, Homo sapiens
  source 1..1733: mol_type = unassigned DNA
gagcacacgggagaggagaagagggagacccgccgcctccctccctccctagctgacttgctccctcccgggctgcggctgctgcaaaagccagcagcggcagcgggagctgtccggaggccggcgtcgagggtttgccgctgtctctgctattccatcctccccataggggctctctcccctctcccatctcaagatggcagccagcagctctgagatctctgagatgaagggggttgaggagagtcccaaggttccaggcgaagggcctggccattctgaagctgaaactggccctccccaggtcctagcaggggtaccagaccagccagaggccccgcagccaggtccaaacaccactgcggcccctgtggactcagggcccaaggctgggctggctccagaaaccacagagaccccggctggggcctcagaaacagcccaggccacagacctcagcttaagcccaggaggggaatcaaaggccaactgcagccccgaagacccatgccaagaaacagtgtccaaaccagaacctgcagcagggggacgtggacggggcccagcgtctgggccgggtagccaagctcttaagcatcgtggcgctggtggggggagtcctcatcatcatcgcctcctgcgtcatcaacttaggcgtgtataagtgaggggctctgccccgcatcccaagacttttcttcctgttgggagctgccttgggcccatccctcccctggggggagcccaactgatggccctggcccccacccctaaggaccaagggagcctgagcggccttgtttacagcttctgtcctgctcctgcatcttgccaggctcctctgccaactgtaggcctgcctcatccctgcactggttccaacctccctgcactaatgcctgcatcccctccggcctcttggccccctatccctgcacttctggaaacctccctgcactctggaaacctccctgaacacctccccaactctgcgctctcagcctccctgcatctctcctggcctccctgcacttcttccagccccccaaattctctggacctccaccctggccgcctcctcccaactttcattgtcttggcatctctcaaccctcagtcctctcttccttcccttctttatcatctcccctttcctctccacgtcccgcccccttcctcttcctgcctcctcatctcccttaagcatcctcttctccaacctcccgtcaccgtttactctgcaaaattgacagcacttagacgaggcttgggggcagggagcagtgttgggagagggctccccaaccccaggctcggactgttctctgctgggaccacccagggtcggacacccaagggtgcctggcaggtcgcagagttggcaagccgggcctcgtatggggactcgggtgagggtggcgagtactggttccgaacgcacgcaggggagaagggagggacgcggcgctgacccttccaggtcagctggagttgacccgcccacctgggcttttcaaccccagtccgcgagtttctttcttgaaggtgtgggggctagattcattcacgtgcttcgtaatgaaataatccaaaaaataggaccaaagcgcccactggcaggagcgagggcggggcgccgcgctctataattattttctaagatgatgggggaggtttgttgcacgcgacagcccgctgaggaggcggggaccgagctacaacgcggttcggat

SEQ ID NO: 16737 - DNA, 2065 bp, Homo sapiens
  source 1..2065: mol_type = unassigned DNA
acacgggagaggagaagagggagacccgccgcctccctccctccctagctgacttgctccctcccgggctgcggctgctgcaaaagccagcagcggcagcgggagctgtccggaggccggcgtcgagggtttgccgctgtctctgctattccatcctccccataggggctctctcccctctcccatctcaagatggcagccagcagctctgagatctctgagatgaagggggttgaggagagtcccaaggttccaggcgaagggcctggccattctgaagctgaaactggccctccccaggtcctagcaggggtaccagaccagccagaggccccgcagccaggtccaaacaccactgcggcccctgtggactcagggcccaaggctgggctggctccagaaaccacagagaccccggctggggcctcagaaacagcccaggccacagacctcagcttaagcccaggaggggaatcaaaggccaactgcagccccgaagacccatgccaagaaacagtgtccaaaccagaagtgagcaaagaggccactgcagaccaggggtccaggctggagtctgcagccccacctgaaccagccccagagcctgctccccaaccagacccccggccagattcccagcctacccccaagccagcccttcaaccagagctccctacccaggaggaccccacccctgagattctgtctgagagtgtaggggaaaagcaagagaatggggcagtggtgcccctgcaggctggtgatggggaagagggcccagcccctgagcctcactcaccaccctcaaaaaaatcccccccagccaatggggcccccccccgagtgctgcagcagctggttgaggaggatcgaatgagaagggcacacagtgggcatccaggatctccccgaggtatcccggaacagcctgcagcagggggacgtggacggggcccagcgtctgggccgggtagccaagctcttaagcatcgtggcgctggtggggggagtcctcatcatcatcgcctcctgcgtcatcaacttaggcgtgtataagtgaggggctctgccccgcatcccaagacttttcttcctgttgggagctgccttgggcccatccctcccctggggggagcccaactgatggccctggcccccacccctaaggaccaagggagcctgagcggccttgtttacagcttctgtcctgctcctgcatcttgccaggctcctctgccaactgtaggcctgcctcatccctgcactggttccaacctccctgcactaatgcctgcatcccctccggcctcttggccccctatccctgcacttctggaaacctccctgcactctggaaacctccctgaacacctccccaactctgcgctctcagcctccctgcatctctcctggcctccctgcacttcttccagccccccaaattctctggacctccaccctggccgcctcctcccaactttcattgtcttggcatctctcaaccctcagtcctctcttccttcccttctttatcatctcccctttcctctccacgtcccgcccccttcctcttcctgcctcctcatctcccttaagcatcctcttctccaacctcccgtcaccgtttactctgcaaaattgacagcacttagacgaggcttgggggcagggagcagtgttgggagagggctccccaaccccaggctcggactgttctctgctgggaccacccagggtcggacacccaagggtgcctggcaggtcgcagagttggcaagccgggcctcgtatggggactcgggtgagggtggcgagtactggttccgaacgcacgcaggggagaagggagggacgcggcgctgacccttccaggtcagctggagttgacccgcccacctgggcttttcaaccccagtccgcgagtttctttcttgaaggtgtgggggctagattcattcacgtgcttcgtaatgaaataatccaaaaaataggaccaaagcgcccactggcaggagcgagggcggggcgccgcgctctataattattttctaagatgatgggggag

SEQ ID NO: 16738 - DNA, 131 bp, Homo sapiens
  source 1..131: mol_type = unassigned DNA
ctccctagctgacttgctccctcccgggctgcggctgctgcaaaagccagcagcggcagcgggagctgtccggaggccggcgtcgagccaatggggcccccccccgagtgctgcagcagctggttgaggag

SEQ ID NO: 16739 - DNA, 3002 bp, Homo sapiens
  source 1..3002: mol_type = unassigned DNA
ctagctgacttgctccctcccgggctgcggctgctgcaaaagccagcagcggcagcgggagctgtccggaggccggcgtcgaggtgagacccgggcagactgaggctgcggggtttgccgctgtctctgctattccatcctccccataggggctctctcccctctcccatctcaagatggcagccagcagctctgagatctctgagatgaagggggttgaggagagtcccaaggttccaggcgaagggcctggccattctgaagctgaaactggccctccccaggtcctagcaggggtaccagaccagccagaggccccgcagccaggtccaaacaccactgcggcccctgtggactcagggcccaaggctgggctggctccagaaaccacagagaccccggctggggcctcagaaacagcccaggccacagacctcagcttaagcccaggaggggaatcaaaggccaactgcagccccgaagacccatgccaagaaacagtgtccaaaccagaagtgagcaaagaggccactgcagaccaggggtccaggctggagtctgcagccccacctgaaccagccccagagcctgctccccaaccagacccccggccagattcccagcctacccccaagccagcccttcaaccagagctccctacccaggaggaccccacccctgagattctgtctgagagtgtaggggaaaagcaagagaatggggcagtggtgcccctgcaggctggtgatggggaagagggcccagcccctgagcctcactcaccaccctcaaaaaaatcccccccagccaatggggcccccccccgagtgctgcagcagctggttgaggaggatcgaatgagaagggcacacagtgggcatccaggatctccccgaggtagcctgagccgccaccccagctcccagttggcaggtcctggggtggaggggggtgaaggcacccagaaacctcgggactacatcatccttgccatcctgtcctgcttctgccccatgtggcctgtcaacatcgtggccttcgcttatgctgtcatggtgagccccatgggaccctagcccaggcctgctgtggctcccagcttcccgccagcgctgcaatagagcctctggagtaatcatgccttccttcccctctcctctctgcatggatcccacctccccaattccagggcctttgtttgcctctccctaggacctaaccctctgagccaccactgccctgcccctttgggtgggagggatatggaaacacgtgtcacacagcctcgctgacctgtgccctcctccccctgccccttcactcctccttcctcccttacccgccatctatggggctggcctctctctcttctggatgacttttccacctgatcccttctgggctggcttctcctgaccccggctatgtgcctccacccctcgccctaaccccagtcccggaacagcctgcagcagggggacgtggacggggcccagcgtctgggccgggtagccaagctcttaagcatcgtggcgctggtggggggagtcctcatcatcatcgcctcctgcgtcatcaacttaggcggtgagtgggggcttgggacaggcaggggaggaatggaagggttggcaagggcagctttactaacccctgcccctgctctctcctgtctgtcctccttacctctcctttgtctctccttgtctccccctccccccgtctgtccttccctctcctctcccacagtgtataagtgaggggctctgccccgcatcccaagacttttcttcctgttgggagctgccttgggcccatccctcccctggggggagcccaactgatggccctggcccccacccctaaggaccaagggagcctgagcggccttgtttacagcttctgtcctgctcctgcatcttgccaggctcctctgccaactgtaggcctgcctcatccctgcactggttccaacctccctgcactaatgcctgcatcccctccggcctcttggccccctatccctgcacttctggaaacctccctgcactctggaaacctccctgaacacctccccaactctgcgctctcagcctccctgcatctctcctggcctccctgcacttcttccagccccccaaattctctggacctccaccctggccgcctcctcccaactttcattgtcttggcatctctcaaccctcagtcctctcttccttcccttctttatcatctcccctttcctctccacgtcccgcccccttcctcttcctgcctcctcatctcccttaagcatcctcttctccaacctcccgtcaccgtttactctgcaaaattgacagcacttagacgaggcttgggggcagggagcagtgttgggagagggctccccaaccccaggctcggactgttctctgctgggaccacccagggtcggacacccaagggtgcctggcaggtcgcagagttggcaagccgggcctcgtatggggactcgggtgagggtggcgagtactggttccgaacgcacgcaggggagaagggagggacgcggcgctgacccttccaggtcagctggagttgacccgcccacctgggcttttcaaccccagtccgcgagtttctttcttgaaggtgtgggggctagattcattcacgtgcttcgtaatgaaataatccaaaaaataggaccaaagcgcccactggcaggagcgagggcggggcgccgcgctctataattattttctaagatgatgggggaggtttgttgcacgcgacagcccgctgaggaggcggggaccgagctacaacgcggttcggatttggcgggggtttttttccttaaaaaaaaaaaaaaaaaaaaaaaaaaagtctgggggaagaaaaaaactaaaattcttaaaaaaaaaaaaaaaaggctattatcaaactgatttctccctttttgtatgccggatgctgcatgagtctgaaacaccaataaacggagactgcatgag

SEQ ID NO: 16740 - DNA, 2033 bp, Homo sapiens
  source 1..2033: mol_type = unassigned DNA
gggctgcggctgctgcaaaagccagcagcggcagcgggagctgtccggaggccggcgtcgagggtttgccgctgtctctgctattccatcctccccataggggctctctcccctctcccatctcaagatggcagccagcagctctgagatctctgagatgaagggggttgaggagagtcccaaggttccaggcgaagggcctggccattctgaagctgaaactggccctccccaggtcctagcaggggtaccagaccagccagaggccccgcagccaggtccaaacaccactgcggcccctgtggactcagggcccaaggctgggctggctccagaaaccacagagaccccggctggggcctcagaaacagcccaggccacagacctcagcttaagcccaggaggggaatcaaaggccaactgcagccccgaagacccatgccaagaaacagtgtccaaaccagaagtgagcaaagaggccactgcagaccaggggtccaggctggagtctgcagccccacctgaaccagccccagagcctgctccccaaccagacccccggccagattcccagcctacccccaagccagcccttcaaccagagctccctacccaggaggaccccacccctgagattctgtctgagagtgtaggggaaaagcaagagaatggggcagtggtgcccctgcaggctggtgatggggaagagggcccagcccctgagcctcactcaccaccctcaaaaaaatcccccccagccaatggggcccccccccgagtgctgcagcagctggttgaggaggatcgaatgagaagggcacacagtgggcatccaggatctccccgagtcccggaacagcctgcagcagggggacgtggacggggcccagcgtctgggccgggtagccaagctcttaagcatcgtggcgctggtggggggagtcctcatcatcatcgcctcctgcgtcatcaacttaggcgtgtataagtgaggggctctgccccgcatcccaagacttttcttcctgttgggagctgccttgggcccatccctcccctggggggagcccaactgatggccctggcccccacccctaaggaccaagggagcctgagcggccttgtttacagcttctgtcctgctcctgcatcttgccaggctcctctgccaactgtaggcctgcctcatccctgcactggttccaacctccctgcactaatgcctgcatcccctccggcctcttggccccctatccctgcacttctggaaacctccctgcactctggaaacctccctgaacacctccccaactctgcgctctcagcctccctgcatctctcctggcctccctgcacttcttccagccccccaaattctctggacctccaccctggccgcctcctcccaactttcattgtcttggcatctctcaaccctcagtcctctcttccttcccttctttatcatctcccctttcctctccacgtcccgcccccttcctcttcctgcctcctcatctcccttaagcatcctcttctccaacctcccgtcaccgtttactctgcaaaattgacagcacttagacgaggcttgggggcagggagcagtgttgggagagggctccccaaccccaggctcggactgttctctgctgggaccacccagggtcggacacccaagggtgcctggcaggtcgcagagttggcaagccgggcctcgtatggggactcgggtgagggtggcgagtactggttccgaacgcacgcaggggagaagggagggacgcggcgctgacccttccaggtcagctggagttgacccgcccacctgggcttttcaaccccagtccgcgagtttctttcttgaaggtgtgggggctagattcattcacgtgcttcgtaatgaaataatccaaaaaataggaccaaagcgcccactggcaggagcgagggcggggcgccgcgctctataattattttctaagatgatgggggaggtttgttgcacgcgacagcccgctgaggaggcgggg

SEQ ID NO: 16741 - DNA, 2403 bp, Homo sapiens
  source 1..2403: mol_type = unassigned DNA
ggcagcgggagctgtccggaggccggcgtcgaggtgagacccgggcagactgaggctgcggggtttgccgctgtctctgctattccatcctccccataggggctctctcccctctcccatctcaagatggcagccagcagctctgagatctctgagatgaagggggttgaggagagtcccaaggttccaggcgaagggcctggccattctgaagctgaaactggccctccccaggtcctagcaggggtaccagaccagccagaggccccgcagccaggtccaaacaccactgcggcccctgtggactcagggcccaaggctgggctggctccagaaaccacagagaccccggctggggcctcagaaacagcccaggccacagacctcagcttaagcccaggaggggaatcaaaggccaactgcagccccgaagacccatgccaagaaacagtgtccaaaccagaagtgagcaaagaggccactgcagaccaggggtccaggctggagtctgcagccccacctgaaccagccccagagcctgctccccaaccagacccccggccagattcccagcctacccccaagccagcccttcaaccagagctccctacccaggaggaccccacccctgagattctgtctgagagtgtaggggaaaagcaagagaatggggcagtggtgcccctgcaggctggtgatggggaagagggcccagcccctgagcctcactcaccaccctcaaaaaaatcccccccagccaatggggcccccccccgagtgctgcagcagctggttgaggaggatcgaatgagaagggcacacagtgggcatccaggatctccccgaggtagcctgagccgccaccccagctcccagttggcaggtcctggggtggaggggggtgaaggcacccagaaacctcgggactacatcatccttgccatcctgtcctgcttctgccccatgtggcctgtcaacatcgtggccttcgcttatgctgtcatgtcccggaacagcctgcagcagggggacgtggacggggcccagcgtctgggccgggtagccaagctcttaagcatcgtggcgctggtggggggagtcctcatcatcatcgcctcctgcgtcatcaacttaggcgtgtataagtgaggggctctgccccgcatcccaagacttttcttcctgttgggagctgccttgggcccatccctcccctggggggagcccaactgatggccctggcccccacccctaaggaccaagggagcctgagcggccttgtttacagcttctgtcctgctcctgcatcttgccaggctcctctgccaactgtaggcctgcctcatccctgcactggttccaacctccctgcactaatgcctgcatcccctccggcctcttggccccctatccctgcacttctggaaacctccctgcactctggaaacctccctgaacacctccccaactctgcgctctcagcctccctgcatctctcctggcctccctgcacttcttccagccccccaaattctctggacctccaccctggccgcctcctcccaactttcattgtcttggcatctctcaaccctcagtcctctcttccttcccttctttatcatctcccctttcctctccacgtcccgcccccttcctcttcctgcctcctcatctcccttaagcatcctcttctccaacctcccgtcaccgtttactctgcaaaattgacagcacttagacgaggcttgggggcagggagcagtgttgggagagggctccccaaccccaggctcggactgttctctgctgggaccacccagggtcggacacccaagggtgcctggcaggtcgcagagttggcaagccgggcctcgtatggggactcgggtgagggtggcgagtactggttccgaacgcacgcaggggagaagggagggacgcggcgctgacccttccaggtcagctggagttgacccgcccacctgggcttttcaaccccagtccgcgagtttctttcttgaaggtgtgggggctagattcattcacgtgcttcgtaatgaaataatccaaaaaataggaccaaagcgcccactggcaggagcgagggcggggcgccgcgctctataattattttctaagatgatgggggaggtttgttgcacgcgacagcccgctgaggaggcggggaccgagctacaacgcggttcggatttggcgggggtttttttccttaaaaaaaaaaaaaaaaaaaaaaaaaaagtctgggggaagaaaaaaactaaaattcttaaaaaaaaaaaaaaaaggctattatcaaactgatttctccctttttgtatgccggatgctgcatgagtctgaaacaccaataaacggagactgcatgagactcgcctccaa

SEQ ID NO: 16742 - DNA, 2153 bp, Homo sapiens
  source 1..2153: mol_type = unassigned DNA
gctgcgggtaggagtggaccgaccgacggctgacgccgggcggactgcacgggaatgcggggtttgccgctgtctctgctattccatcctccccataggggctctctcccctctcccatctcaagatggcagccagcagctctgagatctctgagatgaagggggttgaggagagtcccaaggttccaggcgaagggcctggccattctgaagctgaaactggccctccccaggtcctagcaggggtaccagaccagccagaggccccgcagccaggtccaaacaccactgcggcccctgtggactcagggcccaaggctgggctggctccagaaaccacagagaccccggctggggcctcagaaacagcccaggccacagacctcagcttaagcccaggaggggaatcaaaggccaactgcagccccgaagacccatgccaagaaacagtgtccaaaccagaagtgagcaaagaggccactgcagaccaggggtccaggctggagtctgcagccccacctgaaccagccccagagcctgctccccaaccagacccccggccagattcccagcctacccccaagccagcccttcaaccagagctccctacccaggaggaccccacccctgagattctgtctgagagtgtaggggaaaagcaagagaatggggcagtggtgcccctgcaggctggtgatggggaagagggcccagcccctgagcctcactcaccaccctcaaaaaaatcccccccagccaatggggcccccccccgagtgctgcagcagctggttgaggaggatcgaatgagaagggcacacagtgggcatccaggatctccccgaggtagcctgagccgccaccccagctcccagttggcaggtcctggggtggaggggggtgaaggcacccagaaacctcgggactacatcatccttgccatcctgtcctgcttctgccccatgtggcctgtcaacatcgtggccttcgcttatgctgtcatgtcccggaacagcctgcagcagggggacgtggacggggcccagcgtctgggccgggtagccaagctcttaagcatcgtggcgctggtggggggagtcctcatcatcatcgcctcctgcgtcatcaacttaggcgtgtataagtgaggggctctgccccgcatcccaagacttttcttcctgttgggagctgccttgggcccatccctcccctggggggagcccaactgatggccctggcccccacccctaaggaccaagggagcctgagcggccttgtttacagcttctgtcctgctcctgcatcttgccaggctcctctgccaactgtaggcctgcctcatccctgcactggttccaacctccctgcactaatgcctgcatcccctccggcctcttggccccctatccctgcacttctggaaacctccctgcactctggaaacctccctgaacacctccccaactctgcgctctcagcctccctgcatctctcctggcctccctgcacttcttccagccccccaaattctctggacctccaccctggccgcctcctcccaactttcattgtcttggcatctctcaaccctcagtcctctcttccttcccttctttatcatctcccctttcctctccacgtcccgcccccttcctcttcctgcctcctcatctcccttaagcatcctcttctccaacctcccgtcaccgtttactctgcaaaattgacagcacttagacgaggcttgggggcagggagcagtgttgggagagggctccccaaccccaggctcggactgttctctgctgggaccacccagggtcggacacccaagggtgcctggcaggtcgcagagttggcaagccgggcctcgtatggggactcgggtgagggtggcgagtactggttccgaacgcacgcaggggagaagggagggacgcggcgctgacccttccaggtcagctggagttgacccgcccacctgggcttttcaaccccagtccgcgagtttctttcttgaaggtgtgggggctagattcattcacgtgcttcgtaatgaaataatccaaaaaataggaccaaagcgcccactggcaggagcgagggcggggcgccgcgctctataattattttctaagatgatgggggag

SEQ ID NO: 16743 - DNA, 517 bp, Homo sapiens
  source 1..517: mol_type = unassigned DNA
tgacgccgggcggactgcacgggaatgcgggtgtctggagggctggtggtggtgctgggcgggctgaaccatcgggaggaggcgccagcccaccgaagggtttgccgctgtctctgctattccatcctccccataggggctctctcccctctcccatctcaagatggcagccagcagctctgagatctctgagatgaagggggttgaggagagtcccaaggttccaggcgaagggcctggccattctgaagctgaaactggccctccccaggtcctagcaggggtaccagaccagccagaggccccgcagccaggtccaaacaccactgcggcccctgtggactcagggcccaaggctgggctggctccagaaaccacagagaccccggctggggcctcagaaacagcccaggccacagacctcagcttaagcccaggaggggaatcaaaggccaactgcagccccgaagacccatgccaagaaacagtgtccaaaccagaagtgagcaaagaggcc

SEQ ID NO: 16744 - DNA, 100 bp, Homo sapiens
  source 1..100: mol_type = unassigned DNA
atcatcgcctcctgcgtcatcaacttaggcgacttttcttcctgttgggagctgccttgggcccatccctcccctggggggagcccaactgatggccctg

SEQ ID NO: 16745 - DNA, 100 bp, Homo sapiens
  source 1..100: mol_type = unassigned DNA
ttctgtcctgctcctgcatcttgccagtccgcgagtttctttcttgaaggtgtgggggctagattcattcacgtgcttcgtaatgaaataatccaaaaaa

SEQ ID NO: 16746 - DNA, 2313 bp, Homo sapiens
  source 1..2313: mol_type = unassigned DNA
cgcggagtgcggagtgcggagcgcggggcctggccgcccgcctggaccttcctcctcaaaagctgctgaacaactgagtccctgcccaccaaggccacccgaagccaggtggggccatggccaggcatggctgtctagggctgggactgttctgctgcgtcctgtttgctgctactgtgggcccccagcccaccccctccatcccaggtgcccctgccaccactttgacccccgtacctcaaagtgaggcctctatgctgtctctcaacctgggacttaacttcaaattccatcttcggggacctgctgctgtctgggggagcccagtcacagagacccagccactctctcttgggccaggccaggagccaggggaagaggtggccagtgggctgaggactgaccccctttgggaattgctggtgggctcctcagggaactctctcactgagtggggctccaccgaaggtggctcaaagccccgggcctcctccctgcttccggagtccacatcccggcgctctgggcccagcgatgggcccactgccccctatcagcccaggaggagcactgtgacctgggacactgctctgatggtgacagcacttccatccagtgctcccaggccccaccagagcgagctggagctgaagtttgacatggcactgagagcaggtgcagcccccacgcttgggcatcgaacgctgcccctgctgcccagcctgcgggccagcctggcagagattgctgggcgcctgggaccctttggattctttggcactactctgtccccactccggaacttctccggcctgagccccccaggtgaaactacatccacaagctctgcctctggagtttcgggttctctggggttccttggtaccactctgtccctgcccccatactccctggagaggaagctctccagcccaagtcctctggacccagctgcttccctaagttttgcctcgattgcaacaacatcattagaccccacagtccccatctctggcccagatgacctctctcctcccgccagcctcgggaacccttcggggcagccagagtgtgggccagggtcctgcagcgtgggagaattgcctgaacgcgaggggcagcctcccgaggcgccgaggcccctctttttcctgaccctggaggccgactgggcagaggccagggctcgctgggggctggcctgggaggcccacgtgtacgggcgattacaccgtggacttccgcccgccctccccaatcaacctgcgacgcagcatcgaggaggccctctgcagcgaggccctgcttgcgcctggcctcttccagggccctgccttcgaggacgctctgcctgggctcggactctaccgcaccgcctcgctggggaccgggggcagggccagtgagagatcaggggaggcctctggccccgctgcgcccccggagctcccctcccctggggcttggcccgcaggcagcagcgtctcatctggctcgttctgcggactctcgcgggacagctcgtccatgctgctgtgttccagccccgacaggcccccgcgctgccctctggtctgcgtcctcagtcccccgcggccctcaggaagcagccccagcctcccggcctcaggatcctaccaggccctgtccccaccctctcgcgactccccagagcctgcttctgagctgcaggccgaggaggccttgctgcaggagcagttcctggacgcctgccgacagatcgacgagctgagcgtgggcagcgacaccatagacctgtgaagaggtggccaccttgctaccctgcgatatgcccctttctggcgcctgccctgcccgagacctgcacactgtaatccttccccaatcctccctggctcagatacctctccagattccttccccatccaggggtccctgggtgggtgggtcagcagccaggctctatcgattgggaatcagtgccaccttctctggagccctgggtgctgatgccctcagctgcaaatctaggttggcaggggtcccattttccttggcattcaccagcaataaagctccaaggtgctccactcctgaccaccactccccactctggtgctgagtgagaggggctgtcctcagaggaccctgggacctgcctcaggcccccctacccacctctgccatgcctaggaatcccacccctgtgtgaatgggactccctttcctccatgtgacacccacaggggtccatgacccatctaggagactttatagcagttgggtgggaggggaatgctcttaatttatcaataaaatattttcagagga

SEQ ID NO: 16747 - DNA, 1789 bp, Homo sapiens
  source 1..1789: mol_type = unassigned DNA
ctcaaagccccgggcctcctccctgcttccggagtccacatcccggcgctctgggcccagcgatgggcccactgccccctatcagcccaggaggagcactgtgacctgggacactgctctgatggtgacagcacttccatccagtgctcccaggccccaccagagcgagctggagctgaagtttgacatggcactgagagcaggtgcagcccccacgcttgggcatcgaacgctgcccctgctgcccagcctgcgggccagcctggcagagattgctgggcgcctgggaccctttggattctttggcactactctgtccccactccggaacttctccggcctgagccccccaggtgaaactacatccacaagctctgcctctggagtttcgggttctctggggttccttggtaccactctgtccctgcccccatactccctggagaggaagctctccagcccaatcctcgcgtgccgccgcgctgctgggccaagctcttccgcttgtccccgggccacgcggctccgctgctgccgggaggctgggtcactgggcccccagacaaggagcccctggggagcgccatcgctcgcggggacgcggagctgctgcagctgtgcgcgctggcagggccaggcccagacctcctactccagggcggaggttgccggggcttcgaaggcgcggcggccaacccggccccgtccccggcttcctctccctgcagcgattacaccgtggacttccgcccgccctccccaatcaacctgcgacgcagcatcgaggaggccctctgcagcgaggccctgcttgcgcctggcctcttccagggccctgccttcgaggacgctctgcctgggctcggactctaccgcaccgcctcgctggggaccgggggcagggccagtgagagatcaggggaggcctctggccccgctgcgcccccggagctcccctcccctggggcttggcccgcaggcagcagcgtctcatctggctcgttctgcggactctcgcgggacagctcgtccatgctgctgtgttccagccccgacaggcccccgcgctgccctctggtctgcgtcctcagtcccccgcggccctcaggaagcagccccagcctcccggcctcaggatcctaccaggccctgtccccaccctctcgcgactccccagagcctgcttctgagctgcaggccgaggaggccttgctgcaggagcagttcctggacgcctgccgacagatcgacgagctgagcgtgggcagcgacaccatagacctgtgaagaggtggccaccttgctaccctgcgatatgcccctttctggcgcctgccctgcccgagacctgcacactgtaatccttccccaatcctccctggctcagatacctctccagattccttccccatccaggggtccctgggtgggtgggtcagcagccaggctctatcgattgggaatcagtgccaccttctctggagccctgggtgctgatgccctcagctgcaaatctaggttggcaggggtcccattttccttggcattcaccagcaataaagctccaaggtgctccactcctgaccaccactccccactctggtgctgagtgagaggggctgtcctcagaggaccctgggacctgcctcaggcccccctacccacctctgccatgcctaggaatcccacccctgtgtgaatgggactccctttcctccatgtgacacccacaggggtccatgacccatctaggagactttatagcagttgggtgggaggggaatgctct

SEQ ID NO: 16748 - DNA, 1887 bp, Homo sapiens
  source 1..1887: mol_type = unassigned DNA
tgccgcggagccccggcgcgggcggcttcgccggggagcgaggctcggagccaggaggcggcgccgctgggagggagcgcggagtgcggagtgcggagcgcggggcctggccgcccgcctggtgagagcgctgcgggccggggctgggccgggggcggctcaggggcagcggggcggcgaggctgcggtctctggactaggcgaggggccgccgggggctggaggtccggatcttcagtcggggcgctgggcacaacagagagaagcggtgagataccacgaagcgttgcccagctgggcgccagggccgccacgaccgccccttttcggaggctcggcgaggagacctgcctgcgggagagaccccggggagcaggaccttcctcctcaaaagctgctgaacaactgagtccctgcccaccaaggccacccgaagccaggtggggccatggccaggcatggctgtctagggctgggactgttctgctgcgtcctgtttgctgctactgtgggcccccagcccaccccctccatcccaggtgcccctgccaccactttgacccccgtacctcaaagtgaggcctctatgctgtctctcaacctgggacttaacttcaaattccatcttcggggacctgctgctgtctgggggagcccagtcacagagacccagccactctctcttgggccaggccaggagccaggggaagaggtggccagtgggctgaggactgaccccctttgggaattgctggtgggctcctcagggaactctctcactgagtggggctccaccgaaggtggctcaaagccccgggcctcctccctgcttccggagtccacatcccggcgctctgggcccagcgatgggcccactgccccctatcagcccaggaggagcactgtgacctgggacactgctctgatggtgacagcacttccatccagtgctcccaggccccaccagagcgagctggagctgaagtttgacatggcactgagagcaggtgcagcccccacgcttgggcatcgaacgctgcccctgctgcccagcctgcgggccagcctggcagagattgctgggcgcctgggaccctttggattctttggcactactctgtccccactccggaacttctccggcctgagccccccaggtgaaactacatccacaagctctgcctctggagtttcgggttctctggggttccttggtaccactctgtccctgcccccatactccctggagaggaagctctccagcccaagtcctctggacccagctgcttccctaagttttgcctcgattgcaacaacatcattagaccccacagtccccatctctggcccagatgacctctctcctcccgccagcctcgggaacccttcggggcagccagagtgtgggccagggtcctgcagcgtgggagaattgcctgaacgcgaggggcagcctcccgaggcgccgaggcccctctttttcctgaccctggaggccgactgggcagaggccagggctcgctgggggctggcctgggaggcccacgtgtacggggtaggcgcgctcttcggcctggttgccttgctggcgctgctggctctggccctcttgccctggcggtgcccgcccggcgccccctgcctggcgctgctggacctgctgctgctgtcggccgggaccacgcgggccttcccgctcttctacgacgcctatgggcacagggatcgactgcccgcgctcgcctggctgctgctgcaggaccttccgctgccctgcttggctgccggcctggggctggcctgcctgctgctggcccggccgcgcccgccgcggtgccccaccggcctggctgcgctgctgctcctggggctggggctggcggccgc

SEQ ID NO: 16749 - DNA, 883 bp, Homo sapiens
  source 1..883: mol_type = unassigned DNA
aggaggcggcgccgctgggagggagcgcggagtgcggagtgcggagcgcggggcctggccgcccgcctgagagaagcggtgagataccacgaagcgttgcccagctgggcgccagggccgccacgaccgccccttttcggaggctcggcgaggagacctgcctgcgggagagaccccggggagcaggaccttcctcctcaaaagctgctgaacaactgagtccctgcccaccaaggccacccgaagccaggtggggccatggccaggcatggctgtctagggctgggactgttctgctgcgtcctgtttgctgctactgtgggcccccagcccaccccctccatcccaggtgcccctgccaccactttgacccccgtacctcaaagtgaggcctctatgctgtctctcaacctgggacttaacttcaaattccatcttcggggacctgctgctgtctgggggagcccagtcacagagacccagccactctctcttgggccaggccaggagccaggggaagaggtggccagtgggctgaggactgaccccctttgggaattgctggtgggctcctcagggaactctctcactgagtggggctccaccgaaggtggctcaaagccccgggcctcctccctgcttccggagtccacatcccggcgctctgggcccagcgatgggcccactgccccctatcagcccaggaggagcactgtgacctgggacactgctctgatggtgacagcacttccatccagtgctcccaggccccaccagagcgagctggagctgaagtttgacatggcactgagagcaggtgcagcccccacgcttgggcatcgaacgctgcccctgctgcccagcctgcgggccagcctggcag

SEQ ID NO: 16750 - DNA, 814 bp, Homo sapiens
  source 1..814: mol_type = unassigned DNA
cggctgccgcggagccccggcgcgggcggcttcgccggggagcgaggctcggagccaggaggcggcgccgctgggagggagcgcggagtgcggagtgcggagcgcggggcctggccgcccgcctggaccttcctcctcaaaagctgctgaacaactgagtccctgcccaccaaggccacccgaagccaggtggggccatggccaggcatggctgtctagggctgggactgttctgctgcgtcctgtttgctgctactgtgggcccccagcccaccccctccatcccaggtgcccctgccaccactttgacccccgtacctcaaagtgaggcctctatgctgtctctcaacctgggacttaacttcaaattccatcttcggggacctgctgctgtctgggggagcccagtcacagagacccagccactctctcttgggccaggccaggagccaggggaagaggtggccagtgggctgaggactgaccccctttgggaattgctggtgggctcctcagggaactctctcactgagtggggctccaccgaaggtggctcaaagccccgggcctcctccctgcttccggagtccacatcccggcgctctgggcccagcgatgggcccactgccccctatcagcccaggaggagcactgtgacctgggacactgctctgatggtgacagcacttccatccagtgctcccaggccccaccagagcgagctggagctgaagtttgacatggcactgagagcaggtgcagcccccacgcttgggcatcgaacgctgcccctgctgcccagcctgcgggccag

SEQ ID NO: 16751 - DNA, 2897 bp, Homo sapiens
  source 1..2897: mol_type = unassigned DNA
cggctgccgcggagccccggcgcgggcggcttcgccggggagcgaggctcggagccaggaggcggcgccgctgggagggagcgcggagtgcggagtgcggagcgcggggcctggccgcccgcctggaccttcctcctcaaaagctgctgaacaactgagtccctgcccaccaaggccacccgaagccaggtggggccatggccaggcatggctgtctagggctgggactgttctgctgcgtcctgtttgctgctactgtgggcccccagcccaccccctccatcccaggtgcccctgccaccactttgacccccgtacctcaaagtgaggcctctatgctgtctctcaacctgggacttaacttcaaattccatcttcggggacctgctgctgtctgggggagcccagtcacagagacccagccactctctcttgggccaggccaggagccaggggaagaggtggccagtgggctgaggactgaccccctttgggaattgctggtgggctcctcagggaactctctcactgagtggggctccaccgaaggtggctcaaagccccgggcctcctccctgcttccggagtccacatcccggcgctctgggcccagcgatgggcccactgccccctatcagcccaggaggagcactgtgacctgggacactgctctgatggtgacagcacttccatccagtgctcccaggccccaccagagcgagctggagctgaagtttgacatggcactgagagcaggtgcagcccccacgcttgggcatcgaacgctgcccctgctgcccagcctgcgggccagcctggcagagattgctgggcgcctgggaccctttggattctttggcactactctgtccccactccggaacttctccggcctgagccccccaggtgaaactacatccacaagctctgcctctggagtttcgggttctctggggttccttggtaccactctgtccctgcccccatactccctggagaggaagctctccagcccaagtcctctggacccagctgcttccctaagttttgcctcgattgcaacaacatcattagaccccacagtccccatctctggcccagatgacctctctcctcccgccagcctcgggaacccttcggggcagccagagtgtgggccagggtcctgcagcgtgggagaattgcctgaacgcgaggggcagcctcccgaggcgccgaggcccctctttttcctgaccctggaggccgactgggcagaggccagggctcgctgggggctggcctgggaggcccacgtgtacggggtaggcgcgctcttcggcctggttgccttgctggcgctgctggctctggccctcttgccctggcggtgcccgcccggcgccccctgcctggcgctgctggacctgctgctgctgtcggccgggaccacgcgggccttcccgctcttctacgacgcctatgggcacagggatcgactgcccgcgctcgcctggctgctgctgcaggaccttccgctgccctgcttggctgccggcctggggctggcctgcctgctgctggcccggccgcgcccgccgcggtgccccaccggcctggctgcgctgctgctcctggggctggggctggcggccgccgccgccctcgggagcgccgcgcatcgcccgctgcggcccctgcggctcgcctcgcgcgggctgcacgcctttctcgccgctttcctttccgggctgctgctggcgctctcctgctggggcgggcggcggcggcgggccggggcgcccctgggagggtcgggcttcaagggcgccacacccctgccgcaggggcgcagccccttcgcccctcgggagtcctggcggcgcgcggcgcgcacggccccggtggcgggcaccttcgggctgctgagcggagccctgcagggctatgaggtgctgcacgccctgggctacggcggccaatccggcctggaagggccctggccctggtgggccttccagctaggcctgcgcctgggcgaggtgggcgtcgcgctcccgttggcgctgctgggcctctacccggcgctctgcagtcctcgcgtgccgccgcgctgctgggccaagctcttccgcttgtccccgggccacgcggctccgctgctgccgggaggctgggtcactgggcccccagacaaggagcccctggggagcgccatcgctcgcggggacgcggagctgctgcagctgtgcgcgctggcagggccaggcccagacctcctactccagggcggaggttgccggggcttcgaaggcgcggcggccaacccggccccgtccccggcttcctctccctgcagcgattacaccgtggacttccgcccgccctccccaatcaacctgcgacgcagcatcgaggaggccctctgcagcgaggccctgcttgcgcctggcctcttccagggccctgccttcgaggacgctctgcctgggctcggactctaccgcaccgcctcgctggggaccgggggcagggccagtgagagatcaggggaggcctctggccccgctgcgcccccggagctcccctcccctggggcttggcccgcaggcagcagcgtctcatctggctcgttctgcggactctcgcgggacagctcgtccatgctgctgtgttccagccccgacaggcccccgcgctgccctctggtctgcgtcctcagtcccccgcggccctcaggaagcagccccagcctcccggcctcaggatcctaccaggccctgtccccaccctctcgcgactccccagagcctgcttctgagctgcaggccgaggaggccttgctgcaggagcagttcctggacgcctgccgacagatcgacgagctgagcgtgggcagcgacaccatagacctgtga

SEQ ID NO: 16752 - DNA, 3544 bp, Homo sapiens
  source 1..3544: mol_type = unassigned DNA
cggctgccgcggagccccggcgcgggcggcttcgccggggagcgaggctcggagccaggaggcggcgccgctgggagggagcgcggagtgcggagtgcggagcgcggggcctggccgcccgcctgagagaagcggtgagataccacgaagcgttgcccagctgggcgccagggccgccacgaccgccccttttcggaggctcggcgaggagacctgcctgcgggagagaccccggggagcaggaccttcctcctcaaaagctgctgaacaactgagtccctgcccaccaaggccacccgaagccaggtggggccatggccaggcatggctgtctagggctgggactgttctgctgcgtcctgtttgctgctactgtgggcccccagcccaccccctccatcccaggtgcccctgccaccactttgacccccgtacctcaaagtgaggcctctatgctgtctctcaacctgggacttaacttcaaattccatcttcggggacctgctgctgtctgggggagcccagtcacagagacccagccactctctcttgggccaggccaggagccaggggaagaggtggccagtgggctgaggactgaccccctttgggaattgctggtgggctcctcagggaactctctcactgagtggggctccaccgaaggtggctcaaagccccgggcctcctccctgcttccggagtccacatcccggcgctctgggcccagcgatgggcccactgccccctatcagcccaggaggagcactgtgacctgggacactgctctgatggtgacagcacttccatccagtgctcccaggccccaccagagcgagctggagctgaagtttgacatggcactgagagcaggtgcagcccccacgcttgggcatcgaacgctgcccctgctgcccagcctgcgggccagcctggcagagattgctgggcgcctgggaccctttggattctttggcactactctgtccccactccggaacttctccggcctgagccccccaggtgaaactacatccacaagctctgcctctggagtttcgggttctctggggttccttggtaccactctgtccctgcccccatactccctggagaggaagctctccagcccaagtcctctggacccagctgcttccctaagttttgcctcgattgcaacaacatcattagaccccacagtccccatctctggcccagatgacctctctcctcccgccagcctcgggaacccttcggggcagccagagtgtgggccagggtcctgcagcgtgggagaattgcctgaacgcgaggggcagcctcccgaggcgccgaggcccctctttttcctgaccctggaggccgactgggcagaggccagggctcgctgggggctggcctgggaggcccacgtgtacggggtaggcgcgctcttcggcctggttgccttgctggcgctgctggctctggccctcttgccctggcggtgcccgcccggcgccccctgcctggcgctgctggacctgctgctgctgtcggccgggaccacgcgggccttcccgctcttctacgacgcctatgggcacagggatcgactgcccgcgctcgcctggctgctgctgcaggaccttccgctgccctgcttggctgccggcctggggctggcctgcctgctgctggcccggccgcgcccgccgcggtgccccaccggcctggctgcgctgctgctcctggggctggggctggcggccgccgccgccctcgggagcgccgcgcatcgcccgctgcggcccctgcggctcgcctcgcgcgggctgcacgcctttctcgccgctttcctttccgggctgctgctggcgctctcctgctggggcgggcggcggcggcgggccggggcgcccctgggagggtcgggcttcaagggcgccacacccctgccgcaggggcgcagccccttcgcccctcgggagtcctggcggcgcgcggcgcgcacggccccggtggcgggcaccttcgggctgctgagcggagccctgcagggctatgaggtgctgcacgccctgggctacggcggccaatccggcctggaagggccctggccctggtgggccttccagctaggcctgcgcctgggcgaggtgggcgtcgcgctcccgttggcgctgctgggcctctacccggcgctctgcagtcctcgcgtgccgccgcgctgctgggccaagctcttccgcttgtccccgggccacgcggctccgctgctgccgggaggctgggtcactgggcccccagacaaggagcccctggggagcgccatcgctcgcggggacgcggagctgctgcagctgtgcgcgctggcagggccaggcccagacctcctactccagggcggaggttgccggggcttcgaaggcgcggcggccaacccggccccgtccccggcttcctctccctgcagcgattacaccgtggacttccgcccgccctccccaatcaacctgcgacgcagcatcgaggaggccctctgcagcgaggccctgcttgcgcctggcctcttccagggccctgccttcgaggacgctctgcctgggctcggactctaccgcaccgcctcgctggggaccgggggcagggccagtgagagatcaggggaggcctctggccccgctgcgcccccggagctcccctcccctggggcttggcccgcaggcagcagcgtctcatctggctcgttctgcggactctcgcgggacagctcgtccatgctgctgtgttccagccccgacaggcccccgcgctgccctctggtctgcgtcctcagtcccccgcggccctcaggaagcagccccagcctcccggcctcaggatcctaccaggccctgtccccaccctctcgcgactccccagagcctgcttctgagctgcaggccgaggaggccttgctgcaggagcagttcctggacgcctgccgacagatcgacgagctgagcgtgggcagcgacaccatagacctgtgaagaggtggccaccttgctaccctgcgatatgcccctttctggcgcctgccctgcccgagacctgcacactgtaatccttccccaatcctccctggctcagatacctctccagattccttccccatccaggggtccctgggtgggtgggtcagcagccaggctctatcgattgggaatcagtgccaccttctctggagccctgggtgctgatgccctcagctgcaaatctaggttggcaggggtcccattttccttggcattcaccagcaataaagctccaaggtgctccactcctgaccaccactccccactctggtgctgagtgagaggggctgtcctcagaggaccctgggacctgcctcaggcccccctacccacctctgccatgcctaggaatcccacccctgtgtgaatgggactccctttcctccatgtgacacccacaggggtccatgacccatctaggagactttatagcagttgggtgggaggggaatgctcttaatttatcaataaaatattttcagagg

SEQ ID NO: 16753 - DNA, 529 bp, Homo sapiens
  source 1..529: mol_type = unassigned DNA
agaaaatttttttttgggggggggcggtttgggggaaggcagaaggagaagaaaatttgattgtgatggtggtggattttttccaaatttccccacagctgttatcaaaacatgcaaatgagattttccaacaggatcttaaacaaatctggaggagttaatgccgaagcaaaataatcagcacgtttgaagtgactgcgaaaaagaacttctccgtcagtcacctgctagacctggaggaagccggggacatggtggcggcacaggcggatgagaacgtgggcgaggctggccggagcctgctggagtcgccgggactcaccagcggcagcgacaccccgcagcaggacaatgaccagctgaactcagaagaaaaaaagaagagaaagcagcgaaggaataggacaaccttcaatagcagccagctgcaggctttggagcgtgtctttgagcggacacactatcctgatgcttttgtgcgagaagaccttgcccgccgggtgaacctcaccgaggcgagagtgcaggt

SEQ ID NO: 16754 - DNA, 2217 bp, Homo sapiens
  source 1..2217: mol_type = unassigned DNA
gatgttggcaaagggggttttcttaatcagactgttttttggtcccagggaaaggaggaagaaggagattgtgatggagaaagggggtctgtgaaacgtcaggcacagcacaaaggctttgccacgtaattacaggctcctattaagtcgagatctgccctcccaggggtctccaattttcttgtattccctacaaagcctcctctgcatgccagtttgtgccttttgaagtgccagagagcttcttgatccaactgagaaggaaaaaggagcccagcaagaagagggggagagagagaaggggaaaggggggaacccaccagcaccctccgtcggactcttgaagccttttttttttaattcttaatttttttttttactctttacaaaaagtaaagtgagaatcctgctctctaatacatctgcaagacatcaccctctcctcctgaaactttagtcactcctgagaatccacaggagtgcagagaggggggaacacgttttcttgaagatgttttaaagctggaacaagccttcttctgttggtgcttgaactcttgcctgggaataacttttttaacctttaaaaaaaccattcactttgattcttctctcccaccccttcttctctcttcttctgtttgcctaactcccccgccctgctggcctccgctttcctctctcccccttgttattatttttagtctgtgcgtgtggacacttttggagagttggaagggatttttttctcctgacttgaacatagggtgactttttaatattgtattttactgtggattatctctttggaccgcgccggacttggcctcaggaaatcaaccaatgctgcggaaggcggctggtgcacaacgctctgctctacagaagggggtcccccaccctcttttccaattttttttttttggccttcctctccttccctccctcttcctccctctctctctctctctctccactacccccctctttcttccccactcggctcctctcccccctcgcgcccacagcgtttggtgttgattcgagcgggaagaggggggtgggtgggatcggtgggggagaccatgacctccagctacgggcacgttctggagcggcaaccggcgctgggcggccgcttggacagcccgggcaacctcgacaccctgcaggcgaaaaagaacttctccgtcagtcacctgctagacctggaggaagccggggacatggtggcggcacaggcggatgagaacgtgggcgaggctggccggagcctgctggagtcgccgggactcaccagcggcagcgacaccccgcagcaggacaatgaccagctgaactcagaagaaaaaaagaagagaaagcagcgaaggaataggacaaccttcaatagcagccagctgcaggctttggagcgtgtctttgagcggacacactatcctgatgcttttgtgcgagaagaccttgcccgccgggtgaacctcaccgaggcgagagtgcaggtgtggtttcagaaccgaagagccaagttccgcaggaatgagagagccatgctagccaataaaaacgcttccctcctcaaatcctactcaggagacgtgactgctgtggagcagcccatcgtacctcgtcctgctccgagacccaccgattatctctcctgggggacagcgtctccgtacagatcctcgtccctcccaagatgttgtttacacgaggggcttcataacggattctaacggaagacactgaaaagcgccatggctacttattctgccacatgtgccaacaatagccctgcacagggcatcaacatggccaacagcattgccaacctgagactgaaggccaaggaatatagtttacagaggaaccaggtgccaacagtcaactgaggaaaaaaaataattaaacaggcctaagaagaaatcaaaaaccataagacacctatcctgctctgttatttcttcatctgctggggggaaaaagtaaattacaaacaaacaaacaaagcagaactaaaatattgggaccatggcagagaaaagcaggagaggagcaaaatgaaaattagttaacaaatgttcctcctccctctgggataccaccaccacttgtttctgtgtgtgtttattttgtttttctttcattcatgctttgcttaatgtactccaggcttcttcagctaggttcagcccacccacccccatgattgta

SEQ ID NO: 16755 - DNA, 4284 bp, Homo sapiens
  source 1..4284: mol_type = unassigned DNA
tttttaatattgtattttactgtggattatctctttggaccgcgccggacttggcctcaggaaatcaaccaatgctgcggaaggcggctggtgcacaacgctctgctctacagaagggggtcccccaccctcttttccaattttttttttttggccttcctctccttccctccctcttcctccctctctctctctctctctccactacccccctctttcttccccactcggctcctctcccccctcgcgcccacagcgtttggtgttgattcgagcgggaagaggggggtgggtgggatcggtgggggagaccatgacctccagctacgggcacgttctggagcggcaaccggcgctgggcggccgcttggacagcccgggcaacctcgacaccctgcaggcgaaaaagaacttctccgtcagtcacctgctagacctggaggaagccggggacatggtggcggcacaggcggatgagaacgtgggcgaggctggccggagcctgctggagtcgccgggactcaccagcggcagcgacaccccgcagcaggacaatgaccagctgaactcagaagaaaaaaagaagagaaagcagcgaaggaataggacaaccttcaatagcagccagctgcaggctttggagcgtgtctttgagcggacacactatcctgatgcttttgtgcgagaagaccttgcccgccgggtgaacctcaccgaggcgagagtgcaggtgtggtttcagaaccgaagagccaagttccgcaggaatgagagagccatgctagccaataaaaacgcttccctcctcaaatcctactcaggagacgtgactgctgtggagcagcccatcgtacctcgtcctgctccgagacccaccgattatctctcctgggggacagcgtctccgtacagcgccatggctacttattctgccacatgtgccaacaatagccctgcacagggcatcaacatggccaacagcattgccaacctgagactgaaggccaaggaatatagtttacagaggaaccaggtgccaacagtcaactgaggaaaaaaaataattaaacaggcctaagaagaaatcaaaaaccataagacacctatcctgctctgttatttcttcatctgctggggggaaaaagtaaattacaaacaaacaaacaaagcagaactaaaatattgggaccatggcagagaaaagcaggagaggagcaaaatgaaaattagttaacaaatgttcctcctccctctgggataccaccaccacttgtttctgtgtgtgtttattttgtttttctttcattcatgctttgcttaatgtactccaggcttcttcagctaggttcagcccacccacccccatgattgtatgaagttttaaaaaaaactacagcagccaaagaaactatatatatatatatatatatatatatccagaatgattgcctctactgtcctcattgacttgtttgaaccttagtgccttaccctgtcctcttcccagttctctttatagaagctctaggagctttcgaaaagccaaagtctttctgaagaatctgtgctggacagacataattccctttctcattgtctccatctttgttggtcatggtaaggtttttccatcagcctctgaaaaaatagttgtgcacaacatctgctcactggactgtctgatccaatgtaattggctgcgtctggctaattctaagcactaaagtctacatctaagctatagatttaagcttgaagctacagattatatcactatcaccaccacccctcaccctatgcaatcaatcaatcaatcatcttaagttaaagatatttgttgtctttgaatgatttgctgtcacagactatttggtagaagaaatatttttcacctgagagaggaagagaaatttctctagtaacacaaagagtgagttctaaaaggcatgcccacatctctttcgtgccttaaggatagtgagatgcacacttatatatatactgtatatatttatatatttatatatatatttcatatatatatataatattgcaagcttaagtttgcaatttcccaaacaatacaaaaagcaaattacacaccctcaccactgttcttatctctatagtgatgaaacattaattagggatcttgctgcttttctttttctacacgaagttttcattaaagccacagaataattgatagggcagctgtttgagaacaggtcccattttcacattagggctttaaatgaattagaaactatttgaggctataaaaatgtccttgagtttggagcctgagctctggtgaaatgctgatacatctgatctatcatgggaattgcagttagagagagtaaggaataccatttagtcatctatccgttcttcacttagcaggaatatgaaagaaaggcacatgtttaagaggaatacctaaaggtttttctaaattccaacatttaaaaggcaattgtgggctatttttattttttaatattttgaaataaagtttagtgtctagggctgggagccaggactgatcttccatttctttttctttgttcccagccatgcttttgtaacttgccaggtggacttgaccaactacattaccatgctgtgcctcagtttacccatttgtaaaatgggattaataatacttacctacctcacaggggtgttgtgaggctctattcatttgctcctttattctttcctgtattctctgtatgtccagcactttgtagccatgggaggaaagggactataaaagtgtacaatgttaatggaatgatacggtacctgaaagccttgttttctagtaagaaaatgctaccttgctgtacatacttataaccttgtatttggaaatgagaaataggtttatattttcagatctctcaaaaatcacatcatttgaccaaagaataatttaagacacatagaacagatttttttaatttatattttcatcctgaccagcttagttctaataatttttagttgtgagtgattaaaaaactttggatcaattttggtcaaacatgccaactttgtagtctgagtgacaggcaaggatttttgggtttaagatgcacttttagcacacatttgtatttcccttggcatatcagattgagctaatggtgatgttatttcaatctaacagccaccaatctgaaattgtatttcaaatgttgattctgtagttctttaaataataatgaagctcatcttatacattttgctttcaccaattgattccttcttcttttagcccactattaaaacatttcttactgaatggttcatgtaggcttgctgaacagcacgcattacttgcttcctgaagagttcccccattcatccatttgtcccattagttgctgtggattatcaagttttgaaggaactgtacatcccaacagactgaaacattctaagtgaaatgagtataatccaagtaactggtgaactttggaggtttggagcttgaagagaatggctaagaagatttgaattatagggagggaacagaaatcatacatgaaaaggttttactgagaaggggaaaaccttagatagagggacatgtgaaacaaaatcatttgaaattttgattcagacatccatttccagtggcaaacagcaaagcctgaacccataaacccaaatgataggtgaagttgggtggttttatccaatgtctcaagcaagcaatgtctgggaatatcatagagtaacaagtgctggtcagccaaagaaacattcactgctggtgaaccaataccataagcatgtattatctaagcacttgatcaagaaatatacatgttgtacaagctctcaattttgttcatttattatcaaatttttaaaatacaagtttggtatgtgatttggaaaagatgccttctggatcttaagccagttgtcagtggaggtcctcagggctgcaaatgtcaagacataaccctgttcctcaccatcatgataccagatacaggtgaatacataggaactatctgcctgtgtcctcaatctcccttcaaacaagatgctgatttgtagggtacttggcaggttaaattaaaccagaagaggtgacttaataaaaaagggaatgacatttagggtataaagatctcataagaaatgtaatatgtaaattatatcttgctttatgttgtaaaatatacattgtttgcgctagaatagaaatgatttcttttcaataaaaagaaagaaggactctaccatgtcttttgttatata

SEQ ID NO: 16756 - DNA, 3501 bp, Homo sapiens
  source 1..3501: mol_type = unassigned DNA
tctttggaccgcgccggacttggcctcaggaaatcaaccaatgctgcggaaggcggctggtgcacaacgctctgctctacagaagggggtcccccaccctcttttccaattttttttttttggccttcctctccttccctccctcttcctccctctctctctctctctctccactacccccctctttcttccccactcggctcctctcccccctcgcgcccacagcgtttggtgttgattcgagcgggaagaggggggtgggtgggatcggtgggggagaccatgacctccagctacgggcacgttctggagcggcaaccggcgctgggcggccgcttggacagcccgggcaacctcgacaccctgcaggcgaaaaagaacttctccgtcagtcacctgctagacctggaggaagccggggacatggtggcggcacaggcggatgagaacgtgggcgaggctggccggagcctgctggagtcgccgggactcaccagcggcagcgacaccccgcagcaggacaatgaccagctgaactcagaagaaaaaaagaagagaaagcagcgaaggaataggacaaccttcaatagcagccagctgcaggctttggagcgtgtctttgagcggacacactatcctgatgcttttgtgcgagaagaccttgcccgccgggtgaacctcaccgaggcgagagtgcaggtgtggtttcagaaccgaagagccaagttccgcaggaatgagagagccatgctagccaataaaaacgcttccctcctcaaatcctactcaggagacgtgactgctgtggagcagcccatcgtacctcgtcctgctccgagacccaccgattatctctcctgggggacagcgtctccgtacaggtgaatgactggcccactctcccttgctccacttccacatgtttctcagcggtcggtcatgtttcaagctgcttgtgcagctcaccgacatttcttactgggttaatctcttcagagacattcaacttgctgacatccccacattttcccaggagattataagctgccccagcagcagggtttggggcagaagtgagaggggcaggctatctcaccaatctcctcttggactcaggaactcttgcaaaggtttcaaagatgaggaagaatctaaaagaaaagatcattaagctgtgcccagtgttcctcttgcaacaattctggaacaaaactttaccctgtttccaaatttaagctaaattcgttgtattatgcaaatgtagggacgtaacttgtaaaactccaagtatagggccaaaggcaaactttgcagtaaaactggctttgaattaaaaaaaggaagaaggaaggaaggaagaaagaaaggaaagaaggaaggaaggagagagacgagagggactatgacagagagaggaggaaagaaaagccaagttcattctgatcactttcatggccaaggttctttgttagtaggtgtgaatttcttataatgccaaatgccttcctaatctattgctaattcttgtctacttgtctgaagttttctctggggatcagtttgtgtgtatttgtgtgtgtgcgtgtgtgtgtgtgtctgtgtgtgtttcttttaaataaaaaaggaatgtataatttacactaaacttttatattaaaaagttgaacatttttaaagaaacaaatatcagagtactatttcaatctcataaagaggcttttaacctcccattattatgctgttcagaaaatataggctgccagaagggaagctgagacacaaattcctaacccattggattagtctagagtgactttctttgaaaatatacctgagtactctgagaaaccaggccaagcctacgtgttctccctggctgatttcagtggaggaagaactattcaaaaattcatttattatgcttttgtttacctttttattgtcaaggttaattattggtttaaggagaggttttaaatgaaatataggagattatgtctcagatgaagttgaatttctgacatgaaatgctacatttttgaaatgcaagtgtttttcaaaggttcttagctttaatcaaagcaaaaagcctcatctaaaagtttctttctgttccaaatcagttcctttagagaaacatggtaaatgcacttggaaatttgttttaatcccctgttataaaattagcctgaattctttttgtcttagcacatagagaccctacatctaggaaagtcttattctgggccctattgcactcagatgtggtgtgccttactgatcttgaaacattagttatatctgtgtgccctattttaaatttaaactcctctcctataagatttactacaaatacattttttgaagaccactgtaaaatcacatattctctaatattttaaataaatgaaaggctgctttatttctcttataaacattggtataagagaaatttggtgtgttcatgaacacgctaaatggcttggaaaatgggtgtggttcaaagcctgatgcttcaagatctctggtttgaatttggtcacaaccaggaagtattgcccctttttctgtctgggtcctccataggaacttttcataccagccataaacaatccagatggctgccacgtggtccttaccagtgagaggcgtcacacagcacacactgcatgaatggggatgaaatcattcctgaattaatatagggttatattacttggacctcagccatttgagcctcagtgtctgcatcatatgtgtttagtatatggacatctaactgaaattattaacgtggcaatttatgcgtgccttttttggaaatattctattttaatggaaagaattatgtagaaatactggatacatttttaaaaacatccataattcaccatcttgacataactagtatattcatttttgtgattagagttcaatgttttatatagatgtagctttagtgtatatattattttgtattctgctcttttcacttaaagtcatatgacctagtacattttactcatttcttggtatgcttttatatcatttctctcttagaaattggatttgtaaaaattaatttagaaaatcataaaatctgttcatattctgtatgaagaataaattaatcttcagatataagcagaaaagtgatgttaaaacaataatttaatcaataataatgttttttgatccaatgttgactgaagtgtttatattttggttgatttctaaaagtagcaaaaagctattctgttatttggagaattttctgctatgtttagaaccaaactatgttatgatttcacactttgaagcttgataggaaatattgttaaggaaataaaaaagaaaaacaagtgatccaaagcaaaggaaatgatagacttttgtgttatgaaaaattaactcactgttcttgttggtactattatgtcaagttagttatctcacatgtgacactcattaaaaggcatttctcttggttaattcttggaa

SEQ ID NO: 16757 - DNA, 586 bp, Homo sapiens
  source 1..586: mol_type = unassigned DNA
agaatttatgtttattaggcactaattctgggccaattctcaaaactatcctgtgtggtttcagaaccgaagagccaagttccgcaggaatgagagagccatgctagccaataaaaacgcttccctcctcaaatcctactcaggagacgtgactgctgtggagcagcccatcgtacctcgtcctgctccgagacccaccgattatctctcctgggggacagcgtctccgtacagcgccatggctacttattctgccacatgtgccaacaatagccctgcacagggcatcaacatggccaacagcattgccaacctgagactgaaggccaaggaatatagtttacagaggaaccaggtgccaacagtcaactgaggaaaaaaaataattaaacaggcctaagaagaaatcaaaaaccataagacacctatcctgctctgttatttcttcatctgctggggggaaaaagtaaattacaaacaaacaaacaaagcagaactaaaatattgggaccatggcagagaaaagcaggagaggagcaaaatgaaaattagttaacaaatgttcctcctccctctgggataccac

SEQ ID NO: 16758 - DNA, 464 bp, Homo sapiens
  source 1..464: mol_type = unassigned DNA
tgggccaattctcaaaactatcctgtgtggtttcagaaccgaagagccaagttccgcaggaatgagagagccatgctagccaataaaaacgcttccctcctcaaatcctactcaggagacgtgactgctgtggagcagcccatcgtacctcgtcctgctccgagacccaccgattatctctcctgggggacagcgtctccgtacagatcctcgtccctcccaagatgttgtttacacgaggggcttcataacggattctaacggaagacactgaaaagcgccatggctacttattctgccacatgtgccaacaatagccctgcacagggcatcaacatggccaacagcattgccaacctgagactgaaggccaaggaatatagtttacagaggaaccaggtgccaacagtcaactgaggaaaaaaaataattaaacaggcctaagaagaaatcaaaaaccataa

SEQ ID NO: 16759 - DNA, 329 bp, Homo sapiens
  source 1..329: mol_type = unassigned DNA
tggtcatggtgctgcctgacatctgctgaacgcatttggcttatttctccctttcacactttcaaaaatagatcctcgtccctcccaagatgttgtttacacgaggggcttcataacggattctaacggaagacactgaaaagcgccatggctacttattctgccacatgtgccaacaatagccctgcacagggcatcaacatggccaacagcattgccaacctgagactgaaggccaaggaatatagtttacagaggaaccaggtgccaacagtcaactgaggaaaaaaaataattaaacaggcctaagaagaaatcaaaaaccataa

SEQ ID NO: 16760 - DNA, 362 bp, Homo sapiens
  source 1..362: mol_type = unassigned DNA
tcagcagtgaagtcctcaagtgaggaatattattggtaaccagagctgcaagaaagcatgtccactaaatgaagcatagtgtgatactaatctagagcagggctcttcagagattgctgtgcacaggaaacatctgggatcgcgtgactgtgcaaactctgattcactaattccagcgccatggctacttattctgccacatgtgccaacaatagccctgcacagggcatcaacatggccaacagcattgccaacctgagactgaaggccaaggaatatagtttacagaggaaccaggtgccaacagtcaactgaggaaaaaaaataattaaacaggcctaagaagaaatcaaaaaccataa

SEQ ID NO: 16761 - DNA, 1124 bp, Homo sapiens
  source 1..1124: mol_type = unassigned DNA
ggcctctgtcacccccgggcccacagcacagcccagggccatgctcctgttctcagtgttgctgctcctgtccctggtcacgggaactcagctcggtccacggactcctctcccagaggctggagtggctatcctaggcagggctaggggagcccaccgccctcagccccctcatccccccagcccagtcagtgaatgtggtgacagatctattttcgagggaagaactcggtattccagaatcacaggggggatggaggcggaggtgggtgagtttccgtggcaggtgagtattcaggcaagaagtgaacctttctgtggcggctccatcctcaacaagtggtggattctcactgcggctcactgcttatattccgaggagctgtttccagaagaactgagtgtcgtgctggggaccaacgacttaactagcccatccatggaaataaaggaggtcgccagcatcattcttcacaaagactttaagagagccaacatggacaatgacattgccttgctgctgctggcttcgcccatcaagctcgatgacctgaaggtgcccatctgcctccccacgcagcccggccctgccacatggcgcgaatgctgggtggcaggttggggccagaccaatgctgctgacaaaaactctgtgaaaacggatctgatgaaagcgccaatggtcatcatggactgggaggagtgttcaaagatgtttccaaaacttaccaaaaatatgctgtgtgccggatacaagaatgagagctatgatgcctgcaagggtgacagtggggggcctctggtctgcaccccagagcctggtgagaagtggtaccaggtgggcatcataagctggggaaagagctgtggagagaagaacaccccagggatatacacctcgttggtgaactacaacctctggatcgagaaagtgacccagctagagggcaggcccttcaatgcagagaaaaggaggacttctgtcaaacagaaacctatgggctccccagtctcgggagtcccagagccaggcagccccagatcctggctcctgctctgtcccctgtcccatgtgttgttcagagctattttgtactgataataaaatagaggctattctttca

SEQ ID NO: 16762 - DNA, 1005 bp, Homo sapiens
  source 1..1005: mol_type = unassigned DNA
ggcctctgtcacccccgggcccacagcacagcccagggccatgctcctgttctcagtgttgctgctcctgtccctggtcacgggaactcagctcggtccacggactcctctcccagaggctggagtggctatcctaggcagggctaggggagcccaccgccctcagccccctcatccccccagcccagtcagtgaatgtggtgacagatctattttcgagggaagaactcggtattccagaatcacaggggggatggaggcggaggtgggtgagtttccgtggcaggtgagtattcaggcaagaagtgaacctttctgtggcggctccatcctcaacaagtggtggattctcactgcggctcactgcttatattccgaggagctgtttccagaagaactgagtgtcgtgctggggaccaacgacttaactagcccatccatggaaataaaggaggtcgccagcatcattcttcacaaagactttaagagagccaacatggacaatgacattgccttgctgctgctggcttcgcccatcaagctcgatgacctgaaggtgcccatctgcctccccacgcagcccggccctgccacatggcgcgaatgctgggtggcaggttggggccagaccaatgctgctgacaaaaactctgtgaaaacggatctgatgaaagcgccaatggtcatcatggactgggaggagtgttcaaagatgtttccaaaacttaccaaaaatatgctgtgtgccggatacaagaatgagagctatgatgcctgcaagcaaagctattttcccactttacaaagaatgaacaccggaagctctcaaacaaagccgcctgggtctcacacctttcatctgcaaaactgatgctttgctctttcttctacatggagccatttttggggcagaaaacatacccttgggcatagccttgagttgaaaatctttgagggtgttttctgtccaaatgactgaaaaaatgaataaaagcctccccattt

SEQ ID NO: 16763 - DNA, 2374 bp, Homo sapiens
  source 1..2374: mol_type = unassigned DNA
ttggaagcctgctcctcccagcccggtccccagctcacactggatgctgactaagtgtttccccttttcctttccactctctttctttccaccagaatgtggtgacagatctattttcgagggaagaactcggtattccagaatcacaggggggatggaggcggaggtgggtgagtttccgtggcaggtgagtattcaggcaagaagtgaacctttctgtggcggctccatcctcaacaagtggtggattctcactgcggctcactgcttatattccgaggagctgtttccagaagaactgagtgtcgtgctggggaccaacgacttaactagcccatccatggaaataaaggaggtcgccagcatcattcttcacaaagactttaagagagccaacatggacaatgacattgccttgctgctgctggcttcgcccatcaagctcgatgacctgaaggtgcccatctgcctccccacgcagcccggccctgccacatggcgcgaatgctgggtggcaggttggggccagaccaatgctggtatgtgactgctcagcttcccctggggaaaaagccactgcaatgtgaaggagaggggaggaagctaaggaaggagtgaggacaagacttgcattggagcagattcccgctcagtggagtctcacagtgcccaaagtttagctccttttgggtgccgaaaccccaagctgacaaaaactctgtgaaaacggatctgatgaaagcgccaatggtcatcatggactgggaggagtgttcaaagatgtttccaaaacttaccaaaaatatgctgtgtgccggatacaagaatgagagctatgatgcctgcaagacccagcgctgccgcgtgcttctttcctctggattcgaatttcctgggccaccaccgaagatgcaaaggcaaattcaggaaatgcaaatccttaaatggaagcttgggcttttcctggggacctacagcctggctgagtgttctccagaaagagactgaagaaaagcttcctggttgggcgaggtggctcatgcctgtaatcccagcactttgggaggctgagatgggtggatcacctaaggccaggagttcaagaccagtctggccaccacggtgaaaccccgtctctactttaaaaaatacaaaagttagccgggtgtggtggcgggcacctgtaatcccagccaatcgggatcctgaggcaggataacggcttgaacccaggaggtggaggttgcaatgagcggagatcacgccactgcactccggcctgggcatcaagagtgaactctatctccaaaaaaaaagaaaaaagaaaaaaagcttcctagttatcctttttcccactctaaccctactcctccagaggtcctacagctacaatgtctagaagccattttttcagaagctcctaagaacctgggactcaggcaggcccagtggagggtggccagctggagtgttcaccatctcaggacatcaccactgtccactccactttcctgctcaccgccctctgacttctgtgtgggggccctcccttttcacccactctccaatttgcatagttctggatggctggccctttgctgggggctggggtgggcatagaactcgagcctggcctagaaggacattgattttggccacagggatgggagcagcaatgggctgtgggctttataggtcacaagagcaagaccaagacttctgctggagttatcaggaacaagactgactgactctcctgggactcccaacatggtagggtgcatgttgaaggtactgctcatgtgaaggctgctggggagtgtggtggttccttttgtctgtcaacttggaggggatctgtggatgagattgatgtttaaattggtaaactgtgacgaagcagattgccctccataatggggtgagcctcatccaatccgttgaaggcctgagtaggacaaaaatgattggcctccccacacaagagggaattcctcagccgcccaccttcagacttcatctgcattgtcagctcttctggggctctgcctgccagtctctaaaccagagcagcaccaccagctctcctgcatctcgagcctgccagtccacaccccaggtttgagcttgccagtctctgtaatcagggacagaaaactgactgtgtgctctgttgacccagcctcaacaaacaggacatggtggcctgcacctgtgcttctcagaccatctgtgaggaaaaagaccagggcttttggtttttggttttgcttcgaaatttccaacttatttcaaaccaatactttcataaaacataaaattgaactactcgaaaaatgaaatcgaaaatgaacaaataaaatgcaagcccaca

SEQ ID NO: 16764 - DNA, 4513 bp, Homo sapiens
  source 1..4513: mol_type = unassigned DNA
ctcgctcagcctctccacatcgcggctccggcacctgaagggacgcgggcgggcgcgggcagctccgaccggcggcggcggggcgggacaggcagcccggcggcctccgatggccccgccgtgagaggccggacccgcggcggggaccagcagcggtctagaggagtcccaggagcagccaggacaggcggaagcagtggctgccatggaggaggacaagctcttatctgcagtgcctgaggaaggcgatgccacccgtgaccccggtccagagcctgaagaggagccaggggtccggaatgggatggccagtgagggcctgaacagcagcctctgcagcccagggcacgagcgaaggggcaccccagcggacactgaggaacccacgaaggacccagatgtggccttccatggcctcagccttggcctctctctcaccaatggcctagccctggggccagacttgaacattctggaagattcagcggagtccaggccctggagggctggcgtgctggcagagggggacaatgcttccaggagcctctacccagatgctgaggaccctcagctggggttggatggtcccggggagccagatgtgcgggatggcttcagcgccacgtttgagaagattctggagtcagagctgctgcggggcacccagtacagcagcctcgactccctagacgggctgagcctcacggatgagagcgacagctgcgtcagcttcgaggcccccctcacacccctcatccagcagcgggcccgtgacagccctgagccaggggctgggttgggcattggggacatggcgtttgagggggacatgggggcagctggtggtgatggggagctgggcagccccctgcggcgctccatctccagcagccgctctgagaatgtcctgagccgcctgtctctcatggccatgcccaatggattccatgaagatggccctcagggcccagggggggatgaggatgatgatgaggaggacacggacaagttgctgaactcagccagtgaccccagcctgaaggatggcctgtcagactcagactctgagctcagcagctcggaggggttggagcctggtagtgcagaccctctggccaacgggtgccagggggtcagtgaagctgctcatcggctggcacgccgtctctaccacctcgagggcttccagcgctgtgatgtggcccggcagctgggcaagaacaacgagtttagcaggctggtggccggggagtacctcagtttcttcgacttctcgggcttgactctggacggagcactcagaacattcttgaaggccttcccgctgatgggggagacacaagagcgtgagcgggtcctcacacacttctcccgccggtactgccagtgcaaccctgatgacagcacttcggaagatgggatccacacgctcacctgtgccctgatgctgctcaacacggacctgcacggccacaacattggcaaaaagatgtcctgtcagcaattcattgccaacttggaccagctgaatgatggccaagactttgccaaagacctgctgaagaccctttacaactccatcaagaatgaaaagctggaatgggccattgatgaggatgagctgaggaaatccctgtctgagctggtggatgacaagttcgggacaggcacgaagaaggtgacgcgaatcctggatggtggcaaccccttcctggatgtcccacaggcgctcagtgccaccacctacaagcacggcgtcctgacccggaagactcacgctgacatggatggcaagaggacgccccgtgggaggcgtggctggaagaaattctacgcagtgctcaaagggaccatcctgtacctgcagaaggatgagtacaggcctgacaaagctctatcggagggtgacctgaagaacgccattcgcgtgcatcacgctctggccaccagggcctctgactacagcaagaagtccaacgtgctgaagcttaagacagccgactggagggtattcctcttccaggcaccgagcaaggaagaaatgctgtcctggatcctcaggatcaacctggtggcagccatcttctctgccccggccttcccagccgctgtcagctccatgaagaagttctgtcggcccctgctgccctcctgcaccacccgcctctgccaggaggagcaactgcggtctcatgagaataagttgaggcagctgactgcggagctggccgaacacaggtgtcacccagtcgagaggggcatcaagtccaaggaggccgaggagtaccggttgaaggagcactatctcaccttcgagaaaagccgttatgagacctatatccacctcctggctatgaaaatcaaagtgggctcagatgatctggagcggattgaggcccggctggccactctggaaggggatgacccttctctccggaagacacattcaagccctgccctcagccagggccatgtgactggcagcaaaaccacaaaggatgccactgggcctgatacttagctgacatggatttgcagaccccagggtgggcagatgtctccagtggggtcagtgagcacaattccagccaggggccacttggaccaagctccagtcagttgatgggcagctagaggggtgcagaaagcctgtgggcccaggagatggagatgccgtttgtggcgttgatctccttgcgtccttgggcatctccgggcatcagaccctctccctggcccttgttttcctctccaccatggagcctcattttgtaggccagttgtgtgcatgctctagacaccacctcgctggagaagctggaagggctgttgtcttcccaggtctttctcttctcatcaagctcctctcctcatcttttttgtgtgtgagggcaggtcttgactctaggtctcagctggaaccccaccctttctcctcctccttcctctgagttgaccagcagcaggtctgccgaccaccagcaccatcctctcctcccagcagcctccagaaccatgcccaggtctcctgcctcacatcacaataatctgggacccaggcttgtgccctttcagtgtaaagctgactccatcacatgtgcatccacttcttttcatccattgagatcacactgcctcctttttatacagacacaaatatacatctataagaataatatatacataaggaacccctgaaagatggttttggaactggaatcagttagaggatgaaatcagataaaggaaaagcctattttggagcttcccctgttaggaaggatggctgcacctggccccctggcattcctgacgctctaggagggaagggggaggcagtgctggcctcccttgccctgtttttccctcttccagctgacctgtgacttatactgctcttaccgatgatacttttggaaaaaatagagcgtgtatgcaccgccccgtttgtcccatggatatcctggggtgtgagtcggatgggaccacggccctgtttatatttgggtctttatgttggtgctgccaggtctctgagctccagaggtggcctcttggacagatctactgctataggaataaaagacactctgtctcgcaaatggctgcttgtcaacaagcccaaagatgcttgtcggaggacggttatggaagcccttaattcttggttgtgggaaaaggtggaatgacaagttattgattgtttttctgtcgctatttctttcatttgtctagtgaatcagaaaggcttagccaaggccacatctgggaagagtggagaaatttgccacttgacgatcacggattagctagcacctttaagccctgcatttctccaactgacaagtgggtgggggtgatggcacattcagtgtggctatgaagagcgaatcctctctattgtttaaatagattactgtagtttggccaggaatttggcgtcagtggtaacacacttagttaataaaataagccaggcttgcaactaagtatctaactttacaggcccactcacatttgaggcaaggggctattgagtatgtggagagatgtagtgatttaaattcagattatttaagttggatcagctgaagtgtgttttagacccaaaccatctggccccttcgttttgctcagaggaagtaaatgttcacttaaatgaaattgaaaacgccatgtggcaccacaaaagagctctctgtactttccccatgctgcctcaaaagttctgtgagtttcggggtcagtgtcccacccttcacttcccgagggcgggtgagtggagagcagagccaggagctctggcagctgtggacagatgtgcttcctgagcatgggttgtgcctcccatcagtaaaaaaatgtttagttcacttccttaattgtataattatttatttgtaaattatatacatgtactactgtactaaaatattatgtacattataaaacatacacaaaaatagaaatttaaaaaagatgagatgaaaataaatctaagtcaaagttctaa

SEQ ID NO: 16765 - DNA, 1584 bp, Homo sapiens
  source 1..1584: mol_type = unassigned DNA
ctgttgcgtggaagataaggcggcgcgggaagtggacacagggtgggctggagatctaactggactctcgctcctgctggctggacatggaggatttggaggaagatgtaaggtttattgtggatgagaccttggactttggggggctgtcaccatctgacagccgtgaggaggaagacataacagtgttggtgactccagagaaaccacttcgacggggcctctcccaccgaagtgacccaaatgcagtggcacctgccccccagggtgtgaggctcagcctaggccccctcagtccagagaagctggaggagatcctcgatgaggccaaccggctggccgctcagctggagcagtgtgccctgcaggatcgggagagcgcaggcgagggcctggggcctcgccgagtgaagcccagtcctcggcgggagacctttgtgctgaaggatagtcctgtccgagacctgctgcccactgtgaactctttgacgcggagcaccccctccccaagcagcctgacgcctcgactccggagtaatgataggaaggggtcagtcagggctctccgggctacatctggaaagaggccctccaacatgaagagggagtcacccacttgcaatctgttccctgcatccaaaagcccagcatcttctcctcttacccgatcgactcccccagtccgggggagagccgggcccagtgggagagcagcagccagtgaggagaccagagcagccaagttgcgggcctgccagccgaatgccactcaccagccggagtgtgccacctggcagaggtgccctacctccggattctctgtcaactcgaaaagggcttccaagaccaagcactgcaggacacagagtgcgggaaagtggacacaaggttcctgtttcccagcgactaaatcttcctgtcatgggtgccactcgcagcaatctgcagccccccaggaaagtggcagtcccaggacctaccaggtaaagagatcaggacagcaagcaagacttcagtagcaaaccactacagtcagtacctggactcgcctctacccagcagaccctgactccagcagattctggcccagggacaggaggaagagatgccaccagggctggtctcccaggagtagagaccatgggaaatggggtggattaggattgagctggagaagacttaaactctctgggttgaaagaagattaggggaaaagaggtcaccttccagcagtgaaatgaacaaatagaagatgagaagtacaggcaagtggtttgtctttatccacccccactgttgtggtcagccccagagaattttatcttcttccttggcattggttcactggacatttccacgtgagcggcctccgtagctaacctccctgccctctgaggagccatcttcctgaatcgcattctctactggactctggcctgcttggagaggtggcagcaggcacctggtcttcagaaattgtttcctgtgaattctgtgactcctaataggccagtttgtgataagcttactctatgagtcttcatttttctaaaataaagtgaatgtatttttatattctctgta

SEQ ID NO: 16766 - DNA, 1730 bp, Homo sapiens
  source 1..1730: mol_type = unassigned DNA
gggagaaagcctgttgcgtggaagataaggcggcgcgggaagtggacacagggtgggctggaggtgtgcttcgcgtgtgatgccaggggagtggaaagatctaactggactctcgctcctgctggctggacatggaggatttggaggaagatgtaaggtttattgtggatgagaccttggactttggggggctgtcaccatctgacagccgtgaggaggaagacataacagtgttggtgactccagagaaaccacttcgacggggcctctcccaccgaagtgacccaaatgcagtggcacctgccccccagggtgtgaggctcagcctaggccccctcagtccagagaagctggaggagatcctcgatgaggccaaccggctggccgctcagctggagcagtgtgccctgcaggatcgggagagcgcaggcgagggcctggggcctcgccgagtgaagcccagtcctcggcgggagacctttgtgctgaaggatagtcctgtccgagacctgctgcccactgtgaactctttgacgcggagcaccccctccccaagcagcctgacgcctcgactccggagtaatgataggaaggggtcagtcagggctctccgggctacatctggaaagaggccctccaacatgaagagggagtcacccacttgcaatctgttccctgcatccaaaagcccagcatcttctcctcttacccgatcgactcccccagtccgggggagagccgggcccagtgggagagcagcagccagcccacccacccccatcagatccgtcctggccccacagccttctaccagcaactctcaacgcctgccccggccgcagggagcagctgctaaatcttccagtcaactgcccattccctcggccatccccaggcctgccagccgaatgccactcaccagccggagtgtgccacctggcagaggtgccctacctccggattctctgtcaactcgaaaagggcttccaagaccaagcactgcaggacacagagtgcgggaaagtggacacaaggttcctgtttcccagcgactaaatcttcctgtcatgggtgccactcgcagcaatctgcagccccccaggaaagtggcagtcccaggacctaccaggtaaagagatcaggacagcaagcaagacttcagtagcaaaccactacagtcagtacctggactcgcctctacccagcagaccctgactccagcagattctggcccagggacaggaggaagagatgccaccagggctggtctcccaggagtagagaccatgggaaatggggtggattaggattgagctggagaagacttaaactctctgggttgaaagaagattaggggaaaagaggtcaccttccagcagtgaaatgaacaaatagaagatgagaagtacaggcaagtggtttgtctttatccacccccactgttgtggtcagccccagagaattttatcttcttccttggcattggttcactggacatttccacgtgagcggcctccgtagctaacctccctgccctctgaggagccatcttcctgaatcgcattctctactggactctggcctgcttggagaggtggcagcaggcacctggtcttcagaaattgtttcctgtgaattctgtgactcctaataggccagtttgtgataagcttactctatgagtcttcatttttctaaaataaagtgaatgtatttttatattctctgta

SEQ ID NO: 16767 - DNA, 1717 bp, Homo sapiens
  source 1..1717: mol_type = unassigned DNA
ctgattcccgggactaggttgcgggagaaagcctgttgcgtggaagataaggcggcgcgggaagtggacacagggtgggctggagatctaactggactctcgctcctgctggctggacatggaggatttggaggaagatgtaaggtttattgtggatgagaccttggactttggggggctgtcaccatctgacagccgtgaggaggaagacataacagtgttggtgactccagagaaaccacttcgacggggcctctcccaccgaagtgacccaaatgcagtggcacctgccccccagggtgtgaggctcagcctaggccccctcagtccagagaagctggaggagatcctcgatgaggccaaccggctggccgctcagctggagcagtgtgccctgcaggatcgggagagcgcaggcgagggcctggggcctcgccgagtgaagcccagtcctcggcgggagacctttgtgctgaaggatagtcctgtccgagacctgctgcccactgtgaactctttgacgcggagcaccccctccccaagcagcctgacgcctcgactccggagtaatgataggaaggggtcagtcagggctctccgggctacatctggaaagaggccctccaacatgaagagggagtcacccacttgcaatctgttccctgcatccaaaagcccagcatcttctcctcttacccgatcgactcccccagtccgggggagagccgggcccagtgggagagcagcagccagcccacccacccccatcagatccgtcctggccccacagccttctaccagcaactctcaacgcctgccccggccgcagggagcagctgctaaatcttccagtcaactgcccattccctcggccatccccaggcctgccagccgaatgccactcaccagccggagtgtgccacctggcagaggtgccctacctccggattctctgtcaactcgaaaagggcttccaagaccaagcactgcaggacacagagtgcgggaaagtggacacaaggttcctgtttcccagcgactaaatcttcctgtcatgggtgccactcgcagcaatctgcagccccccaggaaagtggcagtcccaggacctaccaggtaaagagatcaggacagcaagcaagacttcagtagcaaaccactacagtcagtacctggactcgcctctacccagcagaccctgactccagcagattctggcccagggacaggaggaagagatgccaccagggctggtctcccaggagtagagaccatgggaaatggggtggattaggattgagctggagaagacttaaactctctgggttgaaagaagattaggggaaaagaggtcaccttccagcagtgaaatgaacaaatagaagatgagaagtacaggcaagtggtttgtctttatccacccccactgttgtggtcagccccagagaattttatcttcttccttggcattggttcactggacatttccacgtgagcggcctccgtagctaacctccctgccctctgaggagccatcttcctgaatcgcattctctactggactctggcctgcttggagaggtggcagcaggcacctggtcttcagaaattgtttcctgtgaattctgtgactcctaataggccagtttgtgataagcttactctatgagtcttcatttttctaaaataaagtgaatgtatttttatattctctgta

SEQ ID NO: 16768 - DNA, 1826 bp, Homo sapiens
  source 1..1826: mol_type = unassigned DNA
gggcctgagagattcgaaaggagccccgccccctcggagctgattcccgggactaggttgcgggagaaagcctgttgcgtggaagataaggcggcgcgggaagtggacacaggatctaactggactctcgctcctgctggctggacatggaggatttggaggaagatgtaaggtttattgtggatgagaccttggactttggggggctgtcaccatctgacagccgtgaggaggaagacataacagtgttggtgactccagagaaaccacttcgacggggcctctcccaccgaagtgacccaaatgcagtggcacctgccccccagggtgtgaggctcagcctaggccccctcagtccagagaagctggaggagatcctcgatgaggccaaccggctggccgctcagctggagcagtgtgccctgcaggatcgggagagcgcaggcgagggcctggggcctcgccgagtgaagcccagtcctcggcgggagacctttgtgctgaaggatagtcctgtccgagacctgctgcccactgtgaactctttgacgcggagcaccccctccccaagcagcctgacgcctcgactccggagtaatgataggaaggggtcagtcagggctctccgggctacatctggaaagaggccctccaacatgaagagggagtcacccacttgcaatctgttccctgcatccaaaagcccagcatcttctcctcttacccgatcgactcccccagtccgggggagagccgggcccagtgggagagcagcagccagtgaggagaccagagcagccaagttgcgggtgagtgggagtggggagtttgtgggattgaccctgaaatttctccacccctctccaccaggcccacccacccccatcagatccgtcctggccccacagccttctaccagcaactctcaacgcctgccccggccgcagggagcagctgctaaatcttccagtcaactgcccattccctcggccatccccaggcctgccagccgaatgccactcaccagccggagtgtgccacctggcagaggtgccctacctccggattctctgtcaactcgaaaagggcttccaagaccaagcactgcaggacacagagtgcgggaaagtggacacaaggttcctgtttcccagcgactaaatcttcctgtcatgggtgccactcgcagcaatctgcagccccccaggaaagtggcagtcccaggacctaccaggtaaagagatcaggacagcaagcaagacttcagtagcaaaccactacagtcagtacctggactcgcctctacccagcagaccctgactccagcagattctggcccagggacaggaggaagagatgccaccagggctggtctcccaggagtagagaccatgggaaatggggtggattaggattgagctggagaagacttaaactctctgggttgaaagaagattaggggaaaagaggtcaccttccagcagtgaaatgaacaaatagaagatgagaagtacaggcaagtggtttgtctttatccacccccactgttgtggtcagccccagagaattttatcttcttccttggcattggttcactggacatttccacgtgagcggcctccgtagctaacctccctgccctctgaggagccatcttcctgaatcgcattctctactggactctggcctgcttggagaggtggcagcaggcacctggtcttcagaaattgtttcctgtgaattctgtgactcctaataggccagtttgtgataagcttactctatgagtcttcatttttctaaaataaagtgaatgtatttttata

SEQ ID NO: 16769 - DNA, 1870 bp, Homo sapiens
  source 1..1870: mol_type = unassigned DNA
ggtttggcgcacttggggctgctgggcggctggctgactcgggcctctatgacactattggtagcggggagagaagggagaagctggagttagatttcagggtgttaagaagaaggataagtggatttgctgcatctccatcctggcatcatttctgatgtccgtaaatgctaaaggcctattaggccccatagaaccaggtatctcatcgcccagaggccacatctcacagccagcatgggcatcggggcctagggtcatgtccctggctctgttgtggggcttttatgcagtctcccttgcataatctcctgttcccttttgcatgggcatgatgcctggtttgtttcctgtctcagccgtgaggaggaagacataacagtgttggtgactccagagaaaccacttcgacggggcctctcccaccgaagtgacccaaatgcagtggcacctgccccccagggtgtgaggctcagcctaggccccctcagtccagagaagctggaggagatcctcgatgaggccaaccggctggccgctcagctggagcagtgtgccctgcaggatcgggagagcgcaggcgagggcctggggcctcgccgagtgaagcccagtcctcggcgggagacctttgtgctgaaggatagtcctgtccgagacctgctgcccactgtgaactctttgacgcggagcaccccctccccaagcagcctgacgcctcgactccggagtaatgataggaaggggtcagtcagggctctccgggctacatctggaaagaggccctccaacatgaagagggagtcacccacttgcaatctgttccctgcatccaaaagcccagcatcttctcctcttacccgatcgactcccccagtccgggggagagccgggcccagtgggagagcagcagccagcccacccacccccatcagatccgtcctggccccacagccttctaccagcaactctcaacgcctgccccggccgcagggagcagctgctaaatcttccagtcaactgcccattccctcggccatccccaggcctgccagccgaatgccactcaccagccggagtgtgccacctggcagaggtgccctacctccggattctctgtcaactcgaaaagggcttccaagaccaagcactgcaggacacagagtgcgggaaagtggacacaaggttcctgtttcccagcgactaaatcttcctgtcatgggtgccactcgcagcaatctgcagccccccaggaaagtggcagtcccaggacctaccaggtaaagagatcaggacagcaagcaagacttcagtagcaaaccactacagtcagtacctggactcgcctctacccagcagaccctgactccagcagattctggcccagggacaggaggaagagatgccaccagggctggtctcccaggagtagagaccatgggaaatggggtggattaggattgagctggagaagacttaaactctctgggttgaaagaagattaggggaaaagaggtcaccttccagcagtgaaatgaacaaatagaagatgagaagtacaggcaagtggtttgtctttatccacccccactgttgtggtcagccccagagaattttatcttcttccttggcattggttcactggacatttccacgtgagcggcctccgtagctaacctccctgccctctgaggagccatcttcctgaatcgcattctctactggactctggcctgcttggagaggtggcagcaggcacctggtcttcagaaattgtttcctgtgaattctgtgactcctaataggccagtttgtgataagcttactctatgagtcttcatttttctaaaataaagtgaatgtattttta

SEQ ID NO: 16770 - DNA, 1710 bp, Homo sapiens
  source 1..1710: mol_type = unassigned DNA
agaaagcctgttgcgtggaagataaggcggcgcgggaagtggacacaggctgcgagccttgggcagaatggatacctgaggaaaggtatggtttctctccagctcagatctaactggactctcgctcctgctggctggacatggaggatttggaggaagatgtaaggtttattgtggatgagaccttggactttggggggctgtcaccatctgacagccgtgaggaggaagacataacagtgttggtgactccagagaaaccacttcgacggggcctctcccaccgaagtgacccaaatgcagtggcacctgccccccagggtgtgaggctcagcctaggccccctcagtccagagaagctggaggagatcctcgatgaggccaaccggctggccgctcagctggagcagtgtgccctgcaggatcgggagagcgcaggcgagggcctggggcctcgccgagtgaagcccagtcctcggcgggagacctttgtgctgaaggatagtcctgtccgagacctgctgcccactgtgaactctttgacgcggagcaccccctccccaagcagcctgacgcctcgactccggagtaatgataggaaggggtcagtcagggctctccgggctacatctggaaagaggccctccaacatgaagagggagtcacccacttgcaatctgttccctgcatccaaaagcccagcatcttctcctcttacccgatcgactcccccagtccgggggagagccgggcccagtgggagagcagcagccagcccacccacccccatcagatccgtcctggccccacagccttctaccagcaactctcaacgcctgccccggccgcagggagcagctgctaaatcttccagtcaactgcccattccctcggccatccccaggcctgccagccgaatgccactcaccagccggagtgtgccacctggcagaggtgccctacctccggattctctgtcaactcgaaaagggcttccaagaccaagcactgcaggacacagagtgcgggaaagtggacacaaggttcctgtttcccagcgactaaatcttcctgtcatgggtgccactcgcagcaatctgcagccccccaggaaagtggcagtcccaggacctaccaggtaaagagatcaggacagcaagcaagacttcagtagcaaaccactacagtcagtacctggactcgcctctacccagcagaccctgactccagcagattctggcccagggacaggaggaagagatgccaccagggctggtctcccaggagtagagaccatgggaaatggggtggattaggattgagctggagaagacttaaactctctgggttgaaagaagattaggggaaaagaggtcaccttccagcagtgaaatgaacaaatagaagatgagaagtacaggcaagtggtttgtctttatccacccccactgttgtggtcagccccagagaattttatcttcttccttggcattggttcactggacatttccacgtgagcggcctccgtagctaacctccctgccctctgaggagccatcttcctgaatcgcattctctactggactctggcctgcttggagaggtggcagcaggcacctggtcttcagaaattgtttcctgtgaattctgtgactcctaataggccagtttgtgataagcttactctatgagtcttcatttttctaaaat

SEQ ID NO: 16771 - DNA, 366 bp, Homo sapiens
  source 1..366: mol_type = unassigned DNA
gaaggggtcagtcagggctctccgggctacatctggaaagaggccctccaacatgaagagggagtcacccacttgcaatctgttccctgcatccaaaagcccagcatcttctcctcttacccgatcgactcccccagtccgggggagagccgggcccagtgggagagcagcagccagtgaggagaccagagcagccaagttgcggggagcagctgctaaatcttccagtcaactgcccattccctcggccatccccaggcctgccagccgaatgccactcaccagccggagtgtgccacctggcagaggtgccctacctccggattctctgtcaactcgaaaagggcttccaagaccaagcactgc

SEQ ID NO: 16772 - DNA, 835 bp, Homo sapiens
  source 1..835: mol_type = unassigned DNA
agaaagcctgttgcgtggaagataaggcggcgcgggaagtggacacaggctgcgagccttgggcagaatggatacctgaggaaaggtatggtttctctccagctcagatctaactggactctcgctcctgctggctggacatggaggatttggaggaagatgtaaggtttattgtggatgagaccttggactttggggggctgtcaccatctgacagccgtgaggaggaagacataacagtgttggtgactccagagaaaccacttcgacggggcctctcccaccgaagtgacccaaatgcagtggcacctgccccccagggtgtgaggctcagcctaggccccctcagtccagagaagctggaggagatcctcgatgaggccaaccggctggccgctcagctggagcagtgtgccctgcaggatcgggagagcgcaggcgagggcctggggcctcgccgagtgaagcccagtcctcggcgggagacctttgtgctgaaggatagtcctgtccgagacctgctgcccactgtgaactctttgacgcggagcaccccctccccaagcagcctgacgcctcgactccggagtaatgataggaaggggtcagtcagggctctccgggctacatctggaaagaggccctccaacatgaagagggagtcacccacttgcaatctgttccctgcatccaaaagcccagcatcttctcctcttacccgatcgactcccccagtccgggggagagccgggcccagtgggagagcagcagccagcccacccacccccatcagatccgtcctggccccacagccttctaccagcaactctcaacg

SEQ ID NO: 16773 - DNA, 1040 bp, Homo sapiens
  source 1..1040: mol_type = unassigned DNA
agaaagcctgttgcgtggaagataaggcggcgcgggaagtggacacagggtgggctggaggtgtgcttcgcgtgtgatgccaggggagtggaaaggtggcttggggagtgcagaaccctgaggatagtggcggggaggaagatggggcgtgcaggccgcccccagtgaggagaggccaggatgcagggcggctccagggcaatctgggcagttgggggagccctccgtatcgttcccggaggtagcaggagtagctgtgcgggaggtgccactcctgggcgcttgctttgcctccagcatgacccccgaccctggcttgcaccctgaatctagctgcgagccttgggcagaatggatacctgaggaaaggtatggtttctctccagctcagatctaactggactctcgctcctgctggctggacatggaggatttggaggaagatgtaaggtttattgtggatgagaccttggactttggggggctgtcaccatctgacagccgtgaggaggaagacataacagtgttggtgactccagagaaaccacttcgacggggcctctcccaccgaagtgacccaaatgcagtggcacctgccccccagggtgtgaggctcagcctaggccccctcagtccagagaagctggaggagatcctcgatgaggccaaccggctggccgctcagctggagcagtgtgccctgcaggatcgggagagcgcaggcgagggcctggggcctcgccgagtgaagcccagtcctcggcgggagacctttgtgctgaaggatagtcctgtccgagacctgctgcccactgtgaactctttgacgcggagcaccccctccccaagcagcctgacgcctcgactccggagtaatgataggaaggggtcagtcagggctctccgggctacatctggaaagaggccctccaacatgaagagggagtcacccacttgcaatctgttccctgcatccaaaagcccagcatcttctcctcttacccgatcgactcccccagtccgggggagagccgggccca

SEQ ID NO: 16774 - DNA, 839 bp, Homo sapiens
  source 1..839: mol_type = unassigned DNA
gattcccgggactaggttgcgggagaaagcctgttgcgtggaagataaggcggcgcgggaagtggacacaggatctaactggactctcgctcctgctggctggacatggaggatttggaggaagatgtaaggtttattgtggatgagaccttggactttggggggctgtcaccatctgacagccgtgaggaggaagacataacagtgttggtgactccagagaaaccacttcgacggggcctctcccaccgaagtgacccaaatgcagtggcacctgccccccagggtgtgaggctcagcctaggccccctcagtccagagaagctggaggagatcctcgatgaggccaaccggctggccgctcagctggagcagtgtgccctgcaggatcgggagagcgcaggcgagggcctggggcctcgccgagtgaagcccagtcctcggcgggagacctttgtgctgaaggatagtcctgtccgagacctgctgcccactgtgaactctttgacgcggagcaccccctccccaagcagcctgacgcctcgactccggagtaatgataggaaggggtcagtcagggctctccgggctacatctggaaagaggccctccaacatgaagagggtgagttgagagagttgagttggaggtgtgccccagacatggtgtgtgccatgatgcagggagtggtttccttattggtaaaacagggatagcatttctacatctagaattgttggaattaaatgagaaccatgaaaaaagagaaccaaaactcttaccacagtgtctgagtatatgtctatgataaactcaataaatggtattggcaatagtga

SEQ ID NO: 16775 - DNA, 738 bp, Homo sapiens
  source 1..738: mol_type = unassigned DNA
attcccgggactaggttgcgggagaaagcctgttgcgtggaagataaggcggcgcgggaagtggacacagggtgggctggagatctaactggactctcgctcctgctggctggacatggaggatttggaggaaggtaaggaaaggagggagggaagaatgaaagggaggagtgagacccagcgatggagagctgcatcagggacccatgactggctttcattcttctttccccttcagatgtaaggtttattgtggatgagaccttggactttggggggctgtcaccatctgacagccgtgaggaggaagacataacagtgttggtgactccagagaaaccacttcgacggggcctctcccaccgaagtgacccaaatgcagtggcacctgccccccagggtgtgaggctcagcctaggccccctcagtccagagaagctggaggagatcctcgatgaggccaaccggctggccgctcagctggagcagtgtgccctgcaggatcgggagagcgcaggcgagggcctggggcctcgccgagtgaagcccagtcctcggcgggagacctttgtgctgaaggatagtcctgtccgagacctgctgcccactgtgaactctttgacgcggagcaccccctccccaagcagcctgacgcctcgactccggagtaatgataggaaggggtcagtcagggctctccgggctacatctggaaagaggccctccaacatgaagagg

SEQ ID NO: 16776 - DNA, 1742 bp, Homo sapiens
  source 1..1742: mol_type = unassigned DNA
aggagccccgccccctcggagctgattcccgggactaggttgcgggagaaagcctgttgcgtggaagataaggcggcgcgggaagtggacacagggtgggctggagctcagatctaactggactctcgctcctgctggctggacatggaggatttggaggaagatgtaaggtttattgtggatgagaccttggactttggggggctgtcaccatctgacagccgtgaggaggaagacataacagtgttggtgactccagagaaaccacttcgacggggcctctcccaccgaagtgacccaaatgcagtggcacctgccccccagggtgtgaggctcagcctaggccccctcagtccagagaagctggaggagatcctcgatgaggccaaccggctggccgctcagctggagcagtgtgccctgcaggatcgggagagcgcaggcgagggcctggggcctcgccgagtgaagcccagtcctcggcgggagacctttgtgctgaaggatagtcctgtccgagacctgctgcccactgtgaactctttgacgcggagcaccccctccccaagcagcctgacgcctcgactccggagtaatgataggaaggggtcagtcagggctctccgggctacatctggaaagaggccctccaacatgaagagggagtcacccacttgcaatctgttccctgcatccaaaagcccagcatcttctcctcttacccgatcgactcccccagtccgggggagagccgggcccagtgggagagcagcagccagcccacccacccccatcagatccgtcctggccccacagccttctaccagcaactctcaacgcctgccccggccgcagggagcagctgctaaatcttccagtcaactgcccattccctcggccatccccaggcctgccagccgaatgccactcaccagccggagtgtgccacctggcagaggtgccctacctccggattctctgtcaactcgaaaagggcttccaagaccaagcactgcaggacacagagtgcgggaaagtggacacaaggttcctgtttcccagcgactaaatcttcctgtcatgggtgccactcgcagcaatctgcagccccccaggaaagtggcagtcccaggacctaccaggtaaagagatcaggacagcaagcaagacttcagtagcaaaccactacagtcagtacctggactcgcctctacccagcagaccctgactccagcagattctggcccagggacaggaggaagagatgccaccagggctggtctcccaggagtagagaccatgggaaatggggtggattaggattgagctggagaagacttaaactctctgggttgaaagaagattaggggaaaagaggtcaccttccagcagtgaaatgaacaaatagaagatgagaagtacaggcaagtggtttgtctttatccacccccactgttgtggtcagccccagagaattttatcttcttccttggcattggttcactggacatttccacgtgagcggcctccgtagctaacctccctgccctctgaggagccatcttcctgaatcgcattctctactggactctggcctgcttggagaggtggcagcaggcacctggtcttcagaaattgtttcctgtgaattctgtgactcctaataggccagtttgtgataagcttactctatgagtcttcatttttctaaaataaagtgaatgtatttttatattctctgt

SEQ ID NO: 16777 - DNA, 2900 bp, Homo sapiens
  source 1..2900: mol_type = unassigned DNA
ggcagtcaggcctccccgctctgtgctacctgcggcccggctctcctccgcgcccccactcgcgctgcgatgacgcgctcactgttcaagggaaacttttggagtgcagacatcctcagcaccatcggctatgacaacattatccaacatctgaacaatggccgcaagaactgcaaagagtttgaagactttctaaaagaaagggcagcaattgaagagaggtatggcaaagatctgctcaacctctctaggaagaagccgtgtggacagtctgaaatcaacaccctgaagcgggcccttgaagtcttcaagcagcaagtagacaatgtggcacaatgtcacattcagcttgcacagagtttaagagaagaggccaggaagatggaagaattcagggaaaagcaaaaactacaacgaaaaaagacagagctcataatggatgctatccataaacaaaagagcttacaattcaagaaaaccatggatgcaaagaagaactatgagcagaaatgccgggacaaagatgaggcagaacaggccgtcagccggagtgccaacctggtgaacccgaagcaacaagaaaagctttttgtgaaactggcaacttcaaagaccgcagtagaggactcagacaaagcatacatgctgcacatcggcaccctggataaggtccgagaagagtggcagagtgagcacatcaaggcctgcgaggcatttgaggctcaagaatgtgaacgaataaacttcttccggaatgcattgtggttacatgtgaatcagctgtcacaacaatgtgtcaccagtgatgaacacccatcatgtatgagaatttctactcctcccagaagaatgcagtcccagcaggaaaggctacagggcctaacttggcaaggagaggacccctcccaattcctaaaagctcaccagatgatcccaattactctttggttgatgactacagtttgctctatcagtaaaatcaatgaaaccagagctttttccggctagtgcttctgtgatatggaaagggcacccagagcagcaggacctatagccacgttatgtcagcaatgaagactttgaagtgaacccttgctataattttttagagatttaaaatttatggtagacatttaggacaacataagcaagtagagttctgcagttttttgaagtttacaaattgccccattctgaagaattattctttcccagttactcaggttatgaatgaattaggttttcaacatgggaagcatgaaatccacttctggatttggagcatccacttgaggagcagaggtggcagcagaggattctgagccaccaactgcagtagtggctcctttggctttgggcagcctggctgtggagtttccacggcgacacacagcctcagtggtgcaagatttaaaattaccttcctttttggctggaagacttagaagccgcctgatcatactttctcattttacagatgaggaaataaagcctacaagtgtgaaattaatttccttacagttttcctagctgatgagggacagaaccagaactagagcctgagcccaacccacatcactattcttctaacccttcctgaagttgtgatgctcatgctgaaatttaagatgccaaatatttttgccagcactttttcagttgggagaatcaccagggtttaaatgtcagatttatttttatgtggatccctgtgtatgctgaactacagagcatgatgtttaatctaatttaaggagccactgattgtaaaacatgccattattttatgttgcactaagaaggtggggtcgaggagttgccaataaacttgggacagactattgatggccaagcccatctgaatttaagatgctaaagtatgaaaaaaatacatcttagaatcaatgaaataccatattttgattccattcctcaagataattttagagttataaaaccagtcctcaattttgggtcttcacagagaatctttcccttgctagaccccagaattttaaatgcatccgtcttacactttcacaaatatttgggttttcctttttcactcacaaacagcagggaggtcatgtactttttgtacaacacctgtgcactatgagaaaatggtaccttttagttattgacaagttaaaatagcactctcagtttttcagtattacagagagcaaatagtttcctctcctgctctgtgcagtagcttttccagaactatggacaaattgatcagaagaagattgattatttcctcatctttttttcttttttttgagacagagtctctctctgtcccccaggctgaagtgcagcggcatgatctcagctcactgcaacctctgcctcccgggttcaagtgattctcctgcctcagcctcctgagtagctgggattacaggcacccaccaccacacctggctaattttttgtatttttagtaaagacagggttttaccatgttggtcaggctggtctcaaactcctgacctcaggtgatccacctgcctcggcctcccaaagtgctgggattacaggcgtgagccactgcgcccggcctatttccccacctttcgtgtaaggtgctactgaacatgacagcttcttgtcatgacaggaaacttgcatcagttggatatccttttgagaaactgaattttgcaaagggccaaatttccccaaactgaacgggctcaggaaatgttcctttacactcagaacattctattttaagtatattatttattgttggcagttcctcagggatttcccttttctctgtattggtcagtgtagttgatgtaaaaccgttttgtggatggaaaatatttttattttattgctcttttagtttggtaggttaaataaaggttcttggtaatttggga

SEQ ID NO: 16778 - DNA, 3000 bp, Homo sapiens
  source 1..3000: mol_type = unassigned DNA
agtggcagtcaggcctccccgctctgtgctacctgcggcccggctctcctccgcgcccccactcgcgctgcgatgacgcgctcactgttcaagggaaacttttggagtgcagacatcctcagcaccatcggctatgacaacattatccaacatctgaacaatggccgcaagaactgcaaagagtttgaagactttctaaaagaaagggcagcaattgaagagaggtatggcaaagatctgctcaacctctctaggaagaagccgtgtggacagtctgaaatcaacaccctgaagcgggcccttgaagtcttcaagcagcaagtagacaatgtggcacaatgtcacattcagcttgcacagagtttaagagaagaggccaggaagatggaagaattcagggaaaagcaaaaactacaacgaaaaaagacagagctcataatggatgctatccataaacaaaagagcttacaattcaagaaaaccatggatgcaaagaagaactatgagcagaaatgccgggacaaagatgaggcagaacaggccgtcagccggagtgccaacctggtgaacccgaagcaacaagaaaagctttttgtgaaactggcaacttcaaagaccgcagtagaggactcagacaaagcatacatgctgcacatcggcaccctggataaggtccgagaagagtggcagagtgagcacatcaaggcctgcgaggcatttgaggctcaagaatgtgaacgaataaacttcttccggaatgcattgtggttacatgtgaatcagctgtcacaacaatgtgtcaccagtgatgaaatgtacgaacaagtccgaaagagtttagaaatgtgcagcattcagagggacattgaatactttgtgaatcaacgcaaaactggacagattccaccagcacccatcatgtatgagaatttctactcctcccagaagaatgcagtcccagcaggaaaggctacagggcctaacttggcaaggagaggacccctcccaattcctaaaagctcaccagatgatcccaattactctttggttgatgactacagtttgctctatcagtaaaatcaatgaaaccagagctttttccggctagtgcttctgtgatatggaaagggcacccagagcagcaggacctatagccacgttatgtcagcaatgaagactttgaagtgaacccttgctataattttttagagatttaaaatttatggtagacatttaggacaacataagcaagtagagttctgcagttttttgaagtttacaaattgccccattctgaagaattattctttcccagttactcaggttatgaatgaattaggttttcaacatgggaagcatgaaatccacttctggatttggagcatccacttgaggagcagaggtggcagcagaggattctgagccaccaactgcagtagtggctcctttggctttgggcagcctggctgtggagtttccacggcgacacacagcctcagtggtgcaagatttaaaattaccttcctttttggctggaagacttagaagccgcctgatcatactttctcattttacagatgaggaaataaagcctacaagtgtgaaattaatttccttacagttttcctagctgatgagggacagaaccagaactagagcctgagcccaacccacatcactattcttctaacccttcctgaagttgtgatgctcatgctgaaatttaagatgccaaatatttttgccagcactttttcagttgggagaatcaccagggtttaaatgtcagatttatttttatgtggatccctgtgtatgctgaactacagagcatgatgtttaatctaatttaaggagccactgattgtaaaacatgccattattttatgttgcactaagaaggtggggtcgaggagttgccaataaacttgggacagactattgatggccaagcccatctgaatttaagatgctaaagtatgaaaaaaatacatcttagaatcaatgaaataccatattttgattccattcctcaagataattttagagttataaaaccagtcctcaattttgggtcttcacagagaatctttcccttgctagaccccagaattttaaatgcatccgtcttacactttcacaaatatttgggttttcctttttcactcacaaacagcagggaggtcatgtactttttgtacaacacctgtgcactatgagaaaatggtaccttttagttattgacaagttaaaatagcactctcagtttttcagtattacagagagcaaatagtttcctctcctgctctgtgcagtagcttttccagaactatggacaaattgatcagaagaagattgattatttcctcatctttttttcttttttttgagacagagtctctctctgtcccccaggctgaagtgcagcggcatgatctcagctcactgcaacctctgcctcccgggttcaagtgattctcctgcctcagcctcctgagtagctgggattacaggcacccaccaccacacctggctaattttttgtatttttagtaaagacagggttttaccatgttggtcaggctggtctcaaactcctgacctcaggtgatccacctgcctcggcctcccaaagtgctgggattacaggcgtgagccactgcgcccggcctatttccccacctttcgtgtaaggtgctactgaacatgacagcttcttgtcatgacaggaaacttgcatcagttggatatccttttgagaaactgaattttgcaaagggccaaatttccccaaactgaacgggctcaggaaatgttcctttacactcagaacattctattttaagtatattatttattgttggcagttcctcagggatttcccttttctctgtattggtcagtgtagttgatgtaaaaccgttttgtggatggaaaatatttttattttattgctcttttagtttggtaggttaaataaaggttcttggtaatttggga

SEQ ID NO: 16779 - DNA, 1023 bp, Homo sapiens
  source 1..1023: mol_type = unassigned DNA
tttctggttgcagggctagctagatacctggaattttccttgaaggaactgaaacatgttctttcatctccagggtgggggtggagaagcctgacaggctcctaagtgggtccctgcgccatctcaaaagtgcagacatcctcagcaccatcggctatgacaacattatccaacatctgaacaatggccgcaagaactgcaaagagtttgaagactttctaaaagaaagggcagcaattgaagagaggtatggcaaagatctgctcaacctctctaggaagaagccgtgtggacagtctgaaatcaacaccctgaagcgggcccttgaagtcttcaagcagcaagtagacaatgtggcacaatgtcacattcagcttgcacagagtttaagagaagaggccaggaagatggaagaattcagggaaaagcaaaaactacaacgaaaaaagacagagctcataatggatgctatccataaacaaaagagcttacaattcaagaaaaccatggatgcaaagaagaactatgagcagaaatgccgggacaaagatgaggcagaacaggccgtcagccggagtgccaacctggtgaacccgaagcaacaagaaaagctttttgtgaaactggcaacttcaaagaccgcagtagaggactcagactattgatggccaagcccatctgaatttaagatgctaaagtatgaaaaaaatacatcttagaatcaatgaaataccatattttgattccattcctcaagataattttagagttataaaaccagtcctcaattttgggtcttcacagagaatctttcccttgctagaccccagaattttaaatgcatccgtcttacactttcacaaatatttgggttttcctttttcactcacaaacagcagggaggtcatgtactttttgtacaacacctgtgcactatgagaaaatggtaccttttagttattgacaagttaaaatagcactctcagtttttcagtattacagagagcaaatagtttcctctcc

SEQ ID NO: 16780 - DNA, 515 bp, Homo sapiens
  source 1..515: mol_type = unassigned DNA
ctcagttagaacattggtatctgggatcatcattactttttaccctcagaactatttccaagcctgtttgtgttactgtgatattaggatttgtttgcattctttgtgatatgagtttatgagtttcctcagtggtgggggagaagcattctaaattggacaataagtttacagataactgaaggttgacactgtttcttaagtcacagctagccaaaatgaatggtccttttccttgcatatctatgtacacgtagctatttttctgtaggcatttgaggctcaagaatgtgaacgaataaacttcttccggaatgcattgtggttacatgtgaatcagctgtcacaacaatgtgtcaccagtgatgaaatgtacgaacaagtccgaaagagtttagaaatgtgcagcattcagagggacattgaatactttgtgaatcaacgcaaaactggacagattccaccagcacccatcatgtatgagaatttctactcctcccagaagaatgcagtcc

SEQ ID NO: 16781 - DNA, 569 bp, Homo sapiens
  source 1..569: mol_type = unassigned DNA
atgagaaaaggatcataactcctatcctatcattggagaaaatgaaacacaaagagttttggcatgttgctctccccaaatgaacagtgaagaatttcttgtgcctgggattgaggaaactggacttaagaagtcttggtcttttgctgtctctctagctcatgggcaaaaattggtctgtagtttctaagttaagatatgggcagagagaagcatgcaaaggcattataataagattgtgcagagaatttccagaactgaaattatatatgtgcttgttttttttagcaccctgaagcgggcccttgaagtcttcaagcagcaagtagacaatgtggcacaatgtcacattcagcttgcacagagtttaagagaagaggccaggaagatggaagaattcagggaaaagcaaaaactacaacgaaaaaagacagagctcataatggatgctatccataaacaaaagagcttacaattcaagaaaaccatggatgcaaagaagaactatgagcagaaatgccgggacaaagatgaggcagaacaggccgtcagccggagtgccaacctgg

SEQ ID NO: 16782 - DNA, 859 bp, Homo sapiens
  source 1..859: mol_type = unassigned DNA
ggagccgcgggcagtggcagtcaggcctccccgctctgtgctacctgcggcccggctctcctccgcgcccccactcgcgctgcgatgacgcgctcactgttcaagggaaacttttggagtgcagacatcctcagcaccatcggctatgacaacattatccaacatctgaacaatggccgcaagaactgcaaagagtttgaagactttctaaaagaaagggcagcaattgaagagaggtatggcaaagatctgctcaacctctctaggaagaagccgtgtggacagtctgaaatcaacaccctgaagcgggcccttgaagtcttcaagcagcaagtagacaatgtggcacaatgtcacattcagcttgcacagagtttaagagaagaggccaggaagatggaagaattcagggaaaagcaaaaactacaacgaaaaaaggttggatttgcatacgtgttaaggtgtttcctttcctcctatagaaaaccgcaggcttgtttgttcattatactcctcagctcagctcccaccatcatgtaatcatgacctgagaaattacttactggagtccccacatggggactcagtccagatgggtatatgcatttctacaccccaggccagttgtccttttttaaagttcacataggattcagaggtccagcttgcattcctcttcaggtctgctgccgctattcagactatgaatggaaaggggaaccctctgaattcaatagactctagcacatcccagctggacggctcccaaaaccacactcctcatcctggacaaggcaataggggaagggagaagtagtggaagagactcccgctccccctgaagaccataatgtagtcc

SEQ ID NO: 16783 - DNA, 1110 bp, Homo sapiens
  source 1..1110: mol_type = unassigned DNA
ctttgacttcattgtaaggtacttctttgcggcgctgacagtgctcacgctcctgggcctcctccatggactcgtgctgctgcctgtgctgctgtccatcctgggcccgccgccagaggtgatacagatgtacaaggaaagcccagagatcctgagtccaccagctccacagggaggcgggcttagagtggggagtttgcaagtgaacattagctattggaaggagcttctctggtgccaggacctgaggcccgaggagatctagcctctgcctcccaccccagcaccccctcatcagacacacggagcgccactgtctggacaggctgaattggtcttcgggtccctaatttctcatacgccattccctctgcctagaacactttctcacctccccttgatgtgaccccatatcacccttcgaggtgaattggatcggatgccatctcctccaggaggggtggggtcgtgcctcctgtgaggtcccagtgcccctgagtgtctgtgcccgtctgtttccccgtccctctctctaagcccggaggcttactgcgggtaaggacggcgggacaggaccttaacccctgggacgaacaccagctccgcaaaggactccgcacccggcgccgcccacggggtgcgggtcccaggaggaccagcagagaggagcataggagagcaaaggagatcagtgacccatggcttccccggtggcgcggaacagcccggagccgcctgtgatttgcatacccatggtgcaccacgaaaagataccctcaagatgcttgcactccctctgtgcgcgcatttctgcactgttttagagcatgatgcctcttacacgcatctgtgtgcataaactacatatagggagtgcgtaccacgcaggcatccaacaaccataagtgtgttaagtgttagttctccctgcgaggttcgaagcggaagtcacgaatatactcgggtttctcttcaaagcgcataaatctttcgccttttactaaagatttccgtggagagaaagttgtgagtttttattcaattttttgaggcctcttatttcctgaggctacatttttaagtattaaaagttaggcaactacaaccaag

SEQ ID NO: 16784 - DNA, 4225 bp, Homo sapiens
  source 1..4225: mol_type = unassigned DNA
cccacgcccgcgccttggcggccccactgaatccctacgcggggcccagcggtaccgggagaccgggctagcctatgggagcgcccagataacgcgggttgggggcgcccgcgccccccatccccgccagcatgactcgatcgccgcccctcagagagctgcccccgagttacacacccccagctcgaaccgcagcaccccagatcctagctgggagcctgaaggctccactctggcttcgtgcttacttccagggcctgctcttctctctgggatgcgggatccagagacattgtggcaaagtgctctttctgggactgttggcctttggggccctggcattaggtctccgcatggccattattgagacaaacttggaacagctctgggtagaagtgggcagccgggtgagccaggagctgcattacaccaaggagaagctgggggaggaggctgcatacacctctcagatgctgatacagaccgcacgccaggagggagagaacatcctcacacccgaagcacttggcctccacctccaggcagccctcactgccagtaaagtccaagtatcactctatgggaagtcctgggatttgaacaaaatctgctacaagtcaggagttccccttattgaaaatggaatgattgagcggatgattgagaagctgtttccgtgcgtgatcctcacccccctcgactgcttctgggagggagccaaactccaagggggctccgcctacctgcccggccgcccggatatccagtggaccaacctggatccagagcagctgctggaggagctgggtccctttgcctcccttgagggcttccgggagctgctagacaaggcacaggtgggccaggcctacgtggggcggccctgtctgcaccctgatgacctccactgcccacctagtgcccccaaccatcacagcaggcaggctcccaatgtggctcacgagctgagtgggggctgccatggcttctcccacaaattcatgcactggcaggaggaattgctgctgggaggcatggccagagacccccaaggagagctgctgagggcagaggccctgcagagcaccttcttgctgatgagtccccgccagctgtacgagcatttccggggtgactatcagacacatgacattggctggagtgaggagcaggccagcacagtgctacaagcctggcagcggcgctttgtgcagctggcccaggaggccctgcctgagaacgcttcccagcagatccatgccttctcctccaccaccctggatgacatcctgcatgcgttctctgaagtcagtgctgcccgtgtggtgggaggctatctgctcatgctggcctatgcctgtgtgaccatgctgcggtgggactgcgcccagtcccagggttccgtgggccttgccggggtactgctggtggccctggcggtggcctcaggccttgggctctgtgccctgctcggcatcaccttcaatgctgccactacccaggtgctgcccttcttggctctgggaatcggcgtggatgacgtattcctgctggcgcatgccttcacagaggctctgcctggcacccctctccaggagcgcatgggcgagtgtctgcagcgcacgggcaccagtgtcgtactcacatccatcaacaacatggccgccttcctcatggctgccctcgttcccatccctgcgctgcgagccttctccctacaggcggccatagtggttggctgcacctttgtagccgtgatgcttgtcttcccagccatcctcagcctggacctacggcggcgccactgccagcgccttgatgtgctctgctgcttctccagtccctgctctgctcaggtgattcagatcctgccccaggagctgggggacgggacagtaccagtgggcattgcccacctcactgccacagttcaagcctttacccactgtgaagccagcagccagcatgtggtcaccatcctgcctccccaagcccacctggtgcccccaccttctgacccactgggctctgagctcttcagccctggagggtccacacgggaccttctaggccaggaggaggagacaaggcagaaggcagcctgcaagtccctgccctgtgcccgctggaatcttgcccatttcgcccgctatcagtttgccccgttgctgctccagtcacatgctaaggccatcgtgctggtgctctttggtgctcttctgggcctgagcctctacggagccaccttggtgcaagacggcctggccctgacggatgtggtgcctcggggcaccaaggagcatgccttcctgagcgcccagctcaggtacttctccctgtacgaggtggccctggtgacccagggtggctttgactacgcccactcccaacgcgccctctttgatctgcaccagcgcttcagttccctcaaggcggtgctgcccccaccggccacccaggcaccccgcacctggctgcactattaccgcaactggctacagggaatccaggctgcctttgaccaggactgggcttctgggcgcatcacccgccactcgtaccgcaatggctctgaggatggggccctggcctacaagctgctcatccagactggagacgcccaggagcctctggatttcagccagctgaccacaaggaagctggtggacagagagggactgattccacccgagctcttctacatggggctgaccgtgtgggtgagcagtgaccccctgggtctggcagcctcacaggccaacttctaccccccacctcctgaatggctgcacgacaaatacgacaccacgggggagaaccttcgcatcccgccagctcagcccttggagtttgcccagttccccttcctgctgcgtggcctccagaagactgcagactttgtggaggccatcgagggggcccgggcagcatgcgcagaggccggccaggctggggtgcacgcctaccccagcggctcccccttcctcttctgggaacagtatctgggcctgcggcgctgcttcctgctggccgtctgcatcctgctggtgtgcactttcctcgtctgtgctctgctgctcctcaacccctggacggctggcctcatagtgctggtcctggcgatgatgacagtggaactctttggtatcatgggtttcctgggcatcaagctgagtgccatccccgtggtgatccttgtggcctctgtaggcattggcgttgagttcacagtccacgtggctctgggcttcctgaccacccagggcagccggaacctgcgggccgcccatgcccttgagcacacatttgcccccgtgaccgatggggccatctccacattgctgggtctgctcatgcttgctggttcccactttgacttcattgtaaggtacttctttgcggcgctgacagtgctcacgctcctgggcctcctccatggactcgtgctgctgcctgtgctgctgtccatcctgggcccgccgccagaggtgatacagatgtacaaggaaagcccagagatcctgagtccaccagctccacagggaggcgggcttaggtggggggcatcctcctccctgccccagagctttgccagagtgactacctccatgaccgtggccatccacccaccccccctgcctggtgcctacatccatccagcccctgatgagcccccttggtcccctgctgccactagctctggcaacctcagttccaggggaccaggtccagccactgggtgaaagagcagctgaagcacagagaccatgtgtggggcgtgtggggtcactgggaagcactgggtctggtgttagacgcaggatggacccctggagggccctgctgctgctgcatcccctctcccgacccagctgtcatgggcctccctgatatccatacagaacagccaccgatttgcacatccaggcctgtgtgagcctgtatctgtgtcacttgagagtgaaagctggcacttggggctgcagtgcagccctgtcccccttcccaccccacaccactgcctgcccagctgaccaagcctgagggaccctccagcacccttccgtctggtgactcctgggcaggctctccatatccctgcccacctcctaccacatccattatttatatgaaaatgtctatttttgtagtatacatacatgttagctatgatgaaagttttattttttaaagaatgaaatatattctatgtgaactaatctca

SEQ ID NO: 16785 - DNA, 4298 bp, Homo sapiens
  source 1..4298: mol_type = unassigned DNA
atccccgccagcatgactcgatcgccgcccctcagagagctgcccccgagttacacacccccagctcgaaccgcagcaccccagatcctagctgggagcctgaaggctccactctggcttcgtgcttacttccagggcctgctcttctctctgggatgcgggatccagagacattgtggcaaagtgctctttctgggactgttggcctttggggccctggcattaggtctccgcatggccattattgagacaaacttggaacagctctgggtagaagtgggcagccgggtgagccaggagctgcattacaccaaggagaagctgggggaggaggctgcatacacctctcagatgctgatacagaccgcacgccaggagggagagaacatcctcacacccgaagcacttggcctccacctccaggcagccctcactgccagtaaagtccaagtatcactctatgggaagtcctgggatttgaacaaaatctgctacaagtcaggagttccccttattgaaaatggaatgattgagcggatgattgagaagctgtttccgtgcgtgatcctcacccccctcgactgcttctgggagggagccaaactccaagggggctccgcctacctgcccggccgcccggatatccagtggaccaacctggatccagagcagctgctggaggagctgggtccctttgcctcccttgagggcttccgggagctgctagacaaggcacaggtgggccaggcctacgtggggcggccctgtctgcaccctgatgacctccactgcccacctagtgcccccaaccatcacagcaggcaggctcccaatgtggctcacgagctgagtgggggctgccatggcttctcccacaaattcatgcactggcaggaggaattgctgctgggaggcatggccagagacccccaaggagagctgctgagggcagaggccctgcagagcaccttcttgctgatgagtccccgccagctgtacgagcatttccggggtgactatcagacacatgacattggctggagtgaggagcaggccagcacagtgctacaagcctggcagcggcgctttgtgcagctggcccaggaggccctgcctgagaacgcttcccagcagatccatgccttctcctccaccaccctggatgacatcctgcatgcgttctctgaagtcagtgctgcccgtgtggtgggaggctatctgctcatgctggcctatgcctgtgtgaccatgctgcggtgggactgcgcccagtcccagggttccgtgggccttgccggggtactgctggtggccctggcggtggcctcaggccttgggctctgtgccctgctcggcatcaccttcaatgctgccactacccaggtgctgcccttcttggctctgggaatcggcgtggatgacgtattcctgctggcgcatgccttcacagaggctctgcctggcacccctctccaggagcgcatgggcgagtgtctgcagcgcacgggcaccagtgtcgtactcacatccatcaacaacatggccgccttcctcatggctgccctcgttcccatccctgcgctgcgagccttctccctacaggcggccatagtggttggctgcacctttgtagccgtgatgcttgtcttcccagccatcctcagcctggacctacggcggcgccactgccagcgccttgatgtgctctgctgcttctccagtccctgctctgctcaggtgattcagatcctgccccaggagctgggggacgggacagtaccagtgggcattgcccacctcactgccacagttcaagcctttacccactgtgaagccagcagccagcatgtggtcaccatcctgcctccccaagcccacctggtgcccccaccttctgacccactgggctctgagctcttcagccctggagggtccacacgggaccttctaggccaggaggaggagacaaggcagaaggcagcctgcaagtccctgccctgtgcccgctggaatcttgcccatttcgcccgctatcagtttgccccgttgctgctccagtcacatgctaaggccatcgtgctggtgctctttggtgctcttctgggcctgagcctctacggagccaccttggtgcaagacggcctggccctgacggatgtggtgcctcggggcaccaaggagcatgccttcctgagcgcccagctcaggtacttctccctgtacgaggtggccctggtgacccagggtggctttgactacgcccactcccaacgcgccctctttgatctgcaccagcgcttcagttccctcaaggcggtgctgcccccaccggccacccaggcaccccgcacctggctgcactattaccgcaactggctacagggaatccaggctgcctttgaccaggactgggcttctgggcgcatcacccgccactcgtaccgcaatggctctgaggatggggccctggcctacaagctgctcatccagactggagacgcccaggagcctctggatttcagccagctgaccacaaggaagctggtggacagagagggactgattccacccgagctcttctacatggggctgaccgtgtgggtgagcagtgaccccctgggtctggcagcctcacaggccaacttctaccccccacctcctgaatggctgcacgacaaatacgacaccacgggggagaaccttcgcatcccgccagctcagcccttggagtttgcccagttccccttcctgctgcgtggcctccagaagactgcagactttgtggaggccatcgagggggcccgggcagcatgcgcagaggccggccaggctggggtgcacgcctaccccagcggctcccccttcctcttctgggaacagtatctgggcctgcggcgctgcttcctgctggccgtctgcatcctgctggtgtgcactttcctcgtctgtgctctgctgctcctcaacccctggacggctggcctcatagtgctggtcctggcgatgatgacagtggaactctttggtatcatgggtttcctgggcatcaagctgagtgccatccccgtggtgatccttgtggcctctgtaggcattggcgttgagttcacagtccacgtggctctgggcttcctgaccacccagggcagccggaacctgcgggccgcccatgcccttgagcacacatttgcccccgtgaccgatggggccatctccacattgctgggtctgctcatgcttgctggttcccactttgacttcattgtaaggtacttctttgcggcgctgacagtgctcacgctcctgggcctcctccatggactcgtgctgctgcctgtgctgctgtccatcctgggcccgccgccagaggtgatacagatgtacaaggaaagcccagagatcctgagtccaccagctccacagggaggcgggcttaggcccgaggagatctagcctctgcctcccaccccagcaccccctcatcagacacacggagcgccactgtctggacaggctgaattggtcttcgggtccctaatttctcatacgccattccctctgcctagaacactttctcacctccccttgatgtgaccccatatcacccttcgaggtgaattggatcggatgccatctcctccaggaggggtggggtcgtgcctcctgtgaggtcccagtgcccctgagtgtctgtgcccgtctgtttccccgtccctctctctaagcccggaggcttactgcgggtaaggacggcgggacaggaccttaacccctgggacgaacaccagctccgcaaaggactccgcacccggcgccgcccacggggtgcgggtcccaggaggaccagcagagaggagcataggagagcaaaggagatcagtgacccatggcttccccggtggcgcggaacagcccggagccgcctgtgatttgcatacccatggtgcaccacgaaaagataccctcaagatgcttgcactccctctgtgcgcgcatttctgcactgttttagagcatgatgcctcttacacgcatctgtgtgcataaactacatatagggagtgcgtaccacgcaggcatccaacaaccataagtgtgttaagtgttagttctccctgcgaggttcgaagcggaagtcacgaatatactcgggtttctcttcaaagcgcataaatctttcgccttttactaaagatttccgtggagagaaagttgtgagtttttattcaattttttgaggcctcttatttcctgaggctacatttttaagtattaaaagttaggcaactacaaccaag

SEQ ID NO: 16786 - DNA, 13714 bp, Homo sapiens
  source 1..13714: mol_type = unassigned DNA
tttggaaggaggcgtgatttccacgttcgagcgtcttcgctccccaccccctctcggcaccagccagtgcgcgccaccacctgagcctggcgagagccgggacgcacgcagtcttcagcctgctcctttaagcctctggagagactcggctctgagcgggtccgcccgacacccgccccctccccccactcctgagaactctttactttttgtttggaaaatcggggccatttctttatttatctctgggtcttcccggaggagggcagagaaggggagagcgagcttggcgggccggaccgggggaggggagcgaagggaggggaggggactgggtgtagcctggaattctccgtcctcgtgttcctgggcgggcgcgcagagtctcctggcgatagcgccgtcgccgctccccgcgccaccccgtcgttggccttgggggtcgggtgagtggggtcatgacgagccgcgggggctgccccgggccccgcccgcgctgagaggggacgcggccgcgcggcgcggagcccccctggcggggaggccgcggggggtggggagggcgcacgcggtagggcggagtgggggcggcgcagaggccgccaagctggggggctctccgggagggcgcggccgcgggcaggagggcgtgtctccggctcgaggggaccctcccgaggcgcggcgcgggactccccgatggtggtgccgcggctccgggagagctcagggtctcgccgccgccgccgtcgccgccgccgcgggcgccgctgccgccgccgccgccgccgccgccgccgccgcccgaacccgcgccgagcgtgcgcctcgccctcctcccgcgcccgctctgctctaggatgctgcggcaggttctgcacaggggcttgaggacgtgtttctcccggctcggccacttcattgccagtcaccctgtcttcttcgcctcggcgccggtgctcatctccatcctgctcggcgccagcttcagccgctaccaggtcgaggagagcgtggagcacctgctggcgccccagcacagcctggccaagatcgagcgcaacctcgttaacagcctcttcccggtcaaccgctccaagcaccgtctctactcggacctgcagacccccgggcgctacggccgggtcatcgtcacctccttccagaaagccaacatgctggaccagcatcacaccgacctgatcttaaagttgcatgctgctgtcaccaagatccaggttccaaggcctggttttaattacacgtttgcccatatatgtatcctgaataatgataagacttgcatcgtggatgacatagtgcacgtcctggaagagctaaagaatgctcgggccaccaatcggaccaattttgctatcacatacccaatcactcacttaaaggacgggagggctgtgtacaatgggcaccagcttgggggcgtcactgtgcacagcaaagaccgggtgaaatctgcagaggccatccagctcacctactacctgcagtcaatcaacagtctcaatgacatggtggctgagaggtgggagtccagcttctgcgacactgtcagactgtttcagaaatccaacagcaaagtcaaaatgtacccttacacgtcctcctcactgagggaagatttccagaagaccagccgcgtatcagaacgttacctggtcaccagcctgattctggtggttaccatggccatcctgtgttgctctatgcaggactgcgtccgcagcaaaccctggctaggcctgctcggattggtgaccataagcctggccactctcactgcagccgggatcatcaatcttactggtgggaaatataattccaccttcctgggagtccctttcgtcatgctaggtcatggattatatgggacttttgaaatgttatcctcctggaggaaaactagagaagaccaacatgttaaagagagaactgcagcagtctatgcagactccatgctctccttttctctcaccactgccatgtacctggtcacctttggcataggggccagccctttcacgaacattgaggcagccaggattttctgctgcaattcctgtattgcaatcttcttcaactacctctatgtactctcgttttatggttccagcctagtgttcactggctacatagaaaacaattaccagcatagtatcttctgtagaaaagtcccaaagcctgaggcattgcaggagaagccggcatggtacaggtttctcctgacggccagattcagtgaggacacagctgaaggcgaggaagcgaacacttacgagagtcacctattggtatgtttcctcaaacgctattactgtgactggataaccaacacctatgtcaagccttttgtagttctcttttaccttatttatatttcctttgccttaatgggctatctgcaggtcagtgaagggtcagaccttagtaacattgtagcaaccgcgacacaaaccattgagtacactactgcccagcaaaagtacttcagcaactacagtcctgtgattgggttttacatatatgagtctatagaatactggaacactagtgtccaagaagatgttctagaatacaccaaggggtttgtgcggatatcctggtttgagagctatttaaattaccttcggaaactcaatgtatccactggcttgcctaagaaaaatttcacagacatgttgaggaattcctttctgaaagcccctcaattttcacattttcaagaggacatcatcttctctaaaaaatacaatgatgaggtcgatgtagtggcctccagaatgtttttggtggccaagaccatggaaacaaacagagaagaactctatgatctcttggaaaccctgaggagactttctgtcacctccaaggtgaagttcatcgtcttcaatccgtcctttgtatacatggatcgatatgcctcctctctgggagcccccctgcacaactcctgcatcagtgctttgttcctgctcttcttctcggcattcctggtggcagattcactgattaacgtctggatcactctcacagttgtgtccgtggagtttggagtgataggtttcatgacattatggaaagtagaactggactgcatttctgtgctatgcttaatttatggaattaattacacaattgacaattgtgctccaatgttatccacatttgttctgggcaaggatttcacaagaactaaatgggtaaaaaatgccctggaagtgcatggggtagctattttacagagttacctctgctatattgttggtctgattcctcttgcagctgtgccttcaaatctgacctgtacactgttcaggtgcttgtttttaatagcatttgtcaccttctttcactgctttgccattttacctgtgatactgactttcctgccaccctctaagaaaaaaaggaaagagaagaaaaatcctgagaaccgggaggaaattgagtgtgtagaaatggtagatatcgatagtacccgtgtggttgaccaaattacaacagtgtgataatgtctgcttggcatattttcaccttaggtcttatcaagaccaaagagattatgttaatgaaacaattaaattcaaagttcttcccttttttaaagataggaaacaggcattgccaaaaaaaaaaaaaaaaaaaaaaggaaaggacagtggggagaaatgggcctggcatattttcagtctttaaaacaaaggagttgttatgagaattcacacacacatagacacacacacacacacacacacacacacacacacacacacaccctgggagacctatagtctcttaaactaagatcaagtagaagaaagcttattaacaagcaggatcctgccttatccaaactgcagatgttgctggcattgtgacaaaacccactgattgaaaggtcaactgccaaggcagaaacacctttaagcattgttcaaacaataaggcttccagaacttctgtagagcagtagctccagtcatggtctgtggtttgaggttttagctgtctcacctagctccctaacactgaaggagatacttgtgaaagttctgaccagcaaaagcaagccagagccttggaaactgatatgtggtagagtggccatcactcatggactaaaattgattcaccgctaaatttacccaggtgaagcagtttcgttgtctagaatgaaattatcatattccgccattggtatgcctttaacatttgtatagtttggtttgcttaaaacaccttaaaaccaatgacagctccagcactgcagaattggtgtgattctactttggaatagcttgtcacttgtcaccaaatgggtctgctttattagttacagctcttggcaggaggatccagggacccaaaaccacagggccaaacccaaatacctggcatgatggagcaaaagcaggtgtctacttggacccagatatagtgtctccattttaacaacaacaacaaaatagccagctggtacagctgtttgcattggccctacatgcattttttgcatggatatccagaaacatctgcccacacaaaactgcggggaaaaaaaatgaacactgaaatagttatttgctgttgcttccaacttgtagtgccagtctgcctttgctgtgaaacacacctgctcagagacagagaggggaagaagatctttggtaagtctaagtcctgacgctgagaagctttgtaaaagtgcagggagataaagggccaaaagggagatagatggaaaacactggaaaaagtattcactgatacaaatctatcaatgatggcagtccaattctcttgctaaagtggctgcacctcaccttgctggtcccccccacaccttttttgatgtccttctgcgtcatcatagcaaggcccttctgtaaattaacaagcctagatatttatactcttgacttccagtatctacagaagaatggttcatagatctaaacagaaatggtttagatctaaaaaggctgtatacgttgcccaggcccctgcatttctttaaatttataaaaatgaagctaaaacctggttacatttgaagcaaatatctacagtatttttcccttttagagatgtagcttccttagacatctgtagtggtaagcatttcccaaaagcatcttacctttctgaaccttagcagacatactgtgcagcttacctatcttctgcagaggaggaaactgagacctaggagaataaagtgactcactcaggtcacaccactaaagggttttcatcatttcagcatacctaagacagggcagtccaattttcagtattctcataagatggctattactcctctcaaaatgcatttccaaagtaggaacataggacttcgttggccacagggcagacatttttttagtgtctggaattaaaatgtttgaggtttaggtttgccattgtctttccaaaaggccaaataattcagatgtaaccacaccaagtgcaaacctgtgctttctatttcacgtactgttgtccatacagttctaaatacatgtgcaggggattgtagctaatgcattacacagtcgttcagtcttctctgcagacacactaagtgatcataccaacgtgttatacactcaactagaagataataagctttaatctgagggcaagtacagtcctgacaaaagggcaagtttgcataatagatcttcgatcaattctctctccaaggggcccgcaactaggctattattcataaaacacaactgaagaggggattggttttactgttaaatcatgtgttgctaaatcattttctgaacagtgtgttctaaatcagtcattgatttagtgtcagccacgtggagcacctcggcttaaagcagctccacaaaacctgacacaacacacacaccaattaaatggattttgttgagaatttaatcattcaatttggtcaaccagaatgacttcctgtggaactctgttttatgacagataatagttttccaacttgattgagtctctgtataccctgggatattgtattttttaatgaagggcattttcaaacttgtcaacttctcttttcagcacttgaaatgaaggcttatggaattctgactgtgaaatgaatttttctattgggagattatgcatgccaagatttattatttattgttagataattattatttatttgttaatactgattattgattattgctctgctgcattggtttagccccgctatggagaagacactttagaagtaactcagaatcacatccccataaaatctaagtctttacttcatcaagttttactttttgaattgctataaagacggaaaaattgatccctgcaaacacttgaagaagctgtgttttttttctttcaattaattccaaccaagacattaacgtccactttaccaaagaaacttacttggttggtttttagttggtgtttgttgtttgtttaccaaagaaaatattcgattcatcaaaaatattgctcctggtcaactaaaaaactgtgatactgggacttttttggccattcataaggaaaatttttaaaagtcaaggtaagggtgatattctctcatttagtggaagaagaagatgtcaattcacagggaatgtggtgttcgcaagaaagaaaatgatacttgaaatagggcattattgtttagcctacagcaacatttcaacaagcagcatcagggctcctcaggttaaaagaagtacagtttgtttcagagaaaaaggaagacaaaccctcgtgaaatgtttctccattgttccagctcataagttttactttgttttgggttttggagtttttagtttctttgatgtttgttttgctttaatttggtttgtggtttgtgtttgcttgtgtttgcttctgcctttcctaccttctgccttttactccctcagttttcagtcagaagtgtgataatcagatgccatcctccatggccacgcttatgtatgcaatataccgctccaaatgaggaccttggtaacccttgaccctttaattctaactaaccatcacccaatcgtaagtggcattatgggaccatgataccacttttctccagtgtcaatgacagagctcagctgtgtccatcacaagaaaaggtggaatgggcagctgtcttgggggtgtggcaagaggcagaacctcttggacacaaatgttatcttcctcataatggctttattcttttggatcctattaaagtacccctgtagcttatagtagtgtttgacctctgtgactctgttttctcatctgtaaaatggggataatatcagtaaatgtctttaaattcagcaaatacttatcgagtgccaaatatcgcccagatactgttcgagaggctggggacacaacagtcaacaaatcagattttttaaaatctgctcttgtagagtctacctttgagtgacattgcaggtatattgtggggattgaatgagatgagagatgacatttggaaagcactcttggaaaggcctggcaaagaaaagagactcaagacattatttgtaattcagcaatctcgcacagtagcattagggctcgggatgtaaagctactgagaagtagatttgagcctgagaattagggctacaaatacaatgagttgccacagaaggtagttaattaccagtcattttaggacatcaaaatgaagctgatcaccacatagtggggccactgtaaaggggctgcaagtcctggatgttggcatcatactatgatctttgaaaaaaacagatacaggcacttgcttttggggatggggaagggacaccactgattactgaataactgtggctggcttgtctgagggaatgtaaacattcccttgaggtaatttgcttttaattttgtgtaaaaagcaccaggtatttagagacataaagttcccgttttttaaaagaatagtaaatctgcaatacaaagaaaaatattaagttagtggattcgctggcaaagaactaagaatggctgcagccaacacactgcagagttcctccctgtggtggttacaactgttatttctgtttcatgccagtccaggagaaagcaaagaggaaagtggatgagctataatccgttcacctgaataggcagtgccaggatgtcccccccagcttgcctctcacccgccccgctgctgcccagctgatttgtttgaagtcctctttgatatctatgagagcaccgtggaaggaagaagaagggaggcgaccggagagctatggcctctgtgcagatttttgagttagattaaaattagtaccacctgattaggagcctacctggtgaggaaaaaagccttcttttcaaagtacaaaaaaaagcgatgtgtaccaaggagaaaaccagcagagaaagcttggtggaagaagtgatgttcttgtggaatgtgccagcagcttctccttccagaatgctgacaccagatgaatctttggttagaattaagcctacccctttgtttttcacatgagaaaactgaaccctcgagtaatgaaattatattcacagagctaattagaaacaggagactataattgaaatctagtttttagcctcaattctttctccattttgccactttactgccaaattctattcatctaaattattggggtcttaacctgggggccaaatgagttcatgggaggggtctctgagtttcctacaattaagttacatgcaaaaatgtgtgtatatgttcaacatgtgcattttcctaaactgagggctcagattccaaaagaggtctatgaccgaaaaagggtgaagaaccactgtcctaaattaatacagacctcattgggagtgtgatcctggtgtcctcattttggctaatgagcaatcaagaacttttgaactatcttttctctaaggatccaaaaatgcttcaaaatattggtttcttcatcccaagccaagtgcctacttctattcatttattcttcattcattctttcattcattcatttctttattctgcaaatgtattttcagtgccaattcatgttctagcagcagctaaatatgccctccacagcaggaccaggaaaggagccctctgtactgtgctcttgttggcaagaggaacaccaggttgctaccacattctcactgttgcaacaaattatatatagcctcaaattttcagtaaccatcccacacacacatacacacataaaggcagcagccaacaaagccaacatatagaagtgtgccctgtcaaagaaccaggaagagcagcctatttccaggttatatacagtgatatgctgtttacaactgcataccacatccttagaaggcctgctcccaaatgagccctactctgagatgtctacaccaggcatgctttcacacacgtgcagtaccctactctcaaaacaagtatggagagaataagtctcattcatctcgttaatatttttagtgggcaaagaagcaaccgtggccatggacagatgggtgcatttaaggacaggtgtggccgggcacagtggctcaagcctgtaatcccagcactttgggaggcggaggcgggcagatcacgaggttaagagattgagaccatcctggccagcatggtgaaaccccgcctctactaaaaaatacaaaaaaattagctgggcgtggtggcacgtgcctgtagtcccagctactcaggaggcaggagaatcccttgaacccgggaggtagaagttgcagtgagccgagatttcaccactgccctccagactggcaacagagtgagacttcgtctcaaaaaaataaaggacaagtgtgttttatacacaaatatgcagaagcccagttctcttgactccaagtcagaagctagataaaatagaggttgctgggggaagttggaaaataaatgactatactgtacttgttggctctgctgctgctgatataacttcaggcacaacggaagccgcctcggttggcctatgggaagggctgggtgaatcactgcttggccttgcatgaagcacaaaggacacaccaatggctgatcagtggcccttccatcatcttctgcccagccatgataaggaaagccttctattgagatggaggaatattagctcaactttgtagcatctgatgtaaagtttgaggggtttgtcttttttgtttgtttgtttgtttttttttgagatggagtctcactctgtcacccaggctggagtgcagtggcgccatctcagctcactgcaagctccacctcccaggttcacgacattctcctgcctcagcctcctgagtagctgggactacaggtgcccgccaccgcgcccggctaattgtgtgtgtgtgtgtgtgtgtgtgtgtgtgtgtgtttagtagagatggggtttcaccgtgttacccatgatagtctcgatctcctaacctcgtgatccacccgcctcggcctcccaaagtgctgggattacaggcgtgagccaccgtgcccggcaagggctttgttcattaggatcaacaaagtgctttgtctaattcctgcaaaatggcaaagacccagcccatttccattactcattccaggctcatgctcaggaaaactaataacgttctctttgacaaaacaatttccttaattttctaggatgaatcttgaacatgtttagctcagcctttcagatatttattctttaaattaccatcctgtcaaaattgcctttacgcactgatccagaatcaccaaggcagttgccacgatgcctcccaggactgtgggtgactgggcaaactggtaatgacccgttggctctgcttcacacacacacatacacattgacacacataaatgtacacatgcatatatgtgtgtacaacacaactataaaacatagaaacatatacctgtacatatgcacatgcttacatacacacatatcacagatgtgcatgcacacatacacatgcacaccaccttttacaatatgcctgacacatttgaggcacattaaaatgccttggcaggcccagccctatagttctgtaaggtttggcaggccaaaggcttcggatgtctgcaggataccattgaaaaaatgttatcttccccttctatatgtttcttatgcacgagcacagctaagagcagccaaatagtaagctttaaagaaaagaaacctggaaaagtgaatgtgccttgcaatttaaaaattgctaacagtttcacagtgggaaaattgcatttgttggaattttccaagtcataagcaagaagaatagcatagacccaaaacgacagagatctcttccaaggtatggaattgtggaaatttatttagaatatttgcttggtgatccagagaagggggaaagaagtggtgaggaagaatatatggggtgatccctccaaattgccaactcctcgtcttaggaagaagtgggcagtttccattgatccctagcatcagtttgacgggaaaaccggtgcatttcatcaacctcaaggaaaggaagtgccatgcatggaggcctggtgataggcaacatccatttagaagaacagtcacacaagcaacagaagaactatccaagactagaagcttagaagcttataccaaactctctgtctctctctctctctctcacacacacacacacagagtggatgggaggggacattaagaggaaccctagtgcagttcccccaaaaaaccttggcatagagtataacagggaaaaagtaattactgggaagctgaaaacaatcaaatatgtgaggaatgactgaatatgagctgaggataatgtaaattgttctggattgtctataagataaagatacagagcctgaatctatgtttttctgaataaagagaccccatattctcttttgaattattgacctataattcctcttcagcagctttgaatacactcaagttctcttcctattgtttatgatcccataatacaaccacccactatttgttgtggtttacaatccagcttagaacccttgagcaaaattattgaattattgaatgctaggcccaaacaaaagaaatttcagcttggttttagtaatttcttgatcaaacttctctcattcctctaaatgtacaaaggtttcaaagttgtaaaaaatatgtctacatagccaatgctcttagtatttttaacagcaaagataatctctgccaataattattaatgacaaaatagtgataactgttcaatgttgctttaacagtccaattgtagtaggtgagaaaacaaaaaagaagagaagctatgttgaatatttagtaatgttggaaaagatcctcaccctagacataaaatagtttaaacatttaaacatggcccctctcttattgtcattgctagtgaaagaagttcctgaaattgcatattacattgtaaagttttgggctaaatcacaatacatttttaagttgcttccatggcaatagatcgtaagaccacagcttgtcaaagtaaccactaattcagtattcagaaaccttatcatctgttcctccaaaaagaccccatagttaatgttgtgtttcccagtattttagttgggtttcttcacacttaggcaagtgggtgattctggtcataataaactattttcaaactaggaaaaagtatccaaatgctagagcacataatgagttcagcttggtcagttttgagacagataagcataaaaccctactagaaaaaaataatagtcaaacctaaagctttaaaaaatgtgagtcacatcacttttctccaggaaaggcagaacgtgctcagggtggaatttaatcaaaaatgtacccagaacaatttcccacaaagagctgtaatactttgcagcaaggggcattaataaactctaatttttaccgaaagtcaagagacacacagatcttttttggtaccctctacatcatcatagcaaggcccttctgaacattaacaagcctagatgtttctactgcttatttgcagtatctacaggggaatggttcgtggatataaacagaaatgttttatctgaagaggctgtgtatgccaccccagacccctgcatttcttaatatctataaaaatatgactaaacttgttacatttgaggcaaatatgtacagtatttttcccttttaaagatagtttaaaaaatcaaggtaataaaaaacggccaactctttcaggaaaaaaaaaatccggtattttgtactacttgagtttctctaatgcctaaaatatgcatttaaatcatcccacacctacacagaaacaaaatcagcagggaaaaccatcccactgatgattggcaattccaccgttcctctccatctgaccagctttcaccagagggcgatctttcatgcttgcacatcgagtttatacaatgtagaagcccccaagtcacctgggaaatggctcatgccaaatacatggagtccttagttgactatcttttcatattaaaatcccatcttccaatgaagcatcctgttttcaatactgatatcaaatttcgaatgtaaaggagatttcaaatgtattgctttcaccttttcttttttattcatttatttttaattgacataaaaattgtatatatttatgggatacaatgtgatgttttgatatatgtatgcattgtggaatgattaaatcaagctaattaaca

SEQ ID NO: 16787 - DNA, 736 bp, Homo sapiens
  source 1..736: mol_type = unassigned DNA
tcgagcgcaacctcgttaacagcctcttcccggtcaaccgctccaagcaccgtctctactcggacctgcagacccccgggcgctacggccgggtcatcgtcacctccttccagaaagccaacatgctggaccagcatcacaccgacctgatcttaaaggtcatggattatatgggacttttgaaatgttatcctcctggaggaaaactagagaagaccaacatgttaaagagagaactgcagcagtctatgcagactccatgctctccttttctctcaccactgccatgtacctggtcacctttggcataggggccagccctttcacgaacattgaggcagccaggattttctgctgcaattcctgtattgcaatcttcttcaactacctctatgtactctcgttttatggttccagcctagtgttcactggctacatagaaaacaattaccagcatagtatcttctgtagaaaagtcccaaagcctgaggcattgcaggagaagccggcatggtacaggtttctcctgacggccagattcagtgaggacacagctgaaggcgaggaagcgaacacttacgagagtcacctattggtatgtttcctcaaacgctattactgtgactggataaccaacacctatgtcaagccttttgtagttctcttttaccttatttatatttcctttgccttaatgggctatctgcaggtcagtgaagggtcagaccttagtaac

SEQ ID NO: 16788 - DNA, 2850 bp, Homo sapiens
  source 1..2850: mol_type = unassigned DNA
gagaacggggtagcccggcgcttacacatgtcacatgtgctttttaagacggccgggagcgcctgcgagctggatctggtggaggatgctgcggcaggtgcttcgcagagggctccagtcgttctgccacaggctgggtttgtgcgtgagccggcacccggtctttttcctcaccgtgcccgcagtcctgacaatcaccttcggcctcagcgcgctcaaccgcttccagcccgagggcgacctggagcgcctggtcgctcccagccacagcctggccaagatcgagcgcagcctggccagcagccttttccccctggaccagtccaaaagccagctctattcggacttacacacccctgggaggtatggcagggtgatcctcctctccccaaccggggacaatattttgctccaggctgaggggatcctgcagacccaccgagccgtgctggaaatgaaggatgggaggaacagttttattggacaccaactgggcggggtagtggaagtgccaaacagcaaagatcagcgggtcaagtcagccagagccattcaaatcacctactacctccagacctatggctctgccacccaagacctcataggggagaagtgggagaatgagttctgtaagcttataaggaagctccaggaggagcatcaagaactccagctctactctttagcatcctttagcctctggagggactttcataagaccagcatcctggccagaagcaaggtcctggtgagcctcgtgctgatcctgaccacagccaccctctccagctccatgaaggactgcttgcgcagtaagcccttcctgggcctcctgggggtgctcacagtatgcatctccatcatcacagcagcagggatcttcttcatcaccgatggaaagtacaactccaccctgctgggaatcccgttcttcgccatgggtcatggaactaaaggagtgtttgagcttctgtccggatggcggagaaccaaagagaacttgcccttcaaagacaggatagcagatgcctattctgatgtgatggtcacctataccatgaccagctccctgtacttcatcacttttggcatgggtgccagcccattcacaaacatagaggctgtgaaggtcttctgtcaaaacatgtgtgtctctattctgttgaactacttctacattttctccttctttggctcctgtctggtctttgctggccaactagagcaaaaccgctaccacagcatcttttgctgtaagatcccttctgcagaatacctggatcgcaaacctgtgtggttccagacagtgatgagtgatgggcatcaacagacgtcccatcatgagacgaacccctaccagcaccacttcattcagcacttcctccgtgaacattataatgaatggattaccaatatatatgtgaagccatttgttgtcatcctctatctcatttatgcctccttctccttcatggggtgcttacagatcagtgacggagccaacatcatcaatctactagccagtgattcgccaagtgtttcctatgccatggttcagcagaaatatttcagcaactatagccctgtgataggattctacgtctatgagcccctagagtactggaacagcagcgtccaggatgacctaagaagactctgtagtggattcactgcagtgtcctgggtggagcagtactaccagttcctgaaagtcagcaacgtcagtgccaataacaaaagtgacttcatcagtgtcctgcaaagctcatttttaaaaaagccagaattccagcattttcgaaatgatatcatcttctccaaggcaggggatgaaagcaatatcattgcttctcgcttgtatctggtggccaggactagcagagacaagcagaaagaaatcacagaagtgttggaaaagctgaggcccctatccctctcaaagagcatccgattcatcgtgttcaacccctcctttgtcttcatggaccattacagcttgtctgtcacagtgcctgttctgattgcaggctttggtgttctcctggtgttaatcctgacttttttcctagtgatccaccctctgggaaacttctggctaattcttagcgtcacctcaattgagctgggcgttctgggcttaatgacattatggaacgtcgacatggattgcatttctatcttgtgccttatctacaccttgaatttcgccattgaccactgtgcaccactgcttttcacatttgtattagcaactgagcacacccgaacacaatgtataaaaagctccttgcaagaccatgggacagccattttgcaaaatgttacttcttttcttattgggttagtcccccttctatttgtgccttcgaacctgaccttcacactgttcaaatgcttgctgctcactgggggttgcacacttctgcactgttttgttattttacctgtgttcctaacgtttttccccccttccaaaaagcaccacaagaaaaagaaacgtgccaagcgaaaggagagagaggaaattgaatgcatagaaattcaagagaacccggatcacgtcaccacagtatgaggggtatagaccagtggattatttttcttttccagtattgcacaatgatgcagggcaagtaaagctcagacctcagctgcttgggctggccaggggtaacaaggcaagtcagatcaagagtgcattattcatgacacttcaaggtgcctgcttcttggggggaagagggaataaaaaaagaggaaaaagttatttgcaaccttgttctcctctaaaaacaagtttctggatgtaatctgagagctcttccaaggaatggatgaatcaatggagtg

SEQ ID NO: 16789 - DNA, 3232 bp, Homo sapiens
  source 1..3232: mol_type = unassigned DNA
gtgctttttaagacggccgggagcgcctgcgagctggatctggtggaggatgctgcggcaggtgcttcgcagagggctccagtcgttctgccacaggctgggtttgtgcgtgagccggcacccggtctttttcctcaccgtgcccgcagtcctgacaatcaccttcggcctcagcgcgctcaaccgcttccagcccgagggcgacctggagcgcctggtcgctcccagccacagcctggccaagatcgagcgcagcctggccagcagccttttccccctggaccagtccaaaagccagctctattcggacttacacacccctgggaggtatggcagggtgatcctcctctccccaaccggggacaatattttgctccaggctgaggggatcctgcagacccaccgagccgtgctggaaatgaaggatgggaggaacagttttattggacaccaactgggcggggtagtggaagtgccaaacagcaaagatcagcgggtcaagtcagccagagccattcaaatcacctactacctccagacctatggctctgccacccaagacctcataggggagaagtgggagaatgagttctgtaagcttataaggaagctccaggaggagcatcaagaactccagctctactctttagcatcctttagcctctggagggactttcataagaccagcatcctggccagaagcaaggtcctggtgagcctcgtgctgatcctgaccacagccaccctctccagctccatgaaggactgcttgcgcagtaagcccttcctgggcctcctgggggtgctcacagtatgcatctccatcatcacagcagcagggatcttcttcatcaccgatggaaagtacaactccaccctgctgggaatcccgttcttcgccatgggcatctccactgaatttacctcaagctagaaacaaatttagtttggaagaaagaaaggagagaaggaaggagagaaaaaactggagaggagaaaaatatcacatttggaagattatatgtgaagactcctaggatacaataaaatcatcatcatcgtcatcatcatcatcatcaccaccaataccatcagagcaatctgagagttcattctagtctaagaacccagccctctattttttggaggttaagtatcctccaggtatttctttcctccctgtgcttaacagctgtgtgtctgtaacccatactgtcttttctatctcccacctgactcctctcatgggaaactaaattggtttaaatcatatggaagcattataagtactgtttagtgatgaaaataaattgattccaatcatataggtactttcctaaatactgactgatgaagtttagatgtgctgtaatttataaataaaatgaaggaggttacctggcaatatgtgagagggaggaacaattatcgtgtttgagatttaaaggaaagagtaatgaacacttcccaaataattctatgagataaatattaccctgatactaaaaccagacaaaaacatcacaaggaaggaaaactacaggttaataactttatgaacttgagtgtaaaaattctcaataaaatactagcaagccaaattcaatgaacaaatgaggtttatttctatttatttttatttttttttatttttattttattttattattttttttttttgagacggagtcttgctctgtcgcccaggccggactgcggactgcagtggcgcaatctcggctcactgcaagctccgcctcccaggttcacgccattctcctgcctcagcctcccgagtagctgggactacaggcgcccgccaccgcgcccggctaattttttgtatttttagtagagacggggtttcaccttgttagccaggatggtctcgatctcctgacctcatgatccacccgcctcggcctcccaaagtgctgggattacaggcgtgagccaccatgcccggcccaaatgaggtttattttataaatgcaagagtggtttaacatttgaaaatcattaacataatataccatcaatagaattaaggtcaaaaaccgcatggtcatctcaatagacaaagaaagggcatttgacaaactctaacaacattttatgacaacaaaataactctcaacaaactagtaatagaagggaacttgcttaatctgatacagatatccataaaaacccaaagctaatatcatatttaatggagaaagaatgaacttaaaagttgtacttcaatgaataccatcaagaaagtgaaaaacaaactcacagaatgggagaaaatattttcaaattatctatcttataagagacttgtatacagaatatttaaaggactattacagcttaataataaaaacacaacccaatttcaaagtggacagaagattcgaatagacatttattctaagaagataaacaagtggccaaaagtatatttaaaatgctcaaaataattagttattaaagaaatgcaaatcaaaaccacattgagcacatcatatccattaggatgactaaaatcaagaagtaaggcaataacaagtattgatgaggtaggttaggaactctttacacattgctgatgaaaatgtaaatgatgcagctcttttggaaaatagtctgacagttcctaaaaatgctaaacttagtattagcattttgattcagtaattccactgctaggtatatactcaagagaaatgaaaatatttatccacacaaaactgtacaaatgttcatagcaatattattcataatggcaaaaggtagacacaatccaaatgtccatcaactgatgaatggaaacataaaaagtggtatatgcatacaatggaatattattcagccattaaaaaggaaacaagtactgatacatgctccaatatggatgagcattgaaaatattttgataagtgaaagaagtcatgaaagtgtacataattgcatgattctatatatatgaaatgttcagagtaggcaaatatgtagagacaggaagtagatgagtagttgctgaggattggtgggttaggggatgaagccagggaatggagtcactgctaatgatacagaagttctttcaggttgatgaaatgttctgaaattgattatggcaatcattgcacaactttgtagtatactagaaacttttaaattgtacacttttaatcaatgaattgcttggcattatatcacaataaagctgttaaaaacaaac

SEQ ID NO: 16790 - DNA, 1203 bp, Homo sapiens
  source 1..1203: mol_type = unassigned DNA
gagagaaccagagggcgaagtgggagggcacaggggagactaaaaaggccagggaagttggcctgccggaagttcccagggagaaggcagcgcgttgtacccgagaaaaaagaaatcctctttttagaacatctcttggtggtaccatcagaaatgtcttccttaagtggaaaagtccaaaccgttttgggccttgtagagccaagcaaactgggccgtaccctgacccatgaacacctggccatgacctttgactgctgttactgtccacctcccccgtgccaggaagctatttccaaagaacctatcgtgatgaaaaatttatattggattcagaaaaacgcctattcccataaagaaaaccttcaattaaatcaggagacagaagccataaaggaagaactgttgtattttaaagctaatggtggaggggctttggtggaaaacacaaccactgggattagccgagacacacagacgttgaagaggcttgcagaagagactggcgtccatatcatatctggagccgggttttatgtggatgcaactcactcctcagagaccagggccatgtcagtggagcagcttaccgatgtccttatgaatgaaattctccatggagctgatggaaccagtatcaagtgtggcattattggagaaattggttgctcctggcctttgactgagagtgaaagaaaggttctccaggccacagctcatgcccaggctcagcttggttgtcctgttattatccatcctggacggagctccagggcaccatttcagattatccgaatattgcaagaagcaggcgcagacatctccaaaacagtcatgtcacacctggataggactattcttgataagaaagagctcttggagtttgctcaacttggctgctacttggaatatgatctctttggtactgaactacttcattaccaactcggcccagatattgacatgcctgatgataacaaaagaattagaagggtgcgtctcctggtggaagagggctgtgaagatcgaattctggtagcacatgacatacatacgaaaacccggctgatgaaatatggaggtcacggctattctcatatactcaccaatgttgttcctaaaatgttgctgagaggcataactgagaatgtgcttgataagattctaatagagaaccctaagcaatggctaactttcaaatag

SEQ ID NO: 16791 - DNA, 3777 bp, Homo sapiens
  source 1..3777: mol_type = unassigned DNA
aaaaaggccagggaagttggcctgccggaagttcccagggagaaggcagcgcgttgtacccgagattcagggtctggctctgcttcccaggctagagtgcatttggcgcgatcacagctcactgcagcctcgacctcctgagctcaagcgaacttcctgcctcagcctcctgagcttcctgagtagctgcgactacagaaaaaagaaatcctctttttagaacatctcttggtggtaccatcagaaatgtcttccttaagtggaaaagtccaaaccgttttgggccttgtagagccaagcaaactgggccgtaccctgacccatgaacacctggccatgacctttgactgctgttactgtccacctcccccgtgccaggaagctatttccaaagaacctatcgtgatgaaaaatttatattggattcagaaaaacgcctattcccataaagaaaaccttcaattaaatcaggagacagaagccataaaggaagaactgttgtattttaaagctaatggtggaggggctttggtggaaaacacaaccactgggattagccgagacacacagacgttgaagaggcttgcagaagagactggcgtccatatcatatctggagccgggttttatgtggatgcaactcactcctcagagaccagggccatgtcagtggagcagcttaccgatgtccttatgaatgaaattctccatggagctgatggaaccagtatcaagtgtggcattattggagaaattggttgctcctggcctttgactgagagtgaaagaaaggttctccaggccacagctcatgcccaggctcagcttggttgtcctgttattatccatcctggacggagctccagggcaccatttcagattatccgaatattgcaagaagcaggcgcagacatctccaaaacagtcatgtcacacctggataggactattcttgataagaaagagctcttggagtttgctcaacttggctgctacttggaatatgatctctttggtactgaactacttcattaccaactcggcccagatattgacatgcctgatgataacaaaagaattagaagggtgcgtctcctggtggaagagggctgtgaagatcgaattctggtagcacatgacatacatacgaaaacccggctgatgaaatatggaggtcacggctattctcatatactcaccaatgttgttcctaaaatgttgctgagaggcataactgagaatgtgcttgataagattctaatagagaaccctaagcaatggctaactttcaaataggatggttgcttatgaattcacaccttgagtataaaacttgcagagaacattcagcgatttccagtccactgtgagatattaatcagttacctaggactaatgacagatcatttccttctgatgagaactaggagggtttgccttctctgagaccagctattacaactgtgcctctagggagttactcagcctaattgagccctattattttaacttaacaaaataaatacagaagtacctatttctaaacaatgatttaaagtctatatcccctaagcggagttgttgtttttctccctaatctatcagctgcactacttgagaaaatttaaagtgtttctagttaaattatttccttcttgagcgatctaatgtttcttgtaatattgatgatcctactaattatcctgctgttctttaattaatgcttaatgaataatatggcactgtaaaatagcttctgcaacaagggaagttaaattttgagacttttttccccaaaggatactgactgtaatacaattaccaattcacaatgataaaaatattttgaaaggttaattttatactgtccacctatctatatattcttctactgaaatgattttgatatctttggctttccggtatctatttttgccatacattttgctgttttgcaaagtttgtataagaacacataacactactgaattataaaaattcaatcataaaagtcaaaatatattacataatatagtttaatgaatcattacatttataataacaaaggccacaatttaattaattggtaagatataatgcaaaaaaaaaaagagaaatgtttgccttatgtatattccctttatttcctttaccttttgtttttccttggacctaaacagagaaaataatgcttatgtatctgaagaaaaggtcagatctattggaaatgacagcccgatacttgagcctcctctttaaaaggtatccagccctgatattttgtgtaaataaaatgtttttaaaacctgttagttaaaacacttaggtgatgggcactgctgcttataaattcatcttttggttgaatcctcactatgctatttggtacctaaaaatattctccaaacccttgctgccagttcctctttgataaatatatagttaattcgaaataaaatccattgcaattcatttatgagttatcttacatatcacaaagaccaattagaattagtcattattcttgatgaagagtctgtttttaatcataaaaatcatgacagttactcagacccaggcatttcaacagagctaacaccaccttcagataggcacaccatgcataactcttgggaagttgagctttgctaaataaaagatatttctgctgatcaaagatgatcaagctttctgtgtattggaacagaaagtaacaaagaggaatgagccaggagaacaaactaattcctttaaataaataaaaaaaaaaaatgcaaatgtccttcaccagtaaagcaagcaaatttttaaaatctctgtttttgaaatctactcgtcaaagagttttcagaggcaatgaaaggggaacagatttttcattgtaatagtggaagttgtgtgatagttaggagatatcaacatgcatttttaatcttttccttagatgaaagagatggcttttggcagtgtgttctaaccagaaagaaaggatttgtattactctccaaatctactgtactgtcagcttcactccacctgagaaaaaagaaaaaaaaattgatagctcaaatgcatgtaattcataaacactgcaaaggagagccacttggtgtctgcagtcctcatattaacagtctgtcacagaatgcagttaaagtattgattggcatatggtaatagagcaaccatagccttaacttacagacctgtgaaataaagggcattttgacctaatacaattaattttctggataactcttaaagagaagtcattttaactgtttttgctactccatatattgtcattcaaaatatattttaacccaaaataagttaaataatttgtgcatgtttgtgtgtgtatatatgcatacacttttttatattaaaattttgaggctatacagccactgtgccctgtggaataaagccatatatataaatgttttatatgtatatgttttatacataaataaaacatttcatctaatatatatatgtgtgtgtgagtatatgtgtgcatgtttagcagatatttgtataaaatataaacactctgttgtcatataggctatatgcgaaattgttaattttaaaataacctcaggccacagacttgtagtaatcatttgaaggcctcacctagtgtccccttggtgacgtatgcagcagctcaaattaaacctttgtgcattgggttatgaataatcttttcttccaaagatggcaaaagcctcggtttgatttgatactaaagaataaatttctctgactttc

SEQ ID NO: 16792 - DNA, 567 bp, Homo sapiens
  source 1..567: mol_type = unassigned DNA
attagccgagacacacagacgttgaagaggcttgcagaagagactggcgtccatatcatatctggagccgggttttatgtggatgcaactcactcctcagagaccagggccatgtcagtggagcagcttaccgatgtccttatgaatgaaattctccatggagctgatggaaccagtatcaagtgtggcattattggagaaattggttgctcctggcctttgactgagagtgaaagaaaggttctccaggccacagctcatgcccaggctcagcttggttgtcctgttattatccatcctggacggagctccagggcaccatttcagattatccgaatattgcaagaagcaggcgcagacatctccaaaacagtcatgtcacacctggataggtaagtaggctgtcttacaaatggatgcaaactgccatataattaatgcatgatcaaattaagaatctacagtaatcagtcaatgcaatactaatcacgcagagaaaaccactaactatatggaaggtagtatttataaagtttcacaactgacatgaataaaagtcaatgctgc

SEQ ID NO: 16793 - DNA, 3212 bp, Homo sapiens
  source 1..3212: mol_type = unassigned DNA
gagagaaccagagggcgaagtgggagggcacaggggagactaaaaaggccagggaagttggcctgccggaagttcccagggagaaggcagcgcgttgtacccgagcttaccgatgtccttatgaatgaaattctccatggagctgatggaaccagtatcaagtgtggcattattggagaaattggttgctcctggcctttgactgagagtgaaagaaaggttctccaggccacagctcatgcccaggctcagcttggttgtcctgttattatccatcctggacggagctccagggcaccatttcagattatccgaatattgcaagaagcaggcgcagacatctccaaaacagtcatgtcacacctggataggactattcttgataagaaagagctcttggagtttgctcaacttggctgctacttggaatatgatctctttggtactgaactacttcattaccaactcggcccagatattgacatgcctgatgataacaaaagaattagaagggtgcgtctcctggtggaagagggctgtgaagatcgaattctggtagcacatgacatacatacgaaaacccggctgatgaaatatggaggtcacggctattctcatatactcaccaatgttgttcctaaaatgttgctgagaggcataactgagaatgtgcttgataagattctaatagagaaccctaagcaatggctaactttcaaataggatggttgcttatgaattcacaccttgagtataaaacttgcagagaacattcagcgatttccagtccactgtgagatattaatcagttacctaggactaatgacagatcatttccttctgatgagaactaggagggtttgccttctctgagaccagctattacaactgtgcctctagggagttactcagcctaattgagccctattattttaacttaacaaaataaatacagaagtacctatttctaaacaatgatttaaagtctatatcccctaagcggagttgttgtttttctccctaatctatcagctgcactacttgagaaaatttaaagtgtttctagttaaattatttccttcttgagcgatctaatgtttcttgtaatattgatgatcctactaattatcctgctgttctttaattaatgcttaatgaataatatggcactgtaaaatagcttctgcaacaagggaagttaaattttgagacttttttccccaaaggatactgactgtaatacaattaccaattcacaatgataaaaatattttgaaaggttaattttatactgtccacctatctatatattcttctactgaaatgattttgatatctttggctttccggtatctatttttgccatacattttgctgttttgcaaagtttgtataagaacacataacactactgaattataaaaattcaatcataaaagtcaaaatatattacataatatagtttaatgaatcattacatttataataacaaaggccacaatttaattaattggtaagatataatgcaaaaaaaaaaagagaaatgtttgccttatgtatattccctttatttcctttaccttttgtttttccttggacctaaacagagaaaataatgcttatgtatctgaagaaaaggtcagatctattggaaatgacagcccgatacttgagcctcctctttaaaaggtatccagccctgatattttgtgtaaataaaatgtttttaaaacctgttagttaaaacacttaggtgatgggcactgctgcttataaattcatcttttggttgaatcctcactatgctatttggtacctaaaaatattctccaaacccttgctgccagttcctctttgataaatatatagttaattcgaaataaaatccattgcaattcatttatgagttatcttacatatcacaaagaccaattagaattagtcattattcttgatgaagagtctgtttttaatcataaaaatcatgacagttactcagacccaggcatttcaacagagctaacaccaccttcagataggcacaccatgcataactcttgggaagttgagctttgctaaataaaagatatttctgctgatcaaagatgatcaagctttctgtgtattggaacagaaagtaacaaagaggaatgagccaggagaacaaactaattcctttaaataaataaaaaaaaaaaatgcaaatgtccttcaccagtaaagcaagcaaatttttaaaatctctgtttttgaaatctactcgtcaaagagttttcagaggcaatgaaaggggaacagatttttcattgtaatagtggaagttgtgtgatagttaggagatatcaacatgcatttttaatcttttccttagatgaaagagatggcttttggcagtgtgttctaaccagaaagaaaggatttgtattactctccaaatctactgtactgtcagcttcactccacctgagaaaaaagaaaaaaaaattgatagctcaaatgcatgtaattcataaacactgcaaaggagagccacttggtgtctgcagtcctcatattaacagtctgtcacagaatgcagttaaagtattgattggcatatggtaatagagcaaccatagccttaacttacagacctgtgaaataaagggcattttgacctaatacaattaattttctggataactcttaaagagaagtcattttaactgtttttgctactccatatattgtcattcaaaatatattttaacccaaaataagttaaataatttgtgcatgtttgtgtgtgtatatatgcatacacttttttatattaaaattttgaggctatacagccactgtgccctgtggaataaagccatatatataaatgttttatatgtatatgttttatacataaataaaacatttcatctaatatatatatgtgtgtgtgagtatatgtgtgcatgtttagcagatatttgtataaaatataaacactctgttgtcatataggctatatgcgaaattgttaattttaaaataacctcaggccacagacttgtagtaatcatttgaaggcctcacctagtgtccccttggtgacgtatgcagcagctcaaattaaacctttgtgcattgggttatgaataatcttttcttccaaagatggcaaaagcctcggtttgatttgatactaaagaataaatttctctgactttcccagtgaa

SEQ ID NO: 16794 - DNA, 3448 bp, Homo sapiens
  source 1..3448: mol_type = unassigned DNA
agaaaaaagaaatcctctttttagaacatctcttggtggtaccatcagaaatgtcttccttaagtggaaaagtccaaaccgttttgggccttgtagagccaagcaaactgggccgtaccctgacccatgaacacctggccatgacctttgactgctgttactgtccacctcccccgtgccaggaagctatttccaaagaacctatcgtgatgaaaaatttatattggattcagaaaaacgcctattcccataaagaaaaccttcaattaaatcaggagacagaagccataaaggaagaactgttgtattttaaagctaatggtggaggggctttggtggaaaacacaaccactgggattagccgagacacacagacgttgaagaggcttgcagaagagactggcgtccatatcatatctggagccgggttttatgtggatgcaactcactcctcagagaccagggccatgtcagtggagcagcttaccgatgtccttatgaatgaaattctccatggagctgatggaaccagtatcaagtgtggcattattggagaaattggttgctcctggcctttgactgagagtgaaagaaaggttctccaggccacagctcatgcccaggctcagcttggttgtcctgttattatccatcctggacggagctccagggcaccatttcagattatccgaatattgcaagaagcaggcgcagacatctccaaaacagtcatgtcacacctggatagggtgcgtctcctggtggaagagggctgtgaagatcgaattctggtagcacatgacatacatacgaaaacccggctgatgaaatatggaggtcacggctattctcatatactcaccaatgttgttcctaaaatgttgctgagaggcataactgagaatgtgcttgataagattctaatagagaaccctaagcaatggctaactttcaaataggatggttgcttatgaattcacaccttgagtataaaacttgcagagaacattcagcgatttccagtccactgtgagatattaatcagttacctaggactaatgacagatcatttccttctgatgagaactaggagggtttgccttctctgagaccagctattacaactgtgcctctagggagttactcagcctaattgagccctattattttaacttaacaaaataaatacagaagtacctatttctaaacaatgatttaaagtctatatcccctaagcggagttgttgtttttctccctaatctatcagctgcactacttgagaaaatttaaagtgtttctagttaaattatttccttcttgagcgatctaatgtttcttgtaatattgatgatcctactaattatcctgctgttctttaattaatgcttaatgaataatatggcactgtaaaatagcttctgcaacaagggaagttaaattttgagacttttttccccaaaggatactgactgtaatacaattaccaattcacaatgataaaaatattttgaaaggttaattttatactgtccacctatctatatattcttctactgaaatgattttgatatctttggctttccggtatctatttttgccatacattttgctgttttgcaaagtttgtataagaacacataacactactgaattataaaaattcaatcataaaagtcaaaatatattacataatatagtttaatgaatcattacatttataataacaaaggccacaatttaattaattggtaagatataatgcaaaaaaaaaaagagaaatgtttgccttatgtatattccctttatttcctttaccttttgtttttccttggacctaaacagagaaaataatgcttatgtatctgaagaaaaggtcagatctattggaaatgacagcccgatacttgagcctcctctttaaaaggtatccagccctgatattttgtgtaaataaaatgtttttaaaacctgttagttaaaacacttaggtgatgggcactgctgcttataaattcatcttttggttgaatcctcactatgctatttggtacctaaaaatattctccaaacccttgctgccagttcctctttgataaatatatagttaattcgaaataaaatccattgcaattcatttatgagttatcttacatatcacaaagaccaattagaattagtcattattcttgatgaagagtctgtttttaatcataaaaatcatgacagttactcagacccaggcatttcaacagagctaacaccaccttcagataggcacaccatgcataactcttgggaagttgagctttgctaaataaaagatatttctgctgatcaaagatgatcaagctttctgtgtattggaacagaaagtaacaaagaggaatgagccaggagaacaaactaattcctttaaataaataaaaaaaaaaaatgcaaatgtccttcaccagtaaagcaagcaaatttttaaaatctctgtttttgaaatctactcgtcaaagagttttcagaggcaatgaaaggggaacagatttttcattgtaatagtggaagttgtgtgatagttaggagatatcaacatgcatttttaatcttttccttagatgaaagagatggcttttggcagtgtgttctaaccagaaagaaaggatttgtattactctccaaatctactgtactgtcagcttcactccacctgagaaaaaagaaaaaaaaattgatagctcaaatgcatgtaattcataaacactgcaaaggagagccacttggtgtctgcagtcctcatattaacagtctgtcacagaatgcagttaaagtattgattggcatatggtaatagagcaaccatagccttaacttacagacctgtgaaataaagggcattttgacctaatacaattaattttctggataactcttaaagagaagtcattttaactgtttttgctactccatatattgtcattcaaaatatattttaacccaaaataagttaaataatttgtgcatgtttgtgtgtgtatatatgcatacacttttttatattaaaattttgaggctatacagccactgtgccctgtggaataaagccatatatataaatgttttatatgtatatgttttatacataaataaaacatttcatctaatatatatatgtgtgtgtgagtatatgtgtgcatgtttagcagatatttgtataaaatataaacactctgttgtcatataggctatatgcgaaattgttaattttaaaataacctcaggccacagacttgtagtaatcatttgaaggcctcacctagtgtccccttggtgacgtatgcagcagctcaaattaaacctttgtgcattgggttatgaataatcttttcttccaaagatggcaaaagcctcggtttgatttgatactaaagaataaatttctctgactttcccagtgaa

SEQ ID NO: 16795 - DNA, 2939 bp, Homo sapiens
  source 1..2939: mol_type = unassigned DNA
gtgagtgcgacaccccgccgagggaaggtcgccgagtgaggccgaggccgcgttgggggctccctggaagcggccccctagcctttctcgcatcggtggtggcagtcgttcctgcctgggggcgggaggtccaggatccttgttccggttaccgttggcgggtggaggacatttttcctccagatgtctgcttcccccacccctgaaccgttccttggcttccccatgccggaaatcctacttttacccctttggctgtctgggttactcgcctctttcggtaacttcaccctaggccttaagctcccggtagctgctcgccatgcggcgccctgaagcgtgaaccttcgtgggtcgcctctcggctgcttgggcgctccggttctgttgctttgtggtcccggggccaggccctgagtcgagtgcacctgtggtgggtgccgccaggtgcctggcggagctcctgggagagccccacgcggacctcgccgtgagctgcaggtactgctaggcaactagaaggaagccatgcccacgccgcaacatacttccctctccagtgtctgggtttcttgagtgtgggtacttccagtccgcctcctaactccagtctcttgaaaacacgggaggttgccaaaactcagccgcttccctggcagcgaggaggagttaccattgagcaggtagttccgcacgtgtcgactttggaaagatacggacattttctgtgtttcatgttctacttgaggcagcctgcttctgcaaagtggtacgatcgaagggactatgtcttcattgaattttgtgttgaagacagtaaggatgttaatgtaaattttgaaaaatccaaacttacattcagttgtctcggaggaagtgataattttaagcatttaaatgaaattgatctttttcactgtattgatccaaatgattccaagcataaaagaacggacagatcaattttatgttgtttacgaaaaggagaatctggccagtcatggccaaggttaacaaaagaaagggcaaagcttaattggcttagtgtcgacttcaataattggaaagactgggaagatgattcagatgaagacatgtctaattttgatcgtttctctgagatgatgaacaacatgggtggtgatgaggatgtagatttaccagaagtagatggagcagatgatgtaagtctaaaaattcttttttctgtttactttcatactattaaatagtaagaaacaacatatttacaaatggttttatatagattcacaattacttcttattttctaaaaaaaaagaaaagggaaaagcaatttttaaaatgtgcccatttttgacgaatgggggtatctattagggaactggttgtaccgtagaccattcctaaatggattagatttccaaagaatcattgtatagagacattatatattaataccgtactcaattataacagtcagtttaggccgggcgaggtggctcatgtctgttatcccagcaggccaggtgggcagagtacgtgaggtcaggagttcgagaccagcctggccaacatggtgaaaccctgtcttaaaaacttagccagacatgatggcaggtgcctgtaatcccagctactggtgagctgaggtgggagaatcgcttgaacctgggaggcggaggttgcagtgagccaagatcacaccattgcactccagtgtgggcagcagagcgaggctccatctcaaaaagaaagaagagagtcagtttataggattcacaagacagtgatgatgaaaaaatgccagatctggagtaaggaatattgtcatcacctggattttgagaaagaaaaataacttctctgcaagatttcataattgagagaattcctgagttgatagctctaaaggcagatatgctgtatttgcctactttaacccatttttcaacctgtttgttttttaaaaggcttcactaagggttgatatgtaccattgtatggggcaattttaagtcagctaaggcaataaccttatgcatgaacatttcccagactttcatgaagctgttgaggtcctaggcaattaatgcagcagttgcgataaataaaaacatctcacctaagtctccttttcttcataacatagatactgacatgataggaagctctcagcttagggaaagagaataaattttagattatagaacatggattcaaaagtgactggaacaaattggctgacaccttactggtaacctgctattcttctggtgttatccttcaggattgttccactaaaatttatttttcaaaaaatttacttcacattattctatgtaagtgatgacttgtcagtgttccaggtgtatcttagctaaaactagagaatgccctaacttagatggtttttgaagcctatacaattggtattgtttgacccttaagcttttacatctcttagcatggaggacgaagaaagctgtacattgttgcttgagagtctgtacatttagtccagatttgtatttgcactgtcagtatggcaaatgagtgaaaaatgtttaatacactattggattttttatttcctttttttgattcagcttatacccgggctgaaaacctcaatttatgttcatgacagtggggatttttttaaatgtctacattctttctaataaactgttggaagacttcttggctgtccttttaagtgtctggcttactgtaatttttatgtatttaccatttactggaatggagtttatttgaggaagaatttgggattattcctctgtttgaaaaaagaggcttgctgtaatgtcacaggaaaccttttaaaagtggatctgtaatagcatattgtagatgcactttgcagcagttggaaaagaaagtgttgtgtgatttgattgaaataaaactaaatgtgttgtcctcctaaatctttgaa

SEQ ID NO: 16796 - DNA, 1920 bp, Homo sapiens
  source 1..1920: mol_type = unassigned DNA
ccagccgccgcccggcctcaccacccctcgtttgcacgcacgcacgttcattctccgtcctcgcgccccttttcctacactttcctcttctccccgaccggaggagccgctctttccgcgcggtgcattctggggcccgaggtcgagcccgccgctgccgccgtcgcctgagggaagcgagaagaggccgcgaccggagagaaaaagcggagtcgccaccggagagaagtcgactccctagcagcagccgccgccagagaggcccgcccaccagttcgcccgtccccctgccccgttcacaatgcagcctgcttctgcaaagtggtacgatcgaagggactatgtcttcattgaattttgtgttgaagacagtaaggatgttaatgtaaattttgaaaaatccaaacttacattcagttgtctcggaggaagtgataattttaagcatttaaatgaaattgatctttttcactgtattgatccaaatgattccaagcataaaagaacggacagatcaattttatgttgtttacgaaaaggagaatctggccagtcatggccaaggttaacaaaagaaagggcaaagcttaattggcttagtgtcgacttcaataattggaaagactgggaagatgattcagatgaagacatgtctaattttgatcgtttctctgagatgatgaacaacatgggtggtgatgaggatgtagatttaccagaagtagatggagcagatgatgattcacaagacagtgatgatgaaaaaatgccagatctggagtaaggaatattgtcatcacctggattttgagaaagaaaaataacttctctgcaagatttcataattgagagaattcctgagttgatagctctaaaggcagatatgctgtatttgcctactttaacccatttttcaacctgtttgttttttaaaaggcttcactaagggttgatatgtaccattgtatggggcaattttaagtcagctaaggcaataaccttatgcatgaacatttcccagactttcatgaagctgttgaggtcctaggcaattaatgcagcagttgcgataaataaaaacatctcacctaagtctccttttcttcataacatagatactgacatgataggaagctctcagcttagggaaagagaataaattttagattatagaacatggattcaaaagtgactggaacaaattggctgacaccttactggtaacctgctattcttctggtgttatccttcaggattgttccactaaaatttatttttcaaaaaatttacttcacattattctatgtaagtgatgacttgtcagtgttccaggtgtatcttagctaaaactagagaatgccctaacttagatggtttttgaagcctatacaattggtattgtttgacccttaagcttttacatctcttagcatggaggacgaagaaagctgtacattgttgcttgagagtctgtacatttagtccagatttgtatttgcactgtcagtatggcaaatgagtgaaaaatgtttaatacactattggattttttatttcctttttttgattcagcttatacccgggctgaaaacctcaatttatgttcatgacagtggggatttttttaaatgtctacattctttctaataaactgttggaagacttcttggctgtccttttaagtgtctggcttactgtaatttttatgtatttaccatttactggaatggagtttatttgaggaagaatttgggattattcctctgtttgaaaaaagaggcttgctgtaatgtcacaggaaaccttttaaaagtggatctgtaatagcatattgtagatgcactttgcagcagttggaaaagaaagtgttgtgtgatttgattgaaataaaactaaatgtgttgtcctcctaaatctttg

SEQ ID NO: 16797 - DNA, 1547 bp, Homo sapiens
  source 1..1547: mol_type = unassigned DNA
ggcctcaccacccctcgtttgcacgcacgcacgttcattctccgtcctcgcgccccttttcctacactttcctcttctccccgaccggaggagccgctctttccgcgcggtgcattctggggcccgaggtcgagcccgccgctgccgccgtcgcctgagggaagcgagaagaggccgcgaccggagagaaaaagcggagtcgccaccggagagaagtcgactccctagcagcagccgccgccagagaggcccgcccaccagttcgcccgtccccctgccccgttcacaatgcagcctgcttctgcaaagtggtacgatcgaagggactatgtcttcattgaattttgtgttgaagacagtaaggatgttaatgtaaattttgaaaaatccaaacttacattcagttgtctcggaggaagtgataattttaagcatttaaatgaaattgatctttttcactgtattgatccaaatgattccaagcataaaagaacggacagatcaattttatgttgtttacgaaaaggagaatctggccagtcatggccaaggttaacaaaagaaagggcaaagatgatgaacaacatgggtggtgatgaggatgtagatttaccagaagtagatggagcagatgatgattcacaagacagtgatgatgaaaaaatgccagatctggagtaaggaatattgtcatcacctggattttgagaaagaaaaataacttctctgcaagatttcataattgagagaattcctgagttgatagctctaaaggcagatatgctgtatttgcctactttaacccatttttcaacctgtttgttttttaaaaggcttcactaagggttgatatgtaccattgtatggggcaattttaagtcagctaaggcaataaccttatgcatgaacatttcccagactttcatgaagctgttgaggtcctaggcaattaatgcagcagttgcgataaataaaaacatctcacctaagtctccttttcttcataacatagatactgacatgataggaagctctcagcttagggaaagagaataaattttagattatagaacatggattcaaaagtgactggaacaaattggctgacaccttactggtaacctgctattcttctggtgttatccttcaggattgttccactaaaatttatttttcaaaaaatttacttcacattattctatgtaagtgatgacttgtcagtgttccaggtgtatcttagctaaaactagagaatgccctaacttagatggtttttgaagcctatacaattggtattgtttgacccttaagcttttacatctcttagcatggaggacgaagaaagctgtacattgttgcttgagagtctgtacatttagtccagatttgtatttgcactgtcagtatggcaaatgagtgaaaaatgtttaatacactattggattttttatttcctttttttgattcagcttatacccgggctgaaaacctcaatttatgttcatgacagtggggatttttttaaatgtctacattctttctaataa

SEQ ID NO: 16798 - DNA, 941 bp, Homo sapiens
  source 1..941: mol_type = unassigned DNA
gaggtcgagcccgccgctgccgccgtcgcctgagggaagcgagaagaggccgcgaccggagagaaaaagcggagtcgccaccggagagaagtcgactccctagcagcagccgccgccagagaggcccgcccaccagttcgcccgtccccctgccccgttcacaatgcagcctgcttctgcaaagtggtacgatcgaagggactatgtcttcattgaattttgtgttgaagacagtaaggatgttaatgtaaattttgaaaaatccaaacttacattcagttgtctcggaggaagtgataattttaagcatttaaatgaaattgatctttttcactgtattgatccaaatcttaattggcttagtgtcgacttcaataattggaaagactgggaagatgattcagatgaagacatgtctaattttgatcgtttctctgagatgatgaacaacatgggtggtgatgaggatgtagatttaccagaagtagatggagcagatgatgattcacaagacagtgatgatgaaaaaatgccagatctggagtaaggaatattgtcatcacctggattttgagaaagaaaaataacttctctgcaagatttcataattgagagaattcctgagttgatagctctaaaggcagatatgctgtatttgcctactttaacccatttttcaacctgtttgttttttaaaaggcttcactaagggttgatatgtaccattgtatggggcaattttaagtcagctaaggcaataaccttatgcatgaacatttcccagactttcatgaagctgttgaggtcctaggcaattaatgcagcagttgcgataaataaaaacatctcacctaagtctccttttcttcataacatagatactgacatgataggaagctctcagcttagggaaagagaataaattttagattatagaacat

SEQ ID NO: 16799 - DNA, 1017 bp, Homo sapiens
  source 1..1017: mol_type = unassigned DNA
ctcaccacccctcgtttgcacgcacgcacgttcattctccgtcctcgcgccccttttcctacactttcctcttctccccgaccggaggagccgctctttccgcgcggtgcattctggggcccgaggtcgagcccgccgctgccgccgtcgcctgagggaagcgagaagaggccgcgaccggagagaaaaagcggagtcgccaccggagagaagtcgactccctagcagcagccgccgccagagaggcccgcccaccagttcgcccgtccccctgccccgttcacaatgcagcctgcttctgcaaagtggtacgatcgaagggactatgtcttcattgaattttgtgttgaagacagtaaggatgttaatgtaaattttgaaaaatccaaacttacattcagttgtctcggaggaagtgataattttaagcatttaaatgaaattgatctttttcactgtattgatccaaatgattccaagcataaaagaacggacagatcaattttatgttgtttacgaaaaggagaatctggccagtcatggccaaggttaacaaaagaaagggcaaagcttaattggcttagtgtcgacttcaataattggaaagactgggaagatgattcagatgaagacatgtctaattttgatcgtttctctgaggattcacaagacagtgatgatgaaaaaatgccagatctggagtaaggaatattgtcatcacctggattttgagaaagaaaaataacttctctgcaagatttcataattgagagaattcctgagttgatagctctaaaggcagatatgctgtatttgcctactttaacccatttttcaacctgtttgttttttaaaaggcttcactaagggttgatatgtaccattgtatggggcaattttaagtcagctaaggcaataaccttatgcatgaacatttcccagactttcatgaagctgttgaggtcctaggcaattaatgcagcagttgcgataaataaaaacatctcacctaagtct

SEQ ID NO: 16800 - DNA, 957 bp, Homo sapiens
  source 1..957: mol_type = unassigned DNA
tagaaagccgcgccggagcccaaaaacaaggactgcgcacgcgcggcggcaaggcccgggcattttgctgcgtcaccagccgccgcccggcctcaccacccctcgtttgcacgcacgcacgttcattctccgtcctcgcgccccttttcctacactttcctcttctccccgaccggaggagccgctctttccgcgcggtgcattctggggcccgaggtcgagcccgccgctgccgccgtcgcctgagggaagcgagaagaggccgcgaccggagagaaaaagcggagtcgccaccggagagaagtcgactccctagcagcagccgccgccagagaggcccgcccaccagttcgcccgtccccctgccccgttcacaatgcagcctgcttctgcaaagtggtacgatcgaagggactatgtcttcattgaattttgtgttgaagacagtaaggatgttaatgtaaattttgaaaaatccaaacttacattcagttgtttacgaaaaggagaatctggccagtcatggccaaggttaacaaaagaaagggcaaagcttaattggcttagtgtcgacttcaataattggaaagactgggaagatgattcagatgaagacatgtctaattttgatcgtttctctgagatgatgaacaacatgggtggtgatgaggatgtagatttaccagaagtagatggagcagatgatgattcacaagacagtgatgatgaaaaaatgccagatctggagtaaggaatattgtcatcacctggattttgagaaagaaaaataacttctctgcaagatttcataattgagagaattcctgagttgatagctctaaaggcagatatgctgtatttgcctactttaacccatttttcaacctgtttgttttttaaaaggcttcactaagggttgatatgtaccattgtatggggcaattttaagtcagctaa

SEQ ID NO: 16801 - DNA, 2077 bp, Homo sapiens
  source 1..2077: mol_type = unassigned DNA
gctgggaggccccgccctttccgtagatatctctagaaagccgcgccggagcccaaaaacaaggactgcgcacgcgcggcggcaaggcccgggcattttgctgcgtcaccagccgccgcccggcctcaccacccctcgtttgcacgcacgcacgttcattctccgtcctcgcgccccttttcctacactttcctcttctccccgaccggaggagccgctctttccgcgcggtgcattctggggcccgaggtcgagcccgccgctgccgccgtcgcctgagggaagcgagaagaggccgcgaccggagagaaaaagcggagtcgccaccggagagaagtcgactccctagcagcagccgccgccagagaggcccgcccaccagttcgcccgtccccctgccccgttcacaatactccattcagaagagagaagaggggagtgactttatgtctttggaaaagcagcctgcttctgcaaagtggtacgatcgaagggactatgtcttcattgaattttgtgttgaagacagtaaggatgttaatgtaaattttgaaaaatccaaacttacattcagttgtctcggaggaagtgataattttaagcatttaaatgaaattgatctttttcactgtattgatccaaatgattccaagcataaaagaacggacagatcaattttatgttgtttacgaaaaggagaatctggccagtcatggccaaggttaacaaaagaaagggcaaagcttaattggcttagtgtcgacttcaataattggaaagactgggaagatgattcagatgaagacatgtctaattttgatcgtttctctgagatgatgaacaacatgggtggtgatgaggatgtagatttaccagaagtagatggagcagatgatgattcacaagacagtgatgatgaaaaaatgccagatctggagtaaggaatattgtcatcacctggattttgagaaagaaaaataacttctctgcaagatttcataattgagagaattcctgagttgatagctctaaaggcagatatgctgtatttgcctactttaacccatttttcaacctgtttgttttttaaaaggcttcactaagggttgatatgtaccattgtatggggcaattttaagtcagctaaggcaataaccttatgcatgaacatttcccagactttcatgaagctgttgaggtcctaggcaattaatgcagcagttgcgataaataaaaacatctcacctaagtctccttttcttcataacatagatactgacatgataggaagctctcagcttagggaaagagaataaattttagattatagaacatggattcaaaagtgactggaacaaattggctgacaccttactggtaacctgctattcttctggtgttatccttcaggattgttccactaaaatttatttttcaaaaaatttacttcacattattctatgtaagtgatgacttgtcagtgttccaggtgtatcttagctaaaactagagaatgccctaacttagatggtttttgaagcctatacaattggtattgtttgacccttaagcttttacatctcttagcatggaggacgaagaaagctgtacattgttgcttgagagtctgtacatttagtccagatttgtatttgcactgtcagtatggcaaatgagtgaaaaatgtttaatacactattggattttttatttcctttttttgattcagcttatacccgggctgaaaacctcaatttatgttcatgacagtggggatttttttaaatgtctacattctttctaataaactgttggaagacttcttggctgtccttttaagtgtctggcttactgtaatttttatgtatttaccatttactggaatggagtttatttgaggaagaatttgggattattcctctgtttgaaaaaagaggcttgctgtaatgtcacaggaaaccttttaaaagtggatctgtaatagcatattgtagatgcactttgcagcagttggaaaagaaagtgttgtgtgatttgattgaaataaaactaaatgtgttgtcctcctaaatctttg

SEQ ID NO: 16802 - DNA, 6178 bp, Homo sapiens
  source 1..6178: mol_type = unassigned DNA
gatttatcggctcgcgaggagagcggagcaggcgcgcggcccaggcggaggagcgccgactctggagcagccggagctggaagaggaggaggaggagaggcggcggggaaggaggaggagggggagagtcgctcccgccgggcgagcatggggcgcctggcctcgaggccgctgctgctggcgctcctgtcgttggctctttgccgagggcgtgtggtgagagtccccacagcgaccctggttcgagtggtgggcactgagctggtcatcccctgcaacgtcagtgactatgatggccccagcgagcaaaactttgactggagcttctcatctttggggagcagctttgtggagcttgcaagcacctgggaggtggggttcccagcccagctgtaccaggagcggctgcagaggggcgagatcctgttaaggcggactgccaacgacgccgtggagctccacataaagaacgtccagccttcagaccaaggccactacaaatgttcaacccccagcacagatgccactgtccagggaaactatgaggacacagtgcaggttaaagtgctggccgactccctgcacgtgggccccagcgcgcggcccccgccgagcctgagcctgcgggagggggagcccttcgagctgcgctgcaccgccgcctccgcctcgccgctgcacacgcacctggcgctgctgtgggaggtgcaccgcggcccggccaggcggagcgtcctcgccctgacccacgagggcaggttccacccgggcctggggtacgagcagcgctaccacagtggggacgtgcgcctcgacaccgtgggcagcgacgcctaccgcctctcagtgtcccgggctctgtctgccgaccagggctcctacaggtgtatcgtcagcgagtggatcgccgagcagggcaactggcaggaaatccaagaaaaggccgtggaagttgccaccgtggtgatccagccatcagttctgcgagcagctgtgcccaagaatgtgtctgtggctgaaggaaaggaactggacctgacctgtaacatcacaacagaccgagccgatgacgtccggcccgaggtgacgtggtccttcagcaggatgcctgacagcaccctacctggctcccgcgtgttggcgcggcttgaccgtgattccctggtgcacagctcgcctcatgttgctttgagtcatgtggatgcacgctcctaccatttactggttcgggatgttagcaaagaaaactctggctactattactgccacgtgtccctgtgggcacccggacacaacaggagctggcacaaagtggcagaggccgtgtcttccccagctggtgtgggtgtgacctggctagaaccagactaccaggtgtacctgaatgcttccaaggtccccgggtttgcggatgaccccacagagctggcatgccgggtggtggacacgaagagtggggaggcgaatgtccgattcacggtttcgtggtactacaggatgaaccggcgcagcgacaatgtggtgaccagcgagctgcttgcagtcatggacggggactggacgctaaaatatggagagaggagcaagcagcgggcccaggatggagactttattttttctaaggaacatacagacacgttcaatttccggatccaaaggactacagaggaagacagaggcaattattactgtgttgtgtctgcctggaccaaacagcggaacaacagctgggtgaaaagcaaggatgtcttctccaagcctgttaacatattttgggcattagaagattccgtgcttgtggtgaaggcgaggcagccaaagcctttctttgctgccggaaatacatttgagatgacttgcaaagtatcttccaagaatattaagtcgccacgctactctgttctcatcatggctgagaagcctgtcggcgacctctccagtcccaatgaaacgaagtacatcatctctctggaccaggattctgtggtgaagctggagaattggacagatgcatcacgggtggatggcgttgttttagaaaaagtgcaggaggatgagttccgctatcgaatgtaccagactcaggtctcagacgcagggctgtaccgctgcatggtgacagcctggtctcctgtcaggggcagcctttggcgagaagcagcaaccagtctctccaatcctattgagatagacttccaaacctcaggtcctatatttaatgcttctgtgcattcagacacaccatcagtaattcggggagatctgatcaaattgttctgtatcatcactgtcgagggagcagcactggatccagatgacatggcctttgatgtgtcctggtttgcggtgcactcttttggcctggacaaggctcctgtgctcctgtcttccctggatcggaagggcatcgtgaccacctcccggagggactggaagagcgacctcagcctggagcgcgtgagtgtgctggaattcttgctgcaagtgcatggctccgaggaccaggactttggcaactactactgttccgtgactccatgggtgaagtcaccaacaggttcctggcagaaggaggcagagatccactccaagcccgtttttataactgtgaagatggatgtgctgaacgccttcaagtatcccttgctgatcggcgtcggtctgtccacggtcatcgggctcctgtcctgtctcatcgggtactgcagctcccactggtgttgtaagaaggaggttcaggagacacggcgcgagcgccgcaggctcatgtcgatggagatggactaggctggcccgggaggggagtgacagagggacgttctaggagcaattggggcaagaagaggacagtgatattttaaaacaaagtgtgttacactaaaaaccagtcctctctaatctcaggtgggacttggcgctctctcttttctgcatgtcaagttctgagcgcggacatgtttaccagcacacggctcttcttcccacggcactttctgatgtaacaatcgagtgtgtgttttcccaactgcagctttttaatggttaaccttcatctaattttttttctcccactggtttatagatcctctgacttgtgtgtgtttatagcttttgtttcgcggggttgtggtgaggaaggggtgatggcatgcggagttctttatcttcagtgagaatgtgcctgcccgcctgagagccagcttccgcgttggaggcacgtgttcagagagctgctgagcgccaccctctacccggctgacagacaacacagacctgtgccgaaggctaatttgtggcttttacgaccctaccccaccccctgttttcaggggtttagactacatttgaaatccaaacttggagtatataacttcttattgagcccaactgctttttttttttttttttttgcttctctgccccttttccatttcttttgtatttgttttctgtgagagcactgaaatggcagccctggaatctacaatttggctctccactgagcaccttatcttgccaccttagccttaagaatgaatatgaagaaaaatacacagccacctctgtccagggcagtaagaagggctgcaaggaaggggaggatggggacaaggaaaggatcagatacctgctccagtagttgtgaggccactgtgtctcaggggactccaggaggagcagaagagggatcccacgaagttattcttacgcagctggggccaggagggtcagagtggtgccaggtgcaagttaggctaaagaagccaccactattcctctctcttgcccattgtggggggcaaaggcattggtcaccaagagtcttgcagggggacccacagatatgccatgtccttcacacgtgcttgggctccttaacctgaaggcaaattgctacttgcaagactgactgacttcaaggaatcagaaattacctagaagcaccatgttttttctatgaccttttcagtccttcaggtcattttaaggtccactgcagggggttagtgagaaagggtatactttgtggtatgttttgctttcctaatagggacatgaaggaaacccagcaatttgctgttatgtgaatggcctgtagagcagagtcaagagcggtgtgctttgcccgactgctcccatcaggaataggagagtagacagagatcttccacatcccaggcttctgctgctgctttaaaagctctgtccttggagcctcccgctccctgaagtgtctcgccccctgcacagcactggcctttcggaagcatcccagtagggttttctgaggctcgctggtgactcatgccctaattgcaatcctctgcttttatcttgactttgaaggatctaacactgctctctcttccaaaggggaaaaaaagattcatttgttttgagcaataaactaatacaaaatgatggccattcatgtgcagctctttgtcaccatgggccggatgagttgtgctcctcctggctcaccatttccccctgctcccccacagccggttctgcacttatcaccgagtcgcccctggaagcagattcccattgagttttccccaccaaggggaccatgcacatggtagaaacattagattctgcattgacagtagcctttccttggcccgggcctgtggtgggaagacgggcaacaagtataccccaccagggcctgagtgactagaggaagaggacgaggccttgttggcactagatttgggtattttctgcatgtcataacatatcctaactgctatttcagaagaggcagcttgtaggtgattgtacaagtgagaattaaagagagaacagatatttaaacaggtgctgtattagtaacagccagtgccctttcagcccttgcatctattaaaaggagattcaggattttattggcacaggcccttcttagtaggaagaaagggtgcttagctttggacctgaccgggtgtgtgtaaaaccatggactgagtcacagcagacactcgatggtggtaaatgtgatgggtgcttacacactgtaccttttcctttcatactgatgctgcagttcagggctggagttgttaaggcattgacctccacccacctgccccatgtccactgggctgcccaagctgcatgtcacctgagggctggcaggaaggggcgagaaatcccagggcattgtaccaaggacctagttccttctagggatataaatttccaggaatgtgtatttttaatgtggtgagatgcactcttttgttgtaccaaatagggctccccaccccacccctgcgacaagtgctcttctagaacaggttcctaccagcagcactggtgtgaatgaaagagagacccagccgcgtctcacacaggtggaattgcacttcttaacaaaaaggaactttataaaagtttgggattttttttcctaatcataaaaatagccccagaaagagcctaagctatgttcagatagaagcctcgaaattcctgtaaattgtttactttatgatgtttacatacacgtttcactttgaaaaaaaatgcaaatcgactttttaacaactgttgagatgtttcatgggacagtagaactctgactcaccaactgggctaaattttaatttaaaaatgtatttatttgagtgtctttccccccctcaccctcaccatctgaggggctccctgagatcttggtagaggaggcccctcctgcccagaccttcgtttgtttccccggtggcccttgcttcttgctttgcagactgcctgcagccatgattttgtcactgacatctgtgagccaaagactgagcctttttggcaggaataataagcaatactacacaacttgctactttcagaaaacttttttttagcttcaccgatgacaacagaggaagaagggaactgggatttgggtaagttctcctccactgtttgaccaaattctcagtgataaatatgtgtgcagatccctagaagagaaaacgctgactttctttttaagtgtggcacataaggatctgcagaattttccgtagacaaagaaaggatcttgtgtatttttgtccatatccaatgttatatgaactaattgtattgttttatactgtgaccacaaatattatgcaatgcaccatttgttttttatttcattaaaggaagtttaatttaaattgaa

SEQ ID NO: 16803 - DNA, 553 bp, Homo sapiens
  source 1..553: mol_type = unassigned DNA
tccagtcccaatgaaacgaagtacatcatctctctggaccaggattctgtggtgaagctggagaattggacagatgcatcacgggtggatggcgttgttttagaaaaagtgcaggaggatgagttccgctatcgaatgtaccagactcaggtctcagacgcagggctgtaccgctgcatggtgacagcctggtctcctgtcaggggcagcctttggcgagaagcagcaaccagtctctccaatcctattgagatagacttccaaacctcaggtcctatatttaatgcttctgtgcattcagacacaccatcagtaattcggggagatctgatcaaattgttctgtatcatcactgtcgagggagcagcactggatccaggtacctcactccatcctcaccccttcaccatgttgctttctgtaaatgtttctcatatcatccgcactgtgttacacagatgtgggttagggataggattatctatttatcccctaactgcctggcccagtactttgtactcattaagtgtttaataaatacatgttgagtgga

SEQ ID NO: 16804 - DNA, 457 bp, Homo sapiens
  source 1..457: mol_type = unassigned DNA
aaaacaaagtgtgttacactaaaaaccagtcctctctaatctcagactgcctgcagccatgattttgtcactgacatctgtgagccaaagactgagcctttttggcaggaataataagcaatactacacaacttgctactttcagaaaacttttttttagcttcaccgatgacaacagaggaagaagggaactgggatttgggtaagttctcctccactgtttgaccaaattctcagtgataaatatgtgtgcagatccctagaagagaaaacgctgactttctttttaagtgtggcacataaggatctgcagaattttccgtagacaaagaaaggatcttgtgtatttttgtccatatccaatgttatatgaactaattgtattgttttatactgtgaccacaaatattatgcaatgcaccatttgttttttatttcattaaaggaagtttaattt

SEQ ID NO: 16805 - DNA, 4719 bp, Homo sapiens
  source 1..4719: mol_type = unassigned DNA
gcagttcccgcctcctcaggtccgggcgggtccctggccggggtagcacggaagggtctcccaggcggcgtagtagggcttccgtgttactggaaacctacttccggctgcaaatgggaaaaggagcctctaccttaaccaatccccgggaacctcaggcccgcggatgggagaaaccagagatgccaacttcctgcttccgaagtagtggctgggtcttaaagcaccgatgtttctgcattgaatagccctggaagacagaattcttgtctctccaaagatctggcagacttattcccaattataagagatccttgcaaaggaggtgtcttgcttcaccttcaccttccactgtgattgtaagttttctgaggcctcgccagccatgcggaactgaataggactagcaacttcatagacggttgtgaagacaagctagacggcagatgaaagttcttggcacagagtgaacacttgataaactatatggcagggagggctggaacggggcttgtttgaagagcaatatgagccagggttatagacctgagtttggggtaagagtggaacatccaaatggaagagtccagcagctgaaaggacatttgttcaaaggcctttttcattacagttttctccttcttctgatccagccacagcctccggagccgttgcacacctacctgcccggccgacttacctgtacttgccgccgtcccggctcacctggcggtgcccgaggagtagtcgctggagtccgcgcctccctgggactgcaatgtgccgatcttagctgctgcctgagaggatgtctggggtgtccgagcccctgagtcgagtaaagttgggcacgttacgccggcctgaaggccctgcagagcccatggtggtggtaccagtagatgtggaaaaggaggacgtgcgtatcctcaaggtctgcttctatagcaacagcttcaatcctgggaaaaacttcaaactggtcaaatgcactgtccagacggagatccgggagatcatcacctccatcctgctgagcgggcggatcgggcccaacatccggttggctgagtgctatgggctgaggctgaagcacatgaagtccgatgagatccactggctgcacccacagatgacggtgggtgaggtgcaggacaagtatgagtgtctgcacgtggaagccgagtggaggtatgaccttcaaatccgctacttgccagaagacttcatggagagcctgaaggaggacaggaccacgctgctctatttttaccaacagctccggaacgactacatgcagcgctacgccagcaaggtcagcgagggcatggccctgcagctgggctgcctggagctcaggcggttcttcaaggatatgccccacaatgcacttgacaagaagtccaacttcgagctcctagaaaaggaagtggggctggacttgtttttcccaaagcagatgcaggagaacttaaagcccaaacagttccggaagatgatccagcagaccttccagcagtacgcctcgctcagggaggaggagtgcgtcatgaagttcttcaacactctcgccggcttcgccaacatcgaccaggagacctaccgctgtgaactcattcaaggatggaacattactgtggacctggtcattggccctaaagggatccgccagctgactagtcaggacgcaaagcccacctgcctggccgagttcaagcagatcaggtccatcaggtgcctcccgctggaggagggccaggcagtacttcagctgggcattgaaggtgccccccaggccttgtccatcaaaacctcatccctagcagaggctgagaacatggctgacctcatagacggctactgccggctgcagggtgagcaccaaggctctctcatcatccatcctaggaaagatggtgagaagcggaacagcctgccccagatccccatgctaaacctggaggcccggcggtcccacctctcagagagctgcagcatagagtcagacatctacgcagagattcccgacgaaaccctgcgaaggcccggaggtccacagtatggcattgcccgtgaagatgtggtcctgaatcgtattcttggggaaggcttttttggggaggtctatgaaggtgtctacacaaatcacaaaggggagaaaatcaatgtagctgtcaagacctgcaagaaagactgcactctggacaacaaggagaagttcatgagcgaggcagtgatcatgaagaacctcgaccacccgcacatcgtgaagctgatcggcatcattgaagaggagcccacctggatcatcatggaattgtatccctatggggagctgggccactacctggagcggaacaagaactccctgaaggtgctcaccctcgtgctgtactcactgcagatatgcaaagccatggcctacctggagagcatcaactgcgtgcacagggacattgctgtccggaacatcctggtggcctcccctgagtgtgtgaagctgggggactttggtctttcccggtacattgaggacgaggactattacaaagcctctgtgactcgtctccccatcaaatggatgtccccagagtccattaacttccgacgcttcacgacagccagtgacgtctggatgttcgccgtgtgcatgtgggagatcctgagctttgggaagcagcccttcttctggctggagaacaaggatgtcatcggggtgctggagaaaggagaccggctgcccaagcctgatctctgtccaccggtcctttataccctcatgacccgctgctgggactacgaccccagtgaccggccccgcttcaccgagctggtgtgcagcctcagtgacgtttatcagatggagaaggacattgccatggagcaagagaggaatgctcgctaccgaacccccaaaatcttggagcccacagccttccaggaacccccacccaagcccagccgacctaagtacagaccccctccgcaaaccaacctcctggctccaaagctgcagttccaggttcctgagggtctgtgtgccagctctcctacgctcaccagccctatggagtatccatctcccgttaactcactgcacaccccacctctccaccggcacaatgtcttcaaacgccacagcatgcgggaggaggacttcatccaacccagcagccgagaagaggcccagcagctgtgggaggctgaaaaggtcaaaatgcggcaaatcctggacaaacagcagaagcagatggtggaggactaccagtggctcaggcaggaggagaagtccctggaccccatggtttatatgaatgataagtccccattgacgccagagaaggaggtcggctacctggagttcacagggcccccacagaagcccccgaggctgggcgcacagtccatccagcccacagctaacctggaccggactgatgacctggtgtacctcaatgtcatggagctggtgcgggccgtgctggagctcaagaatgagctctgtcagctgccccccgagggctacgtggtggtggtgaagaatgtggggctgaccctgcggaagctcatcgggagcgtggatgatctcctgccttccttgccgtcatcttcacggacagagatcgagggcacccagaaactgctcaacaaagacctggcagagctcatcaacaagatgcggctggcacagcagaacgccgtgacctccctaagtgaggagtgcaagaggcagatgctgacggcttcacacaccctggctgtggacgccaagaacctgctcgacgctgtggaccaggccaaggttctggccaatctggcccacccacctgcagagtgacggagggtgggggccacctgcctgcgtcttccgcccctgcctgccatgtacctcccctgccttgctgttggtcatgtgggtcttccagggggaaggccaaggggagtcaccttcccttgccactttgcacgacgccctctccccacccctacccctggctgtactgctcaggctgcagctggacagaggggactctgggctatggacacagggtgacggtgacaaagatggctcagagggggactgctgctgcctggccactgctccctaagccagcctggtccatgcagggggctcctgggggtggggaggtgtcacatggtgcccctagctttatatatggacatggcaggccgatttgggaaccaagctattcctttcccttcctcttcggccctcagatgtcccttgatgcacagagaagctggggaggagctttgttttgggggtcaggcagccagtgagatgagggatgggcctggcattcttgtacagtgtatattgaaatttatttaatgtgagtttggtctggactgacagcatgtgccctcctgagggaggacctggggcacagtccaggaacaagctaattgggagtccaggcacaggatgctgtgttgtcaacaaaccaagcatcagggggaagaagcagagagatgcggccaagataggaccttgggccaaatccgctctcttcctgcccctctttctctttcttcctttactttcccttgcttttccctcttttcttactcctcctctttctctccccaacccccattctcatctgcacccttcttttctcatgtgtttgcataaacattcttttaacttctttctatttgacttgtggttgaattaaaattgtcccatttgctttg

SEQ ID NO: 16806 - DNA, 559 bp, Homo sapiens
  source 1..559: mol_type = unassigned DNA
gttactggaaacctacttccggctgcaaatgggaaaaggagcctctaccttaaccaatccccgggaacctcaggcccgcggatgggagaaaccagagatgccaacttcctgcttccgaagtagtggctgggtcttaaagcaccgatgtttctgcattgaatagccctggaagacagaattcttgtctctccaaagatctggcagacttattcccaattataagagatccttgcaaaggaggtgtcttgcttcaccttcaccttccactgtgattgtaagttttctgaggcctcgccagccatgcggaactgaataggactagcaacttcatagacggttgtgaagacaagctagacggcagatgaaagttcttggcacagagtgaacacttgataaactatatggcagattaggaaataaaagctcagaaagatggattcgcatgtccaaagtcacaacctcttccctcttgactggatccttcctgtgagcattgaaacctgctctactggctatcatcctaaatgacaaatcagtcctctttcaacccacgaccccc

SEQ ID NO: 16807 - DNA, 539 bp, Homo sapiens
  source 1..539: mol_type = unassigned DNA
gggaacctcaggcccgcggatgggagaaaccagagatgccaacttcctgcttccgaagtagtggctgggtcttaaagcaccgaataggactagcaacttcatagacggttgtgaagacaagctagacggcagatgaaagttcttggcacagagtgaacacttgataaactatatggcagccacagcctccggagccgttgcacacctacctgcccggccgacttacctgtacttgccgccgtcccggctcacctggcggtgcccgaggagtagtcgctggagtccgcgcctccctgggactgcaatgtgccgatcttagctgctgcctgagaggatgtctggggtgtccgagcccctgagtcgagtaaagttgggcacgttacgccggcctgaaggccctgcagagcccatggtggtggtaccagtagatgtggaaaaggaggacgtgcgtatcctcaaggtctgcttctatagcaacagcttcaatcctgggaaaaacttcaaactggtcaaatgcactgtccagacggagatccggg

SEQ ID NO: 16808 - DNA, 554 bp, Homo sapiens
  source 1..554: mol_type = unassigned DNA
atttgcggccgggggaatggcagagatcgccccccaggtctgcccggcgctcagggaattggtggcagcgtctatttcagagtttatgccacagcctccggagccgttgcacacctacctgcccggccgacttacctgtacttgccgccgtcccggctcacctggcggtgcccgaggagtagtcgctggagtccgcgcctccctgggactgcaatgtgccgatcttagctgctgcctgagaggatgtctggggtgtccgagcccctgagtcgagtaaagttgggcacgttacgccggcctgaaggccctgcagagcccatggtggtggtaccagtagatgtggaaaaggaggacgtgcgtatcctcaaggtctgcttctatagcaacagcttcaatcctgggaaaaacttcaaactggtcaaatgcactgtccagacggagatccgggagatcatcacctccatcctgctgagcgggcggatcgggcccaacatccggttggctgagtgctatgggctgaggctgaagcacatgaagtccgatgagatccactg

SEQ ID NO: 16809 - DNA, 4147 bp, Homo sapiens
  source 1..4147: mol_type = unassigned DNA
aaggaagtggggaggagagcagcaggggtgtggttaacaactcagaggaggagggagaatctaacctgtcagcccttttactcagccacagcctccggagccgttgcacacctacctgcccggccgacttacctgtacttgccgccgtcccggctcacctggcggtgcccgaggagtagtcgctggagtccgcgcctccctgggactgcaatgtgccgatcttagctgctgcctgagaggatgtctggggtgtccgagcccctgagtcgagtaaagttgggcacgttacgccggcctgaaggccctgcagagcccatggtggtggtaccagtagatgtggaaaaggaggacgtgcgtatcctcaaggtctgcttctatagcaacagcttcaatcctgggaaaaacttcaaactggtcaaatgcactgtccagacggagatccgggagatcatcacctccatcctgctgagcgggcggatcgggcccaacatccggttggctgagtgctatgggctgaggctgaagcacatgaagtccgatgagatccactggctgcacccacagatgacggtgggtgaggtgcaggacaagtatgagtgtctgcacgtggaagccgagtggaggtatgaccttcaaatccgctacttgccagaagacttcatggagagcctgaaggaggacaggaccacgctgctctatttttaccaacagctccggaacgactacatgcagcgctacgccagcaaggtcagcgagggcatggccctgcagctgggctgcctggagctcaggcggttcttcaaggatatgccccacaatgcacttgacaagaagtccaacttcgagctcctagaaaaggaagtggggctggacttgtttttcccaaagcagatgcaggagaacttaaagcccaaacagttccggaagatgatccagcagaccttccagcagtacgcctcgctcagggaggaggagtgcgtcatgaagttcttcaacactctcgccggcttcgccaacatcgaccaggagacctaccgctgtgaactcattcaaggatggaacattactgtggacctggtcattggccctaaagggatccgccagctgactagtcaggacgcaaagcccacctgcctggccgagttcaagcagatcaggtccatcaggtgcctcccgctggaggagggccaggcagtacttcagctgggcattgaaggtgccccccaggccttgtccatcaaaacctcatccctagcagaggctgagaacatggctgacctcatagacggctactgccggctgcagggtgagcaccaaggctctctcatcatccatcctaggaaagatggtgagaagcggaacagcctgccccagatccccatgctaaacctggaggcccggcggtcccacctctcagagagctgcagcatagagtcagacatctacgcagagattcccgacgaaaccctgcgaaggcccggaggtccacagtatggcattgcccgtgaagatgtggtcctgaatcgtattcttggggaaggcttttttggggaggtctatgaaggtgtctacacaaatcacaaaggggagaaaatcaatgtagctgtcaagacctgcaagaaagactgcactctggacaacaaggagaagttcatgagcgaggcagtgatcatgaagaacctcgaccacccgcacatcgtgaagctgatcggcatcattgaagaggagcccacctggatcatcatggaattgtatccctatggggagctgggccactacctggagcggaacaagaactccctgaaggtgctcaccctcgtgctgtactcactgcagatatgcaaagccatggcctacctggagagcatcaactgcgtgcacagggacattgctgtccggaacatcctggtggcctcccctgagtgtgtgaagctgggggactttggtctttcccggtacattgaggacgaggactattacaaagcctctgtgactcgtctccccatcaaatggatgtccccagagtccattaacttccgacgcttcacgacagccagtgacgtctggatgttcgccgtgtgcatgtgggagatcctgagctttgggaagcagcccttcttctggctggagaacaaggatgtcatcggggtgctggagaaaggagaccggctgcccaagcctgatctctgtccaccggtcctttataccctcatgacccgctgctgggactacgaccccagtgaccggccccgcttcaccgagctggtgtgcagcctcagtgacgtttatcagatggagaaggacattgccatggagcaagagaggaatgctcgctaccgaacccccaaaatcttggagcccacagccttccaggaacccccacccaagcccagccgacctaagtacagaccccctccgcaaaccaacctcctggctccaaagctgcagttccaggttcctgagggtctgtgtgccagctctcctacgctcaccagccctatggagtatccatctcccgttaactcactgcacaccccacctctccaccggcacaatgtcttcaaacgccacagcatgcgggaggaggacttcatccaacccagcagccgagaagaggcccagcagctgtgggaggctgaaaaggtcaaaatgcggcaaatcctggacaaacagcagaagcagatggtggaggactaccagtggctcaggcaggaggagaagtccctggaccccatggtttatatgaatgataagtccccattgacgccagagaaggaggtcggctacctggagttcacagggcccccacagaagcccccgaggctgggcgcacagtccatccagcccacagctaacctggaccggactgatgacctggtgtacctcaatgtcatggagctggtgcgggccgtgctggagctcaagaatgagctctgtcagctgccccccgagggctacgtggtggtggtgaagaatgtggggctgaccctgcggaagctcatcgggagcgtggatgatctcctgccttccttgccgtcatcttcacggacagagatcgagggcacccagaaactgctcaacaaagacctggcagagctcatcaacaagatgcggctggcacagcagaacgccgtgacctccctaagtgaggagtgcaagaggcagatgctgacggcttcacacaccctggctgtggacgccaagaacctgctcgacgctgtggaccaggccaaggttctggccaatctggcccacccacctgcagagtgacggagggtgggggccacctgcctgcgtcttccgcccctgcctgccatgtacctcccctgccttgctgttggtcatgtgggtcttccagggggaaggccaaggggagtcaccttcccttgccactttgcacgacgccctctccccacccctacccctggctgtactgctcaggctgcagctggacagaggggactctgggctatggacacagggtgacggtgacaaagatggctcagagggggactgctgctgcctggccactgctccctaagccagcctggtccatgcagggggctcctgggggtggggaggtgtcacatggtgcccctagctttatatatggacatggcaggccgatttgggaaccaagctattcctttcccttcctcttcggccctcagatgtcccttgatgcacagagaagctggggaggagctttgttttgggggtcaggcagccagtgagatgagggatgggcctggcattcttgtacagtgtatattgaaatttatttaatgtgagtttggtctggactgacagcatgtgccctcctgagggaggacctggggcacagtccaggaacaagctaattgggagtccaggcacaggatgctgtgttgtcaacaaaccaagcatcagggggaagaagcagagagatgcggccaagataggaccttgggccaaatccgctctcttcctgcccctctttctctttcttcctttactttcccttgcttttccctcttttcttactcctcctctttctctccccaacccccattctcatctgcacccttcttttctcatgtgtttgcataaacattcttttaacttctttctatttgacttgtggttgaattaaaattgtcccatttgc

SEQ ID NO: 16810 - DNA, 651 bp, Homo sapiens
  source 1..651: mol_type = unassigned DNA
tccattcaggaggcactcactggcttcccacctgcggccaggtgcaaggtgtggggacaaggactgcaatgtgccgatcttagctgctgcctgagaggatgtctggggtgtccgagcccctgagtcgagtaaagttgggcacgttacgccggcctgaaggccctgcagagcccatggtggtggtaccagtagatgtggaaaaggaggacgtgcgtatcctcaaggtctgcttctatagcaacagcttcaatcctgggaaaaacttcaaactggtcaaatgcactgtccagacggagatccgggagatcatcacctccatcctgctgagcgggcggatcgggcccaacatccggttggctgagtgctatgggctgaggctgaagcacatgaagtccgatgagatccactggctgcacccacagatgacggtgggtgaggtgcaggacaagtatgagtgtctgcacgtggaagccgagtggaggtatgaccttcaaatccgctacttgccagaagacttcatggagagcctgaaggaggacaggaccacgctgctctatttttaccaacagctccggaacgactacatgcagcgctacgccagcaaggtcagcgagggcatggccctgcagctgggctgcctggagctcaggt

SEQ ID NO: 16811 - DNA, 818 bp, Homo sapiens
  source 1..818: mol_type = unassigned DNA
ccaggaagggcctgcctttgagacttgtcactccctgagatccatcgtggcaccaaatgtttgccgagctccgccctgggagggaggcctgcagcctgggaactgggagacctgggtcccagtggagaggcctcaccatgtagactgcaatgtgccgatcttagctgctgcctgagaggatgtctggggtgtccgagcccctgagtcgagtaaagttgggcacgttacgccggcctgaaggccctgcagagcccatggtggtggtaccagtagatgtggaaaaggaggacgtgcgtatcctcaaggtctgcttctatagcaacagcttcaatcctgggaaaaacttcaaactggtcaaatgcactgtccagacggagatccgggagatcatcacctccatcctgctgagcgggcggatcgggcccaacatccggttggctgagtgctatgggctgaggctgaagcacatgaagtccgatgagatccactggctgcacccacagatgacggtgggtgaggtgcaggacaagtatgagtgtctgcacgtggaagccgagtggaggtatgaccttcaaatccgctacttgccagaagacttcatggagagcctgaaggaggacaggaccacgctgctctatttttaccaacagctccggaacgactacatgcagcgctacgccagcaaggtcagcgagggcatggccctgcagctgggctgcctggagctcaggcggttcttcaaggatatgccccacaatgcacttgacaagaagtccaacttcgagctcctagaaaaggaagtggggctggacttgttt

SEQ ID NO: 16812 - DNA, 379 bp, Homo sapiens
  source 1..379: mol_type = unassigned DNA
ggaagggcctgcctttgagacttgtcactccctgagatccatcgtggcaccaaatgtttgccgagctccgccctgggagggaggcctgcagcctgggaactgggagacctgggtcccagtggagaggcctcaccatgtagtcttatgccacattttgctgcccttgtggactctgagcttggtgctgcctgttgtctgcctgcccctgacctgaaggacatgcccagctccttctctcatccttgcctctcttttgcatcttcgtaatacatattcactttttaaaaaaggaatggctctttgaagctaatggctatctaaatctttcttttctattgtccagcacagtgtgaataaatacatacaggctatgattcca

SEQ ID NO: 16813 - DNA, 3914 bp, Homo sapiens
  source 1..3914: mol_type = unassigned DNA
tctgtcttggagctcggtgggtgctgtccctggggccatgaggtatgtgggcctgtgtggggctctttcagggctgaccctctgctgtctctgcaggactgcaatgtgccgatcttagctgctgcctgagaggatgtctggggtgtccgagcccctgagtcgagtaaagttgggcacgttacgccggcctgaaggccctgcagagcccatggtggtggtaccagtagatgtggaaaaggaggacgtgcgtatcctcaaggtctgcttctatagcaacagcttcaatcctgggaaaaacttcaaactggtcaaatgcactgtccagacggagatccgggagatcatcacctccatcctgctgagcgggcggatcgggcccaacatccggttggctgagtgctatgggctgaggctgaagcacatgaagtccgatgagatccactggctgcacccacagatgacggtgggtgaggtgcaggacaagtatgagtgtctgcacgtggaagccgagtggaggtatgaccttcaaatccgctacttgccagaagacttcatggagagcctgaaggaggacaggaccacgctgctctatttttaccaacagctccggaacgactacatgcagcgctacgccagcaaggtcagcgagggcatggccctgcagctgggctgcctggagctcaggcggttcttcaaggatatgccccacaatgcacttgacaagaagtccaacttcgagctcctagaaaaggaagtggggctggacttgtttttcccaaagcagatgcaggagaacttaaagcccaaacagttccggaagatgatccagcagaccttccagcagtacgcctcgctcagggaggaggagtgcgtcatgaagttcttcaacactctcgccggcttcgccaacatcgaccaggagacctaccgctgtgaactcattcaaggatggaacattactgtggacctggtcattggccctaaagggatccgccagctgactagtcaggacgcaaagcccacctgcctggccgagttcaagcagatcaggtccatcaggtgcctcccgctggaggagggccaggcagtacttcagctgggcattgaaggtgccccccaggccttgtccatcaaaacctcatccctagcagaggctgagaacatggctgacctcatagacggctactgccggctgcagggtgagcaccaaggctctctcatcatccatcctaggaaagatggtgagaagcggaacagcctgccccagatccccatgctaaacctggaggcccggcggtcccacctctcagagagctgcagcatagagtcagacatctacgcagagattcccgacgaaaccctgcgaaggcccggaggtccacagtatggcattgcccgtgaagatgtggtcctgaatcgtattcttggggaaggcttttttggggaggtctatgaaggtgtctacacaaatcacaaaggggagaaaatcaatgtagctgtcaagacctgcaagaaagactgcactctggacaacaaggagaagttcatgagcgaggcagtgatcatgaagaacctcgaccacccgcacatcgtgaagctgatcggcatcattgaagaggagcccacctggatcatcatggaattgtatccctatggggagctgggccactacctggagcggaacaagaactccctgaaggtgctcaccctcgtgctgtactcactgcagatatgcaaagccatggcctacctggagagcatcaactgcgtgcacagggacattgctgtccggaacatcctggtggcctcccctgagtgtgtgaagctgggggactttggtctttcccggtacattgaggacgaggactattacaaagcctctgtgactcgtctccccatcaaatggatgtccccagagtccattaacttccgacgcttcacgacagccagtgacgtctggatgttcgccgtgtgcatgtgggagatcctgagctttgggaagcagcccttcttctggctggagaacaaggatgtcatcggggtgctggagaaaggagaccggctgcccaagcctgatctctgtccaccggtcctttataccctcatgacccgctgctgggactacgaccccagtgaccggccccgcttcaccgagctggtgtgcagcctcagtgacgtttatcagatggagaaggacattgccatggagcaagagaggaatgctcgctaccgaacccccaaaatcttggagcccacagccttccaggaacccccacccaagcccagccgacctaagtacagaccccctccgcaaaccaacctcctggctccaaagctgcagttccaggaggaggacttcatccaacccagcagccgagaagaggcccagcagctgtgggaggctgaaaaggtcaaaatgcggcaaatcctggacaaacagcagaagcagatggtggaggactaccagtggctcaggcaggaggagaagtccctggaccccatggtttatatgaatgataagtccccattgacgccagagaaggaggtcggctacctggagttcacagggcccccacagaagcccccgaggctgggcgcacagtccatccagcccacagctaacctggaccggactgatgacctggtgtacctcaatgtcatggagctggtgcgggccgtgctggagctcaagaatgagctctgtcagctgccccccgagggctacgtggtggtggtgaagaatgtggggctgaccctgcggaagctcatcgggagcgtggatgatctcctgccttccttgccgtcatcttcacggacagagatcgagggcacccagaaactgctcaacaaagacctggcagagctcatcaacaagatgcggctggcacagcagaacgccgtgacctccctaagtgaggagtgcaagaggcagatgctgacggcttcacacaccctggctgtggacgccaagaacctgctcgacgctgtggaccaggccaaggttctggccaatctggcccacccacctgcagagtgacggagggtgggggccacctgcctgcgtcttccgcccctgcctgccatgtacctcccctgccttgctgttggtcatgtgggtcttccagggggaaggccaaggggagtcaccttcccttgccactttgcacgacgccctctccccacccctacccctggctgtactgctcaggctgcagctggacagaggggactctgggctatggacacagggtgacggtgacaaagatggctcagagggggactgctgctgcctggccactgctccctaagccagcctggtccatgcagggggctcctgggggtggggaggtgtcacatggtgcccctagctttatatatggacatggcaggccgatttgggaaccaagctattcctttcccttcctcttcggccctcagatgtcccttgatgcacagagaagctggggaggagctttgttttgggggtcaggcagccagtgagatgagggatgggcctggcattcttgtacagtgtatattgaaatttatttaatgtgagtttggtctggactgacagcatgtgccctcctgagggaggacctggggcacagtccaggaacaagctaattgggagtccaggcacaggatgctgtgttgtcaacaaaccaagcatcagggggaagaagcagagagatgcggccaagataggaccttgggccaaatccgctctcttcctgcccctctttctctttcttcctttactttcccttgcttttccctcttttcttactcctcctctttctctccccaacccccattctcatctgcacccttcttttctcatgtgtttgcataaacattcttttaacttctttctatttgacttgtggttgaattaaaattgtcccatttgc

SEQ ID NO: 16814 - DNA, 557 bp, Homo sapiens
  source 1..557: mol_type = unassigned DNA
cctgatgcttgacctttctccccaccagctccggaacgactacatgcagcgctacgccagcaaggtcagcgagggcatggccctgcagctgggctgcctggagctcaggcggttcttcaaggatatgccccacaatgcacttgacaagaagtccaacttcgagctcctagaaaaggaagtggggctggacttgtttttcccaaagcagatgcaggagaacttaaagcccaaacagttccggaagatgatccagcagaccttccagcagtacgcctcgctcagggaggaggagtgcgtcatgaagttcttcaacactctcgccggcttcgccaacatcgaccaggagacctaccgctgtgaactcattgtaatggcgggctctcttgatcctctccctgacctggattccaggcctctcggaaaagggggccaggagggggcagggagaggctgcaatcgctgcagattctcactcaggcagcaggacctcgctgacctgccgtcggtggaagtcaaaagcatccccttgcctgaagcaggcactgaaatgttggcct

SEQ ID NO: 16815 - DNA, 582 bp, Homo sapiens
  source 1..582: mol_type = unassigned DNA
ccggaagatgatccagcagaccttccagcagtacgcctcgctcagggaggaggagtgcgtcatgaagttcttcaacactctcgccggcttcgccaacatcgaccaggagacctaccgctgtgaactcattcaaggatggaacattactgtggacctggtcattggccctaaagggatccgccagctgactagtcaggacgcaaagcccacctgcctggccgagttcaagcagatcaggtccatcaggtgcctcccgctggaggagggccaggcagtacttcagctgggcattgaaggtgccccccaggccttgtccatcaaaacctcatccctagcagaggctgagaacatggctgacctcatagacggctactgccggctgcaggatggtgagaagcggaacagcctgccccagatccccatgctaaacctggaggcccggcggtcccacctctcagagagctgcagcatagagtcagacatctacgcagagattcccgacgaaaccctgcgaaggcccggaggtccacagtatggcattgcccgtgaagatgtggtcctgaatcgtattcttggggaagg

SEQ ID NO: 16816 - DNA, 3161 bp, Homo sapiens
  source 1..3161: mol_type = unassigned DNA
ccagcagaccttccagcagtacgcctcgctcagggaggaggagtgcgtcatgaagttcttcaacactctcgccggcttcgccaacatcgaccaggagacctaccgctgtgaactcattgtaatggcgggctctcttgatcctctccctgacctggattccaggcctctcggaaaagggggccaggagggggcagggagaggctgcaatcgctgcagattctcactcaggcagcaggacctcgctgacctgccgtcggtggaagtcaaaagcatccccttgcctgaagcaggcactgaaatgttggcctccagctctgggaggtgggcaggacaggcaaggtgtcaggaggggaagatccatatggccagggtttcggtgagaaggagctggagacccaggaaacagtggcttgtgtctagcttagggagcttttcttcaagtttctgaagaatggggaggacagctctggaacaacagtccactctccttttattccagcaaggatggaacattactgtggacctggtcattggccctaaagggatccgccagctgactagtcaggacgcaaagcccacctgcctggccgagttcaagcagatcaggtccatcaggtgcctcccgctggaggagggccaggcagtacttcagctgggcattgaaggtgccccccaggccttgtccatcaaaacctcatccctagcagaggctgagaacatggctgacctcatagacggctactgccggctgcagggtgagcaccaaggctctctcatcatccatcctaggaaagatggtgagaagcggaacagcctgccccagatccccatgctaaacctggaggcccggcggtcccacctctcagagagctgcagcatagagtcagacatctacgcagagattcccgacgaaaccctgcgaaggcccggaggtccacagtatggcattgcccgtgaagatgtggtcctgaatcgtattcttggggaaggcttttttggggaggtctatgaaggtgtctacacaaatcacaaaggggagaaaatcaatgtagctgtcaagacctgcaagaaagactgcactctggacaacaaggagaagttcatgagcgaggcagtgatcatgaagaacctcgaccacccgcacatcgtgaagctgatcggcatcattgaagaggagcccacctggatcatcatggaattgtatccctatggggagctgggccactacctggagcggaacaagaactccctgaaggtgctcaccctcgtgctgtactcactgcagatatgcaaagccatggcctacctggagagcatcaactgcgtgcacagggacattgctgtccggaacatcctggtggcctcccctgagtgtgtgaagctgggggactttggtctttcccggtacattgaggacgaggactattacaaagcctctgtgactcgtctccccatcaaatggatgtccccagagtccattaacttccgacgcttcacgacagccagtgacgtctggatgttcgccgtgtgcatgtgggagatcctgagctttgggaagcagcccttcttctggctggagaacaaggatgtcatcggggtgctggagaaaggagaccggctgcccaagcctgatctctgtccaccggtcctttataccctcatgacccgctgctgggactacgaccccagtgaccggccccgcttcaccgagctggtgtgcagcctcagtgacgtttatcagatggagaaggacattgccatggagcaagagaggaatgctcgctaccgaacccccaaaatcttggagcccacagccttccaggaacccccacccaagcccagccgacctaagtacagaccccctccgcaaaccaacctcctggctccaaagctgcagttccaggaggaggacttcatccaacccagcagccgagaagaggcccagcagctgtgggaggctgaaaaggtcaaaatgcggcaaatcctggacaaacagcagaagcagatggtggaggactaccagtggctcaggcaggaggagaagtccctggaccccatggtttatatgaatgataagtccccattgacgccagagaaggaggtcggctaccgtgagtgttcccgcccttcttcggggggtttcctcttggcaccttgtgcagagccaccatccttgcccaccgcccagggcagggagcagcggagtctgtctgcattccctgcagcatcggccatgatttaattcagagcatgtggggcaggccagcttcccctccgctccctccaccccattcctctccctgcctagcaccctgcccttctctctctcagtggccacatccttaggcccctcctcagatcatccccctcctgcattagtttggaggagctggaaattctctcttcctcatttcctgctctgttggaagctcccgtgggaaaagttaagcagtgccacctgcctgtcccagttcagattcatcttctgtaggcctgagggacagaggagagaaagtgagaggggcagctgagccctcaggctctctccagaagaccctgttgcaggcagggagggaagagccagcagtaagcccggggcctggaggggtggcattgaggaggaggatgatgacagccatcacagagaactggacacaagtcaggcatgggcctgggaccatttattatcttctgaggcacagggtgattaggtaacttgtccaaattcacacagctaataattggcaaagttcagatttgaacccaagccttctgactttagggtcccttctgagctcaccctcttatcttacaaatgaaaattaaggctcggaatgtgagctgcctagagtggtcacagagctctttggcggcagaggtgagaatagaaggccaggtgtggtggctcacacctgtaatcccagcactttgggaggctgaggtgggagggtcacttgatcccaggagtttgagactggcttgggcaacatagcaagaccccatctctacaaaagattaagaaaattaggcctggtgatgcatgcctgcaagcccagcggctcaggaggccgaggcaggaggattgcctgagcctagaaggtgaggctacagtgagctgtgatcacgccactgtgctccagcctcggtgcaagccctgcctc

SEQ ID NO: 16817 - DNA, 427 bp, Homo sapiens
  source 1..427: mol_type = unassigned DNA
ctagaggatccttctagccttaatagtgtttgattctctcttcatctcccagagaaactcccagttcctcctcaccccggctcccccatactgaccaatctgcatggcctagtcctggtagtgggatggtctgaagctcccccttcttttcccacagcccacctgcctggccgagttcaagcagatcaggtccatcaggtgcctcccgctggaggagggccaggcagtacttcagctgggcattgaaggtgccccccaggccttgtccatcaaaacctcatccctagcagaggctgagaacatggctgacctcatagacggctactgccggctgcagggtgagcaccaaggctctctcatcatccatcctaggaaagatggtgagaagcggaacagcctgccccagatccccatgctaaacctggag

SEQ ID NO: 16818 - DNA, 270 bp, Homo sapiens
  source 1..270: mol_type = unassigned DNA
gagcccacctggatcatcatggaattgtatccctatggggagctgggccactacctggagcggaacaagaactccctgaaggtgctcaccctcgtgctgtactcactgcagatatgcaaagccatggcctacctggagagcatcaactgcgtgcacaggtaggggtggagggagtggccagcggtatggaagccaggccttcaccagatcctcaaggcctctgggtagaagcagggcttgtgggtgacacagagcagtgttggaatccca

SEQ ID NO: 16819 - DNA, 499 bp, Homo sapiens
  source 1..499: mol_type = unassigned DNA
gcaccactgcaatccccccatcttgctgggactttgcctttttcttcctataaaagggacaacagtgctgtccctgactactgcaaaaccagggagaccaggaggttccttcccctgcccgcttcctggattcagagttaatttccctgaagtctcctggtggtagaggggaaggggctcatttgatgtcagcaggtacgaagggaagggttggagtgctgagaactgccccccacttgctgttctttttattgcagtggagttcacagggcccccacagaagcccccgaggctgggcgcacagtccatccagcccacagctaacctggaccggactgatgacctggtgtacctcaatgtcatggagctggtgcgggccgtgctggagctcaagaatgagctctgtcagctgccccccgagggctacgtggtggtggtgaagaatgtggggctgaccctgcggaagctcatcgggagcgtggatgatctcctgccttcc

SEQ ID NO: 16820 - DNA, 762 bp, Homo sapiens
  source 1..762: mol_type = unassigned DNA
aaagaagagtcctttccaatcgggctggtggtggagttggccacagtggtgcctgcccaggaaagaatcattccgtgcccctggctctccccaactcactggccacctgcgtcttcccctcagtccatccagcccacagctaacctggaccggactgatgacctggtgtacctcaatgtcatggagctggtgcgggccgtgctggagctcaagaatgagctctgtcagctgccccccgagggctacgtggtggtggtgaaggtgagagcagggctgggttggggaggtggaggcggctcaagtccgccctggaaggaaaggggactgcgcttcctgttggctggcccagcagatcctcttagagcaagctgggccaggggaattgagtcccaggccactcgcgggggacaagcaccaccccaggagagctcttcccaggggaaacctggctctctccaatagctaggagtggcggccatcctgcccctttctccccccagaatgtggggctgaccctgcggaagctcatcgggagcgtggatgatctcctgccttccttgccgtcatcttcacggacagagatcgagggcacccagaaactgctcaacaaagacctggcagagctcatcaacaagatgcggctggcacagcagaacgccgtgacctccctaagtgaggagtgcaagaggcagatgctgacggcttcacacaccctggctgtggacgccaagaacctgctcgacgctgtggaccaggccaagg

SEQ ID NO: 16821 - DNA, 3941 bp, Homo sapiens
  source 1..3941: mol_type = unassigned DNA
ccacagcctccggagccgttgcacacctacctgcccggccgacttacctgtacttgccgccgtcccggctcacctggcggtgcccgaggagtagtcgctggagtccgcgcctccctgggactgcaatgtgccgatcttagctgctgcctgagaggatgtctggggtgtccgagcccctgagtcgagtaaagttgggcacgttacgccggcctgaaggccctgcagagcccatggtggtggtaccagtagatgtggaaaaggaggacgtgcgtatcctcaaggtctgcttctatagcaacagcttcaatcctgggaaaaacttcaaactggtcaaatgcactgtccagacggagatccgggagatcatcacctccatcctgctgagcgggcggatcgggcccaacatccggttggctgagtgctatgggctgaggctgaagcacatgaagtccgatgagatccactggctgcacccacagatgacggtgggtgaggtgcaggacaagtatgagtgtctgcacgtggaagccgagtggaggtatgaccttcaaatccgctacttgccagaagacttcatggagagcctgaaggaggacaggaccacgctgctctatttttaccaacagctccggaacgactacatgcagcgctacgccagcaaggtcagcgagggcatggccctgcagctgggctgcctggagctcaggcggttcttcaaggatatgccccacaatgcacttgacaagaagtccaacttcgagctcctagaaaaggaagtggggctggacttgtttttcccaaagcagatgcaggagaacttaaagcccaaacagttccggaagatgatccagcagaccttccagcagtacgcctcgctcagggaggaggagtgcgtcatgaagttcttcaacactctcgccggcttcgccaacatcgaccaggagacctaccgctgtgaactcattcaaggatggaacattactgtggacctggtcattggccctaaagggatccgccagctgactagtcaggacgcaaagcccacctgcctggccgagttcaagcagatcaggtccatcaggtgcctcccgctggaggagggccaggcagtacttcagctgggcattgaaggtgccccccaggccttgtccatcaaaacctcatccctagcagaggctgagaacatggctgacctcatagacggctactgccggctgcagggtgagcaccaaggctctctcatcatccatcctaggaaagatggtgagaagcggaacagcctgccccagatccccatgctaaacctggaggcccggcggtcccacctctcagagagctgcagcatagagtcagacatctacgcagagattcccgacgaaaccctgcgaaggcccggaggtccacagtatggcattgcccgtgaagatgtggtcctgaatcgtattcttggggaaggcttttttggggaggtctatgaaggtgtctacacaaatcacaaaggggagaaaatcaatgtagctgtcaagacctgcaagaaagactgcactctggacaacaaggagaagttcatgagcgaggcagtgatcatgaagaacctcgaccacccgcacatcgtgaagctgatcggcatcattgaagaggagcccacctggatcatcatggaattgtatccctatggggagctgggccactacctggagcggaacaagaactccctgaaggtgctcaccctcgtgctgtactcactgcagatatgcaaagccatggcctacctggagagcatcaactgcgtgcacagggacattgctgtccggaacatcctggtggcctcccctgagtgtgtgaagctgggggactttggtctttcccggtacattgaggacgaggactattacaaagcctctgtgactcgtctccccatcaaatggatgtccccagagtccattaacttccgacgcttcacgacagccagtgacgtctggatgttcgccgtgtgcatgtgggagatcctgagctttgggaagcagcccttcttctggctggagaacaaggatgtcatcggggtgctggagaaaggagaccggctgcccaagcctgatctctgtccaccggtcctttataccctcatgacccgctgctgggactacgaccccagtgaccggccccgcttcaccgagctggtgtgcagcctcagtgacgtttatcagatggagaaggacattgccatggagcaagagaggaatgctcgctaccgaacccccaaaatcttggagcccacagccttccaggaacccccacccaagcccagccgacctaagtacagaccccctccgcaaaccaacctcctggctccaaagctgcagttccaggaggaggacttcatccaacccagcagccgagaagaggcccagcagctgtgggaggctgaaaaggtcaaaatgcggcaaatcctggacaaacagcagaagcagatggtggaggactaccagtggctcaggcaggaggagaagtccctggaccccatggtttatatgaatgataagtccccattgacgccagagaaggaggtcggctacctggagttcacagggcccccacagaagcccccgaggctgggcgcacagtccatccagcccacagctaacctggaccggactgatgacctggtgtacctcaatgtcatggagctggtgcgggccgtgctggagctcaagaatgagctctgtcagctgccccccgagggctacgtggtggtggtgaagaatgtggggctgaccctgcggaagctcatcgggagcgtggatgatctcctgccttccttgccgtcatcttcacggacagagatcgagggcacccagaaactgctcaacaaagacctggcagagctcatcaacaagatgcggctggcacagcagaacgccgtgacctccctaagtgaggagtgcaagaggcagatgctgacggcttcacacaccctggctgtggacgccaagaacctgctcgacgctgtggaccaggccaaggttctggccaatctggcccacccacctgcagagtgacggagggtgggggccacctgcctgcgtcttccgcccctgcctgccatgtacctcccctgccttgctgttggtcatgtgggtcttccagggggaaggccaaggggagtcaccttcccttgccactttgcacgacgccctctccccacccctacccctggctgtactgctcaggctgcagctggacagaggggactctgggctatggacacagggtgacggtgacaaagatggctcagagggggactgctgctgcctggccactgctccctaagccagcctggtccatgcagggggctcctgggggtggggaggtgtcacatggtgcccctagctttatatatggacatggcaggccgatttgggaaccaagctattcctttcccttcctcttcggccctcagatgtcccttgatgcacagagaagctggggaggagctttgttttgggggtcaggcagccagtgagatgagggatgggcctggcattcttgtacagtgtatattgaaatttatttaatgtgagtttggtctggactgacagcatgtgccctcctgagggaggacctggggcacagtccaggaacaagctaattgggagtccaggcacaggatgctgtgttgtcaacaaaccaagcatcagggggaagaagcagagagatgcggccaagataggaccttgggccaaatccgctctcttcctgcccctctttctctttcttcctttactttcccttgcttttccctcttttcttactcctcctctttctctccccaacccccattctcatctgcacccttcttttctcatgtgtttgcataaacattcttttaacttctttctatttgacttgtggttgaattaaaattgtcccatttgctttgc

SEQ ID NO: 16822 - DNA, 4272 bp, Homo sapiens
  source 1..4272: mol_type = unassigned DNA
ggcggggcttggcggcggcggcggcggcgcgcggggactcggaggtactgggcgcgcgcggctccggctcgggacgcctcgggacgcctcggggtcgggctccggctgcggctgctgctgcggcgcccgcgctccggtgcgctccgcctcctgtgcccgccgcggagcgcagtctgcgcgcccgccgtgcgccctcagctccttttcctgagcccgccgcgatgggagctgcgcggggatccccggccagaccccgccggttgcctctgctcagcgtcctgctgctgccgctgctgggcggtacccagacagccattgtcttcatcaagcagccgtcctcccaggatgcactgcaggggcgccgggcgctgcttcgctgtgaggttgaggctccgggcccggtacatgtgtactggctgctcgatggggcccctgtccaggacacggagcggcgtttcgcccagggcagcagcctgagctttgcagctgtggaccggctgcaggactctggcaccttccagtgtgtggctcgggatgatgtcactggagaagaagcccgcagtgccaacgcctccttcaacatcaaatggattgaggcaggtcctgtggtcctgaagcatccagcctcggaagctgagatccagccacagacccaggtcacacttcgttgccacattgatgggcaccctcggcccacctaccaatggttccgagatgggacccccctttctgatggtcagagcaaccacacagtcagcagcaaggagcggaacctgacgctccggccagctggtcctgagcatagtgggctgtattcctgctgcgcccacagtgcttttggccaggcttgcagcagccagaacttcaccttgagcattgctgatgaaagctttgccagggtggtgctggcaccccaggacgtggtagtagcgaggtatgaggaggccatgttccattgccagttctcagcccagccacccccgagcctgcagtggctctttgaggatgagactcccatcactaaccgcagtcgccccccacacctccgcagagccacagtgtttgccaacgggtctctgctgctgacccaggtccggccacgcaatgcagggatctaccgctgcattggccaggggcagaggggcccacccatcatcctggaagccacacttcacctagcagagattgaagacatgccgctatttgagccacgggtgtttacagctggcagcgaggagcgtgtgacctgccttccccccaagggtctgccagagcccagcgtgtggtgggagcacgcgggagtccggctgcccacccatggcagggtctaccagaagggccacgagctggtgttggccaatattgctgaaagtgatgctggtgtctacacctgccacgcggccaacctggctggtcagcggagacaggatgtcaacatcactgtggccactgtgccctcctggctgaagaagccccaagacagccagctggaggagggcaaacccggctacttggattgcctgacccaggccacaccaaaacctacagttgtctggtacagaaaccagatgctcatctcagaggactcacggttcgaggtcttcaagaatgggaccttgcgcatcaacagcgtggaggtgtatgatgggacatggtaccgttgtatgagcagcaccccagccggcagcatcgaggcgcaagcccgtgtccaagtgctggaaaagctcaagttcacaccaccaccccagccacagcagtgcatggagtttgacaaggaggccacggtgccctgttcagccacaggccgagagaagcccactattaagtgggaacgggcagatgggagcagcctcccagagtgggtgacagacaacgctgggaccctgcattttgcccgggtgactcgagatgacgctggcaactacacttgcattgcctccaacgggccgcagggccagattcgtgcccatgtccagctcactgtggcagtttttatcaccttcaaagtggaaccagagcgtacgactgtgtaccagggccacacagccctactgcagtgcgaggcccagggggaccccaagccgctgattcagtggaaaggcaaggaccgcatcctggaccccaccaagctgggacccaggatgcacatcttccagaatggctccctggtgatccatgacgtggcccctgaggactcaggccgctacacctgcattgcaggcaacagctgcaacatcaagcacacggaggcccccctctatgtcgtggacaagcctgtgccggaggagtcggagggccctggcagccctcccccctacaagatgatccagaccattgggttgtcggtgggtgccgctgtggcctacatcattgccgtgctgggcctcatgttctactgcaagaagcgctgcaaagccaagcggctgcagaagcagcccgagggcgaggagccagagatggaatgcctcaacggtgggcctttgcagaacgggcagccctcagcagagatccaagaagaagtggccttgaccagcttgggctccggccccgcggccaccaacaaacgccacagcacaagtgataagatgcacttcccacggtctagcctgcagcccatcaccacgctggggaagagtgagtttggggaggtgttcctggcaaaggctcagggcttggaggagggagtggcagagaccctggtacttgtgaagagcctgcagagcaaggatgagcagcagcagctggacttccggagggagttggagatgtttgggaagctgaaccacgccaacgtggtgcggctcctggggctgtgccgggaggctgagccccactacatggtgctggaatatgtggatctgggagacctcaagcagttcctgaggatttccaagagcaaggatgaaaaattgaagtcacagcccctcagcaccaagcagaaggtggccctatgcacccaggtagccctgggcatggagcacctgtccaacaaccgctttgtgcataaggacttggctgcgcgtaactgcctggtcagtgcccagagacaagtgaaggtgtctgccctgggcctcagcaaggatgtgtacaacagtgagtactaccacttccgccaggcctgggtgccgctgcgctggatgtcccccgaggccatcctggagggtgacttctctaccaagtctgatgtctgggccttcggtgtgctgatgtgggaagtgtttacacatggagagatgccccatggtgggcaggcagatgatgaagtactggcagatttgcaggctgggaaggctagacttcctcagcccgagggctgcccttccaaactctatcggctgatgcagcgctgctgggccctcagccccaaggaccggccctccttcagtgagattgccagcgccctgggagacagcaccgtggacagcaagccgtgaggagggagcccgctcaggatggcctgggcaggggaggacatctctagagggaagctcacagcatgatgggcaagatccctgtcctcctgggccctgaggcccctgccctagtgcaacaggcattgctgaggtctgagcagggcctggcctttcctcctcttcctcaccctcatcctttgggaggctgacttggacccaaactgggcgactagggctttgagctgggcagttttccctgccacctcttcctctatcagggacagtgtgggtgccacaggtaaccccaatttctggccttcaacttctccccttgaccgggtccaactctgccactcatctgccaactttgcctggggagggctaggcttgggatgagctgggtttgtggggagttccttaatattctcaagttctgggcacacagggttaatgagtctcttggcccactggtcccacttgggggtctagaccaggattatagaggacacagcaagtgagtcctccccactctgggcttgtgcacactgacccagacccacgtcttccccacccttctctcctttcctcatcctaagtgcctggcagatgaaggagttttcaggagcttttgacactatataaaccgccctttttgtatgcaccacgggcggcttttatatgtaattgcagcgtggggtgggtgggcatgggaggtaggggtgggccctggagatgaggagggtgggccatccttaccccacacttttattgttgtcgttttttgtttgttttgtttttttgtttttgtttttgtttttacactcgctgctctcaataaataagccttttttacaacctg

SEQ ID NO: 16823 - DNA, 902 bp, Homo sapiens
  source 1..902: mol_type = unassigned DNA
cggaggtactgggcgcgcgcggctccggctcgggacgcctcgggacgcctcggggtcgggctccggctgcggctgctgctgcggcgcccgcgctccggtgcgctccgcctcctgtgcccgccgcggagcgcagtctgcgcgcccgccgtgcgccctcagctccttttcctgagcccgccgcgatgggagctgcgcggggatccccggccagaccccgccggttgcctctgctcagcgtcctgctgctgccgctgctgggcggtacccagacagccattgtcttcatcaagcagccgtcctcccaggatgcactgcaggggcgccgggcgctgcttcgctgtgaggttgaggctccgggcccggtacatgtgtactggctgctcgatggggcccctgtccaggacacggagcggcgtttcgcccagggcagcagcctgagctttgcagctgtggaccggctgcaggactctggcaccttccagtgtgtggctcgggatgatgtcactggagaagaagcccgcagtgccaacgcctccttcaacatcaaatgtgagagccaggggggctgtgcccagtccccctgtcagaccctcaatgactgaggcctgggggatccctcccttacctcagcttctcccatttccagttaaacgggccaggcagaatgcatttatcatcagctttttttgctcatgtggataagaggaaattaaaagttatattttttccaaaattttttccttcaagtctgggacccatttatctgctgcatgcttgtgcaaatggaaagggcggccgagcccttggccaagtgtcagacttgacctgccagggaccaggcaggcacttagtatctggtaactgtagccccagcctcagcctccagggcttccttgtgtctg

SEQ ID NO: 16824 - DNA, 4016 bp, Homo sapiens
  source 1..4016: mol_type = unassigned DNA
ggctcgggacgcctcgggacgcctcggggtcgggctccggctgcggctgctgctgcggcgcccgcgctccggtgcgctccgcctcctgtgcccgccgcggagcgcagtctgcgcgcccgccgtgcgccctcagctccttttcctgagcccgccgcgatgggagctgcgcggggatccccggccagaccccgccggttgcctctgctcagcgtcctgctgctgccgctgctgggcggtacccagacagccattgtcttcatcaagcagccgtcctcccaggatgcactgcaggggcgccgggcgctgcttcgctgtgaggttgaggctccgggcccggtacatgtgtactggctgctcgatggggcccctgtccaggacacggagcggcgtttcgcccagggcagcagcctgagctttgcagctgtggaccggctgcaggactctggcaccttccagtgtgtggctcgggatgatgtcactggagaagaagcccgcagtgccaacgcctccttcaacatcaaatggattgaggcaggtcctgtggtcctgaagcatccagcctcggaagctgagatccagccacagacccaggtcacacttcgttgccacattgatgggcaccctcgatgaaagctttgccagggtggtgctggcaccccaggacgtggtagtagcgaggtatgaggaggccatgttccattgccagttctcagcccagccacccccgagcctgcagtggctctttgaggatgagactcccatcactaaccgcagtcgccccccacacctccgcagagccacagtgtttgccaacgggtctctgctgctgacccaggtccggccacgcaatgcagggatctaccgctgcattggccaggggcagaggggcccacccatcatcctggaagccacacttcacctagcagagattgaagacatgccgctatttgagccacgggtgtttacagctggcagcgaggagcgtgtgacctgccttccccccaagggtctgccagagcccagcgtgtggtgggagcacgcgggagtccggctgcccacccatggcagggtctaccagaagggccacgagctggtgttggccaatattgctgaaagtgatgctggtgtctacacctgccacgcggccaacctggctggtcagcggagacaggatgtcaacatcactgtggccactgtgccctcctggctgaagaagccccaagacagccagctggaggagggcaaacccggctacttggattgcctgacccaggccacaccaaaacctacagttgtctggtacagaaaccagatgctcatctcagaggactcacggttcgaggtcttcaagaatgggaccttgcgcatcaacagcgtggaggtgtatgatgggacatggtaccgttgtatgagcagcaccccagccggcagcatcgaggcgcaagcccgtgtccaagtgctggaaaagctcaagttcacaccaccaccccagccacagcagtgcatggagtttgacaaggaggccacggtgccctgttcagccacaggccgagagaagcccactattaagtgggaacgggcagatgggagcagcctcccagagtgggtgacagacaacgctgggaccctgcattttgcccgggtgactcgagatgacgctggcaactacacttgcattgcctccaacgggccgcagggccagattcgtgcccatgtccagctcactgtggcagtttttatcaccttcaaagtggaaccagagcgtacgactgtgtaccagggccacacagccctactgcagtgcgaggcccagggggaccccaagccgctgattcagtggaaaggcaaggaccgcatcctggaccccaccaagctgggacccaggatgcacatcttccagaatggctccctggtgatccatgacgtggcccctgaggactcaggccgctacacctgcattgcaggcaacagctgcaacatcaagcacacggaggcccccctctatgtcgtggacaagcctgtgccggaggagtcggagggccctggcagccctcccccctacaagatgatccagaccattgggttgtcggtgggtgccgctgtggcctacatcattgccgtgctgggcctcatgttctactgcaagaagcgctgcaaagccaagcggctgcagaagcagcccgagggcgaggagccagagatggaatgcctcaacggtgggcctttgcagaacgggcagccctcagcagagatccaagaagaagtggccttgaccagcttgggctccggccccgcggccaccaacaaacgccacagcacaagtgataagatgcacttcccacggtctagcctgcagcccatcaccacgctggggaagagtgagtttggggaggtgttcctggcaaaggctcagggcttggaggagggagtggcagagaccctggtacttgtgaagagcctgcagagcaaggatgagcagcagcagctggacttccggagggagttggagatgtttgggaagctgaaccacgccaacgtggtgcggctcctggggctgtgccgggaggctgagccccactacatggtgctggaatatgtggatctgggagacctcaagcagttcctgaggatttccaagagcaaggatgaaaaattgaagtcacagcccctcagcaccaagcagaaggtggccctatgcacccaggtagccctgggcatggagcacctgtccaacaaccgctttgtgcataaggacttggctgcgcgtaactgcctggtcagtgcccagagacaagtgaaggtgtctgccctgggcctcagcaaggatgtgtacaacagtgagtactaccacttccgccaggcctgggtgccgctgcgctggatgtcccccgaggccatcctggagggtgacttctctaccaagtctgatgtctgggccttcggtgtgctgatgtgggaagtgtttacacatggagagatgccccatggtgggcaggcagatgatgaagtactggcagatttgcaggctgggaaggctagacttcctcagcccgagggctgcccttccaaactctatcggctgatgcagcgctgctgggccctcagccccaaggaccggccctccttcagtgagattgccagcgccctgggagacagcaccgtggacagcaagccgtgaggagggagcccgctcaggatggcctgggcaggggaggacatctctagagggaagctcacagcatgatgggcaagatccctgtcctcctgggccctgaggcccctgccctagtgcaacaggcattgctgaggtctgagcagggcctggcctttcctcctcttcctcaccctcatcctttgggaggctgacttggacccaaactgggcgactagggctttgagctgggcagttttccctgccacctcttcctctatcagggacagtgtgggtgccacaggtaaccccaatttctggccttcaacttctccccttgaccgggtccaactctgccactcatctgccaactttgcctggggagggctaggcttgggatgagctgggtttgtggggagttccttaatattctcaagttctgggcacacagggttaatgagtctcttggcccactggtcccacttgggggtctagaccaggattatagaggacacagcaagtgagtcctccccactctgggcttgtgcacactgacccagacccacgtcttccccacccttctctcctttcctcatcctaagtgcctggcagatgaaggagttttcaggagcttttgacactatataaaccgccctttttgtatgcaccacgggcggcttttatatgtaattgcagcgtggggtgggtgggcatgggaggtaggggtgggccctggagatgaggagggtgggccatccttaccccacacttttattgttgtcgttttttgtttgttttgtttttttgtttttgtttttgtttttacactcgctgctctcaataaataagccttttttacaacctg

SEQ ID NO: 16825 - DNA, 2412 bp, Homo sapiens
  source 1..2412: mol_type = unassigned DNA
ggacgcctcgggacgcctcggggtcgggctccggctgcggctgctgctgcggcgcccgcgctccggtgcgctccgcctcctgtgcccgccgcggagcgcagtctgcgcgcccgccgtgcgccctcagctccttttcctgagcccgccgcgatgggagctgcgcggggatccccggccagaccccgccggttgcctctgctcagcgtcctgctgctgccgctgctgggcggtacccagacagccattgtcttcatcaagcagccgtcctcccaggatgcactgcaggggcgccgggcgctgcttcgctgtgaggttgaggctccgggcccggtacatgtgtactggctgctcgatggggcccctgtccaggacacggagcggcgtttcgcccagggcagcagcctgagctttgcagctgtggaccggctgcaggactctggcaccttccagtgtgtggctcgggatgatgtcactggagaagaagcccgcagtgccaacgcctccttcaacatcaaatggattgaggcaggtcctgtggtcctgaagcatccagcctcggaagctgagatccagccacagacccaggtcacacttcgttgccacattgatgggcaccctcggcccacctaccaatggttccgagatgggacccccctttctgatggtcagagcaaccacacagtcagcagcaaggagcggaacctgacgctccggccagctggtcctgagcatagtgggctgtattcctgctgcgcccacagtgcttttggccaggcttgcagcagccagaacttcaccttgagcattgctgatgaaagctttgccagggtggtgctggcaccccaggacgtggtagtagcgaggtatgaggaggccatgttccattgccagttctcagcccagccacccccgagcctgcagtggctctttgaggatgagactcccatcactaaccgcagtcgccccccacacctccgcagagccacagtgtttgccaacgggtctctgctgctgacccaggtccggccacgcaatgcagggatctaccgctgcattggccaggggcagaggggcccacccatcatcctggaagccacacttcacctagcagagattgaagacatgccgctatttgagccacgggtgtttacagctggcagcgaggagcgtgtgacctgccttccccccaagggtctgccagagcccagcgtgtggtgggagcacgcgggagtccggctgcccacccatggcagggtctaccagaagggccacgagctggtgttggccaatattgctgaaagtgatgctggtgtctacacctgccacgcggccaacctggctggtcagcggagacaggatgtcaacatcactgtggccagtgagcacctttgccctgaaggtcaaggagaggtggaggggaacacaggtctgggtgtgatggacagaggcttccctggtactcacctgaggtcctctcagttctgggccctgcaggcttgggaatcagttcactactgggagtcggtgtagacagtagagagccaggcacaggggttagggtgggtgctccagaggaaatagtgacagccctcacagaaaaatggtcctctgggtacagaggaaagagcaatagactaggaatctagagacctgggtcccactatgctcccaatgcacagagtgacgatggtagcaaatcacccaccttactggggttcagtctcctcatccataaaatggagccagtaatctactacctaccccacaaggtggttggaaaggtcaaatgaagtagatgaaaatgatttttctttttttcttttttgggaggtaatagtggacaaaattataggtgatttttaatttgttttagtttgttatgctttccaaatttctttactaaacatattacttatgaaaaaaaagagggggagaaaagcaagacatatgactgaaagtacacatgataaaccctttatatcaggctgggcgcggtggctcatgcctgtaatcccagcactttgggaggccgagccgggcggatcacaaggtcaggagttggagaccagcctgaccaacatggtgaaaccccatctctactaaaaatacaaaaattagctgggcgtggtggggcacacctgtaatcccagctactcaggaggctgagggaggaaaattgcttgaacccaggaggcagaggttgcaatgagctgagatcgcaccgttgctcttcagcccgggcaacagagtgagactccatctcaaaacaaaacaaaacaaaccttatatcctcactacaggcatagggatttatttgtttacttatttctttataccatgccttgttccaaaccttttgtggtagtttaaaaggatacacaataaaaattacaatatgcacacagagacaca

SEQ ID NO: 16826 - DNA, 3801 bp, Homo sapiens
  source 1..3801: mol_type = unassigned DNA
cgcctcgggacgcctcggggtcgggctccggctgcggctgctgctgcggcgcccgcgctccggtgcgctccgcctcctgtgcccgccgcggagcgcagtctgcgcgcccgccgtgcgccctcagctccttttcctgagcccgccgcgatgggagctgcgcggggatccccggccagaccccgccggttgcctctgctcagcgtcctgctgctgccgctgctgggcggtacccagacagccattgtcttcatcaagcagccgtcctcccaggatgcactgcaggggcgccgggcgctgcttcgctgtgaggttgaggctccgggcccggtacatgtgtactggctgctcgatggggcccctgtccaggacacggagcggcgtttcgcccagggcagcagcctgagctttgcagctgtggaccggctgcaggactctggcaccttccagtgtgtggctcgggatgatgtcactggagaagaagcccgcagtgccaacgcctccttcaacatcaaatggattgaggcaggtcctgtggtcctgaagcatccagcctcggaagctgagatccagccacagacccaggtcacacttcgttgccacattgatgggcaccctcggcccacctaccaatggttccgagatgggacccccctttctgatggtcagagcaaccacacagtcagcagcaaggagcggaacctgacgctccggccagctggtcctgagcatagtgggctgtattcctgctgcgcccacagtgcttttggccaggcttgcagcagccagaacttcaccttgagcattgctgatgaaagctttgccagggtggtgctggcaccccaggacgtggtagtagcgaggtatgaggaggccatgttccattgccagttctcagcccagccacccccgagcctgcagtggctctttgaggatgagactcccatcactaaccgcagtcgccccccacacctccgcagagccacagtgtttgccaacgggtctctgctgctgacccaggtccggccacgcaatgcagggatctaccgctgcattggccaggggcagaggggcccacccatcatcctggaagccacacttcacctagcagagattgaagacatgccgctatttgagccacgggtgtttacagctggcagcgaggagcgtgtgacctgccttccccccaagggtctgccagagcccagcgtgtggtgggagcacgcgggagtccggctgcccacccatggcagggtctaccagaagggccacgagctggtgttggccaatattgctgaaagtgatgctggtgtctacacctgccacgcggccaacctggctggtcagcggagacaggatgtcaacatcactgtggccaatgggagcagcctcccagagtgggtgacagacaacgctgggaccctgcattttgcccgggtgactcgagatgacgctggcaactacacttgcattgcctccaacgggccgcagggccagattcgtgcccatgtccagctcactgtggcagtttttatcaccttcaaagtggaaccagagcgtacgactgtgtaccagggccacacagccctactgcagtgcgaggcccagggggaccccaagccgctgattcagtggaaaggcaaggaccgcatcctggaccccaccaagctgggacccaggatgcacatcttccagaatggctccctggtgatccatgacgtggcccctgaggactcaggccgctacacctgcattgcaggcaacagctgcaacatcaagcacacggaggcccccctctatgtcgtggacaagcctgtgccggaggagtcggagggccctggcagccctcccccctacaagatgatccagaccattgggttgtcggtgggtgccgctgtggcctacatcattgccgtgctgggcctcatgttctactgcaagaagcgctgcaaagccaagcggctgcagaagcagcccgagggcgaggagccagagatggaatgcctcaacggtgggcctttgcagaacgggcagccctcagcagagatccaagaagaagtggccttgaccagcttgggctccggccccgcggccaccaacaaacgccacagcacaagtgataagatgcacttcccacggtctagcctgcagcccatcaccacgctggggaagagtgagtttggggaggtgttcctggcaaaggctcagggcttggaggagggagtggcagagaccctggtacttgtgaagagcctgcagagcaaggatgagcagcagcagctggacttccggagggagttggagatgtttgggaagctgaaccacgccaacgtggtgcggctcctggggctgtgccgggaggctgagccccactacatggtgctggaatatgtggatctgggagacctcaagcagttcctgaggatttccaagagcaaggatgaaaaattgaagtcacagcccctcagcaccaagcagaaggtggccctatgcacccaggtagccctgggcatggagcacctgtccaacaaccgctttgtgcataaggacttggctgcgcgtaactgcctggtcagtgcccagagacaagtgaaggtgtctgccctgggcctcagcaaggatgtgtacaacagtgagtactaccacttccgccaggcctgggtgccgctgcgctggatgtcccccgaggccatcctggagggtgacttctctaccaagtctgatgtctgggccttcggtgtgctgatgtgggaagtgtttacacatggagagatgccccatggtgggcaggcagatgatgaagtactggcagatttgcaggctgggaaggctagacttcctcagcccgagggctgcccttccaaactctatcggctgatgcagcgctgctgggccctcagccccaaggaccggccctccttcagtgagattgccagcgccctgggagacagcaccgtggacagcaagccgtgaggagggagcccgctcaggatggcctgggcaggggaggacatctctagagggaagctcacagcatgatgggcaagatccctgtcctcctgggccctgaggcccctgccctagtgcaacaggcattgctgaggtctgagcagggcctggcctttcctcctcttcctcaccctcatcctttgggaggctgacttggacccaaactgggcgactagggctttgagctgggcagttttccctgccacctcttcctctatcagggacagtgtgggtgccacaggtaaccccaatttctggccttcaacttctccccttgaccgggtccaactctgccactcatctgccaactttgcctggggagggctaggcttgggatgagctgggtttgtggggagttccttaatattctcaagttctgggcacacagggttaatgagtctcttggcccactggtcccacttgggggtctagaccaggattatagaggacacagcaagtgagtcctccccactctgggcttgtgcacactgacccagacccacgtcttccccacccttctctcctttcctcatcctaagtgcctggcagatgaaggagttttcaggagcttttgacactatataaaccgccctttttgtatgcaccacgggcggcttttatatgtaattgcagcgtggggtgggtgggcatgggaggtaggggtgggccctggagatgaggagggtgggccatccttaccccacacttttattgttgtcgttttttgtttgttttgtttttttgtttttgtttttgtttttacactcgctgctctcaataaataagcctttttta

SEQ ID NO: 16827 - DNA, 4023 bp, Homo sapiens
  source 1..4023: mol_type = unassigned DNA
cgcctcgggacgcctcggggtcgggctccggctgcggctgctgctgcggcgcccgcgctccggtgcgctccgcctcctgtgcccgccgcggagcgcagtctgcgcgcccgccgtgcgccctcagctccttttcctgagcccgccgcgatgggagctgcgcggggatccccggccagaccccgccggttgcctctgctcagcgtcctgctgctgccgctgctgggcggtacccagacagccattgtcttcatcaagcagccgtcctcccaggatgcactgcaggggcgccgggcgctgcttcgctgtgaggttgaggctccgggcccggtacatgtgtactggctgctcgatggggcccctgtccaggacacggagcggcgtttcgcccagggcagcagcctgagctttgcagctgtggaccggctgcaggactctggcaccttccagtgtgtggctcgggatgatgtcactggagaagaagcccgcagtgccaacgcctccttcaacatcaaatggattgaggcaggtcctgtggtcctgaagcatccagcctcggaagctgagatccagccacagacccaggtcacacttcgttgccacattgatgggcaccctcggcccacctaccaatggttccgagatgggacccccctttctgatggtcagagcaaccacacagtcagcagcaaggagcggaacctgacgctccggccagctggtcctgagcatagtgggctgtattcctgctgcgcccacagtgcttttggccaggcttgcagcagccagaacttcaccttgagcattgctgatgaaagctttgccagggtggtgctggcaccccaggacgtggtagtagcgaggtatgaggaggccatgttccattgccagttctcagcccagccacccccgagcctgcagtggctctttgaggatgagactcccatcactaaccgcagtcgccccccacacctccgcagagccacagtgtttgccaacgggtctctgctgctgacccaggtccggccacgcaatgcagggatctaccgctgcattggccaggggcagaggggcccacccatcatcctggaagccacacttcacctagcagagattgaagacatgccgctatttgagccacgggtgtttacagctggcagcgaggagcgtgtgacctgccttccccccaagggtctgccagagcccagcgtgtggtgggagcacgcgggagtccggctgcccacccatggcagggtctaccagaagggccacgagctggtgttggccaatattgctgaaagtgatgctggtgtctacacctgccacgcggccaacctggctggtcagcggagacaggatgtcaacatcactgtggccactgtgccctcctggctgaagaagccccaagacagccagctggaggagggcaaacccggctacttggattgcctgacccaggccacaccaaaacctacagttgtctggtacagaaaccagatgctcatctcagaggactcacggttcgaggtcttcaagaatgggaccttgcgcatcaacagcgtggaggtgtatgatgggacatggtaccgttgtatgagcagcaccccagccggcagcatcgaggcgcaagcccgtgtccaagtgctggaaaagctcaagttcacaccaccaccccagccacagcagtgcatggagtttgacaaggaggccacggtgccctgttcagccacaggccgagagaagcccactattaagtgggaacgggcagatgggagcagcctcccagagtgggtgacagacaacgctgggaccctgcattttgcccgggtgactcgagatgacgctggcaactacacttgcattgcctccaacgggccgcagggccagattcgtgcccatgtccagctcactgtggcagtttttatcaccttcaaagtggaaccagagcgtacgactgtgtaccagggccacacagccctactgcagtgcgaggcccagggggaccccaagccgctgattcagtggaaagacaagcctgtgccggaggagtcggagggccctggcagccctcccccctacaagatgatccagaccattgggttgtcggtgggtgccgctgtggcctacatcattgccgtgctgggcctcatgttctactgcaagaagcgctgcaaagccaagcggctgcagaagcagcccgagggcgaggagccagagatggaatgcctcaacggtgggcctttgcagaacgggcagccctcagcagagatccaagaagaagtggccttgaccagcttgggctccggccccgcggccaccaacaaacgccacagcacaagtgataagatgcacttcccacggtctagcctgcagcccatcaccacgctggggaagagtgagtttggggaggtgttcctggcaaaggctcagggcttggaggagggagtggcagagaccctggtacttgtgaagagcctgcagagcaaggatgagcagcagcagctggacttccggagggagttggagatgtttgggaagctgaaccacgccaacgtggtgcggctcctggggctgtgccgggaggctgagccccactacatggtgctggaatatgtggatctgggagacctcaagcagttcctgaggatttccaagagcaaggatgaaaaattgaagtcacagcccctcagcaccaagcagaaggtggccctatgcacccaggtagccctgggcatggagcacctgtccaacaaccgctttgtgcataaggacttggctgcgcgtaactgcctggtcagtgcccagagacaagtgaaggtgtctgccctgggcctcagcaaggatgtgtacaacagtgagtactaccacttccgccaggcctgggtgccgctgcgctggatgtcccccgaggccatcctggagggtgacttctctaccaagtctgatgtctgggccttcggtgtgctgatgtgggaagtgtttacacatggagagatgccccatggtgggcaggcagatgatgaagtactggcagatttgcaggctgggaaggctagacttcctcagcccgagggctgcccttccaaactctatcggctgatgcagcgctgctgggccctcagccccaaggaccggccctccttcagtgagattgccagcgccctgggagacagcaccgtggacagcaagccgtgaggagggagcccgctcaggatggcctgggcaggggaggacatctctagagggaagctcacagcatgatgggcaagatccctgtcctcctgggccctgaggcccctgccctagtgcaacaggcattgctgaggtctgagcagggcctggcctttcctcctcttcctcaccctcatcctttgggaggctgacttggacccaaactgggcgactagggctttgagctgggcagttttccctgccacctcttcctctatcagggacagtgtgggtgccacaggtaaccccaatttctggccttcaacttctccccttgaccgggtccaactctgccactcatctgccaactttgcctggggagggctaggcttgggatgagctgggtttgtggggagttccttaatattctcaagttctgggcacacagggttaatgagtctcttggcccactggtcccacttgggggtctagaccaggattatagaggacacagcaagtgagtcctccccactctgggcttgtgcacactgacccagacccacgtcttccccacccttctctcctttcctcatcctaagtgcctggcagatgaaggagttttcaggagcttttgacactatataaaccgccctttttgtatgcaccacgggcggcttttatatgtaattgcagcgtggggtgggtgggcatgggaggtaggggtgggccctggagatgaggagggtgggccatccttaccccacacttttattgttgtcgttttttgtttgttttgtttttttgtttttgtttttgtttttacactcgctgctctcaataaataagcctttttta

SEQ ID NO: 16828 - DNA, 4071 bp, Homo sapiens
  source 1..4071: mol_type = unassigned DNA
cgcctcgggacgcctcggggtcgggctccggctgcggctgctgctgcggcgcccgcgctccggtgcgctccgcctcctgtgcccgccgcggagcgcagtctgcgcgcccgccgtgcgccctcagctccttttcctgagcccgccgcgatgggagctgcgcggggatccccggccagaccccgccggttgcctctgctcagcgtcctgctgctgccgctgctgggcggtacccagacagccattgtcttcatcaagcagccgtcctcccaggatgcactgcaggggcgccgggcgctgcttcgctgtgaggttgaggctccgggcccggtacatgtgtactggctgctcgatggggcccctgtccaggacacggagcggcgtttcgcccagggcagcagcctgagctttgcagctgtggaccggctgcaggactctggcaccttccagtgtgtggctcgggatgatgtcactggagaagaagcccgcagtgccaacgcctccttcaacatcaaatggattgaggcaggtcctgtggtcctgaagcatccagcctcggaagctgagatccagccacagacccaggtcacacttcgttgccacattgatgggcaccctcggcccacctaccaatggttccgagatgggacccccctttctgatggtcagagcaaccacacagtcagcagcaaggagcggaacctgacgctccggccagctggtcctgagcatagtgggctgtattcctgctgcgcccacagtgcttttggccaggcttgcagcagccagaacttcaccttgagcattgctgatgaaagctttgccagggtggtgctggcaccccaggacgtggtagtagcgaggtatgaggaggccatgttccattgccagttctcagcccagccacccccgagcctgcagtggctctttgaggatgagactcccatcactaaccgcagtcgccccccacacctccgcagagccacagtgtttgccaacgggtctctgctgctgacccaggtccggccacgcaatgcagggatctaccgctgcattggccaggggcagaggggcccacccatcatcctggaagccacacttcacctagcagagattgaagacatgccgctatttgagccacgggtgtttacagctggcagcgaggagcgtgtgacctgccttccccccaagggtctgccagagcccagcgtgtggtgggagcacgcgggagtccggctgcccacccatggcagggtctaccagaagggccacgagctggtgttggccaatattgctgaaagtgatgctggtgtctacacctgccacgcggccaacctggctggtcagcggagacaggatgtcaacatcactgtggccactgtgccctcctggctgaagaagccccaagacagccagctggaggagggcaaacccggctacttggattgcctgacccaggccacaccaaaacctacagttgtctggtacagaaaccagatgctcatctcagaggactcacggttcgaggtcttcaagaatgggaccttgcgcatcaacagcgtggaggtgtatgatgggacatggtaccgttgtatgagcagcaccccagccggcagcatcgaggcgcaagcccgtgtccaagtgctggatgggagcagcctcccagagtgggtgacagacaacgctgggaccctgcattttgcccgggtgactcgagatgacgctggcaactacacttgcattgcctccaacgggccgcagggccagattcgtgcccatgtccagctcactgtggcagtttttatcaccttcaaagtggaaccagagcgtacgactgtgtaccagggccacacagccctactgcagtgcgaggcccagggggaccccaagccgctgattcagtggaaaggcaaggaccgcatcctggaccccaccaagctgggacccaggatgcacatcttccagaatggctccctggtgatccatgacgtggcccctgaggactcaggccgctacacctgcattgcaggcaacagctgcaacatcaagcacacggaggcccccctctatgtcgtggacaagcctgtgccggaggagtcggagggccctggcagccctcccccctacaagatgatccagaccattgggttgtcggtgggtgccgctgtggcctacatcattgccgtgctgggcctcatgttctactgcaagaagcgctgcaaagccaagcggctgcagaagcagcccgagggcgaggagccagagatggaatgcctcaacggtgggcctttgcagaacgggcagccctcagcagagatccaagaagaagtggccttgaccagcttgggctccggccccgcggccaccaacaaacgccacagcacaagtgataagatgcacttcccacggtctagcctgcagcccatcaccacgctggggaagagtgagtttggggaggtgttcctggcaaaggctcagggcttggaggagggagtggcagagaccctggtacttgtgaagagcctgcagagcaaggatgagcagcagcagctggacttccggagggagttggagatgtttgggaagctgaaccacgccaacgtggtgcggctcctggggctgtgccgggaggctgagccccactacatggtgctggaatatgtggatctgggagacctcaagcagttcctgaggatttccaagagcaaggatgaaaaattgaagtcacagcccctcagcaccaagcagaaggtggccctatgcacccaggtagccctgggcatggagcacctgtccaacaaccgctttgtgcataaggacttggctgcgcgtaactgcctggtcagtgcccagagacaagtgaaggtgtctgccctgggcctcagcaaggatgtgtacaacagtgagtactaccacttccgccaggcctgggtgccgctgcgctggatgtcccccgaggccatcctggagggtgacttctctaccaagtctgatgtctgggccttcggtgtgctgatgtgggaagtgtttacacatggagagatgccccatggtgggcaggcagatgatgaagtactggcagatttgcaggctgggaaggctagacttcctcagcccgagggctgcccttccaaactctatcggctgatgcagcgctgctgggccctcagccccaaggaccggccctccttcagtgagattgccagcgccctgggagacagcaccgtggacagcaagccgtgaggagggagcccgctcaggatggcctgggcaggggaggacatctctagagggaagctcacagcatgatgggcaagatccctgtcctcctgggccctgaggcccctgccctagtgcaacaggcattgctgaggtctgagcagggcctggcctttcctcctcttcctcaccctcatcctttgggaggctgacttggacccaaactgggcgactagggctttgagctgggcagttttccctgccacctcttcctctatcagggacagtgtgggtgccacaggtaaccccaatttctggccttcaacttctccccttgaccgggtccaactctgccactcatctgccaactttgcctggggagggctaggcttgggatgagctgggtttgtggggagttccttaatattctcaagttctgggcacacagggttaatgagtctcttggcccactggtcccacttgggggtctagaccaggattatagaggacacagcaagtgagtcctccccactctgggcttgtgcacactgacccagacccacgtcttccccacccttctctcctttcctcatcctaagtgcctggcagatgaaggagttttcaggagcttttgacactatataaaccgccctttttgtatgcaccacgggcggcttttatatgtaattgcagcgtggggtgggtgggcatgggaggtaggggtgggccctggagatgaggagggtgggccatccttaccccacacttttattgttgtcgttttttgtttgttttgtttttttgtttttgtttttgtttttacactcgctgctctcaataaataagcctttttta

SEQ ID NO: 16829 - DNA, 3958 bp, Homo sapiens
  source 1..3958: mol_type = unassigned DNA
cgcctcgggacgcctcggggtcgggctccggctgcggctgctgctgcggcgcccgcgctccggtgcgctccgcctcctgtgcccgccgcggagcgcagtctgcgcgcccgccgtgcgccctcagctccttttcctgagcccgccgcgatgggagctgcgcggggatccccggccagaccccgccggttgcctctgctcagcgtcctgctgctgccgctgctgggcggtacccagacagccattgtcttcatcaagcagccgtcctcccaggatgcactgcaggggcgccgggcgctgcttcgctgtgaggttgaggctccgggcccggtacatgtgtactggctgctcgatggggcccctgtccaggacacggagcggcgtttcgcccagggcagcagcctgagctttgcagctgtggaccggctgcaggactctggcaccttccagtgtgtggctcgggatgatgtcactggagaagaagcccgcagtgccaacgcctccttcaacatcaaatggattgaggcaggtcctgtggtcctgaagcatccagcctcggaagctgagatccagccacagacccaggtcacacttcgttgccacattgatgggcaccctcggcccacctaccaatggttccgagatgggacccccctttctgatggtcagagcaaccacacagtcagcagcaaggagcggaacctgacgctccggccagctggtcctgagcatagtgggctgtattcctgctgcgcccacagtgcttttggccaggcttgcagcagccagaacttcaccttgagcattgctgatgaaagctttgccagggtggtgctggcaccccaggacgtggtagtagcgaggtatgaggaggccatgttccattgccagttctcagcccagccacccccgagcctgcagtggctctttgaggatgagactcccatcactaaccgcagtcgccccccacacctccgcagagccacagtgtttgccaacgggtctctgctgctgacccaggtccggccacgcaatgcagggatctaccgctgcattggccaggggcagaggggcccacccatcatcctggaagccacacttcacctagcagagattgaagacatgccgctatttgagccacgggtgtttacagctggcagcgaggagcgtgtgacctgccttccccccaagggtctgccagagcccagcgtgtggtgggagcacgcgggagtccggctgcccacccatggcagggtctaccagaagggccacgagctggtgttggccaatattgctgaaagtgatgctggtgtctacacctgccacgcggccaacctggctggtcagcggagacaggatgtcaacatcactgtggccactgtgccctcctggctgaagaagccccaagacagccagctggaggagggcaaacccggctacttggattgcctgacccaggccacaccaaaacctacagttgtctggtacagaaaccagatgctcatctcagaggactcacggttcgaggtcttcaagaatgggaccttgcgcatcaacagcgtggaggtgtatgatgggacatggtaccgttgtatgagcagcaccccagccggcagcatcgaggcgcaagcccgtgtccaagtgctggaaaagctcaagttcacaccaccaccccagccacagcagtgcatggagtttgacaaggaggccacggtgccctgttcagccacaggccgagagaagcccactattaagtgggaacgggcagatgggagcagcctcccagagtgggtgacagacaacgctgggaccctgcattttgcccgggtgactcgagatgacgctggcaactacacttgcattgcctccaacgggccgcagggccagattcgtgcccatgtccagctcactgtggcagtttttatcaccttcaaagtggaaccagagcgtacgactgtgtaccagggccacacagccctactgcagtgcgaggcccagggggaccccaagccgctgattcagtggaaaggcaaggaccgcatcctggaccccaccaagctgggacccaggatgcacatcttccagaatggctccctggtgatccatgacgtggcccctgaggactcaggccgctacacctgcattgcaggcaacagctgcaacatcaagcacacggaggcccccctctatgtcgtggacaagcctgtgccggaggagtcggagggccctggcagccctcccccctacaagatgatccagaccattgggttgtcggtgggtgccgctgtggcctacatcattgccgtgctgggcctcatgttctactgcaagaagcgctgcaaagccaagcggctgcagaagcagcccgagggcgaggagccagagatggaatgcctcaacggtgggcctttgcagaacgggcagccctcagcagagatccaagaagaagtggccttgaccagcttgggctccggccccgcggccaccaacaaacgccacagcacaagtgataagatgcacttcccacggtctagcctgcagcccatcaccacgctggggagacctcaagcagttcctgaggatttccaagagcaaggatgaaaaattgaagtcacagcccctcagcaccaagcagaaggtggccctatgcacccaggtagccctgggcatggagcacctgtccaacaaccgctttgtgcataaggacttggctgcgcgtaactgcctggtcagtgcccagagacaagtgaaggtgtctgccctgggcctcagcaaggatgtgtacaacagtgagtactaccacttccgccaggcctgggtgccgctgcgctggatgtcccccgaggccatcctggagggtgacttctctaccaagtctgatgtctgggccttcggtgtgctgatgtgggaagtgtttacacatggagagatgccccatggtgggcaggcagatgatgaagtactggcagatttgcaggctgggaaggctagacttcctcagcccgagggctgcccttccaaactctatcggctgatgcagcgctgctgggccctcagccccaaggaccggccctccttcagtgagattgccagcgccctgggagacagcaccgtggacagcaagccgtgaggagggagcccgctcaggatggcctgggcaggggaggacatctctagagggaagctcacagcatgatgggcaagatccctgtcctcctgggccctgaggcccctgccctagtgcaacaggcattgctgaggtctgagcagggcctggcctttcctcctcttcctcaccctcatcctttgggaggctgacttggacccaaactgggcgactagggctttgagctgggcagttttccctgccacctcttcctctatcagggacagtgtgggtgccacaggtaaccccaatttctggccttcaacttctccccttgaccgggtccaactctgccactcatctgccaactttgcctggggagggctaggcttgggatgagctgggtttgtggggagttccttaatattctcaagttctgggcacacagggttaatgagtctcttggcccactggtcccacttgggggtctagaccaggattatagaggacacagcaagtgagtcctccccactctgggcttgtgcacactgacccagacccacgtcttccccacccttctctcctttcctcatcctaagtgcctggcagatgaaggagttttcaggagcttttgacactatataaaccgccctttttgtatgcaccacgggcggcttttatatgtaattgcagcgtggggtgggtgggcatgggaggtaggggtgggccctggagatgaggagggtgggccatccttaccccacacttttattgttgtcgttttttgtttgttttgtttttttgtttttgtttttgtttttacactcgctgctctcaataaataagcctttttta

SEQ ID NO: 16830 - DNA, 5282 bp, Homo sapiens
  source 1..5282: mol_type = unassigned DNA
ccggctgcggctgctgctgcggcgcccgcgctccggtgcgctccgcctcctgtgcccgccgcggagcgcagtctgcgcgcccgccgtgcgccctcagctccttttcctgagcccgccgcgatgggagctgcgcggggatccccggccagaccccgccggttgcctctgctcagcgtcctgctgctgccgctgctgggcggtacccagacagccattgtcttcatcaagcagccgtcctcccaggatgcactgcaggggcgccgggcgctgcttcgctgtgaggttgaggctccgggcccggtacatgtgtactggctgctcgatggggcccctgtccaggacacggagcggcgtttcgcccagggcagcagcctgagctttgcagctgtggaccggctgcaggactctggcaccttccagtgtgtggctcgggatgatgtcactggagaagaagcccgcagtgccaacgcctccttcaacatcaaatggattgaggcaggtcctgtggtcctgaagcatccagcctcggaagctgagatccagccacagacccaggtcacacttcgttgccacattgatgggcaccctcggcccacctaccaatggttccgagatgggacccccctttctgatggtcagagcaaccacacagtcagcagcaaggagcggaacctgacgctccggccagctggtcctgagcatagtgggctgtattcctgctgcgcccacagtgcttttggccaggcttgcagcagccagaacttcaccttgagcattgctgatgaaagctttgccagggtggtgctggcaccccaggacgtggtagtagcgaggtatgaggaggccatgttccattgccagttctcagcccagccacccccgagcctgcagtggctctttgaggatgagactcccatcactaaccgcagtcgccccccacacctccgcagagccacagtgtttgccaacgggtctctgctgctgacccaggtccggccacgcaatgcagggatctaccgctgcattggccaggggcagaggggcccacccatcatcctggaagccacacttcacctagcagagattgaagacatgccgctatttgagccacgggtgtttacagctggcagcgaggagcgtgtgacctgccttccccccaagggtctgccagagcccagcgtgtggtgggagcacgcgggagtccggctgcccacccatggcagggtctaccagaagggccacgagctggtgttggccaatattgctgaaagtgatgctggtgtctacacctgccacgcggccaacctggctggtcagcggagacaggatgtcaacatcactgtggccactgtgccctcctggctgaagaagccccaagacagccagctggaggagggcaaacccggctacttggattgcctgacccaggccacaccaaaacctacagttgtctggtacagaaaccagatgctcatctcagaggactcacggttcgaggtcttcaagaatgggaccttgcgcatcaacagcgtggaggtgtatgatgggacatggtaccgttgtatgagcagcaccccagccggcagcatcgaggcgcaagcccgtgtccaagtgctggaaaagctcaagttcacaccaccaccccagccacagcagtgcatggagtttgacaaggaggccacggtgccctgttcagccacaggccgagagaagcccactattaagtgggaacgggcagatgggagcagcctcccagagtgggtgacagacaacgctgggaccctgcattttgcccgggtgactcgagatgacgctggcaactacacttgcattgcctccaacgggccgcagggccagattcgtgcccatgtccagctcactgtggcagtttttatcaccttcaaagtggaaccagagcgtacgactgtgtaccagggccacacagccctactgcagtgcgaggcccagggggaccccaagccgctgattcagtggaaaggcaaggaccgcatcctggaccccaccaagctgggacccaggatgcacatcttccagaatggctccctggtgatccatgacgtggcccctgaggactcaggccgctacacctgcattgcaggcaacagctgcaacatcaagcacacggaggcccccctctatgtcgtgggtatgggctggggagggttatgctgcacaggaagtggtgggcccagacgtttgtcaccttgtactcagcccctgtgtacagaacatggcacagaagccatttttgtggcagcggtggggattcggccgtctcaccatgctgctgcacagtcttagagtccttgctcagagccgggctgtcgtttatttaacatccaacggtcggtgtgtgtgtgtgtgtgttgtgggggagtgggggggtgttctcttcctacaatgctgcctcccaggttcctgcagcagccacacatatctctgggtggctggggaggaggaccaggtcagaatgcagtaggacaaggttcttttctccaggaggcccagagaggatgatgggtcaggtaaaaggccctgcacttaactctctgcccctgggagacttatttctcctctggggacttgtttctgcatccacaggtgaaagtggtttaaatgagaagctcttaaactttcttggtttggcagcagagttatttttctagacaaagtataatgtgaaagtttaaatggatgaaaatgaactgaggaggcccccttggtgggagccactggggtgtgtgtggcagttgggggatcctgcatggtctcccttcattcccctaatgcctcttgaggcccctcagtgtgggccattaaaaggcccctagaccagcagatcccttctacagatctgcttattgaaaaacctgctctgtgccaggcagtgcctggaattctaaacctgaagctcccaaatgctgctctccggggcctggctcacattatcaagtcacttgggaagcttaacaaataacgtgggtttgtggtagctccttgacaggtgtgcttatccgtgtcgcctgtcttggcttccgatgcaaagccagcttgggaacccctggcctcatctccttcagagtcttcgtttgaccttggtggggcatgaggacctgctggcccttgttaaagccagtgaaggtggtgaccctcccgggccatctgttaagttgccctgttgatggggttgggaggagttagtagagaagcagggcttcttttgcttagcagcccctgcccagacccatctgtgtgtctctcagacaagcctgtgccggaggagtcggagggccctggcagccctcccccctacaagatgatccagaccattgggttgtcggtgggtgccgctgtggcctacatcattgccgtgctgggcctcatgttctactgcaagaagcgctgcaaagccaagcggctgcagaagcagcccgagggcgaggagccagagatggaatgcctcaacggtgggcctttgcagaacgggcagccctcagcagagatccaagaagaagtggccttgaccagcttgggctccggccccgcggccaccaacaaacgccacagcacaagtgataagatgcacttcccacggtctagcctgcagcccatcaccacgctggggaagagtgagtttggggaggtgttcctggcaaaggctcagggcttggaggagggagtggcagagaccctggtacttgtgaagagcctgcagagcaaggatgagcagcagcagctggacttccggagggagttggagatgtttgggaagctgaaccacgccaacgtggtgcggctcctggggctgtgccgggaggctgagccccactacatggtgctggaatatgtggatctgggagacctcaagcagttcctgaggatttccaagagcaaggatgaaaaattgaagtcacagcccctcagcaccaagcagaaggtggccctatgcacccaggtagccctgggcatggagcacctgtccaacaaccgctttgtgcataaggacttggctgcgcgtaactgcctggtcagtgcccagagacaagtgaaggtgtctgccctgggcctcagcaaggatgtgtacaacagtgagtactaccacttccgccaggcctgggtgccgctgcgctggatgtcccccgaggccatcctggagggtgacttctctaccaagtctgatgtctgggccttcggtgtgctgatgtgggaagtgtttacacatggagagatgccccatggtgggcaggcagatgatgaagtactggcagatttgcaggctgggaaggctagacttcctcagcccgagggctgcccttccaaactctatcggctgatgcagcgctgctgggccctcagccccaaggaccggccctccttcagtgagattgccagcgccctgggagacagcaccgtggacagcaagccgtgaggagggagcccgctcaggatggcctgggcaggggaggacatctctagagggaagctcacagcatgatgggcaagatccctgtcctcctgggccctgaggcccctgccctagtgcaacaggcattgctgaggtctgagcagggcctggcctttcctcctcttcctcaccctcatcctttgggaggctgacttggacccaaactgggcgactagggctttgagctgggcagttttccctgccacctcttcctctatcagggacagtgtgggtgccacaggtaaccccaatttctggccttcaacttctccccttgaccgggtccaactctgccactcatctgccaactttgcctggggagggctaggcttgggatgagctgggtttgtggggagttccttaatattctcaagttctgggcacacagggttaatgagtctcttggcccactggtcccacttgggggtctagaccaggattatagaggacacagcaagtgagtcctccccactctgggcttgtgcacactgacccagacccacgtcttccccacccttctctcctttcctcatcctaagtgcctggcagatgaaggagttttcaggagcttttgacactatataaaccgccctttttgtatgcaccacgggcggcttttatatgtaattgcagcgtggggtgggtgggcatgggaggtaggggtgggccctggagatgaggagggtgggccatccttaccccacacttttattgttgtcgttttttgtttgttttgtttttttgtttttgtttttgtttttacactcgctgctctcaataaataagccttttttac

SEQ ID NO: 16831 - DNA, 3436 bp, Homo sapiens
  source 1..3436: mol_type = unassigned DNA
cctgagtttttctggtctgagccgagagtttgctcgagaactgccgagagttgctggctctcgggcccagatggggagtttcttgtcgggggagaaaagaccatccgcacccaccgtggggagcgcgatggagaaaaaggaattccccaccccacccggcagggtcggcccaggtacccagacagccattgtcttcatcaagcagccgtcctcccaggatgcactgcaggggcgccgggcgctgcttcgctgtgaggttgaggctccgggcccggtacatgtgtactggctgctcgatggggcccctgtccaggacacggagcggcgtttcgcccagggcagcagcctgagctttgcagctgtggaccggctgcaggactctggcaccttccagtgtgtggctcgggatgatgtcactggagaagaagcccgcagtgccaacgcctccttcaacatcaaatggattgaggcaggtcctgtggtcctgaagcatccagcctcggaagctgagatccagccacagacccaggtcacacttcgttgccacattgatgggcaccctcggcccacctaccaatggttccgagatgggacccccctttctgatggtcagagcaaccacacagtcagcagcaaggagcggaacctgacgctccggccagctggtcctgagcatagtgggctgtattcctgctgcgcccacagtgcttttggccaggcttgcagcagccagaacttcaccttgagcattgctgatgaaagctttgccagggtggtgctggcaccccaggacgtggtagtagcgaggtatgaggaggccatgttccattgccagttctcagcccagccacccccgagcctgcagtggctctttgaggatgagactcccatcactaaccgcagtcgccccccacacctccgcagagccacagtgtttgccaacgggtctctgctgctgacccaggtccggccacgcaatgcagggatctaccgctgcattggccaggggcagaggggcccacccatcatcctggaagccacacttcacctagcagagattgaagacatgccgctatttgagccacgggtgtttacagctggcagcgaggagcgtgtgacctgccttccccccaagggtctgccagagcccagcgtgtggtgggagcacgcgggagtccggctgcccacccatggcagggtctaccagaagggccacgagctggtgttggccaatattgctgaaagtgatgctggtgtctacacctgccacgcggccaacctggctggtcagcggagacaggatgtcaacatcactgtggccactgtgccctcctggctgaagaagccccaagacagccagctggaggagggcaaacccggctacttggattgcctgacccaggccacaccaaaacctacagttgtctggtacagaaaccagatgctcatctcagaggactcacggttcgaggtcttcaagaatgggaccttgcgcatcaacagcgtggaggtgtatgatgggacatggtaccgttgtatgagcagcaccccagccggcagcatcgaggcgcaagcccgtgtccaagtgctggaaaagctcaagttcacaccaccaccccagccacagcagtgcatggagtttgacaaggaggccacggtgccctgttcagccacaggccgagagaagcccactattaagtgggaacgggcagatgggagcagcctcccagagtgggtgacagacaacgctgggaccctgcattttgcccgggtgactcgagatgacgctggcaactacacttgcattgcctccaacgggccgcagggccagattcgtgcccatgtccagctcactgtggcagtttttatcaccttcaaagtggaaccagagcgtacgactgtgtaccagggccacacagccctactgcagtgcgaggcccagggggaccccaagccgctgattcagtggaaaggcaaggaccgcatcctggaccccaccaagctgggacccaggatgcacatcttccagaatggctccctggtgatccatgacgtggcccctgaggactcaggccgctacacctgcattgcaggcaacagctgcaacatcaagcacacggaggcccccctctatgtcgtggacaagcctgtgccggaggagtcggagggccctggcagccctcccccctacaagatgatccagaccattgggttgtcggtgggtgccgctgtggcctacatcattgccgtgctgggcctcatgttctactgcaagaagcgctgcaaagccaagcggctgcagaagcagcccgagggcgaggagccagagatggaatgcctcaacggtgggcctttgcagaacgggcagccctcagcagagatccaagaagaagtggccttgaccagcttgggctccggccccgcggccaccaacaaacgccacagcacaagtgataagatgcacttcccacggtctagcctgcagcccatcaccacgctggggaagagtgagtttggggaggtgttcctggcaaaggctcagggcttggaggagggagtggcagagaccctggtacttgtgaagagcctgcagagcaaggatgagcagcagcagctggacttccggagggagttggagatgtttgggaagctgaaccacgccaacgtggtgcggctcctggggctgtgccgggaggctgagccccactacatggtgctggaatatgtggatctgggagacctcaagcagttcctgaggatttccaagagcaaggatgaaaaattgaagtcacagcccctcagcaccaagcagaaggtggccctatgcacccaggtagccctgggcatggagcacctgtccaacaaccgctttgtgcataaggacttggctgcgcgtaactgcctggtcagtgcccagagacaagtgaaggtgtctgccctgggcctcagcaaggatgtgtacaacagtgagtactaccacttccgccaggcctgggtgccgctgcgctggatgtcccccgaggccatcctggagggtgacttctctaccaagtctgatgtctgggccttcggtgtgctgatgtgggaagtgtttacacatggagagatgccccatggtgggcaggcagatgatgaagtactggcagatttgcaggctgggaaggctagacttcctcagcccgagggctgcccttccaaactctatcggctgatgcagcgctgctgggccctcagccccaaggaccggccctccttcagtgagattgccagcgccctgggagacagcaccgtggacagcaagccgtgaggagggagcccgctcaggatggcctgggcaggggaggacatctctagagggaagctcacagcatgatgggcaagatccctgtcctcctgggccctgaggcccctgccctagtgcaacaggcattgctga

SEQ ID NO: 16832 - DNA, 807 bp, Homo sapiens
  source 1..807: mol_type = unassigned DNA
ttctcagcccagccacccccgagcctgcagtggctctttgaggatgagactcccatcactaaccgcagtcgccccccacacctccgcagagccacagtgtttgccaacgggtctctgctgctgacccaggtccggccacgcaatgcagggatctaccgctgcattggccaggggcagaggggcccacccatcatcctggaagccacacttcacctagcagagattgaagacatgccgctatttgagccacgggtgtttacagctggcagcgaggagcgtgtgacctgccttccccccaagggtctgccagagcccagcgtgtggtgggagcacgcgggagtccggctgcccacccatggcagggtctaccagaagggccacgagctggtgttggccaatattgctgaaagtgatgctggtgtctacacctgccacgcggccaacctggctggtcagcggagacaggatgtcaacatcactgtggccagtgagcacctttgccctgaaggtcaaggagaggtggaggggaacacaggtctgggtgtgatggacagaggcttccctgctgtgccctcctggctgaagaagccccaagacagccagctggaggagggcaaacccggctacttggattgcctgacccaggccacaccaaaacctacagttgtctggtacagaaaccagatgctcatctcagaggactcacggttcgaggtcttcaagaatgggaccttgcgcatcaacagcgtggaggtgtatgatgggacatggtaccgttgtatgagcagcaccccagccggcagcatc

SEQ ID NO: 16833 - DNA, 582 bp, Homo sapiens
  source 1..582: mol_type = unassigned DNA
aagatgagatttgagtggggacacagccaaaccatatcactctctctcgcacctgcattgccatttgcctcattgcttcccgagctgatctcctgtagttggaacacacacctgcacgtgcacctgagcaagtgtatgcaggcacacacaccagtctggagtgtcagcttccttctctctgccctgttcctggtcgattccttactacatttccgactttgcaggaaaggggttcccttgcattcctttccagaactaggcctattggccactttctccaaattgcactctcccctctgcagccccccacacctccgcagagccacagtgtttgccaacgggtctctgctgctgacccaggtccggccacgcaatgcagggatctaccgctgcattggccaggggcagaggggcccacccatcatcctggaagccacacttcacctagcagagattgaagacatgccgctatttgagccacgggtgtttacagctggcagcgaggagcgtgtgacctgccttccccccaagggtctgccagagcccagcgtgtggtgggagcacgcgggagtccggctgccc

SEQ ID NO: 16834 - DNA, 1935 bp, Homo sapiens
  source 1..1935: mol_type = unassigned DNA
gggagcacgcgggagtccggctgcccacccatggcagggtctaccagaagggccacgagctggtgttggccaatattgctgaaagtgatgctggtgtctacacctgccacgcggccaacctggctggtcagcggagacaggatgtcaacatcactgtggccactgtgccctcctggctgaagaagccccaagacagccagctggaggagggcaaacccggctacttggattgcctgacccaggccacaccaaaacctacagttgtctggtacagaaaccagatgctcatctcagaggactcacggttcgaggtgttcctggcaaaggctcagggcttggaggagggagtggcagagaccctggtacttgtgaagagcctgcagagcaaggatgagcagcagcagctggacttccggagggagttggagatgtttgggaagctgaaccacgccaacgtggtgcggctcctggggctgtgccgggaggctgagccccactacatggtgctggaatatgtggatctgggagacctcaagcagttcctgaggatttccaagagcaaggatgaaaaattgaagtcacagcccctcagcaccaagcagaaggtggccctatgcacccaggtagccctgggcatggagcacctgtccaacaaccgctttgtgcataaggacttggctgcgcgtaactgcctggtcagtgcccagagacaagtgaaggtgtctgccctgggcctcagcaaggatgtgtacaacagtgagtactaccacttccgccaggcctgggtgccgctgcgctggatgtcccccgaggccatcctggagggtgacttctctaccaagtctgatgtctgggccttcggtgtgctgatgtgggaagtgtttacacatggagagatgccccatggtgggcaggcagatgatgaagtactggcagatttgcaggctgggaaggctagacttcctcagcccgagggctgcccttccaaactctatcggctgatgcagcgctgctgggccctcagccccaaggaccggccctccttcagtgagattgccagcgccctgggagacagcaccgtggacagcaagccgtgaggagggagcccgctcaggatggcctgggcaggggaggacatctctagagggaagctcacagcatgatgggcaagatccctgtcctcctgggccctgaggcccctgccctagtgcaacaggcattgctgaggtctgagcagggcctggcctttcctcctcttcctcaccctcatcctttgggaggctgacttggacccaaactgggcgactagggctttgagctgggcagttttccctgccacctcttcctctatcagggacagtgtgggtgccacaggtaaccccaatttctggccttcaacttctccccttgaccgggtccaactctgccactcatctgccaactttgcctggggagggctaggcttgggatgagctgggtttgtggggagttccttaatattctcaagttctgggcacacagggttaatgagtctcttggcccactggtcccacttgggggtctagaccaggattatagaggacacagcaagtgagtcctccccactctgggcttgtgcacactgacccagacccacgtcttccccacccttctctcctttcctcatcctaagtgcctggcagatgaaggagttttcaggagcttttgacactatataaaccgccctttttgtatgcaccacgggcggcttttatatgtaattgcagcgtggggtgggtgggcatgggaggtaggggtgggccctggagatgaggagggtgggccatccttaccccacacttttattgttgtcgttttttgtttgttttgtttttttgtttttgtttttgtttttacactcgctgctctcaataaataagccttttttacaacctg

SEQ ID NO: 16835 - DNA, 854 bp, Homo sapiens
  source 1..854: mol_type = unassigned DNA
tgggaggctgaggtgggaaaaatcacttgagcctatgagttcgagactgtagtgagccataattgtgtcactctactccagcctgggtgacagagtgagaacctgtcttaaaagaaaaaaaattttaaaaaaggtgctggcacctgggtcttccgtaaagggaaactcctgccatctgaggagcatggggcttctgaactcagggcctagaatggtagtaggatttcttggagatggatcctttagttttggagacctgtgaagcagccttcactgtttccttcctgtctgtctagctgtgccctcctggctgaagaagccccaagacagccagctggaggagggcaaacccggctacttggattgcctgacccaggccacaccaaaacctacagttgtctggtacagaaaccagatgctcatctcagaggactcacggttcgaggtcttcaagaatgggaccttgcgcatcaacagcgtggaggtgtatgatgggacatggtaccgttgtatgagcagcaccccagccggcagcatcgaggcgcaagcccgtgtccaagtgctggaaaagctcaagttcacaccaccaccccagccacagcagtgcatggagtttgacaaggaggccacggtgccctgttcagccacaggccgagagaagcccactattaagtgggaacgggcagatgggagcagcctcccagagtgggtgacagacaacgctgggaccctgcattttgcccgggtgactcgagatgacgctggcaactacacttgcattgcctccaacgggccgcagggccagattcgtgcccatgtccagctcactgtggcagtttttatcaccttcaaag

SEQ ID NO: 16836 - DNA, 2987 bp, Homo sapiens
  source 1..2987: mol_type = unassigned DNA
gtttgtcaccttgtactcagcccctgtgtacagaacatggcacagaagccatttttgtggcagcggtggggattcggccgtctcaccatgctgctgcacagtcttagagtccttgctcagagccgggctgtcgtttatttaacatccaacggtcggtgtgtgtgtgtgtgtgttgtgggggagtgggggggtgttctcttcctacaatgctgcctcccaggttcctgcagcagccacacatatctctgggtggctggggaggaggaccaggtcagaatgcagtaggacaaggttcttttctccaggaggcccagagaggatgatgggtcaggtaaaaggccctgcacttaactctctgcccctgggagacttatttctcctctggggacttgtttctgcatccacaggtgaaagtggtttaaatgagaagctcttaaactttcttggtttggcagcagagttatttttctagacaaagtataatgtgaaagtttaaatggatgaaaatgaactgaggaggcccccttggtgggagccactggggtgtgtgtggcagttgggggatcctgcatggtctcccttcattcccctaatgcctcttgaggcccctcagtgtgggccattaaaaggcccctagaccagcagatcccttctacagatctgcttattgaaaaacctgctctgtgccaggcagtgcctggaattctaaacctgaagctcccaaatgctgctctccggggcctggctcacattatcaagtcacttgggaagcttaacaaataacgtgggtttgtggtagctccttgacaggtgtgcttatccgtgtcgcctgtcttggcttccgatgcaaagccagcttgggaacccctggcctcatctccttcagagtcttcgtttgaccttggtggggcatgaggacctgctggcccttgttaaagccagtgaaggtggtgaccctcccgggccatctgttaagttgccctgttgatggggttgggaggagttagtagagaagcagggcttcttttgcttagcagcccctgcccagacccatctgtgtgtctctcagacaagcctgtgccggaggagtcggagggccctggcagccctcccccctacaagatgatccagaccattgggttgtcggtgggtgccgctgtggcctacatcattgccgtgctgggcctcatgttctactgcaagaagcgctgcaaagccaagcggctgcagaagcagcccgagggcgaggagccagagatggaatgcctcaacggtgggcctttgcagaacgggcagccctcagcagagatccaagaagaagtggccttgaccagcttgggctccggccccgcggccaccaacaaacgccacagcacaagtgataagatgcacttcccacggtctagcctgcagcccatcaccacgctgggtatgttgccttgactacagctgcccctgcctaactacaagtcacccgctgtgtcttgaggctgggtacgggctagtgttctgaagtccctgaaacctagaatgttagaggtggagggaagcataggtagagatctagcccagtgtggccccagagcctgttattcactgcccttcgtgcagattttgtcattcctgtgtactacctgtagtattatttacttgatgttttatttaaattgactctttaaaaaaaaaaactaagttaccattgttctaggaaaaaatatgagaaatcatgggtttgtcatagttacgttttttcctagcatacgttaagacatgtttaccatgagccaccaaaaattctcatgcgagtcaccctttggaaaatgctgaatattagtcccacccttttattttgttgctgcagacactgaagcctaaggagggagggggtcacagcagaaccgggtctcgtgcccagcccaggtgggtgggtccccactgtgggagaggctaggcccctcccccaggtcaggagctgcctcggcctgggtgaaggtggctggctgactcagactgtacccacagggaagagtgagtttggggaggtgttcctggcaaaggctcagggcttggaggagggagtggcagagaccctggtacttgtgaagagcctgcagagcaaggatgagcagcagcagctggacttccggagggagttggagatgtttgggaagctgaaccacgccaacgtggtgcggctcctggggctgtgccgggaggctgagccccactacatggtgctggaatatgtggatctggtatgctgttggcaggggacgtgggggtctcgggtagggagggcagtgtcctacaaaggtgggagtcagtggttggagcaccgtgaaaaccttgtctcgtgcagtctcagccgagacctcacctgcctgctgttacactttgcccaccttatgatgctcagcttctgccttccctgctcttggatgcctgctttccctttatcagcacccagtctttccatctgtatctcaggggcgttggtcctaagtttttctgggacttctcactgtcacactgcagggatgccttccaggtcatcttctctgactcttgttttctttggtttgttattttttcctccccaaaagcttgtccccacttgagaataaatatatcagaacccactttgcctccctccttcctagcaccacttgtgacatgagtgttaccccagccaccagccttctcctctccactcagggtgtcattcccagagctgcgccttcctcttcattccccagctggtccttgccctcaccccatggtcctcaaactgctgcttctcaaatccctagttctggggcaagagcgggcaggagtcctatcagtctttccattaacaagtacttacgcggctgggcacagtggctcacacttgtaatcccagcactttgggagactgaggcaggaggatcgcctgaggccaggagtccgagaccagcctgggcaacatagcaagactctgtctctac

SEQ ID NO: 16837 - DNA, 546 bp, Homo sapiens
  source 1..546: mol_type = unassigned DNA
acagaacatggcacagaagccatttttgtggcagcggtggggattcggccgtctcaccatgctgctgcacagtcttagagtccttgctcagagccgggctgtcgtttatttaacatccaacggtcgacaagcctgtgccggaggagtcggagggccctggcagccctcccccctacaagatgatccagaccattgggttgtcggtgggtgccgctgtggcctacatcattgccgtgctgggcctcatgttctactgcaagaagcgctgcaaagccaagcggctgcagaagcagcccgagggcgaggagccagagatggaatgcctcaacggtgggcctttgcagaacgggcagccctcagcagagatccaagaagaagtggccttgaccagcttgggctccggccccgcggccaccaacaaacgccacagcacaagtgataagatgcacttcccacggtctagcctgcagcccatcaccacgctggggaagagtgagtttggggaggtgttcctggcaaaggctcagggcttggaggagggagtgg

SEQ ID NO: 16838 - DNA, 576 bp, Homo sapiens
  source 1..576: mol_type = unassigned DNA
acagaacatggcacagaagccatttttgtggcagcggtggggattcggccgtctcaccatgctgctgcacagtcttagagtccttgctcagagccgggctgtcgtttatttaacatccaacgcccctgcccagacccatctgtgtgtctctcagacaagcctgtgccggaggagtcggagggccctggcagccctcccccctacaagatgatccagaccattgggttgtcggtgggtgccgctgtggcctacatcattgccgtgctgggcctcatgttctactgcaagaagcgctgcaaagccaagcggctgcagaagcagcccgagggcgaggagccagagatggaatgcctcaacggtgggcctttgcagaacgggcagccctcagcagagatccaagaagaagtggccttgaccagcttgggctccggccccgcggccaccaacaaacgccacagcacaagtgataagatgcacttcccacggtctagcctgcagcccatcaccacgctggggaagagtgagtttggggaggtgttcctggcaaaggctcagggcttggaggagggagtggca

SEQ ID NO: 16839 - DNA, 713 bp, Homo sapiens
  source 1..713: mol_type = unassigned DNA
agaacatggcacagaagccatttttgtggcagcggtggggattcggccgtctcaccatgctgctgcacagtcttagagtccttgctcagagccgggctgtcgtttatttaacatccaacgacaagcctgtgccggaggagtcggagggccctggcagccctcccccctacaagatgatccagaccattgggttgtcggtgggtgccgctgtggcctacatcattgccgtgctgggcctcatgttctactgcaagaagcgctgcaaagccaagcggctgcagaagcagcccgagggcgaggagccagagatggaatgcctcaacggtgggcctttgcagaacgggcagccctcagcagagatccaagaagaagtggccttgaccagcttgggctccggccccgcggccaccaacaaacgccacagcacaagtgataagatgcacttcccacggtctagcctgcagcccatcaccacgctggggaagagtgagtttggggaggtgttcctggcaaaggctcagggcttggaggagggagtggcagagaccctggtacttgtgaagagcctgcagagcaaggatgagcagcagcagctggacttccggagggagttggagatgtttgggaagctgaaccacgccaacgtggtgcggctcctggggctgtgccgggaggctgagccccactacatggtgctggaatatgtggatctg

SEQ ID NO: 16840 - DNA, 870 bp, Homo sapiens
  source 1..870: mol_type = unassigned DNA
attatttcatcatttgggcttgccctttcatgtggagcactgtgattggacccaagttggcaagagtggaagaccaggggacagaacagaaatccccatggtggccagagtgtcaggtctcatcgtgacgctcttgtcctcctccttcccaggtgggcctttgcagaacgggcagccctcagcagagatccaagaagaagtggccttgaccagcttgggctccggccccgcggccaccaacaaacgccacagcacaagtgataagatgcacttcccacggtctagcctgcagcccatcaccacgctggggaagagtgagtttggggaggtgttcctggcaaaggctcagggcttggaggagggagtggcagagaccctggtacttgtgaagagcctgcagagcaaggatgagcagcagcagctggacttccggagggagttggagatgtttgggaagctgaaccacgccaacgtggtgcggctcctggggctgtgccgggaggctgagccccactacatggtgctggaatatgtggatctgggagacctcaagcagttcctgaggatttccaagagcaaggatgaaaaattgaagtcacagcccctcagcaccaagcagaaggtggccctatgcacccaggtagccctgggcatggagcacctgtccaacaaccgctttgtgcataaggacttggctgcgcgtaactgcctggtcagtgcccagagacaagtgaaggtgtctgccctgggcctcagcaaggatgtgtacaacagtgagtactaccacttccgccaggcctgggtgccgctgcgctggatgtcccccgaggccatcctggagggtgacttctctaccaagtctgatgtctg

SEQ ID NO: 16841 - DNA, 1035 bp, Homo sapiens
  source 1..1035: mol_type = unassigned DNA
ttatttcatcatttgggcttgccctttcatgtggagcactgtgattggacccaagttggcaagagtggaagaccaggggacagaacagaaatccccatggtggccagagtgtcaggtctcatcgtgacgctcttgtcctcctccttcccaggtgggcctttgcagaacgggcagccctcagcagagatccaagaagaagtggccttgaccagcttgggctccggccccgcggccaccaacaaacgccacagcacaagtgataagatgcacttcccacggtctagcctgcagcccatcaccacgctggggagacctcaagcagttcctgaggatttccaagagcaaggatgaaaaattgaagtcacagcccctcagcaccaagcagaaggtggccctatgcacccaggtagccctgggcatggagcacctgtccaacaaccgctttgtgcataaggacttggctgcgcgtaactgcctggtcagtgcccagagacaagtgaaggtgtctgccctgggcctcagcaaggatgtgtacaacagtgagtactaccacttccgccaggcctgggtgccgctgcgctggatgtcccccgaggccatcctggagggtgacttctctaccaagtctgatgtctgggccttcggtgtgctgatgtgggaagtgtttacacatggagagatgccccatggtgggcaggcagatgatgaagtactggcagatttgcaggctgggaaggctagacttcctcagcccgagggctgcccttccaaactctatcggctgatgcagcgctgctgggccctcagccccaaggaccggccctccttcagtgagattgccagcgccctgggagacagcaccgtggacagcaagccgtgaggagggagcccgctcaggatggcctgggcaggggaggacatctctagagggaagctcacagcatgatgggcaagatccctgtcctcctgggccctgaggcccctgccctagtgcaacaggcattgctgaggtctgagcagggcctggcctttcct

SEQ ID NO: 16842 - DNA, 820 bp, Homo sapiens
  source 1..820: mol_type = unassigned DNA
ggagaagaggtgagagaagaatgggagcgattcgagttataattggttgtgaaggaggggtctaggtacagatgactgaggacggatgaagagaaatagaaggaccaggcgaataaaagtgaggacctgaaggagaagaaggagaaggtggaggagaaggcaagccggaaagagcgaaagaaagaagtggtggaggaggaggagaacggggctgaggaggaagaagaagaaactgccgaggatggagaggaggaagatgaaggggaagaagaagatgaggaagaagaagaagaggatgatgaagggcccgcgctgaagagagctgccgaagaggaggatgaagcggatcccaaacggcagaagacagaaaatggggcatcggcgtgagcccctgccaacaggctggggttgggaggcctctctgggcctggaggtgggggtgggggcagccaagtccagccactcttcacctggctccctgctctgggccctgcaccagagctgccaccctcttctttctccccagccttctcatttccgcctctccagacactgcgccctccaccctcactctgccattgttccacctcctgacctgctccatctgagctctccagctggcccccaattgctcctctctctctttgctctctttctccctcccctaccagcctcattcttcctccggtagcctctcccacctaacctctgcatcccccagcctcatgtcctgccccatccctatcctgcctgatccctggatctccctcagatcccctcttctcagacagcgccaggccggggtggggccggggttggg

SEQ ID NO: 16843 - DNA, 773 bp, Homo sapiens
  source 1..773: mol_type = unassigned DNA
gcggcagctctgctggtgcgggggcggcgagcccgggatcgagctaccgcggccgagcgcgccggccaccgcctgcaccgcccttccgcccgccctccggacggccgcagccctgcgggtctccgctccagacccacccccgccccaccccgcgcgcctctgccgcctcttccagagacccagcttgccgagcggccgccgctgccgctgtcgccgccgccgccgccaccgcgccaggttccggccgcggccaccctccgccgtccagggcccctccgtctcggccccgggaccccggctccccgccagccccggccccggccccggcaccatgtcggagaaaagcgtggaggcagcggccgagttgagcgccaaggacctgaaggagaagaaggagaaggtggaggagaaggcaagccggaaagagcgaaagaaagaagtggtggaggctccagtcccattggtggtgatggtgggcaaggcatgcagccagcctgaggctactccctctcctggtccccacaggaggaggagaacggggctgaggaggaagaagaagaaactgccgaggatggagaggaggaagatgaaggggaagaagaagatgaggaagaagaagaagaggatgatgaagggcccgcgctgaagagagctgccgaagaggaggatgaagcggatcccaaacggcagaagacagaaaatggggcatcggcgtgagcccctgccaacaggctggggttgggaggcctctctgggcctggaggtgggggtgg

SEQ ID NO: 16844 - DNA, 501 bp, Homo sapiens
  source 1..501: mol_type = unassigned DNA
cggcagctctgctggtgcgggggcggcgagcccgggatcgagctaccgcggccgagcgcgccggccaccgcctgcaccgcccttccgcccgccctccggacggccgcagccctgcgggtctccgctccagacccacccccgccccaccccgcgcgcctctgccgcctcttccagagacccagcttgccgagcggccgccgctgccgctgtcgccgccgccgccgccaccgcgccaggttccggccgcggccaccctccgccgtccagggcccctccgtctcggccccgggaccccggctccccgccagccccggccccggccccggcaccatgtcggagaaaagcgtggaggcagcggccgagttgagcgccaaggacctgaaggagaagaaggagaaggtggaggagaaggcaagccggaaagagcgaaagaaagaagtggtggaggctccagtcccattggtggtgatggtgggcaaggcatgcagccagcctgaggct

SEQ ID NO: 16845 - DNA, 1139 bp, Homo sapiens
  source 1..1139: mol_type = unassigned DNA
ggcagctctgctggtgcgggggcggcgagcccgggatcgagctaccgcggccgagcgcgccggccaccgcctgcaccgcccttccgcccgccctccggacggccgcagccctgcgggtctccgctccagacccacccccgccccaccccgcgcgcctctgccgcctcttccagagacccagcttgccgagcggccgccgctgccgctgtcgccgccgccgccgccaccgcgccaggttccggccgcggccaccctccgccgtccagggcccctccgtctcggccccgggaccccggctccccgccagccccggccccggccccggcaccatgtcggagaaaagcgtggaggcagcggccgagttgagcgccaaggacctgaaggagaagaaggagaaggtggaggagaaggcaagccggaaagagcgaaagaaagaagtggtggaggaggaggagaacggggctgaggaggaagaagaagaaactgccgaggatggagaggaggaagatgaaggggaagaagaagatgaggaagaagaagaagaggatgatgaagggcccgcgctgaagagagctgccgaagaggaggatgaagcggatcccaaacggcagaagacagaaaatggggcatcggcgtgagcccctgccaacaggctggggttgggaggcctctctgggcctggaggtgggggtgggggcagccaagtccagccactcttcacctggctccctgctctgggccctgcaccagagctgccaccctcttctttctccccagccttctcatttccgcctctccagacactgcgccctccaccctcactctgccattgttccacctcctgacctgctccatctgagctctccagctggcccccaattgctcctctctctctttgctctctttctccctcccctaccagcctcattcttcctccggtagcctctcccacctaacctctgcatcccccagcctcatgtcctgccccatccctatcctgcctgatccctggatctccctcagatcccctcttctcagacagcgccaggccggggtggggccggggttggggccgagccccacagctgcccccctcccctccctttttgtataatttaataaagaaatggtcgcgcttc

SEQ ID NO: 16846 - DNA, 644 bp, Homo sapiens
  source 1..644: mol_type = unassigned DNA
cggccgagttgagcgccaaggacctgaaggagaagaaggagaaggtggaggagaaggcaagccggaaagagcgaaagaaagaagtggtggaggaggaggagaacggggctgaggaggaagaagaagaaactgccgaggatggagaggaggaagatgaaggggaagaagaagatgaggaagaagaagaagaggatgatgaagggcccgcgctgaagagagctgccgaagaggaggatgaagcggatcccaaacggcagaagacagaaaatggggcatcggcgtgagcccctgccaacaggctggggttgggaggcctctctgggcctggaggtgggggtgggggcagccaagtccagccactcttcacctggctccctgctctgggccctgcaccagagctgccaccctcttctttctccccagccttctcatttccgcctctccagacactgcgccctccaccctcactctgccattgttccacctcctgacctgctccatctgagctctccagctggcccccaattgctcctctctctctttgctctctttctccctcccctaccagcctcattcttcctccggtagcctctcccacctaacctctgcatcccccagcctcatgtcctgccccatccctatcc

SEQ ID NO: 16847 - DNA, 976 bp, Homo sapiens
  source 1..976: mol_type = unassigned DNA
gtttggccaagtaggggcctgaggattagggagacacagatggagagaaacaaagaccttagaagctgaaggggaagctgggagggatgcccaggagagagagtcctcaggaaaaggccccagaggacctgaaggagaagaaggagaaggtggaggagaaggcaagccggaaagagcgaaagaaagaagtggtggaggctccagtcccattggtggtgatggtgggcaaggcatgcagccagcctgaggctactccctctcctggtccccacaggaggaggagaacggggctgaggaggaagaagaagaaactgccgaggatggagaggaggaagatgaaggggaagaagaagatgaggaagaagaagaagaggatgatgaagggcccgcgctgaagagagctgccgaagaggaggatgaagcggatcccaaacggcagaagacagaaaatggggcatcggcgtgagcccctgccaacaggctggggttgggaggcctctctgggcctggaggtgggggtgggggcagccaagtccagccactcttcacctggctccctgctctgggccctgcaccagagctgccaccctcttctttctccccagccttctcatttccgcctctccagacactgcgccctccaccctcactctgccattgttccacctcctgacctgctccatctgagctctccagctggcccccaattgctcctctctctctttgctctctttctccctcccctaccagcctcattcttcctccggtagcctctcccacctaacctctgcatcccccagcctcatgtcctgccccatccctatcctgcctgatccctggatctccctcagatcccctcttctcagacagcgccaggccggggtggggccggggttggggccgagccccacagctgcccccctcccctccctttttgtataatttaataaagaaatggtcgcgcttctgtttttaa

SEQ ID NO: 16848 - DNA, 1150 bp, Homo sapiens
  source 1..1150: mol_type = unassigned DNA
gcggcagctctgctggtgcgggggcggcgagcccgggatcgagctaccgcggccgagcgcgccggccaccgcctgcaccgcccttccgcccgccctccggacggccgcagccctgcgggtctccgctccagacccacccccgccccaccccgcgcgcctctgccgcctcttccagagacccagcttgccgagcggccgccgctgccgctgtcgccgccgccgccgccaccgcgccaggttccggccgcggccaccctccgccgtccagggcccctccgtctcggccccgggaccccggctccccgccagccccggccccggccccggcaccatgtcggagaaaagcgtggaggcagcggccgagttgagcgccaaggacctgaaggagaagaaggagaaggtggaggagaaggcaagccggaaagagcgaaagaaagaagtggtggaggaggaggagaacggggctgaggaggaagaagaagaaactgccgaggatggagaggaggaagatgaaggggaagaagaagatgaggaagaagaagaagaggatgatgaagggcccgcgctgaagagagctgccgaagaggaggatgaagcggatcccaaacggcagaagacagaaaatggggcatcggcgtgagcccctgccaacaggctggggttgggaggcctctctgggcctggaggtgggggtgggggcagccaagtccagccactcttcacctggctccctgctctgggccctgcaccagagctgccaccctcttctttctccccagccttctcatttccgcctctccagacactgcgccctccaccctcactctgccattgttccacctcctgacctgctccatctgagctctccagctggcccccaattgctcctctctctctttgctctctttctccctcccctaccagcctcattcttcctccggtagcctctcccacctaacctctgcatcccccagcctcatgtcctgccccatccctatcctgcctgatccctggatctccctcagatcccctcttctcagacagcgccaggccggggtggggccggggttggggccgagccccacagctgcccccctcccctccctttttgtataatttaataaagaaatggtcgcgcttctgtttttaa

SEQ ID NO: 16849 - DNA, 1614 bp, Homo sapiens
  source 1..1614: mol_type = unassigned DNA
ttgctccgcagggagagactgcccctggagtattctgcttttaataagcttcccaatcagctctcgagtgcaaagcgctctccctccctcgcccagccttcgtcctcctggcccgctcctctcatccctcccattctccatttcccttccgttccctccctgtcagggcgtaattgagtcaaaggcaggatcaggttccccgccttccagtccaaaaatcccgccaagagagccccagagcagaggaaaatccaaagtggagagaggggaagaaagagaccagtgagtcatccgtccagaaggcggggagagcagcagcggcccaagcaggagctgcagcgagccgggtacctggactcagcggtagcaacctcgccccttgcaacaaaggcagactgagcgccagagaggacgtttccaactcaaaaatgcaggctcaacagtaccagcagcagcgtcgaaaatttgcagctgccttcttggcattcattttcatactggcagctgtggatactgctgaagcagggaagaaagagaaaccagaaaaaaaagtgaagaagtctgactgtggagaatggcagtggagtgtgtgtgtgcccaccagtggagactgtgggctgggcacacgggagggcactcggactggagctgagtgcaagcaaaccatgaagacccagagatgtaagatcccctgcaactggaagaagcaatttggcgcggagtgcaaataccagttccaggcctggggagaatgtgacctgaacacagccctgaagaccagaactggaagtctgaagcgagccctgcacaatgccgaatgccagaagactgtcaccatctccaagccctgtggcaaactgaccaagcccaaacctcaagcagaatctaagaagaagaaaaaggaaggcaagaaacaggagaagatgctggattaaaagatgtcacctgtggaacataaaaaggacatcagcaaacaggatcagttaactattgcatttatatgtaccgtaggctttgtattcaaaaattatctatagctaagtacacaataagcaaaaacaaaaagaaaagaaaatttttgtagtagcgttttttaaatgtatactatagtaccagtaggggcttataataaaggactgtaatcttatttaggaagttgacttatagtacatgataaatgatagacaattgaggtaagttttttgaaattatgtgacattttacattaaattttttttacattttttgggcagcaatttaaatgttatgactatgtaaactacttctcttgttaggtaatttttttcacctagatttttttcccaattgagaaaaatatatactaaacaaaatagcaataaaacataatcactctatttgaagaaaatatcttgttttctgccaatagattttttaaaatgtagtcagcaaaatgggggtggggaagcagagcatgtcctagttcaatgttgactttttttttttttaaagaaaagcattaagacataaaattctttcactttggcagaagcatttgttttcttgatgaaattatttttccatctgaggaaaaaaatactaggaaaataaatcaaggtgatgctgaaaaaaaaa

SEQ ID NO: 16850 - DNA, 1599 bp, Homo sapiens
  source 1..1599: mol_type = unassigned DNA
cccagccttcgtcctcctggcccgctcctctcatccctcccattctccatttcccttccgttccctccctgtcagggcgtaattgagtcaaaggcaggatcaggttccccgccttccagtccaaaaatcccgccaagagagccccagagcagaggaaaatccaaagtggagagaggggaagaaagagaccagtgagtcatccgtccagaaggcggggagagcagcagcggcccaagcaggagctgcagcgagccgggtacctggactcagcggtagcaacctcgccccttgcaacaaaggcagactgagcgccagagaggacgtttccaactcaaaaatgcaggctcaacagtaccagcagcagcgtcgaaaatttgcagctgccttcttggcattcattttcatactggcagctgtggatactgctgaagcagggaagaaagagaaaccagaaaaaaaagtgaagaagtctgactgtggagaatggcagtggagtgtgtgtgtgcccaccagtggagactgtgggctgggcacacgggagggcactcggactggagctgagtgcaagcaaaccatgaagacccagagatgtaagatcccctgcaactggaagaagcaatttggcgcggagtgcaaataccagttccaggcctggggagaatgtgacctgaacacagccctgaagaccagaactggaagtctgaagcgagccctgcacaatgccgaatgccagaagactgtcaccatctccaagccctgtggcaaactgaccaagcccaaacctcaagagaagggaaaatggagacacaggagtggggagagtttgagaagatggtagagaggagtgtttgggtgaagggagatggattcgtctactgatgcaactgcagaatctaagaagaagaaaaaggaaggcaagaaacaggagaagatgctggattaaaagatgtcacctgtggaacataaaaaggacatcagcaaacaggatcagttaactattgcatttatatgtaccgtaggctttgtattcaaaaattatctatagctaagtacacaataagcaaaaacaaaaagaaaagaaaatttttgtagtagcgttttttaaatgtatactatagtaccagtaggggcttataataaaggactgtaatcttatttaggaagttgacttatagtacatgataaatgatagacaattgaggtaagttttttgaaattatgtgacattttacattaaattttttttacattttttgggcagcaatttaaatgttatgactatgtaaactacttctcttgttaggtaatttttttcacctagatttttttcccaattgagaaaaatatatactaaacaaaatagcaataaaacataatcactctatttgaagaaaatatcttgttttctgccaatagattttttaaaatgtagtcagcaaaatgggggtggggaagcagagcatgtcctagttcaatgttgactttttttttttttaaagaaaagcattaagacataaaattctttcactttggcagaagcatttgttttcttgatgaaattatttttccatctgaggaaaaaaatactaggaaaataaa

SEQ ID NO: 16851 - DNA, 532 bp, Homo sapiens
  source 1..532: mol_type = unassigned DNA
gacttgagttgccttgtctggtatccttatgcagaatgaactgaaataatcatcaatctgaaaagctactcttaaacagagacttgcttcaacaccaggaagaacatgaaagggtgactcataattcccagcagcagtgccagttcatgtgctgggattctgaccacaagcctaacaatcaggtcagggagtcagatttctgttggatttagaaaagcatctatgtgtttatgaaagaaacccactggatttttaatagttctgcagctcttggaggctctacatctaccctttctccccagccaagagcatggctatgggagaaggaaggcaggcagcaggcagggcagtgtgcccgccctctctttctggagtataaaaggagttgtgagaggcttgggtcaccatttggtgagctgagggtgaagctacaaaggttgaagcgttcttcagacgactctacctgagggtgaagctacaaaaattgaagcgttcttcagacgactctacctgaagaaagaaccctgctaca

SEQ ID NO: 16852 - DNA, 479 bp, Homo sapiens
  source 1..479: mol_type = unassigned DNA
ttgtctggtatccttatgcagaatgaactgaaataatcatcaatctgaaaagctactcttaaacagagacttgcttcaacaccaggaagaacatgaaagggtgactcataattcccagcagcagtgccagttcatgtgctgggattctgaccacaagcctaacaatcaggtcagggagtcagatttctgttggatttagaaaagcatctatgtgtttatgaaagaaacccactggatttttaatagttctgcagctcttggaggctctacatctaccctttctccccagccaagagcatggctatgggagaaggaaggcaggcagcaggcagcaattctgtggtgttcttggtcacacatttatggagtttctgaagggcagtggagattactgccaggcacagcacgacctctatgcagacaagtgaactgtagaaactgattactgctccaccaagaagcccccataagagtggtta

SEQ ID NO: 16853 - DNA, 5088 bp, Homo sapiens
  source 1..5088: mol_type = unassigned DNA
aaagatgaccgtggttaaggcagtagaaagcaggctcgacactgagacgcggttccagccctagaaggattgcattttacgattcaggcaaacttcgagtctcctcatgtgacatgtgtgcactcctggaccgttttaattatgagaaacgtggtttgcagcatgattccttccagtcgataaatcggaatctctctcgctcccaccccttcttaacttcaggcttcctgcatcccggagcactcccggcagccccttccctcccccgccccggggatgctccgactcggcgcttagccattcatcaaccggttcacaccggcggcggccgccgcggagtgacgtccggagggggcgggcctccgcccccgcctgtcggctcctggcccgcggttccaggccgcgattggtggctggagggttgcacgtcgcgccggctataaaggggagggcttgtgacgcaagggcgcctcggcgcgtgtattggctccttcggctgcgggccggctcggctacgcgctctgctccgagccgctcactgcatggtagagtctggtgcccccgccgccgcctgcatcgccgccaccgccgctccgccacgaccaccgccgcctcctgccctgcagccaccgccaccgcctgtgtcgccgccgcctcgggaccggctgtatgattaggccacaatcttcaatgagtaaacatattcctcaattctgtggtgttcttggtcacacatttatggagtttctgaagggcagtggagattactgccaggcacagcacgacctctatgcagacaagtgaactgtagaaactgattactgctccaccaagaagcccccataagagtggttatcctggacacagaagtgttgaattgaaatccacagagcattttacaagagttctgacctggatggggtaaacctcagtgcacttcttttctgttggcctcagtattactggattgaagaattgctgcttcttgttaggaggttcatttcacttatcattacttacaacttcatactcaaagcactgagaatttcaagtggagtatattgaagtagacttcagtttctttgcatcatttctgtattcaatttttttaattatttcataaccctattgagtgttttttaactaaattaacatggctcgaatgaaccgcccagctcctgtggaagtcacatacaagaacatgagatttcttattacacacaatccaaccaatgcgaccttaaacaaatttatagaggaacttaagaagtatggagttaccacaatagtaagagtatgtgaagcaacttatgacactactcttgtggagaaagaaggtatccatgttcttgattggccttttgatgatggtgcaccaccatccaaccagattgttgatgactggttaagtcttgtgaaaattaagtttcgtgaagaacctggttgttgtattgctgttcattgcgttgcaggccttgggagagctccagtacttgttgccctagcattaattgaaggtggaatgaaatacgaagatgcagtacaattcataagacaaaagcggcgtggagcttttaacagcaagcaacttctgtatttggagaagtatcgtcctaaaatgcggctgcgtttcaaagattccaacggtcatagaaacaactgttgcattcaataaaattggggtgcctaatgctactggaagtggaacttgagatagggcctaatttgttatacatattagccaacatgttggcttagtaagtctaatgaagcttccataggagtattgaaaggcagttttaccaggcctcaagctagacagatttggcaacctctgtatttgggttacagtcaacctatttggatacttggcaaaagattcttgctgtcagcatataaaatgtgcttgtcatttgtatcaattgacctttccccaaatcatgcagtattgagttatgacttgttaaatctattcccatgccagaatcttatcaatacataagaaatttaggaagattaggtgccaaaatacccagcacaatacttgtatatttttagtaccatacagaagtaaaatcccaggaactatgaacactagaccttatgtggtttattccttcaatcatttcaaacattgaaagtagggcctacatggttatttgcctgctcactttatgtttacatctcccacattcataccaatatacgtcaggtttgcttaaccattgatttttttttttttttaccaagtcttacagtgattattttacgtgtttccatgtatctcactttgtgctgtattaaaaaaacctccattttgaaaatctacgttgtacagaagcacatgtctttaatgtcttcagacaaaaaagccttacattaatttaatgtttgcactctgaggtgcaacttaacagggagggcctgagaaaagaatgggagggggctattaattatttttagcaaaatgttgcctttgtcttgtgcaaacatgtagaatatgctctttaatttagtaaaatatttttttaaaaggtagagatgctttgttattgtaatcataaacttcctgaaattcttgtaatttttttcccatacttatcagaagtgtgtttaccaacttatttttgtttgaaagtgtgattttttttttccttcccaacctctcttgcaaaaaaagaaatgggtttctgctaatgaattgagcagacatctaatattttatatgccttttgagctgtgtaacttaatatttggatacttgacaatttgttttattatgtaattgataaaatggtgatgtgtattaatgttagttcaaccatatatttatactgtctggggatgtgtggttatagttctgtgggagaaataattttgtcagtgttcaccagcttgtaaaaacttagtgcgagagctgaaacatctaaataaataatgacatgcatttatcatcattgagattggtttgcttaaaattaacttattttgtagaagacaaaatgaattgcacttcacttaatgtgtgtcctcatctttttacaaataaatgaaggattataaatgatgtcagcattttagtaaacttttagacaaaatttgttagggtcattcatgaaaactttaatactaaaagcactttccattatatactttttaaaggtctagataattttgaaccaatttattattgtgtactgaggagaaataatgtatagtagaggacagccttggtttgtaaagctcagttccactagttcatggttttgtgcaacttctgagcctcagttttctcctttgcaaattaataattacatacctttatagattttgaaattaatttaaatattagtatttggtacatgaaggcttaatgttaagtttcctttaatgatccacaataatccctttgatcacgttaatctaaatctagatgtctttgtctaattttttttgaatagcagttataaatgtaaaggactcaaagtttaagtaaaaagtgatactccaccttgtgtttcaaagaatttagttccacctcttcataccagtttaacacttaatatatttcattggattttagacagggcaaaaggaagaacaggggcctctggaggcccttggttatttaaatcttggattatttgtgatagtaatcacaaatttttggctaatttttaacctgaggttttgttttttttttaaaggaaatgcagcctagtcttgagaacataattttatataatcaattactaaatgttaaactattaccacacagcccataaaacagcatttgcgtttattgagagagaggatgtgccatcatgattaatgaaaactatcttttgagtttgaaaagaaattaatttgcagtgtttggattgtatatatggtgctaaaaataaattaatttactttataaaccttatctgtacattatacgatgtgatgaaatttgctttttatccaaatattttgtatcttgtaaatatggctaattataggaatgcctataatacatcttagattccttatatctaataagagttcaaagagttatgagttgaagtcttgaatgcaggaaactatctgatagtgttctaaaatttggttacttgggtttggatacccttagtgggatgatgtaaatagaggctagctacctaggcttgtctatagcaaccataatgttgatgtaagtaatgcggttactgaatcataagaaaatgccatctctttttagttgaaggaaaactctggaagtaggtgccattggtcattctgcagtgcactgcaaccattgtttcccctagtgccctcttttccctagggcattgctctcctattcccacgccttaacacagctctatacctagaagcagccagcccaggcatgcagtcacatttaatcacatcccccttctagagtgcttcaaaatgatgtagtccctcaacttggctaaagaatctcaatctcttgaaatttatttttttaatgtcatattcatctggtaaatatctactgtttgccaggcatttaagaatatggcaaagaacataaaagatggtgtcaccagattttggtcaccaatgagtacccgacccgttgccatgattaagagagaatgctttctattggagtttcaggaaatataatttgagaatactttaaagggaagtggaagtataagtgaatgatatttttcttttacatgtaaacaatgaagttatttcaaagttaagttttaaacaaaatacatgaagtagtgtctgccatacatgttaatattctacattcttgcttccttaaattaatatgtttgtgtgtatatatgtgcctcacacctgaattgaaaattaaagactggtttaaaagtggtttaaaagtgacatttaatgtttctccattacgtttggggtaaccagcctaagtggaatcttggaaggaaagtaagggaaaaacttgtatttgccttcaatgaattaaaccagtgatatgtgttaacgtatgaatgaaaggattgatggtgattttataattatatatattgccgcagtaaccagttaataaattgatagctaccattt

SEQ ID NO: 16854 - DNA, 135 bp, Homo sapiens
  source 1..135: mol_type = unassigned DNA
atgattaggccacaatcttcaatgagtaaacatattcctcaattctgtggtgttcttggtcacacatttatggagtttctgaagggcagtggagattactgccaggcacagcacgacctctatgcagacaagtga

SEQ ID NO: 16855 - DNA, 638 bp, Homo sapiens
  source 1..638: mol_type = unassigned DNA
actgcggagccggatacggggagggcgcggcggtggcgggttcgcctccagatccgggcgggcgtggggtaggccggacagccaggcacgggtggtaacgatctggttccagagcttctcggagctccggggtgggcgcgggacagccactgggtgcagctacactcttgtgctcgacggccgggacccgagcctcagacaaaatggcctcggcgcccgcgcctgactgaaggcgcggcgcgaacccgtgattgcggcgcggagagggggcgcagcgggcgtgctcgggcgcacacagccgcgtgcgcggggcggcggccctctggggcattccgcgagctgcacccctgcccgggccagagtggggttctgctagcaattctgtggtgttcttggtcacacatttatggagtttctgaagggcagtggagattactgccaggcacagcacgacctctatgcagacaagtgaactgtagaaactgattactgctccaccaagaagcccccataagagtggttatcctggacacagaagtgttgaattgaaatccacagagcattttacaagagttctgacctggatggggtaaacctcagtgcacttcttttctgttggcctcagtattactggattg

SEQ ID NO: 16856 - DNA, 2203 bp, Homo sapiens
  source 1..2203: mol_type = unassigned DNA
gagattactgccaggcacagcacgacctctatgcagacaagtgaactgtagaaactgattactgctccaccaagaagcccccataagagtggttatcctggacacagaagtgttgaattgaaatccacagagcattttacaagagttctgacctggatggggtaaacctcagtgcacttcttttctgttggcctcagtattactggattgaagaattgctgcttcttgttaggaggttcatttcacttatcattacttacaacttcatactcaaagcactgagaatttcaagtggagtatattgaagtagacttcagtttctttgcatcatttctgtattcaatttttttaattatttcataaccctattgagtgttttttaactaaattaacatggctcgaatgaaccgcccagctcctgtggaagtcacatacaagaacatgagatttcttattacacacaatccaaccaatgcgaccttaaacaaatttatagaggaacttaagaagtatggagttaccacaatagtaagagtatgtgaagcaacttatgacactactcttgtggagaaagaaggtatccatgttcttgattggccttttgatgatggtgcaccaccatccaaccagattgttgatgactggttaagtcttgtgaaaattaagtttcgtgaagaacctggttgttgtattgctgttcattgcgttgcaggccttgggagagctccagtacttgttgccctagcattaattgaaggtggaatgaaatacgaagatgcagtacaattcataagacaaaagcggcgtggagcttttaacagcaagcaacttctgtatttggagaagtatcgtcctaaaatgcggctgcgtttcaaagattccaacggtcatagaaacaactgttgcattcaataaaattggggtgcctaatgctactggaagtggaacttgagatagggcctaatttgttatacatattagccaacatgttggcttagtaagtctaatgaagcttccataggagtattgaaaggcagttttaccaggcctcaagctagacagatttggcaacctctgtatttgggttacagtcaacctatttggatacttggcaaaagattcttgctgtcagcatataaaatgtgcttgtcatttgtatcaattgacctttccccaaatcatgcagtattgagttatgacttgttaaatctattcccatgccagaatcttatcaatacataagaaatttaggaagattaggtgccaaaatacccagcacaatacttgtatatttttagtaccatacagaagtaaaatcccaggaactatgaacactagaccttatgtggtttattccttcaatcatttcaaacattgaaagtagggcctacatggttatttgcctgctcactttatgtttacatctcccacattcataccaatatacgtcaggtttgcttaaccattgatttttttttttttttaccaagtcttacagtgattattttacgtgtttccatgtatctcactttgtgctgtattaaaaaaacctccattttgaaaatctacgttgtacagaagcacatgtctttaatgtcttcagacaaaaaagccttacattaatttaatgtttgcactctgaggtgcaacttaacagggagggcctgagaaaagaatgggagggggctattaattatttttagcaaaatgttgcctttgtcttgtgcaaacatgtagaatatgctctttaatttagtaaaatatttttttaaaaggtagagatgctttgttattgtaatcataaacttcctgaaattcttgtaatttttttcccatacttatcagaagtgtgtttaccaacttatttttgtttgaaagtgtgattttttttttccttcccaacctctcttgcaaaaaaagaaatgggtttctgctaatgaattgagcagacatctaatattttatatgccttttgagctgtgtaacttaatatttggatacttgacaatttgttttattatgtaattgataaaatggtgatgtgtattaatgttagttcaaccatatatttatactgtctggggatgtgtggttatagttctgtgggagaaataattttgtcagtgttcaccagcttgtaaaaacttagtgcgagagctgaaacatctaaataaataatgacatgcatttatcatcattgaga

SEQ ID NO: 16857 - DNA, 447 bp, Homo sapiens
  source 1..447: mol_type = unassigned DNA
atggctcgaatgaaccgcccagctcctgtggaagtcacatacaagaacatgagatttcttattacacacaatccaaccaatgcgaccttaaacaaatttatagaggaacttaagaagtatggagttaccacaatagtaagagtatgtgaagcaacttatgacactactcttgtggagaaagaaggtatccatgttcttgattggccttttgatgatggtgcaccaccatccaaccagattgttgatgactggttaagtcttgtgaaaattaagtttcgtgaagaacctggttgttgtattgctgttcattgcgttgcaggccttgggagaaagcggcgtggagcttttaacagcaagcaacttctgtatttggagaagtatcgtcctaaaatgcggctgcgtttcaaagattccaacggtcatagaaacaactgttgcattcaataa

SEQ ID NO: 16858 - DNA, 1717 bp, Homo sapiens
  source 1..1717: mol_type = unassigned DNA
ctaagccggtggagccgcggccgcgcctgtgcgcgagggcgcgcgcgtcccgagccctccacccgtcgtgccggcgccgcccggaccgccagatgctgtgtgctgtggacccacctggggttcatggagtgggccacggggcccagccctaagcactgctgcgcccagggtcgccgcgcctcctgctgaggggtccccgtgccactggctctcaccattgccctcgcctgccgatggcctctgctgcccagcctggggccagctctaccgcctgagccccctgccccactccaggactcaccgtaccccgatggggtaacgtgacacaggccccacacgtcagaggccgctgtccccacggccactgcccgtgacccctggcccaaggcagctggagttggttcagttcaagttcattcttcctctggcccttgggggcttggggcccacctctgagtgaagggggctgtctgcccatccaccaatgtggagagggcgcccccggtgtggggtccagctctggacactgcttggcggccgggttcactttgagtttttaagttttctttgctgagcttttttggttgttctttttattttttgcctctttatgactatccagctctgagagacgggagtttggagttgcccgctttactttggttgggttggggggggcggcgggctgttttgttccttttcttttttaagagttgggttttcttttttaattatccaaacagtgggcagcttcctcccccacacccaagtatttgcacaatatttgtgcggggtatgggggtgggtttttaaatctcgtttctcttggacaagcacagggatctcgttctcctcattttttgggggtgtgtggggacttctcaggtcgtgtccccagccttctctgcagtcccttctgccctgccgggcccgtcgggaggcgccatggctcggatgaaccgcccggccccggtggaggtgagctacaaacacatgcgcttcctcatcacccacaaccccaccaacgccacgctcagcaccttcattgaggacctgaagaagtacggggctaccactgtggtgcgtgtgtgtgaagtgacctatgacaaaacgccgctggagaaggatggcatcaccgttgtggactggccgtttgacgatggggcgcccccgcccggcaaggtagtggaagactggctgagcctggtgaaggccaagttctgtgaggcccccggcagctgcgtggctgtgcactgcgtggcgggcctgggccgggctccagtccttgtggcgctggcccttattgagagcgggatgaagtacgaggacgccatccagttcatccgccagaagcgccgcggagccatcaacagcaagcagctcacctacctggagaaataccggcccaaacagaggctgcggttcaaagacccacacacgcacaagacccggtgctgcgttatgtagctcaggaccttggctgggcctggtcgtcatgtaggtcaggaccttggctggacctggaggccctgcccagccctgctctgcccagcccagcaggggctccaggccttggctggccccacatcgccttttcctccccgacacctccgtgcacttgtgtccgaggagcgaggagcccctcgggccctgggtggcctctgggccctttctcctgtctccgccactccctctggcggcgctggccgtggctctg

SEQ ID NO: 16859 - DNA, 1866 bp, Homo sapiens
  source 1..1866: mol_type = unassigned DNA
aagccggtggagccgcggccgcgcctgtgcgcgagggcgcgcgcgtcccgagccctccacccgtcgtgccggcgccgcccggaccgccagatgctgtgtgctgtggacccacctggggttcatggagtgggccacggggcccagccctaagcactgctgcgcccagggtcgccgcgcctcctgctgaggggtccccgtgccactggctctcaccattgccctcgcctgccgatggcctctgctgcccagcctggggccagctctaccgcctgagccccctgccccactccaggactcaccgtaccccgatggggtaacgtgacacaggccccacacgtcagaggccgctgtccccacggccactgcccgtgacccctggcccaaggcagctggagttggttcagttcaagttcattcttcctctggcccttgggggcttggggcccacctctgagtgaagggggctgtctgcccatccaccaatgtggagagggcgcccccggtgtggggtccagctctggacactgcttggcggccgggttcactttgagtttttaagttttctttgctgagcttttttggttgttctttttattttttgcctctttatgactatccagctctgagagacgggagtttggagttgcccgctttactttggttgggttggggggggcggcgggctgttttgttccttttcttttttaagagttgggttttcttttttaattatccaaacagtgggcagcttcctcccccacacccaagtatttgcacaatatttgtgcggggtatgggggtgggtttttaaatctcgtttctcttggacaagcacagggatctcgttctcctcattttttgggggtgtgtggggacttctcaggtcgtgtccccagccttctctgcagtcccttctgccctgccgggcccgtcgggaggcgccatggctcggatgaaccgcccggccccggtggaggtgagctacaaacacatgcgcttcctcatcacccacaaccccaccaacgccacgctcagcaccttcattgaggacctgaagaagtacggggctaccactgtggtgcgtgtgtgtgaagtgacctatgacaaaacgccgctggagaaggatggcatcaccgttgtggactggccgtttgacgatggggcgcccccgcccggcaaggtagtggaagactggctgagcctggtgaaggccaagttctgtgaggcccccggcagctgcgtggctgtgcactgcgtggcgggcctgggccggaagcgccgcggagccatcaacagcaagcagctcacctacctggagaaataccggcccaaacagaggctgcggttcaaagacccacacacgcacaagacccggtgctgcgttatgtagctcaggaccttggctgggcctggtcgtcatgtaggtcaggaccttggctggacctggaggccctgcccagccctgctctgcccagcccagcaggggctccaggccttggctggccccacatcgccttttcctccccgacacctccgtgcacttgtgtccgaggagcgaggagcccctcgggccctgggtggcctctgggccctttctcctgtctccgccactccctctggcggcgctggccgtggctctgtctctctgaggtgggtcgggcgccctctgcccgccccctcccacaccagccaggctggtctcctctagcctgtttgttgtggggtgggggtatattttgtaaccactgggcccccagcccctcttttgcgaccccttgtcctgacctgttctcggcaccttaaattattagaccccggggcagtcaggtgctccggacacccgaaggcaataaaacaggagccgtg

SEQ ID NO: 16860 - DNA, 558 bp, Homo sapiens
  source 1..558: mol_type = unassigned DNA
gtgcgcgagggcgcgcgcgtcccgagccctccacccgtcgtgccggcgccgcccggaccgccagatgctgtgtgctgtggacccacctggggttcatggagtgggccacggggcccagccctaagcactgctgcgcccagggtcgccgcgcctcctgctgaggggtccccgtgccactggctctcaccattgccctcgcctgccgatggcctctgctgcccagcctggggccagctctaccgcctgagccccctgccccactccaggactcaccgtaccccgatggggtcgtgtccccagccttctctgcagtcccttctgccctgccgggcccgtcgggaggcgccatggctcggatgaaccgcccggccccggtggaggtgagctacaaacacatgcgcttcctcatcacccacaaccccaccaacgccacgctcagcaccttcattgaggacctgaagaagtacggggctaccactgtggtgcgtgtgtgtgaagtgacctatgacaaaacgccgctggagaaggatggcatcaccgttgtggactggccgtttg

SEQ ID NO: 16861 - DNA, 514 bp, Homo sapiens
  source 1..514: mol_type = unassigned DNA
gaatgaaactccatgccctccgggacaccatgcccacttctgggtactggccttcaggggccttggatgtgggtggcatggcactggctaaatggggcccaggaggaaggcagcaggaccgtgggcatgcaggcctaatgccagggccagggcaggcttcatgtgggcttcctcctgtctggaatcctggagccgcacaatttccgacccaacaccccgtactccagagcgactggctcttaacggaagctgctgctggcagatgctgtgtgctgtggacccacctggggttcatggagtgggccacggggcccagccctaagcactgctgcgcccagggtcgccgcgcctcctgctgaggggtccccgtgccactggctctcaccattgccctcgcctgccgatggcctctgctgcccagcctggggccagctctaccgcctgagccccctgccccactccaggactcaccgtaccccgatggggtaacgtgacacaggccccacacgtcaga

SEQ ID NO: 16862 - DNA, 542 bp, Homo sapiens
  source 1..542: mol_type = unassigned DNA
ctctggccgggaccagggtgcccgccgcagccctgggaccctgcggccccggtccctattcgaggccccagccggagcgttccgggatccttcgggggagtgcccagccccgcgcccccgcctcccacatgactccggatgctgtgtgctgtggacccacctggggttcatggagtgggccacggggcccagccctaagcactgctgcgcccagggtcgccgcgcctcctgctgaggggtccccgtgccactggctctcaccattgccctcgcctgccgatggcctctgctgcccagcctggggccagctctaccgcctgagccccctgccccactccaggactcaccgtaccccgatggggtaacgtgacacaggccccacacgtcagaggccgctgtccccacggccactgcccgtgacccctggcccaaggcagctggagttggttcagttcaagttcattcttcctctggcccttgggggcttggggcccacctctgagtgaagggggctgtctgcccatccaccaatgtggagaggg

SEQ ID NO: 16863 - DNA, 575 bp, Homo sapiens
  source 1..575: mol_type = unassigned DNA
gggagggccggcgcaggcggggataaagcccgcggcgcggctcggctgactcggagcgcggaggaccggcctgccggatgctgtgtgctgtggacccacctggggttcatggagtgggccacggggcccagccctaagcactgctgcgcccagggtcgccgcgcctcctgctgaggggtccccgtgccactggctctcaccattgccctcgcctgccgatggcctctgctgcccagcctggggccagctctaccgcctgagccccctgccccactccaggactcaccgtaccccgatggggtaacgtgacacaggccccacacgtcagaggccgctgtccccacggccactgcccgtgacccctggcccaaggcagctggagttggttcagttcaagttcattcttcctctggcccttgggggcttggggcccacctctgagtgaagggggctgtctgcccatccaccaatgtggagagggcgcccccggtgtggggtccagctctggacactgcttggcggccgggttcactttgagtttttaagttttctttgctgagcttttttggttgttc

SEQ ID NO: 16864 - DNA, 606 bp, Homo sapiens
  source 1..606: mol_type = unassigned DNA
ggcagcgcctggagccggctccgcggcggaggggcggcgccccgacccaggcccagcaccgtgggcaccgccaggccggcgcgtatggaggcggtgggacgcctgcggcgcggatgctgtgtgctgtggacccacctggggttcatggagtgggccacggggcccagccctaagcactgctgcgcccagggtcgccgcgcctcctgctgaggggtccccgtgccactggctctcaccattgccctcgcctgccgatggcctctgctgcccagcctggggccagctctaccgcctgagccccctgccccactccaggactcaccgtaccccgatggggtaacgtgacacaggccccacacgtcagaggccgctgtccccacggccactgcccgtgacccctggcccaaggcagctggagttggttcagttcaagttcattcttcctctggcccttgggggcttggggcccacctctgagtgaagggggctgtctgcccatccaccaatgtggagagggcgcccccggtgtggggtccagctctggacactgcttggcggccgggttcactttgagtttttaagttttctttgctgagcttttttggt

SEQ ID NO: 16865 - DNA, 576 bp, Homo sapiens
  source 1..576: mol_type = unassigned DNA
agcgcctggagccggctccgcggcggaggggcggcgccccgacccaggcccagcaccgtgggcaccgccaggccggcgcgtatggaggcggtgggacgcctgcggcgcgggtgagcctggcagatgctgtgtgctgtggacccacctggggttcatggagtgggccacggggcccagccctaagcactgctgcgcccagggtcgccgcgcctcctgctgaggggtccccgtgccactggctctcaccattgccctcgcctgccgatggcctctgctgcccagcctggggccagctctaccgcctgagccccctgccccactccaggactcaccgtaccccgatggggtaacgtgacacaggccccacacgtcagaggccgctgtccccacggccactgcccgtgacccctggcccaaggcagctggagttggttcagttcaagttcattcttcctctggcccttgggggcttggggcccacctctgagtgaagggggctgtctgcccatccaccaatgtggagagggcgcccccggtgtggggtccagctctggacactgcttggcggccgggttc

SEQ ID NO: 16866 - DNA, 547 bp, Homo sapiens
  source 1..547: mol_type = unassigned DNA
cgcggcggaggggcggcgccccgacccaggcccagcaccgtgggcaccgccaggccggcgcgtatggaggcggtgggacgcctgcggcgcggggcgctgcgtgttgttcctgcctcctagatttgagccagagagaacccagttaactggacgcctgatgctgtgtgctgtggacccacctggggttcatggagtgggccacggggcccagccctaagcactgctgcgcccagggtcgccgcgcctcctgctgaggggtccccgtgccactggctctcaccattgccctcgcctgccgatggcctctgctgcccagcctggggccagctctaccgcctgagccccctgccccactccaggactcaccgtaccccgatggggtaacgtgacacaggccccacacgtcagaggccgctgtccccacggccactgcccgtgacccctggcccaaggcagctggagttggttcagttcaagttcattcttcctctggcccttgggggcttggggcccacctctgagtgaagggggctgtctgcccatccac

SEQ ID NO: 16867 - DNA, 2710 bp, Homo sapiens
  source 1..2710: mol_type = unassigned DNA
atgctgtgtgctgtggacccacctggggttcatggagtgggccacggggcccagccctaagcactgctgcgcccagggtcgccgcgcctcctgctgaggggtccccgtgccactggctctcaccattgccctcgcctgccgatggcctctgctgcccagcctggggccagctctaccgcctgagccccctgccccactccaggactcaccgtaccccgatggggtaacgtgacacaggccccacacgtcagaggccgctgtccccacggccactgcccgtgacccctggcccaaggcagctggagttggttcagttcaagttcattcttcctctggcccttgggggcttggggcccacctctgagtgaagggggctgtctgcccatccaccaatgtggagagggcgcccccggtgtggggtccagctctggacactgcttggcggccgggttcactttgagtttttaagttttctttgctgagcttttttggttgttctttttattttttgcctctttatgactatccagctctgagagacgggagtttggagttgcccgctttactttggttgggttggggggggcggcgggctgttttgttccttttcttttttaagagttgggttttcttttttaattatccaaacagtgggcagcttcctcccccacacccaagtatttgcacaatatttgtgcggggtatgggggtgggtttttaaatctcgtttctcttggacaagcacagggatctcgttctcctcattttttgggggtgtgtggggacttctcaggtcgtgtccccagccttctctgcagtcccttctgccctgccgggcccgtcgggaggcgccatggctcggatgaaccgcccggccccggtggaggtgagctacaaacacatgcgcttcctcatcacccacaaccccaccaacgccacgctcagcaccttcattgaggacctgaagaagtacggggctaccactgtggtgcgtgtgtgtgaagtgacctatgacaaaacgccgctggagaaggatggcatcaccgttgtggactggccgtttgacgatggggcgcccccgcccggcaaggtagtggaagactggctgagcctggtgaaggccaagttctgtgaggcccccggcagctgcgtggctgtgcactgcgtggcgggcctgggccggaagcgccgcggagccatcaacagcaagcagctcacctacctggagaaataccggcccaaacagaggctgcggttcaaagacccacacacgcacaagacccggtgctgcgttatgtagctcaggaccttggctgggcctggtcgtcatgtaggtcaggaccttggctggacctggaggccctgcccagccctgctctgcccagcccagcaggggctccaggccttggctggccccacatcgccttttcctccccgacacctccgtgcacttgtgtccgaggagcgaggagcccctcgggccctgggtggcctctgggccctttctcctgtctccgccactccctctggcggcgctggccgtggctctgtctctctgaggtgggtcgggcgccctctgcccgccccctcccacaccagccaggctggtctcctctagcctgtttgttgtggggtgggggtatattttgtaaccactgggcccccagcccctcttttgcgaccccttgtcctgacctgttctcggcaccttaaattattagaccccggggcagtcaggtgctccggacacccgaaggcaataaaacaggagccgtggccgtgtgtgtggagtgggctacagcgtcaggcggggcgggctggtggcctgggggccccagaggctgctgtctggatcctgggctggtgcccaggatggggctcccgcgtgctcttgcgctgccctctggtggccgctctgggtccttgcaccccgacccaggggccagcctgccctgtcctgtcctgataccgaggtgggagccctgccttggccagggtggccgtgttgacggttcttgggactgtgacattggaaggcgaggcaggtcaccagcactgtcctctgcaggatgggctgggattcatttggcagcttctcagggcctgtgtccggctggttggtccctgtgctgcccaaaccaggtgtccacatttccggctccgaggcgcagagaagggggcaggtggtggcttgggtggaggaagtcaccatccatcagcccagggagggagggtgccacctgggcacctggggctggatgtgagaggcctggaccagggcccgccggagggcgtggaccagatgctcatgtgttcctgggtgcagtgtctgtgttgggggctggccccaccctgggccggggtgcatggagggcatggccccagcggggaggaaggtgggcctagggctggctccagggtgtggagagcctgggagtggtctccgtcctggggccccaggaggttcccgcaaggagcgactggggcaggtgctggaggaggtcagtggacaagatggggagatgtggaaaccccaaaagccccttctcaggcagccctgcccccaagaccgacagatggctaagggggccgcagacctggctcccccagctcctgtgtggagaaagggcaacagctgtcccggatggttattctctcctttcctcaaacacatttggaactcaagtaaatccaatgcatgttgggtgaa

SEQ ID NO: 16868 - DNA, 2785 bp, Homo sapiens
  source 1..2785: mol_type = unassigned DNA
atgctgtgtgctgtggacccacctggggttcatggagtgggccacggggcccagccctaagcactgctgcgcccagggtcgccgcgcctcctgctgaggggtccccgtgccactggctctcaccattgccctcgcctgccgatggcctctgctgcccagcctggggccagctctaccgcctgagccccctgccccactccaggactcaccgtaccccgatggggtaacgtgacacaggccccacacgtcagaggccgctgtccccacggccactgcccgtgacccctggcccaaggcagctggagttggttcagttcaagttcattcttcctctggcccttgggggcttggggcccacctctgagtgaagggggctgtctgcccatccaccaatgtggagagggcgcccccggtgtggggtccagctctggacactgcttggcggccgggttcactttgagtttttaagttttctttgctgagcttttttggttgttctttttattttttgcctctttatgactatccagctctgagagacgggagtttggagttgcccgctttactttggttgggttggggggggcggcgggctgttttgttccttttcttttttaagagttgggttttcttttttaattatccaaacagtgggcagcttcctcccccacacccaagtatttgcacaatatttgtgcggggtatgggggtgggtttttaaatctcgtttctcttggacaagcacagggatctcgttctcctcattttttgggggtgtgtggggacttctcaggtcgtgtccccagccttctctgcagtcccttctgccctgccgggcccgtcgggaggcgccatggctcggatgaaccgcccggccccggtggaggtgagctacaaacacatgcgcttcctcatcacccacaaccccaccaacgccacgctcagcaccttcattgaggacctgaagaagtacggggctaccactgtggtgcgtgtgtgtgaagtgacctatgacaaaacgccgctggagaaggatggcatcaccgttgtggactggccgtttgacgatggggcgcccccgcccggcaaggtagtggaagactggctgagcctggtgaaggccaagttctgtgaggcccccggcagctgcgtggctgtgcactgcgtggcgggcctgggccgggctccagtccttgtggcgctggcccttattgagagcgggatgaagtacgaggacgccatccagttcatccgccagaagcgccgcggagccatcaacagcaagcagctcacctacctggagaaataccggcccaaacagaggctgcggttcaaagacccacacacgcacaagacccggtgctgcgttatgtagctcaggaccttggctgggcctggtcgtcatgtaggtcaggaccttggctggacctggaggccctgcccagccctgctctgcccagcccagcaggggctccaggccttggctggccccacatcgccttttcctccccgacacctccgtgcacttgtgtccgaggagcgaggagcccctcgggccctgggtggcctctgggccctttctcctgtctccgccactccctctggcggcgctggccgtggctctgtctctctgaggtgggtcgggcgccctctgcccgccccctcccacaccagccaggctggtctcctctagcctgtttgttgtggggtgggggtatattttgtaaccactgggcccccagcccctcttttgcgaccccttgtcctgacctgttctcggcaccttaaattattagaccccggggcagtcaggtgctccggacacccgaaggcaataaaacaggagccgtggccgtgtgtgtggagtgggctacagcgtcaggcggggcgggctggtggcctgggggccccagaggctgctgtctggatcctgggctggtgcccaggatggggctcccgcgtgctcttgcgctgccctctggtggccgctctgggtccttgcaccccgacccaggggccagcctgccctgtcctgtcctgataccgaggtgggagccctgccttggccagggtggccgtgttgacggttcttgggactgtgacattggaaggcgaggcaggtcaccagcactgtcctctgcaggatgggctgggattcatttggcagcttctcagggcctgtgtccggctggttggtccctgtgctgcccaaaccaggtgtccacatttccggctccgaggcgcagagaagggggcaggtggtggcttgggtggaggaagtcaccatccatcagcccagggagggagggtgccacctgggcacctggggctggatgtgagaggcctggaccagggcccgccggagggcgtggaccagatgctcatgtgttcctgggtgcagtgtctgtgttgggggctggccccaccctgggccggggtgcatggagggcatggccccagcggggaggaaggtgggcctagggctggctccagggtgtggagagcctgggagtggtctccgtcctggggccccaggaggttcccgcaaggagcgactggggcaggtgctggaggaggtcagtggacaagatggggagatgtggaaaccccaaaagccccttctcaggcagccctgcccccaagaccgacagatggctaagggggccgcagacctggctcccccagctcctgtgtggagaaagggcaacagctgtcccggatggttattctctcctttcctcaaacacatttggaactcaagtaaatccaatgcatgttgggtgaa

SEQ ID NO: 16869 - DNA, 1717 bp, Homo sapiens; identical to SEQ ID NO: 16858
  source 1..1717: mol_type = unassigned DNA

SEQ ID NO: 16870 - DNA, 1866 bp, Homo sapiens; identical to SEQ ID NO: 16859
  source 1..1866: mol_type = unassigned DNA

SEQ ID NO: 16871 - DNA, 558 bp, Homo sapiens; identical to SEQ ID NO: 16860
  source 1..558: mol_type = unassigned DNA

SEQ ID NO: 16872 - DNA, 963 bp, Homo sapiens
  source 1..963: mol_type = unassigned DNA
cttttttaattatccaaacagtgggcagcttcctcccccacacccaagtatttgcacaatatttgtgcggggtatgggggtgggtttttaaatctcgtttctcttggacaagcacagggatctcgttctcctcattttttgggggtgtgtggggacttctcaggtcgtgtccccagccttctctgcagtcccttctgccctgccgggcccgtcgggaggcgccatggctcggatgaaccgcccggccccggtggaggtgagctacaaacacatgcgcttcctcatcacccacaaccccaccaacgccacgctcagcaccttcattgagagcgggatgaagtacgaggacgccatccagttcatccgccagaagcgccgcggagccatcaacagcaagcagctcacctacctggagaaataccggcccaaacagaggctgcggttcaaagacccacacacgcacaagacccggtgctgcgttatgtagctcaggaccttggctgggcctggtcgtcatgtaggtcaggaccttggctggacctggaggccctgcccagccctgctctgcccagcccagcaggggctccaggccttggctggccccacatcgccttttcctccccgacacctccgtgcacttgtgtccgaggagcgaggagcccctcgggccctgggtggcctctgggccctttctcctgtctccgccactccctctggcggcgctggccgtggctctgtctctctgaggtgggtcgggcgccctctgcccgccccctcccacaccagccaggctggtctcctctagcctgtttgttgtggggtgggggtatattttgtaaccactgggcccccagcccctcttttgcgaccccttgtcctgacctgttctcggcaccttaaattattagaccccggggcagtcaggtgctccggacacccgaaggcaataaaacaggagccgtg

SEQ ID NO: 16873 - DNA, 2785 bp, Homo sapiens; identical to SEQ ID NO: 16868
  source 1..2785: mol_type = unassigned DNA

SEQ ID NO: 16874 - DNA, 2710 bp, Homo sapiens; identical to SEQ ID NO: 16867
  source 1..2710: mol_type = unassigned DNA

SEQ ID NO: 16875 - DNA, 12985 bp, Homo sapiens
  source 1..12985: mol_type = unassigned DNA
ccgcgcgggactccggggcgccacgggggccatgtaagcagctatcttccagagggccacactgggcatggacacccttttccctgcctggaggagcacaggtgatagtgtaattttccagtcacgaaactgctaaggccatctcaggggcgtgtgcgccaggataggcgggcggcgtccgaggaccacatagccatgccttttggtctgaagctccgccggacacggcgctacaacgtcctgagcaagaactgctttgtcacacggattcgcctgctggacagcaatgttatcgagtgcacgctgtcggtggaaagcacagggcaagaatgcctggaggctgtggcccagaggctggagctgcgagagacgcactactttggcctttggtttctcagcaagagccagcaagcacgatgggtggagctggagaaacctctgaagaaacatctggacaaattcgctaatgagcctttgcttttctttggagtcatgttctatgtgccaaatgtgtcatggcttcagcaagaggccacaagatatcagtattacctgcaagtcaaaaaagatgtgcttgaagggcgattacgatgtacattggaccaggtgattcggctagccggcctagctgtgcaagctgattttggagactataatcagtttgattctcaagatttcctcagagagtatgtgctatttcctatggatttggccctggaagaggctgttctggaggagctgacccagaaggtagcccaagaacacaaagcccacagtggaatcctgccagcagaagctgaactgatgtacatcaatgaagttgaacgtttggatggatttggacaggaaatcttccctgtaaaggacaatcatggaaactgtgtacaccttggcattttctttatggggattttcgtgaggaacagaattggaagacaagcggtaatatacaggtggaatgacatggggaatatcactcataacaagtcgaccattctagtggagctcatcaacaaagaagagactgccctctttcacacggatgatatcgaaaatgccaagtatatttctcggttgtttgccacacgacacaagttttacaaacaaaacaaaatctgcactgaacagtcaaattctccaccccccatcagacgccagcccacctggagccgatcctctctgcccaggcagcagccgtacatcctgcctcccgttcacgtccagtgtggtgagcactactcggaaacgcacacctcgcaagacagcatttttcatgggaatgaagaagccttgtattgcaactctcacaacagcctggacttaaattatttaaatggcactgtcaccaatggcagcgtgtgtagcgttcacagcgtcaactccctcaactgctcgcaaagtttcatccaggcctcccctgtatcctccaacctcagtatccctgggagtgacatcatgcgggccgactacatcccgagccaccggcacagcgcgatcatcgtgccctcgtacaggccaacccccgattatgagacagtcatgcgccagatgaagagggggatcctgcatacagacagccagagccagtctctgagaaacctcaacattatcaacacccatgcctacaaccagccagaggatctggtgtacagccaaccggagatgcgggagaggcacccctacactgtcccttatgggccacagggggtctacagcaacaaacttgtcagtccatctgaccagaggaacccaaagaataatgtggtaccaagcaagccgggggcaagcgccatctcgcacacggtgagcaccccagagctggccaacatgcagctgcagggcagccataactacagcacggcccacatgcttaagaactatctcttcaggccaccgcccccctacccacggccacgacctgccaccagcaccccagacctggccagccaccgccacaagtacgtcagcggcagcagcccggacctggtgacccggaaggtgcagctctcggtgaagaccttccaagaggacagctctccggtggttcatcagtctctccaggaggtgagcgagcccctcacggccaccaagcaccacggcactgtgaacaagcgccacagcctggaggtgatgaacagcatggtgcggggcatggaggccatgacgctcaagtcgctccacctccccatggctcgccgcaacacgctccgggagcagggaccgcccgaggaggggtcaggcagccacgaggtcccccagctccctcagtatcaccacaagaagaccttctctgatgccactatgctaatccacagcagcgagagtgaggaggaggaggaggaggctccagaatcggtgccccagatccccatgctccgggagaagatggagtacagtgcccagctgcaggcggccctggcccgcatccccaacaagcccccgcctgagtaccccggtccaaggaagagtgtgagcaatggggctctgaggcaggaccaagccagccttcctcccgccatggccagagccagggtgctgaggcatgggccagccaaggccatcagcatgtctcggactgacccgccggctgtcaacggggcctctctcggcccatccatctcggaacccgacctgactagtgtgaaggagcgggtcaaaaaagagcctgtgaaggagagacctgtgtctgaaatgttttccctggaagacagcattatagagagagagatgatgatcaggaatctagagaagcagaagatggcaggcctggaggcacagaagaggccgctgatgttggcagcattgaatgggctctcggtggctcgagtctcagggcgggaagagaatcgagttgatgccacccgggttcccatggacgagaggttcagaaccctgaagaagaaactagaagagggaatggtgttcacagaatatgagcaaattccaaagaaaaaggcgaatggcattttcagcacagcagctctgccagaaaacgccgagcgcagccgaatccgtgaagttgtcccctatgaggagaatcgagtagagctgataccaaccaaagaaaataacacaggatacattaatgcctcccacatcaaggtggtggttggcggggcagaatggcactacatagccacccaggggcccctgccacacacgtgccacgacttctggcagatggtgtgggagcagggagtgaatgtgattgccatggtcactgcagaggaggagggtggacgaaccaaaagccaccgatactggcccaaactaggttcaaagcacagctcagccacctatggcaagttcaaggtcaccacgaagtttcgaacggattctgtttgctatgcaaccacgggcttgaaggtcaagcaccttttgtctgggcaagaaaggacggtgtggcatttacaatatactgactggccagatcacggctgtccagaagatgtccaaggatttttatcctacttggaggagatccagtcggtccgtcgccataccaacagcatgctggaaggcaccaagaaccggcacccgcccatcgtggtccactgtagtgctggggtgggaaggaccggcgtgctcattctttctgagctgatgatctactgcttggaacataacgaaaaggtggaagtgcccatgatgctgaggctcctcagggagcagaggatgttcatgatccagactatcgctcagtacaagtttgtctaccaagtcctcatccagttcctccaaaactccagactcatttaatcaccccaatccagctcctggaggagggacccagctccatcgcgctggaggagagtcacctccagacaacatctgctccccccacaggggtgcaggtggctggcagcaaacaggctctctgaagacagtagccaagattattcacacataccatgtattattttatatgagataatttatttttttcccctttggaataacttttgtgaattattataatgcagtttccctagtaatatagtacttttcatttgaaccacatcttgactgatctgtattgtaatatatgtcagcaggtaaggttgcctgctggatcattttgaggacagaggcatgagggagcacatctcttgtgaagttgcagccagatttgtaaccaaccctgaaattcatcagcttaattcatttatcagcttgattcattcatcattcattgcttatatccaaagcaaagacggtaagaaaatgaattcatcctgaaatataaagaaaagggtctgaaggaacaaacacgattctcttatattttggggctcatgagccttgatagacagtttcctctcgtcttcatttccacccctcatcctcagtagtctcctctcccccacgccccaccccaacttcccccccaagcttgagttaaagacagaatagctaaagacagtgctgcctttacaatgcagtaattgccatctttggggccgaaagacaagctctgtgttgtgcttttcttgaccaccccttatcctgggctctggagcttgtgtttccctgctggcgactgtaccttgggtatttgttgctacctctcctgtttgctcagtaggaccctgtctggtggcattgaggctctggaccagaccatctgtgcagttaaggctctaccctgattgagagaggatagcagacctagaaagagaaaggagttgggcagggcctttgaggattgtgtttttcaggcagggccttgatgatcattgttttttatttaaataagatgtgtgtgctggacagagacctaaaagttgaggtcactaagtcattggaaaggccatcaaggaaacagatggggaagctgatttatgggagctgtaaggcatttagctacataacaggggtcctggccaggaaacacatcaaatgtgacccccgctgtgctgatatcatcttcaggctttggtctgcaagatcagaattaatcccactcgggaccccatagtccaaacttggggccacttgatgaacgatggtagaattgtcattggcagagccctgtgcttctttccttttcttcataaaatccactcgctggtcagttatcttcactttgaagcccagttcttagtttcttcctatggcttcattggtcagtgtccttctgaatttccaaggatggtacacaataaatcatgttttgtacttttttcctcttactgcattttgggggatttatcattctatgtctaccttttcttgagtacagctttgatatgcacctgttgttacgtggtgatgggaagtcacaggcgtgctctttctagttaatttgatgccacatcttccttgtcttttcagcttgggaaaaaggcggcagtggaggaaggcatggaatgcccacagtggtcagttcaaagaacaaacgtgcaattaaaaaactgtagtcagccaggcacggtggttcacacctgtaatcccagcactttgaaaggccaaggcgggcagattgcttgagctaaggagttcgagaccagcctgagcaacatgatgaaaccccgtctctacaaaaagtacaaaaattagccaggcgtggtggtatgccctggtagtcccagctgctcgggaggctgaggcaggaggatcacctgattctaagaattcgagactgcagtgagccgtgatcttgccactgtagtccaggctgggctacggagagaccctgcctccaaaaaaaaaaaaaaaaaaggaaaaaaggttgtcaagaaaaactagatgttaggagaaaggaaaatttaattgcagttttttttcttagaattgactgctgtgagagttccatatgcctttcttcattgctgcttttgtcccccgtgagctaaaaagatggagtgacatcaaatcaaccagaaaaagtatgcctttgtgacatcccatcaccacatgccaacaggtatatattccccattaagttcttcggaataggaatcctctgtttcaacctggccaggtgttgtggtggctgtactctagttagactcggaatatctggggatggagggcttcccctgtgtcttctacttcaaggtctgaaggctcagtgaaggagtataatctgctgatctttgtagattctggagttttgttgtatgtcctggaaagaaacccattagtattacatgtattttcagtgaacagagcttataacccttattataagaagctcatcaataagcaaaaagatacttgtttcctttccttggaggtttttccatccttgggatattctgctgttagggatgttttagcaagtggtctcagttactggtttattgcgtgatgaacaacatcagtatttatcttttatctctaagccccaaggtgggcactgttagaatatgtctcatgtggacagcatatagatctggtgcgtctttgaggtcgtcagagctcatgggcttccctgaaattcatccactgtccctgccgtatgctacgggaatattcattagtgtacaaaatgcagggaggaagtaggtttaatattcaactttctagccaaagtttatattgaaacccaaaagaaaacatttaagagttgttccacatatttcacttttaaaaacaaatgcctttggttctttagcacattttgcattccttttcacatctccagtaaatgccaacatatctcctgttaaattagcagcagccatttaaagtcctttcggtggcatctgcataataattgcccagagatgctttatatctgggaagcaagccaaggaataaaccttgaagcaaagtgtattaaattagttatctagttagagcttttggaatgatttcctgatgatgtatcaagtctgaagctggagctgtcagtgtctattgctgcagtttggatttgaagggagaaaatgtaaaatggaggaaaaaaaagttaccatctcacaacaaagccatcaaacattttccagccgctgttttcgaggttttccagttgaactgtttggtttctttcatccacactcatttggatacattgacccgaggtattcatccttgtttactgtggtccctgaatcatgggggctgaatttgatgtcttcatccttgagatgagcctgctggcttagctgaggaatgtcctgctgaggtttcttaggtttccttgggttctaaggatatactggatataccatcttttagcaagagtatctggtagcatttacagatagcatagacattggtatgcacttctttccccagataggaagtaaaggaggatttagttgcatgaaaaaaggatgttaaacattgattacataggagtaaagatgaatgagctgcaatattcagtcggagctaaacaataagatcagggaaggtaaaaatacctatgtggaatattttgaatcgtaagcttttgaggagcttaaattgagagaattttacttttaattttgtagattgagaagaggaaccgctttttaaaattatagctaaactgtcattgttttcctaagagtcacttggccatctctggccccctctttcatcagcctgaagagagggtctttgtagactgctgagggtgggccttgtaggacttgaccatggcttacacctacttaacctttatcctgctttctttcagcttgtgcttttcagttataaactccagtgggtacagcaggctggccttttcatccagctgattatttttccagcttaatatagattgacccatatgaaatttccaataatggaccatattttctgcaaatagacagtactcgcatggatcacctatatcttccccctgatacactgtgggtcccaacaccagatgtcatttctccagagcagtgctaatgaacacaaaaggtataccctgggtggcccagctcttttcacgaacgtgctgccctgctcatagtgatccttgcatcacttggtgaatgggccatctcctgggacatggaagttgcagaggtagatagtgcactgcagcttctcttaagccggattggccatcaggcatatcactctggagtttttagctgctgtcctttcccgatgaacagtctgtattagctgacctcagcctacttgttacgtgacgtatgggtcccaaaagtgtcctttgtcaaaaagcagaatgtgccttctagtctccctttccccatctaatggtgtattcgatggtgaagatgagtacagttgaccacccctatctgtgggttccacatccctatattcaaccaagtacagattgaaaaatatttggggaagaggggaaacccacaaagttccaaaaagcaaaagttgaatttgccacatgctgaatactacattgaattcacacaaatgaagtgatgtgtaggcattgagttaggtattgtaaataatctagagatgatttaaagtatgcaagagatgtgcataggttatatgcaaatactgtgctattttatataaaagacttgaacatccatggattctggtattctcagagggtccttgattgccccctttggtaaaggacaactatttcgttactgattttcgtttggggaagatctgtcaatcccttgaggtgcgggggttggggggatggagggtacagggcattctaggatgtgtgccagggagcacagattcaagggatgggattgagtcagacctgtgttcttactcagtgtcagaaataactctgtggagctcctagagtaagacatttccggaagcaccacataattactgttgggctcttagggtagcccttttagggaattgagcattcccatgttttaccaacaattattctgctgctgtgttttattatattgccaatggttttgagacactcatcatgctcttatttagtgatttcttttcatgagcagagcaacagctcatccagcatggtttccaaatggagaaatttgggtcttctgtagaaaccacacaaattctccaatggcctacagccttatggttggcacactagttggccctatagggtggaaataaagctgtaagatgttaaactgcatttgatacttctcttgaacgctgagcaaggaagcaaaatagttcttgtctttacttaagcttctaagacattttggggcaaaggaccttacagatggcgtctgttgaaagtaacagcaacgtgccagggagaaatgtgggggaaatctcatcaaattctgccacctcaaatgtgttgtccagaagtcagtgttattcagggggccctgtgaaacttgaccaccagcttgcgccatcaacactcagcctttatccagcctgctctcagcttttgtgtttctgttagaaactcagataggtaagtatttttattcagtagactacctttcttatcttttcagcttaatatagctgcatcttctttctcaaagccaaactaagatattctctattaaaatgtccatgagcctagcattgagtgtctggcatccatcaatttcatagactggaaaatgattgttgtttggtacagtaaagaagaggatgtgcatcagttcctaccgtttgcagctttgtttttagccttcccattttaaaaataaattcaaggacattgagttacaaggcaggagggctggagctactgggcagcctgaatatgacaagcatttgtgtggaaagtcattgctccttctgccacactttgggccatcaggatcattctttcccagaagtgccataaacttgctcaaaagtttctataaatgggaagagggagaggaaggatttttgcatcagtcctgaagttgctatccaaaagttctctgtttcacaaataattttctgaactctggaatgcctctcctactccctgcctccctttctgtaatgtcagagtgatggaaaccaccaagtggcatgctagggaaagcctgcagcagtgttggagtctatttcaccctagctcatagttttaaactgtcttcactgttgaggtagagcttgatgaatgtcatggattatgatgtgtggtttatcatatttgcctggatttgctgatcaaaagcaccatcttccctcgcctgctgctggcagcctttccttgccttgcttgttagcagagcattctgcttacccatgtggctcccagagttagcagccccggctcttggatttcttgattcttctcccctgtgatctcagaggtgctgcagaggacattcccctttagagcaagtcatgtttctattcaggccacaaaactgggatgtacatgcagtgactttggtgttccttgtcttgttcaggggaacgggtgggactgttgtgtgctgtcaccctcttcattccatgagcaccttgttcacttagggtctgctgcctttttttttttctttttctttttttttttttttttagtttttgagatcgtgtctcactcctgttgcgcaggctggagtgcagcctccaaagtagctgggattataggcgtgcaccaccacacccggctaatttttatatttttagtagagacggggttttgccatgttggccagactggtctcaaacctctgacctcgtgatgacccccctcggcctcccaaagtgctgggattacacccagcctctgctgccttttcatatttccccatctgctttatggatcaactctcaacagtacactttttcttttctttacctaccctatgagtgcaacccagatgtaagagttaatcctcgtcagagaatcattgccttaaacctctcagaaatatgtaattaggaaatcttattttaattttttaaaaattgcttgtatagtttcaaagaataagatctggcaaatggccagatgtggtggctcacacctgtaatcaaaccagcactttgggaggctgaggcaggcagatcacctgaggtcaggcgttcaagaccagcctggccaacatggtgaaatcccgtctctactaaaaatacaaaaaaaaaaaaaaaaaaaaaaattagccaggcatggtggcacatgcctgtaatcccagctactcaggaggctgaggcaggataattgcttgaacccgggaggtggaggttgcagtgagccgagatcatgccactgcactccagcctgggcaacagagtgagactttgtctcaaaaaaaaaaaaaaaaaaaaaaaaagatctggcggatgaaaataaccagaatgaaaatagctagaaaactcagcaagcaggaagctccctttctcacccttttgttcccttgccgatagaatcagtcactattagaaaaaatgaaagacgctctgtttaaaacaatgatgacagcagtacttaatatgtatttcgaggtgaacttatatagattgagagaggctgcatttggcagactgatgtataggaagacccatttgtttctagcttctccctgcagggaaaatgctttcgtcattatagcctctttacacagactggccattctagtgaaacaggtggtaaacctttgggctgcccagaaacattttatctgttttcacttacctaggaaggggaaagattagcgggtcatccaaaatctgtatgtaagctatcttcattttcttccccaaccttctcctcctgggaaacacaaatgctatctcatctgacaaaaggttttagaggataaagctgaaaagattggattgggatctttttgtggcttggggcggagccttttgctaaaatctcaagaatgctgctttgagtttagctagggtggctctcagaactggggtgcctggcattctcagcatttctcaggggcctcccacctctgacaactgcagtgttagctaatacataccttgagcatagaactgaatgctgtaattcagagccattttttttttcaacttgaacattgtacaattttactgcaatttcctttgaactttcttgccactgtttggaatcttaaaaattcattagccttctcctttctgacataaagctactcttcatcagagatgagttcctatgtatgtcctttgttccttcaatagctaattaatgtgcttgaggatacttcagtggaaaaaaaggtttaaatatgcaaattactaataaatgtgtaaccttatgtaacttgtgttacatcaagtaacaagctaatctagtttgtttcactggactaggcttgtgctccctacttcagtattttgatgctttccttgatctttgtttcacaaaatgttgtgaattttggtatcattcaaaacaaatgacatttattaggtttcattttgaaacgatgtacagacaagtccccaacttagaaaccggtttgttcttaaggttcttgcgtcagcccatagaagcccactgacctccaccacagcccaaatggagggctgtgatagccagatctggttggcttttgtgggctgacccagacatttaatcaccatctcttatgttgttgccgtaagaaatgcattccaggttgggacttgggatcctgagagcacattcgccccctgtggtggccgcttgccaccttgcaagatggaagcccagtctccttactaccaaactgtagttgtaagcagagggaggggtgagatgtttataggacattccctaagctggggagtgatttttatcactattcatgtcaactgtactttggtatagactccctatcaatttaataatatgaaaagcctaaaataaaactatgcatgctattctatgtgctattttatatcagtaaataagcttatgcttgccagttgtatacacagttatgaggtgtatagaactgactttgacagtattttttgcactgtttcctatctgtttttataaagtcttatttagatattggaccttgttgatgttctcactgcccttgtgcttgctataaaatgtttcatatgtgcctttacaaatgtgagatctttattctaacctttttttgtaaaagatatctattgatttccatatgcaataaacctttttttcagagaaaagtta

SEQ ID NO: 16876 - DNA, 442 bp, Homo sapiens
  source 1..442: mol_type = unassigned DNA
gaatggtgttcacagaatatgagcaaattccaaagaaaaaggcgaatggcattttcagcacagcagctctgccagaaaacgccgagcgcagccgaatccgtgaagttgtcccctatgaggagaatcgagtagagctgataccaaccaaagaaaataacacaggatacattaatgcctcccacatcaaggtggtggttggcggggcagaatggcactacatagccacccaggggcccctgccacacacgtgccacgacttctggcagatggtgtgggagcagggagtgaatgtgattgccatggtcactgcagaggagtgatctttccactggaatttgggagtctcaggctgctctgggcaaatcgacatagacgcccaactccaggcacccagctccacatgccatcatccttatcagctgaaaagagaccagaagccgtt

SEQ ID NO: 16877 - DNA, 487 bp, Homo sapiens
  source 1..487: mol_type = unassigned DNA
gacattttccaactctcagcacacaggctgctttttatcattcctacggggcgggagggggcagggagagaaggctaagacaccgggtccagtacccagagattctagggagagatctctgagattgcctacttgtcactggaatcaattccgtggggaatcggctccgccgccgcgaaggacagcctttccgcgcgggactccggggcgccacgggggccatgtaagcagctatcttccagagggccacactgggcatggacacccttttccctgcctggaggagcacaggtgatagtgtaattttccagtcacgaaactgctaaggccatctcaggggcgtgtgcgccaggataggcgggcggcgtccgaggaccacatagccatgccttttggtctgaagctccgccggacacggcgctacaacgtcctgagcaagaactgctttgtcacacggattcgcctgctggacagcaatgttatcgag

SEQ ID NO: 16878 - DNA, 5552 bp, Homo sapiens
  source 1..5552: mol_type = unassigned DNA
ctttccaactttttctcggcggagtgagcgcagcgggcgcagactcgggggcaggttgctgtgcttctccgggctcagccgcctgctctcctggctcaggtcctcggggagccctagacagacatcaagtggccactggcgctccttcccctcccagctgagccatcctccccggcctcctcgggcgggacagccccgtgcttaggtttttctccttttctcccccggtgcgcctctgctcggactctcgcgccgggatcgcggcggaaacctccctcccctttcgcctcctgcggctccttcccttcgcccctcctccgccagtcactggaatcaattccgtggggaatcggctccgccgccgcgaaggacagcctttccgcgcgggactccggggcgccacgggggccatgtaagcaggtggtggtcttttgaatggtttgcgtggagttgctgctgtccatcaccaagattgaagattgaagtcctcaccgtcttccagcaggcagcggtaggtggtgaccctagcctccagcttggccttgatgttcagcagggcctcgcactcctgggcttggtgttgcgcctcttcctgggtctgggccagccctgacgccaggtgcagcaggatctcgttgagctgctccatctgcagggtgtagcggacctccacctccctcaggctgttctccaagctggccttcagatttttcatggagtccaggtcgatctccaaggactggaccgtacgtcccagctccgtgagtgtcatctcagcagctccaacctgggcggactgggtggtgaccactgtggtgctctcctcagtccgctcagaccagcacttgtccagctcctctcggttcttccgagccagcttgtcatattgggcccagatgtctgccatgatcgtggcgaggtcctgagatttgggggcatcaacctccatggtcaacccagagctggcaatctgggcttgtaggccttttagttcatctttgtggttcttcatgaagagcagctcctccttgagagcctcgatctctgtctccagctgtggccaagtgacattggtgtcatcagtgaccttgcagagcccgtaatgctgctctccacagactggcgcctgagagtctgtctcatacttgactctaaagtcatcagcagcaagatgggcattgtcagtctgcagaacgatgcaggcattgtccacagtatttgctaagatctgagccctcaggtcctcgatgatcttgaagtaatggcccccagtctctgacctggggtcccttcttctccaggtgctcccagattttgctctccagcctccagttctcgatctccaggctcctcagtctgtccaggtaggaggccaggtggtctttcaggctttgcatggtctccttctcgttctggatgcctcctattcctgccaggcccccagccatccctgcggccaggccccgggaccccaagccatcccagaagctggtgtagcaggacacggagatctggaaaccagagcccctggcacgtgcataggctctggccacgctgttgaccagctgggcggctggacagagcccagggaccagtaattggtggagaagttggagcaagtggtgaaactcatgctgtctggggaggagaacgagaggacaggacccaggctttgccaacgacctcagtatactactacttcaatacatatttattctgacattaaaataagacagtgaaaaagtaaaaacaaaacatacttgatacaaggttttataacttttatctcaatcaaatcatagtaattatcactacagaattgaacaagtggtcaaacctgctcagattgctgagttttgtttcatattttaaagtcttaggagggaatttatttattgccctgttgcctaatattggatggctttaattccatggttttcagaattgcctattgccatatggtttacatacaaaataccacctgaaacataagaacgggtctttcctacggctttccccccacaaactgtaaatgaaaactttttattactgactgtatcctctcatttggtttaacttacaagtgtcatgttgcctgctgttacacttgtctttggcgtctgctcagaaataatggtgtctagacagacccataaatatcctgggttatagttcctcatttaaggctctgagacttcacagcaggggcaagaagacttgcagggcagatacgagaaatcttcaggccacttaattcagagtccattggcagaataggcagagaatgtgtgtgtgtgtgtgtgtgtgtgtgtgtgtgtgtgtgtgtgttaggctgggttgtagagatgggttttggaaatgatagttgggtcttgaaactactattggagtgcaaatgcctcctccctcatttggcggagaaacgtcaaaaatcctcagaacggaagaatccattctctttattttgggacacagcctggtaaaacttgtaagaaattatgacagctctgtgggaagcaagtgcaagtgtgggagaagcaagttgatgtgtgaagcagacatcagtgtgtgaaccagagtttatttgaacagtagtagttgctggtggcagaatgttaaaaatgtgagtattaagagtattaatgatgtgactattaagacttggattagtgttgaagaaatgtgaacttgaatagatttgctatgaaagtcttcggattttttttcctgtaatggattttatttcaatttcagttcactttatatgagtctccctggaattcattgcaaatttcttttgaaaggtaaggacccgtttgtttatgaagttttgattttttaggaggtaaatatttgaggcaaagttggtactgaggttcagagtaaatgggaatgaggatgttttatattaatatagaagttaagtaattacagagaaaagcttttaaaaattagtgcagtaaaatagggtgcttgtttatattgaattgttagatatcttggctgaatttataaaaagaaggttactactgaactcttaaaaggttatcgtactcgtcgtaaatattttcgtaaactgctaatagttttgacaacaaaaggagtgcttatctttggaatatattctccttcactgaattatttattttggaagagttgaggctaagggtgtaaaatatattatagagccaggcatcatggtgcacgcctgtgattccagcacttagggaggtcagtgtgggtggattgcttgagcccaggagttcgagaccagcctgggcaacatggtgaaaccccgtctctacaaaaaatacaaaaagtagccaggcatggtggtgcacccctgtagtcccagcttctttggagactgaggtgggaggattgcttgagccttggaggcagaggttgctataagctgagatcctaccactgatgcacaccagcctgggtgaccgaaggagaccctgtctcaaaaaaaaaaaaaaaaaaagaaaagaaaagaaaaaagaaagtattatagatttttagagctttttggttaggggttgatcacttatgggaccccacactgtgttgccctcaaagagttactgttaccatgttcactccctaatactttctccttgcattttccttccattccttttttcttccctcctagcctgaatgttggcctactagtgaaatctgcttatggcctaacctgatgggtaattaacagacaatatgttgtagttgttgacctaagaaggcctgagactattagtctgttttaacatacctgcatctatgaggtatctgtagtcagctctgtttttcttaagtagaggtttatccattaccaacagtgaatgttcaatgcaaggaatagctttttaaaacatatggcaaatttgtggttctttagaatccattgtcatatagtggttaatatatatatatatttttttgagacacactctttcgcccaggctagagtgcagtggtgccacttcggctcactgcaacctccacctcccaggttcaagcgattctcatgcttcagccttccaagtagttgagactacaggcatgtgccaccatgcccggctaatttttatattcttagtagagatggggttttgccatgttggccaggctggtctcaaactcctggcgtcaagtgatctgcctgcctcagtctcccaaagtgctgggactacaggcatgagccaccgtccccagcacatgtttgttgatgtccacaagttgttagaggttgtttataaggaggatggtagccaaaactgttaatttctcccatgtctctgtagaaggaaaacctgtgcagcacgctctattttgctagtgtactcagttgtcaaatagatagccaacttgtgtgtgaccaatcgtcttttctccttcactctgctgctttgaagaccttggtctctgaaacacatacttttggtcaggtatctatgaccatagagattaggacccatcttcttgactttttttggcagagagacagtgtctcactctgtcatgcccaggctagagtatagtggtgtgatcacagttcactgcagcctcaaactcctgggcttaagtgatcctcccacctcagcttcctgtgtatctggggctacagacatgcgccaccacacacagctaaattttttaattttaatttttattttttggtagagatgaagatcttgctatatccccaggctggtctcaaactcctggcttcaagtaattttcccaccttggcctcccaaagtcttagagctacaggtgtgagccaccatacccggccccatcttcttgacttacataggctgtgggtatcatcaagctaaagcccattttttaaaacaaccatacctcaattcttttttttttttttgagatggagtcttgctctgtcacccaggctggagtgcagtggcatgatctcggctcactgcaacctccacctcccagatttaagtgattcttgtgcctcagtctcctgagtagctgggattataggcatataccaccatgcctggctaatttttgtatttttagtagagatggagtttcaccatattggccaaactggtcttgaactcctgacttccagtgatccgcccacctcggcctctcaaagtgctggcattagaggcgtgagccactgcgcccagcccccatacctcagttcttaaagtatctcaagaatattaaaaccaattaccctaccactcaagtatatccactgtgtttttatatattatttctaaactttctattaattatataactgtaatcatgttatatatttagaataatagtcacatagagcaatatattgtgagaatactttttctgcttttcttcccatttatctttttagtcacacttttctctgttgccacatattcttaatatacttagaatgttaatggatgtatagctcattgagtagtatgttataattaacaatttccatttgttgactatttgggttatttccaggtgtttgtttggctactataaataaaataccattaacgtctttg

SEQ ID NO: 16879 - DNA, 3842 bp, Homo sapiens
  source 1..3842: mol_type = unassigned DNA
ccgcgcgggactccggggcgccacgggggccatgtaagcagctatcttccagagggccacactgggcatggacacccttttccctgcctggaggagcacaggtgatagtgtaattttccagtcacgaaactgctaaggccatctcaggggcgtgtgcgccaggataggcgggcggcgtccgaggaccacatagccatgccttttggtctgaagctccgccggacacggcgctacaacgtcctgagcaagaactgctttgtcacacggattcgcctgctggacagcaatgttatcgagtgcacgctgtcggtggaaagcacagggcaagaatgcctggaggctgtggcccagaggctggagctgcgagagacgcactactttggcctttggtttctcagcaagagccagcaagcacgatgggtggagctggagaaacctctgaagaaacatctggacaaattcgctaatgagcctttgcttttctttggagtcatgttctatgtgccaaatgtgtcatggcttcagcaagaggccacaagatatcagtattacctgcaagtcaaaaaagatgtgcttgaagggcgattacgatgtacattggaccaggtgattcggctagccggcctagctgtgcaagctgattttggagactataatcagtttgattctcaagatttcctcagagagtatgtgctatttcctatggatttggccctggaagaggctgttctggaggagctgacccagaaggtagcccaagaacacaaagcccacaggacaatcatggaaactgtgtacaccttggcattttctttatggggattttcgtgaggaacagaattggaagacaagcggtaatatacaggtggaatgacatggggaatatcactcataacaagtcgaccattctagtggagctcatcaacaaagaagagactgccctctttcacacggatgatatcgaaaatgccaagtatatttctcggttgtttgccacacgacacaagttttacaaacaaaacaaaatctgcactgaacagtcaaattctccaccccccatcagacgccagcccacctggagccgatcctctctgcccaggcagcagccgtacatcctgcctcccgttcacgtccagtgtggtgagcactactcggaaacgcacacctcgcaagacagcatttttcatgggaatgaagaagccttgtattgcaactctcacaacagcctggacttaaattatttaaatggcactgtcaccaatggcagcgtgtgtagcgttcacagcgtcaactccctcaactgctcgcaaagtttcatccaggcctcccctgtatcctccaacctcagtatccctgggagtgacatcatgcgggccgactacatcccgagccaccggcacagcgcgatcatcgtgccctcgtacaggccaacccccgattatgagacagtcatgcgccagatgaagagggggatcctgcatacagacagccagagccagtctctgagaaacctcaacattatcaacacccatgcctacaaccagccagaggatctggtgtacagccaaccggagatgcgggagaggcacccctacactgtcccttatgggccacagggggtctacagcaacaaacttgtcagtccatctgaccagaggaacccaaagaataatgtggtaccaagcaagccgggggcaagcgccatctcgcacacggtgagcaccccagagctggccaacatgcagctgcagggcagccataactacagcacggcccacatgcttaagaactatctcttcaggccaccgcccccctacccacggccacgacctgccaccagcaccccagacctggccagccaccgccacaagtacgtcagcggcagcagcccggacctggtgacccggaaggtgcagctctcggtgaagaccttccaagaggacagctctccggtggttcatcagtctctccaggaggtgagcgagcccctcacggccaccaagcaccacggcactgtgaacaagcgccacagcctggaggtgatgaacagcatggtgcggggcatggaggccatgacgctcaagtcgctccacctccccatggctcgccgcaacacgctccgggagcagggaccgcccgaggaggggtcaggcagccacgaggtcccccagctccctcagtatcaccacaagaagaccttctctgatgccactatgctaatccacagcagcgagagtgaggaggaggaggaggaggctccagaatcggtgccccagatccccatgctccgggagaagatggagtacagtgcccagctgcaggcggccctggcccgcatccccaacaagcccccgcctgagtaccccggtccaaggaagagtgtgagcaatggggctctgaggcaggaccaagccagccttcctcccgccatggccagagccagggtgctgaggcatgggccagccaaggccatcagcatgtctcggactgacccgccggctgtcaacggggcctctctcggcccatccatctcggaacccgacctgactagtgtgaaggagcgggtcaaaaaagagcctgtgaaggagagacctgtgtctgaaatgttttccctggaagacagcattatagagagagagatgatgatcaggaatctagagaagcagaagatggcaggcctggaggcacagaagaggccgctgatgttggcagcattgaatgggctctcggtggctcgagtctcagggcgggaagagaatcgagttgatgccacccgggttcccatggacgagaggttcagaaccctgaagaagaaactagaagagggaatggtgttcacagaatatgagcaaattccaaagaaaaaggcgaatggcattttcagcacagcagctctgccagaaaacgccgagcgcagccgaatccgtgaagttgtcccctatgaggagaatcgagtagagctgataccaaccaaagaaaataacacaggatacattaatgcctcccacatcaaggtggtggttggcggggcagaatggcactacatagccacccaggggcccctgccacacacgtgccacgacttctggcagatggtgtgggagcagggagtgaatgtgattgccatggtcactgcagaggaggagggtggacgaaccaaaagccaccgatactggcccaaactaggttcaaagcacagctcagccacctatggcaagttcaaggtcaccacgaagtttcgaacggattctgtttgctatgcaaccacgggcttgaaggtcaagcaccttttgtctgggcaagaaaggacggtgtggcatttacaatatactgactggccagatcacggctgtccagaagatgtccaaggatttttatcctacttggaggagatccagtcggtccgtcgccataccaacagcatgctggaaggcaccaagaaccggcacccgcccatcgtggtccactgtagtgctggggtgggaaggaccggcgtgctcattctttctgagctgatgatctactgcttggaacataacgaaaaggtggaagtgcccatgatgctgaggctcctcagggagcagaggatgttcatgatccagactatcgctcagtacaagtttgtctaccaagtcctcatccagttcctccaaaactccagactcatttaatcaccccaatccagctcctggaggagggacccagctccatcgcgctggaggagagtcacctccagacaacatctgctccccccacaggggtgcaggtggctggcagcaaacaggctctctgaagacagtagccaagattattcacacataccatgtattattttatatgag

SEQ ID NO: 16880 - DNA, 1794 bp, Homo sapiens
  source 1..1794: mol_type = unassigned DNA
agtggctttttggaggtgtctcggccatgacacacatttgacatgccctccctcaacctacttatagactatttttcttgctctgcagcatggaccaaagagaaattctgcagaagttcctggatgaggcccaaagcaagaaaattactaaagaggagtttgccaatgaatttctgaagctgaaaaggcaatctaccaagtacaaggcagacaaaacctatcctacaactgtggctgagaagcccaagaatatcaagaaaaacagatataaggatattttgccctatgattatagccgggtagaactatccctgataacctctgatgaggattccagctacatcaatgccaacttcattaagggagtttatggacccaaggcttatattgccacccagggtcctttatctacaaccctcctggacttctggaggatgatttgggaatatagtgtccttatcattgttatggcatgcatggagtatgaaatgggaaaggaagctgaaaaaaggaaatctgattatataatcaggactctaaaagttaagttcaatagtgtatctgtaattcttgcccaccaaacaagcctgcagaatctgttcagtcaaataactccagctcatttctgaattttggttttgcaaaccgtttttcaaaacccaaaggaccaaggaatccaccaccaacttggaatatttaataaaactccagatttataataatatgggctgcaagtacacctgcaaataaaactactagaatactgctagttaaaataagtgctctatatgcataatatcaaatatgaagatatgctaatgtgttaatagcttttaaaagaaaagcaaaatgccaataagtgccagttttgcattttcatatcatttgcattgagttgaaaactgcaaataaaagtttgtcacttgagcttatgtacagaatgctatatgagaaacacttttagaatggatttatttttcatttttgccagttatttttattttcttttacttttctacataaacataaacttcaaaaggtttgtaagatttggatctcaactaatttctacattgccagaatatactataaaaagttaaaaaaaaaacttactttgtgggttgcaatacaaactgctcttgacaatgactattccctgacagttatttttgcctaaatggagtataccttgtaaatcttcccaaatgttgtggaaaactggaatattaagaaaatgagaaattatatttattagaataaaatgtgcaaataatgacaattatttgaatgtaacaaggaattcaactgaaatcctgataagttttaaccaaagtcattaaattaccaattctagaaaagtaatcaatgaaatataatagctatcttttggtagcaaaagatataaattgtatatgtttatacaggatctttcagatcatgtgcaatttttatctaaccaatcagaaatactagtttaaaatgaatttctatatgaatatggatctgccataagaaaatctagttcaactctaattttatgtagtaaataaattggcaggtaattgtttttacaaagaatccacctgacttcccctaatgcattaaaaatatttttatttaaataactttatttataacttttagaaacatgtagtattgtttaaacatcatttgttcttcagtatttttcatttggaagtccaatagggcaaattgaatgaagtattattatctgtctcttgtagtacaatgtatccaacagacactcaataaactttttggttgttaaactga

SEQ ID NO: 16881 - DNA, 3654 bp, Homo sapiens
  source 1..3654: mol_type = unassigned DNA
gaagtcagtaaaccacagccttcagcatgctctgctcaggcggcagcagtggctttttggaggtgtctcggccatgacacacatttgacatgccctccctcaacctacttatagactatttttcttgctctgcagcatggaccaaagagaaattctgcagaagttcctggatgaggcccaaagcaagaaaattactaaagaggagtttgccaatgaatttctgaagctgaaaaggcaatctaccaagtacaaggcagacaaaacctatcctacaactgtggctgagaagcccaagaatatcaagaaaaacagatataaggatattttgccctatgattatagccgggtagaactatccctgataacctctgatgaggattccagctacatcaatgccaacttcattaagggagtttatggacccaaggcttatattgccacccagggtcctttatctacaaccctcctggacttctggaggatgatttgggaatatagtgtccttatcattgttatggcatgcatggagtatgaaatgggaaagaaaaagtgtgagcgctactgggctgagccaggagagatgcagctggaatttggccctttctctgtatcctgtgaagctgaaaaaaggaaatctgattatataatcaggactctaaaagttaagttcaatagtgaaactcgaactatctaccagtttcattacaagaattggccagaccatgatgtaccttcatctatagaccctattcttgagctcatctgggatgtacgttgttaccaagaggatgacagtgttcccatatgcattcactgcagtgctggctgtggaaggactggtgttatttgtgctattgattatacatggatgttgctaaaagatgggataattcctgagaacttcagtgttttcagtttgatccgggaaatgcggacacagaggccttcattagttcaaacgcaggaacaatatgaactggtctacaatgctgtattagaactatttaagagacagatggatgttatcagagataaacattctggaacagagagtcaagcaaagcattgtattcctgagaaaaatcacactctccaagcagactcttattctcctaatttaccaaaaagtaccacaaaagcagcaaaaatgatgaaccaacaaaggacaaaaatggaaatcaaagaatcttcttcctttgactttaggacttctgaaataagtgcaaaagaagagctagttttgcaccctgctaaatcaagcacttcttttgactttctggagctaaattacagttttgacaaaaatgctgacacaaccatgaaatggcagacaaaggcatttccaatagttggggagcctcttcagaagcatcaaagtttggatttgggctctcttttgtttgagggatgttctaattctaaacctgtaaatgcagcaggaagatattttaattcaaaggtgccaataacacggaccaaatcaactccttttgaattgatacagcagagagaaaccaaggaggtggacagcaaggaaaacttttcttatttggaatctcaaccacatgattcttgttttgtagagatgcaggctcaaaaagtaatgcatgtttcttcagcagaactgaattattcactgccatatgactctaaacaccaaatacgtaatgcctctaatgtaaagcaccatgactctagtgctcttggtgtatattcttacatacctttagtggaaaatccttatttttcatcatggcctccaagtggtaccagttctaagatgtctcttgatttacctgagaagcaagatggaactgtttttccttcttctctgttgccaacatcctctacatccctcttctcttattacaattcacatgattctttatcactgaattctccaaccaatatttcctcactattgaaccaggagtcagctgtactagcaactgctccaaggatagatgatgaaatcccccctccacttcctgtatggacacctgaatcatttattgtggttgaggaagctggagaattctcaccaaatgttcccaaatccttatcctcagctgtgaaggtaaaaattggaacatcactggaatggggtggaacatctgaaccaaagaaatttgatgactctgtgatacttagaccaagcaagagtgtaaaactccgaagtcctaaatcagaactacatcaagatcgttcttctcccccacctcctctcccagaaagaactctagagtccttctttcttgccgatgaagattgtatgcaggcccaatctatagaaacatattctactagctatcctgacaccatggaaaattcaacatcttcaaaacagacactgaagactcctggaaaaagtttcacaaggagtaagagtttgaaaattttgcgaaacatgaaaaagagtatctgtaattcttgcccaccaaacaagcctgcagaatctgttcagtcaaataactccagctcatttctgaattttggttttgcaaaccgtttttcaaaacccaaaggaccaaggaatccaccaccaacttggaatatttaataaaactccagatttataataatatgggctgcaagtacacctgcaaataaaactactagaatactgctagttaaaataagtgctctatatgcataatatcaaatatgaagatatgctaatgtgttaatagcttttaaaagaaaagcaaaatgccaataagtgccagttttgcattttcatatcatttgcattgagttgaaaactgcaaataaaagtttgtcacttgagcttatgtacagaatgctatatgagaaacacttttagaatggatttatttttcatttttgccagttatttttattttcttttacttttctacataaacataaacttcaaaaggtttgtaagatttggatctcaactaatttctacattgccagaatatactataaaaagttaaaaaaaaaacttactttgtgggttgcaatacaaactgctcttgacaatgactattccctgacagttatttttgcctaaatggagtataccttgtaaatcttcccaaatgttgtggaaaactggaatattaagaaaatgagaaattatatttattagaataaaatgtgcaaataatgacaattatttgaatgtaacaaggaattcaactgaaatcctgataagttttaaccaaagtcattaaattaccaattctagaaaagtaatcaatgaaatataatagctatcttttggtagcaaaagatataaattgtatatgtttatacaggatctttcagatcatgtgcaatttttatctaaccaatcagaaatactagtttaaaatgaatttctatatgaatatggatctgccataagaaaatctagttcaactctaattttatgtagtaaataaattggcaggtaattgtttttacaaagaatccacctgacttcccctaatgcattaaaaatatttttatttaaataactttatttataacttttagaaacatgtagtattgtttaaacatcatttgttcttcagtatttttcatttggaagtccaatagggcaaattgaatgaagtattattatctgtctcttgtagtacaatgtatccaacagacactcaataaactttttggttgttaaactga

SEQ ID NO: 16882 - DNA, 3424 bp, Homo sapiens
  source 1..3424: mol_type = unassigned DNA
ggtgtctcggccatgacacacatttgacatgccctccctcaacctacttatagactatttttcttgctctgcagcatggaccaaagagaaattctgcagaagttcctggatgaggcccaaagcaagaaaattactaaagaggagtttgccaatgaatttctgaagctgaaaaggcaatctaccaagtacaaggcagacaaaacctatcctacaactgtggctgagaagcccaagaatatcaagaaaaacagatataaggatattttgccctatgattatagccgggtagaactatccctgataacctctgatgaggattccagctacatcaatgccaacttcattaagggagtttatggacccaaggcttatattgccacccagggtcctttatctacaaccctcctggacttctggaggatgatttgggaatatagtgtccttatcattgttatggcatgcatggagtatgaaatgggaaagaaaaagtgtgagcgctactgggctgagccaggagagatgcagctggaatttggccctttctctgtatcctgtgaagctgaaaaaaggaaatctgattatataatcaggactctaaaagttaagttcaatagtgaaactcgaactatctaccagtttcattacaagaattggccagaccatgatgtaccttcatctatagaccctattcttgagctcatctgggatgtacgttgttaccaagaggatgacagtgttcccatatgcattcactgcagtgctggctgtggaaggactggtgttatttgtgctattgattatacatggatgttgctaaaagatgggagtcaagcaaagcattgtattcctgagaaaaatcacactctccaagcagactcttattctcctaatttaccaaaaagtaccacaaaagcagcaaaaatgatgaaccaacaaaggacaaaaatggaaatcaaagaatcttcttcctttgactttaggacttctgaaataagtgcaaaagaagagctagttttgcaccctgctaaatcaagcacttcttttgactttctggagctaaattacagttttgacaaaaatgctgacacaaccatgaaatggcagacaaaggcatttccaatagttggggagcctcttcagaagcatcaaagtttggatttgggctctcttttgtttgagggatgttctaattctaaacctgtaaatgcagcaggaagatattttaattcaaaggtgccaataacacggaccaaatcaactccttttgaattgatacagcagagagaaaccaaggaggtggacagcaaggaaaacttttcttatttggaatctcaaccacatgattcttgttttgtagagatgcaggctcaaaaagtaatgcatgtttcttcagcagaactgaattattcactgccatatgactctaaacaccaaatacgtaatgcctctaatgtaaagcaccatgactctagtgctcttggtgtatattcttacatacctttagtggaaaatccttatttttcatcatggcctccaagtggtaccagttctaagatgtctcttgatttacctgagaagcaagatggaactgtttttccttcttctctgttgccaacatcctctacatccctcttctcttattacaattcacatgattctttatcactgaattctccaaccaatatttcctcactattgaaccaggagtcagctgtactagcaactgctccaaggatagatgatgaaatcccccctccacttcctgtatggacacctgaatcatttattgtggttgaggaagctggagaattctcaccaaatgttcccaaatccttatcctcagctgtgaaggtaaaaattggaacatcactggaatggggtggaacatctgaaccaaagaaatttgatgactctgtgatacttagaccaagcaagagtgtaaaactccgaagtcctaaatcagaactacatcaagatcgttcttctcccccacctcctctcccagaaagaactctagagtccttctttcttgccgatgaagattgtatgcaggcccaatctatagaaacatattctactagctatcctgacaccatggaaaattcaacatcttcaaaacagacactgaagactcctggaaaaagtttcacaaggagtaagagtttgaaaattttgcgaaacatgaaaaagagtatctgtaattcttgcccaccaaacaagcctgcagaatctgttcagtcaaataactccagctcatttctgaattttggttttgcaaaccgtttttcaaaacccaaaggaccaaggaatccaccaccaacttggaatatttaataaaactccagatttataataatatgggctgcaagtacacctgcaaataaaactactagaatactgctagttaaaataagtgctctatatgcataatatcaaatatgaagatatgctaatgtgttaatagcttttaaaagaaaagcaaaatgccaataagtgccagttttgcattttcatatcatttgcattgagttgaaaactgcaaataaaagtttgtcacttgagcttatgtacagaatgctatatgagaaacacttttagaatggatttatttttcatttttgccagttatttttattttcttttacttttctacataaacataaacttcaaaaggtttgtaagatttggatctcaactaatttctacattgccagaatatactataaaaagttaaaaaaaaaacttactttgtgggttgcaatacaaactgctcttgacaatgactattccctgacagttatttttgcctaaatggagtataccttgtaaatcttcccaaatgttgtggaaaactggaatattaagaaaatgagaaattatatttattagaataaaatgtgcaaataatgacaattatttgaatgtaacaaggaattcaactgaaatcctgataagttttaaccaaagtcattaaattaccaattctagaaaagtaatcaatgaaatataatagctatcttttggtagcaaaagatataaattgtatatgtttatacaggatctttcagatcatgtgcaatttttatctaaccaatcagaaatactagtttaaaatgaatttctatatgaatatggatctgccataagaaaatctagttcaactctaattttatgtagtaaataaattggcaggtaattgtttttacaaagaatccacctgacttcccctaatgcattaaaaatatttttatttaaataactttatttataacttttagaaacatgtagtattgtttaaacatcatttgttcttcagtatttttcatttggaagtccaatagggcaaattgaatgaagtattattatctgtctcttgtagtacaatgtatccaacagacactcaataaactttttggttgttaaa

SEQ ID NO: 16883 - DNA, 562 bp, Homo sapiens
  source 1..562: mol_type = unassigned DNA
tacaaatgagaatattatagtgtcaacccatttgtaagcacctacattttgttaacatttgacagtgatatgtttatttgggattattaattactcttaacaattatatgtgatctgatcaacagtcatctgagtctgtctttagtctttcccttatatttttttcttttgattctaggtatctgtaattcttgcccaccaaacaagcctgcagaatctgttcagtcaaataactccagctcatttctgaattttggttttgcaaaccgtttttcaaaacccaaaggaccaaggaatccaccaccaacttggaatatttaataaaactccagatttataataatatgggctgcaagtacacctgcaaataaaactactagaatactgctagttaaaataagtgctctatatgcataatatcaaatatgaagatatgctaatgtgttaatagcttttaaaagaaaagcaaaatgccaataagtgccagttttgcattttcatatcatttgcattgagttgaaaactgcaaataaaagtttgtcacttgagcttatgtacagaa

SEQ ID NO: 16884 - DNA, 2421 bp, Homo sapiens
  source 1..2421: mol_type = unassigned DNA
gctttttggaggtgtctcggccatgacacacatttgacatgccctccctcaacctacttatagactatttttcttgctctgcagcatggaccaaagagaaattctgcagaagttcctggatgaggcccaaagcaagaaaattactaaagaggagtttgccaatgaatttctgaagctgaaaaggcaatctaccaagtacaaggcagacaaaacctatcctacaactgtggctgagaagcccaagaatatcaagaaaaacagatataaggatattttgccctatgattatagccgggtagaactatccctgataacctctgatgaggattccagctacatcaatgccaacttcattaagggagtttatggacccaaggcttatattgccacccagggtcctttatctacaaccctcctggacttctggaggatgatttgggaatatagtgtcctttgctggctgtggaaggactggtgttatttgtgctattgattatacatggatgttgctaaaagatgggataattcctgagaacttcagtgttttcagtttgatccgggaaatgcggacacagaggccttcattagttcaaacgcaggaacaatatgaactggtctacaatgctgtattagaactatttaagagacagatggatgttatcagagataaacattctggaacagagagtcaagcaaagcattgtattcctgagaaaaatcacactctccaagcagactcttattctcctaatttaccaaaaagtaccacaaaagcagcaaaaatgatgaaccaacaaaggacaaaaatggaaatcaaagaatcttcttcctttgactttaggacttctgaaataagtgcaaaagaagagctagttttgcaccctgctaaatcaagcacttcttttgactttctggagctaaattacagttttgacaaaaatgctgacacaaccatgaaatggcagacaaaggcatttccaatagttggggagcctcttcagaagcatcaaagtttggatttgggctctcttttgtttgagggatgttctaattctaaacctgtaaatgcagcaggaagatattttaattcaaaggtgccaataacacggaccaaatcaactccttttgaattgatacagcagagagaaaccaaggaggtggacagcaaggaaaacttttcttatttggaatctcaaccacatgattcttgttttgtagagatgcaggctcaaaaagtaatgcatgtttcttcagcagaactgaattattcactgccatatgactctaaacaccaaatacgtaatgcctctaatgtaaagcaccatgactctagtgctcttggtgtatattcttacatacctttagtggaaaatccttatttttcatcatggcctccaagtggtaccagttctaagatgtctcttgatttacctgagaagcaagatggaactgtttttccttcttctctgttgccaacatcctctacatccctcttctcttattacaattcacatgattctttatcactgaattctccaaccaatatttcctcactattgaaccaggagtcagctgtactagcaactgctccaaggatagatgatgaaatcccccctccacttcctgtatggacacctgaatcatttattgtggttgaggaagctggagaattctcaccaaatgttcccaaatccttatcctcagctgtgaaggtaaaaattggaacatcactggaatggggtggaacatctgaaccaaagaaatttgatgactctgtgatacttagaccaagcaagagtgtaaaactccgaagtcctaaatcagaactacatcaagatcgttcttctcccccacctcctctcccagaaagaactctagagtccttctttcttgccgatgaagattgtatgcaggcccaatctatagaaacatattctactagctatcctgacaccatggaaaattcaacatcttcaaaacagacactgaagactcctggaaaaagtttcacaaggagtaagagtttgaaaattttgcgaaacatgaaaaagagtatctgtaattcttgcccaccaaacaagcctgcagaatctgttcagtcaaataactccagctcatttctgaattttggttttgcaaaccgtttttcaaaacccaaaggaccaaggaatccaccaccaacttggaatatttaataaaactccagatttataataatatgggctgcaagtacacctgcaaataaaactactagaatactgctagttaaaataagtgctctatatgcataatatcaaatatgaagatatgctaatgtgttaatagcttttaaaagaaaagcaaaatgccaataagtgccagttttgcattttcatatcatttgcattgagttgaaaactgcaaataaaagtttgtcacttg

SEQ ID NO: 16885 - DNA, 2726 bp, Homo sapiens
  source 1..2726: mol_type = unassigned DNA
agtggctttttggaggtgtctcggccatgacacacatttgacatgccctccctcaacctacttatagactatttttcttgctctgcagcatggaccaaagagaaattctgcagaagttcctggatgaggcccaaagcaagaaaattactaaagaggagtttgccaatgaatttctgaagctgaaaaggcaatctaccaagtacaaggcagacaaaacctatcctacaactgtggctgagaagcccaagaatatcaagaaaaacagatataaggatattttgccctatgattatagccgggtagaactatccctgataacctctgatgaggattccagctacatcaatgccaacttcattaagggagtttatggacccaaggcttatattgccacccagggtcctttatctacaaccctcctggacttctggaggatgatttgggaatatagtgtccttatcattgttatggcatgcatggagtatgaaatgggaaagaaaaagtgtgagcgctactgggctgagccaggagagatgcagctggaatttggccctttctctgtatcctgtgaagctgaaaaaaggaaatctgattatataatcaggactctaaaagttaagttcaatagtgaaactcgaactatctaccagtttcattacaagaattggccagaccatgatgtaccttcatctatagaccctattcttgagctcatctgggatgtacgttgttaccaagaggatgacagtgttcccatatgcattcactgcagtgctggctgtggaaggactggtgttatttgtgctattgattatacatggatgttgctaaaagatgggataattcctgagaacttcagtgttttcagtttgatccgggaaatgcggacacagaggccttcattagttcaaacgcaggaacaatatgaactggtctacaatgctgtattagaactatttaagagacagatggatgttatcagagataaacattctggaacagagagtcaagcaaagcattgtattcctgagaaaaatcacactctccaagcagactcttattctcctaatttaccaaaaagtaccacaaaagcagcaaaaatgatgaaccaacaaaggacaaaaatggaaatcaaagaatcttcttcctttgactttaggacttctgaaataagtgcaaaagaagagctagttttgcaccctgctaaatcaagcacttcttttgactttctggagctaaattacagttttgacaaaaatgctgacacaaccatgaaatggcagacaaaggcatttccaatagttggggagcctcttcagaagcatcaaagtttggatttgggctctcttttgtttgagggatgttctaattctaaacctgtaaatgcagcaggaagatattttaattcaaaggtgccaataacacggaccaaatcaactccttttgaattgatacagcagagagaaaccaaggaggtggacagcaaggaaaacttttcttatttggaatctcaaccacatgattcttgttttgtagagatgcaggctcaaaaagtaatgcatgtttcttcagcagaactgaattattcactgccatatgactctaaacaccaaatacgtaatgcctctaatgtaaagcaccatgactctagtgctcttggtgtatattcttacatacctttagtggaaaatccttatttttcatcatggcctccaagtggtaccagttctaagatgtctcttgatttacctgagaagcaagatggaactgtttttccttcttctctgttgccaacatcctctacatccctcttctcttattacaattcacatgattctttatcactgaattctccaaccaatatttcctcactattgaaccaggagtcagctgtactagcaactgctccaaggatagatgatgaaatcccccctccacttcctgtatggacacctgaatcatttattgtggttgaggaagctggagaattctcaccaaatgttcccaaatccttatcctcagctgtgaaggtaaaaattggaacatcactggaatggggtggaacatctgaaccaaagaaatttgatgactctgtgatacttagaccaagcaagagtgtaaaactccgaagtcctaaatcagaactacatcaagatcgttcttctcccccacctcctctcccagaaagaactctagagtccttctttcttgccgatgaagattgtatgcaggcccaatctatagaaacatattctactagctatcctgacaccatggaaaattcaacatcttcaaaacagacactgaagactcctggaaaaagtttcacaaggagtaagagtttgaaaattttgcgaaacatgaaaaagagtatctgtaattcttgcccaccaaacaagcctgcagaatctgttcagtcaaataactccagctcatttctgaattttggtatgtgtgttattttactgaagagttaaaaaaattacctaaattactcatttacagtataactgattcaactttaaatatgattttaggttgcatgtataggtccttatgtttatattcttttccatgcaatttatctttttatttttaaccttaactacctcttaacatctcacacagaactaaattatctagtatatgtggaaaataaagctaggtaaccaaattattgtgttggcatgtagtaaataaatatgactatccaaatggagaaattg

SEQ ID NO: 16886 - DNA, 2118 bp, Homo sapiens
  source 1..2118: mol_type = unassigned DNA
agtggctttttggaggtgtctcggccatgacacacatttgacatgccctccctcaacctacttatagactatttttcttgctctgcagcatggaccaaagagaaattctgcagaagttcctggatgaggcccaaagcaagaaaattactaaagaggagtttgccaatgaatttctgaagctgaaaaggcaatctaccaagtacaaggcagacaaaacctatcctacaactgtggctgagaagcccaagaatatcaagaaaaacagatataaggatattttgccctatgattatagccgggtagaactatccctgataacctctgatgaggattccagctacatcaatgccaacttcattaagggagtttatggacccaaggcttatattgccacccagggtcctttatctacaaccctcctggacttctggaggatgatttgggaatatagtgtccttataattcctgagaacttcagtgttttcagtttgatccgggaaatgcggacacagaggccttcattagttcaaacgcaggaacaatatgaactggtctacaatgctgtattagaactatttaagagacagatggatgttatcagagataaacattctggaacagagagtcaagcaaagcattgtattcctgagaaaaatcacactctccaagcagactcttattctcctaatttaccaaaaagtaccacaaaagcagcaaaaatgatgaaccaacaaaggacaaaaatggaaatcaaagaatcttcttcctttgactttaggacttctgaaataagtgcaaaagaagagctagttttgcaccctgctaaatcaagcacttcttttgactttctggagctaaattacagttttgacaaaaatgctgacacaaccatgaaatggcagacaaaggcatttccaatagttggggagcctcttcagaagcatcaaagtttggatttgggctctcttttgtttgagggatgttctaattctaaacctgtaaatgcagcaggaagatattttaattcaaaggtgccaataacacggaccaaatcaactccttttgaattgatacagcagagagaaaccaaggaggtggacagcaaggaaaacttttcttatttggaatctcaaccacatgattcttgttttgtagagatgcaggctcaaaaagtaatgcatgtttcttcagcagaactgaattattcactgccatatgactctaaacaccaaatacgtaatgcctctaatgtaaagcaccatgactctagtgctcttggtgtatattcttacatacctttagtggaaaatccttatttttcatcatggcctccaagtggtaccagttctaagatgtctcttgatttacctgagaagcaagatggaactgtttttccttcttctctgttgccaacatcctctacatccctcttctcttattacaattcacatgattctttatcactgaattctccaaccaatatttcctcactattgaaccaggagtcagctgtactagcaactgctccaaggatagatgatgaaatcccccctccacttcctgtatggacacctgaatcatttattgtggttgaggaagctggagaattctcaccaaatgttcccaaatccttatcctcagctgtgaaggtaaaaattggaacatcactggaatggggtggaacatctgaaccaaagaaatttgatgactctgtgatacttagaccaagcaagagtgtaaaactccgaagtcctaaatcagaactacatcaagatcgttcttctcccccacctcctctcccagaaagaactctagagtccttctttcttgccgatgaagattgtatgcaggcccaatctatagaaacatattctactagctatcctgacaccatggaaaattcaacatcttcaaaacagacactgaagactcctggaaaaagtttcacaaggagtaagagtttgaaaattttgcgaaacatgaaaaagagtatctgtaattcttgcccaccaaacaagcctgcagaatctgttcagtcaaataactccagctcatttctgaattttggtatgtgtgttattttactgaagagttaaaaaaattacctaaattactcat

SEQ ID NO: 16887 - DNA, 2258 bp, Homo sapiens
  source 1..2258: mol_type = unassigned DNA
tccctcaacctacttatagactatttttcttgctctgcagcatggaccaaagagaaattctgcagaagttcctggatgaggcccaaagcaagaaaattactaaagaggagtttgccaatgaatttctgaagctgaaaaggcaatctaccaagtacaaggcagacaaaacctatcctacaactgtggctgagaagcccaagaatatcaagaaaaacagatataaggatattttgccctatgattatagccgggtagaactatccctgataacctctgatgaggattccagctacatcaatgccaacttcattaagggagtttatggacccaaggcttatattgccacccagggtcctttatctacaaccctcctggacttctggaggatgatttgggaatatagtgtccttatcattgttatggcatgcatggagtatgaaatgggaaagaaaaagtgtgagcgctactgggctgagccaggagagatgcagctggaatttggccctttctctgtatcctgtgaagctgaaaaaaggaaatctgattatataatcaggactctaaaagttaagttcaatagtgaaactcgaactatctaccagtttcattacaagaattggccagaccatgatgtaccttcatctatagaccctattcttgagctcatctgggatgtacgttgttaccaagaggatgacagtgttcccatatgcattcactgcagtgctggctgtggaaggactggtgttatttgtgctattgattatacatggatgttgctaaaagatgggataattcctgagaacttcagtgttttcagtttgatccgggaaatgcggacacagaggccttcattagttcaaacgcaggaacaatatgaactggtctacaatgctgtattagaactatttaagagacagatggatgttatcagagataaacattctggaacagagagtcaagcaaagcattgtattcctgagaaaaatcacactctccaagcagactcttattctcctaatttaccaaaaagtaccacaaaagcagcaaaaatgatgaaccaacaaaggacaaaaatggaaatcaaagaatcttcttcctttgactttaggacttctgaaataagtgcaaaagaagagctagttttgcaccctgctaaatcaagcacttcttttgactttctggagctaaattacagttttgacaaaaatgctgacacaaccatgaaatggcagacaaaggcatttccaatagttggggagcctcttcagaagcatcaaagtttggatttgggctctcttttgtttgagggatgttctaattctaaacctgtaaatgcagcaggaagatattttaattcaaaggtgccaataacacggaccaaatcaactccttttgaattgatacagcagagagaaaccaaggaggtggacagcaaggaaaacttttcttatttggaatctcaaccacatgattcttgttttgtagagatgcaggctcaaaaagtaatgcatgtttcttcagcagaactgaattattcactgccatatgactctaaacaccaaatacgtaatgcctctaatgtaaagcaccatgactctagtgctcttggtgtatattcttacatacctttagtggaaaatccttatttttcatcatggcctccaagtggtaccagttctaagatgtctcttgatttacctgagaagcaagatggaactgtttttccttcttctctgttgccaacatcctctacatccctcttctcttattacaattcacatgattctttatcactgaattctccaaccaatatttcctcactattgaaccaggagtcagctgtactagcaactgctccaaggatagatgatgaaatcccccctccacttcctgtatggacacctgaatcatttattgtggttgaggaagctggagaattctcaccaaatgttcccaaatccttatcctcagctgtgaaggtaaaaattggaacatcactggaatggggtggaacatctgaaccaaagaaatttgatgactctgtgatacttagaccaagcaagagtgtaaaactccgaagtcctaaatcaggtaaaaatttctcttggctttagatgacatttagccctaagattggaagaatggttcgttaagtttagagtaattcacttcaggaagttacttggttcccataatagcttccagtattcattgatttatttctggctttcccagactagaaattttgtaaagag

SEQ ID NO: 16888 - DNA, 565 bp, Homo sapiens
  source 1..565: mol_type = unassigned DNA
agcatgctctgctcaggcggcagcagtggctttttggaggtgtctcggccatgacacacatttgacatgccctccctcaacctacttatagactatttttcttgctctgcagcatggaccaaagagaaattctgcagaagttcctggatgaggcccaaagcaagaaaattactaaagaggagtttgccaatgaatttctgaagctgaaaaggcaatctaccaagtacaaggcagacaaaacctatcctacaactgtggctgagaagcccaagaatatcaagaaaaacagatataaggatattttgccctatgattatagccgggtagaactatccctgataacctctgatgaggattccagctacatcaatgccaacttcattaagggagtttatggacccaaggcttatattgccacccagggtcctttatctacaaccctcctggacttctggaggatgatttgggaatatagtgtccttatcattgttatggcatgcatggagtatgaaatgggaaagactcccaggaagtctgtaatttatatatcctttaatgtttgttt

SEQ ID NO: 16889 - DNA, 527 bp, Homo sapiens
  source 1..527: mol_type = unassigned DNA
agtaaaccacagccttcagcatgctctgctcaggcggcagcagtggctttttggaggtgtctcggccatgacacacatttgacatgccctccctcaacctacttatagactatttttcttgctctgcagcatggaccaaagagaaattctgcagaagttcctggatgaggcccaaagcaagaaaattactaaagaggagtttgccaatgaatttctgggtcttgctctgtcacccaggctggagtgccgtggcttgatcatagctcactgcagacttgacttcctggactcaagtgatcctccagcctcagcctcccaaagtgctgagattacaaccatgagccaccacacctggccagagaaagctttctggacctctttgaatagatcaaatcttctattaagctgaaaaggcaatctaccaagtacaaggcagacaaaacctatcctacaactgtggctgagaagcccaagaatatcaagaaaaacagatataaggatattttgccctatgattatagccgggt

SEQ ID NO: 16890 - DNA, 3575 bp, Homo sapiens
  source 1..3575: mol_type = unassigned DNA
agtaaaccacagccttcagcatgctctgctcaggcggcagcagtggctttttggaggtgtctcggccatgacacacatttgacatgccctccctcaacctacttatagactatttttcttgctctgcagcatggaccaaagagaaattctgcagaagttcctggatgaggcccaaagcaagaaaattactaaagaggagtttgccaatgaatttctgaagctgaaaaggcaatctaccaagtacaaggcagacaaaacctatcctacaactgtggctgagaagcccaagaatatcaagaaaaacagatataaggatattttgccctatgattatagccgggtagaactatccctgataacctctgatgaggattccagctacatcaatgccaacttcattaagggagtttatggacccaaggcttatattgccacccagggtcctttatctacaaccctcctggacttctggaggatgatttgggaatatagtgtccttatcattgttatggcatgcatggagtatgaaatgggaaaggaagctgaaaaaaggaaatctgattatataatcaggactctaaaagttaagttcaatagtgaaactcgaactatctaccagtttcattacaagaattggccagaccatgatgtaccttcatctatagaccctattcttgagctcatctgggatgtacgttgttaccaagaggatgacagtgttcccatatgcattcactgcagtgctggctgtggaaggactggtgttatttgtgctattgattatacatggatgttgctaaaagatgggataattcctgagaacttcagtgttttcagtttgatccgggaaatgcggacacagaggccttcattagttcaaacgcaggaacaatatgaactggtctacaatgctgtattagaactatttaagagacagatggatgttatcagagataaacattctggaacagagagtcaagcaaagcattgtattcctgagaaaaatcacactctccaagcagactcttattctcctaatttaccaaaaagtaccacaaaagcagcaaaaatgatgaaccaacaaaggacaaaaatggaaatcaaagaatcttcttcctttgactttaggacttctgaaataagtgcaaaagaagagctagttttgcaccctgctaaatcaagcacttcttttgactttctggagctaaattacagttttgacaaaaatgctgacacaaccatgaaatggcagacaaaggcatttccaatagttggggagcctcttcagaagcatcaaagtttggatttgggctctcttttgtttgagggatgttctaattctaaacctgtaaatgcagcaggaagatattttaattcaaaggtgccaataacacggaccaaatcaactccttttgaattgatacagcagagagaaaccaaggaggtggacagcaaggaaaacttttcttatttggaatctcaaccacatgattcttgttttgtagagatgcaggctcaaaaagtaatgcatgtttcttcagcagaactgaattattcactgccatatgactctaaacaccaaatacgtaatgcctctaatgtaaagcaccatgactctagtgctcttggtgtatattcttacatacctttagtggaaaatccttatttttcatcatggcctccaagtggtaccagttctaagatgtctcttgatttacctgagaagcaagatggaactgtttttccttcttctctgttgccaacatcctctacatccctcttctcttattacaattcacatgattctttatcactgaattctccaaccaatatttcctcactattgaaccaggagtcagctgtactagcaactgctccaaggatagatgatgaaatcccccctccacttcctgtatggacacctgaatcatttattgtggttgaggaagctggagaattctcaccaaatgttcccaaatccttatcctcagctgtgaaggtaaaaattggaacatcactggaatggggtggaacatctgaaccaaagaaatttgatgactctgtgatacttagaccaagcaagagtgtaaaactccgaagtcctaaatcagaactacatcaagatcgttcttctcccccacctcctctcccagaaagaactctagagtccttctttcttgccgatgaagattgtatgcaggcccaatctatagaaacatattctactagctatcctgacaccatggaaaattcaacatcttcaaaacagacactgaagactcctggaaaaagtttcacaaggagtaagagtttgaaaattttgcgaaacatgaaaaagagtatctgtaattcttgcccaccaaacaagcctgcagaatctgttcagtcaaataactccagctcatttctgaattttggttttgcaaaccgtttttcaaaacccaaaggaccaaggaatccaccaccaacttggaatatttaataaaactccagatttataataatatgggctgcaagtacacctgcaaataaaactactagaatactgctagttaaaataagtgctctatatgcataatatcaaatatgaagatatgctaatgtgttaatagcttttaaaagaaaagcaaaatgccaataagtgccagttttgcattttcatatcatttgcattgagttgaaaactgcaaataaaagtttgtcacttgagcttatgtacagaatgctatatgagaaacacttttagaatggatttatttttcatttttgccagttatttttattttcttttacttttctacataaacataaacttcaaaaggtttgtaagatttggatctcaactaatttctacattgccagaatatactataaaaagttaaaaaaaaaacttactttgtgggttgcaatacaaactgctcttgacaatgactattccctgacagttatttttgcctaaatggagtataccttgtaaatcttcccaaatgttgtggaaaactggaatattaagaaaatgagaaattatatttattagaataaaatgtgcaaataatgacaattatttgaatgtaacaaggaattcaactgaaatcctgataagttttaaccaaagtcattaaattaccaattctagaaaagtaatcaatgaaatataatagctatcttttggtagcaaaagatataaattgtatatgtttatacaggatctttcagatcatgtgcaatttttatctaaccaatcagaaatactagtttaaaatgaatttctatatgaatatggatctgccataagaaaatctagttcaactctaattttatgtagtaaataaattggcaggtaattgtttttacaaagaatccacctgacttcccctaatgcattaaaaatatttttatttaaataactttatttataacttttagaaacatgtagtattgtttaaacatcatttgttcttcagtatttttcatttggaagtccaatagggcaaattgaatgaagtattattatctgtctcttgtagtacaatgtatccaacagacactcaataaactttttggttgttaaactg

SEQ ID NO: 16891 - DNA, 587 bp, Homo sapiens
  source 1..587: mol_type = unassigned DNA
tcccagcgacttccaatattcatgtttctgagaattgtgtccctcttcaggttccctcttggtgcctaacctggattagtaatgtgcattcaggtgaattttcagctgaggctctgagaactggtactctcagtgtgttctggtcatcttgtggcttagttgtagaagcaggtgtgtctcttgcctctgcttgcctcctactgcacactcagcacccaggactggaatcaccgactactgaatctcctacatgtattgctgctacttcaagctcctccacttgaaaccttatgattttcccaaggggagatgggacagtgtcatctaaatattccgaatgtttggccttctgagaaaagagcttctagtaattgaaccatgggaaacccagcttctggagggttggccgtggggctgtgtacatgtgtgtgcccagggaaatcaactcttttggaggagagtgctctctgctcatctccaccttccctctggtcaggagcatgaactcccatcttggccttgtcctggggtattagtccattctcatgctgctaataaagacatacctgagactgggtaatttatga

SEQ ID NO: 16892 - DNA, 6703 bp, Homo sapiens
  source 1..6703: mol_type = unassigned DNA
gacggcggccaggtcgcgccgcgagcgagcttccgcgccgcccgcacgcgcgacctacctgggcgctccgcgcccccggatgctgcaggttattcagcgatagttatgacctcccggttacgtgcgttgggtggaagaattaataatatacgcacctcggagttacccaaagagaaaactcgatcagaagtcatttgcagcatccactttttagatggcgtggtacagacctttaaagttactaaacaagacactggccaggttcttctggatatggtgcacaaccacctgggtgtgactgaaaaggaatattttggtttacagcatgatgacgactccgtggactctcctagatggctggaagcaagcaaagccatcaggaagcagttaaaaggaggtttcccctgtaccctgcattttcgagtaagattttttatacctgatcccaacacactgcagcaagaacaaaccaggcacttgtatttcttacaactgaagatggatatttgcgaaggaaggttaacctgccctcttaactcagcagtggttctagcgtcctatgccgtacaatctcattttggagactataattcttccatacatcatccaggctatctttccgatagtcactttatacccgatcaaaatgaggactttttaacaaaagtcgaatctctgcatgagcagcacagtgggctaaaacaatcagaagcagaatcctgctatatcaacatagcgcggaccctcgacttctatggagtagaactgcacagtggtagggatctgcacaatttagacctaatgattggaattgcttccgcgggtgttgctgtgtaccgaaaatacatttgcacaagtttctatccttgggtgaacattctcaaaatttctttcaaaaggaaaaagttcttcatacatcagcgacagaaacaggctgaatccagggaacatattgtggccttcaacatgctgaattaccgatcttgcaaaaacttgtggaaatcctgtgttgagcaccatacgttctttcaggcaaagaagctactacctcaggaaaagaatgttctgtctcagtactggactatgggctctcggaacaccaaaaagtcggtaaataaccaatattgcaaaaaggtgattggcgggatggtgtggaacccagccatgcggagatccttatcagtggagcacttagaaaccaagagtctgccttctcgttcccctcccattactcccaactggcgaagtcctcggctccggcacgaaatccgaaagccacgccactcttctgcagataaccttgcaaatgaaatgacctacatcacggaaacggaagatgtattttacacgtacaagggctctctggcccctcaagacagcgattctgaagtttctcagaaccgaagcccgcaccaagagagtttatccgagaacaatccggcacaaagctacctgacccagaagtcatccagttctgtgtctccatcttcaaatgctccaggctcctgctcacctgacggcgttgatcagcagctcttagatgacttccacagggtgaccaaagggggctccaccgaggacgccagccagtactactgtgacaagaatgataatggtgacagctacttagtcttgatccgtatcacaccagatgaagatggaaaatttggatttaatcttaagggaggagtggatcaaaagatgcctcttgtggtatcaaggataaacccagagtcacctgcggacacctgcattcctaagctgaacgaaggggatcaaatcgtgttaatcaatggccgggacatctcagaacacacgcatgaccaagtggtgatgttcatcaaagccagccgggagtcccactcacgggagctggccctggtgatcaggaggagagctgtccgctcatttgctgacttcaagtctgaagatgaactgaaccagcttttccccgaagccattttccccatgtgtccggagggtggggacactttggagggatccatggcacagctaaagaagggcctcgaaagcgggacggtgctgatccagtttgagcaactctacagaaaaaagccaggtttggccatcacgtttgcaaagctgcctcaaaatttggacaaaaaccgatataaagatgtgctgccttatgacaccacccgggtattattgcagggaaatgaagattatattaatgcaagttacgtgaacatggaaattcctgctgctaaccttgtgaacaagtacatcgccactcaggggcccctgccgcatacctgtgcacagttttggcaggttgtctgggatcagaagttgtcactcattgtcatgttgacgactctcacagaacgagggcggaccaaatgtcaccagtactggccagatccccccgacgtcatgaaccacggcggctttcacatccagtgtcagtcagaggactgcaccatcgcctatgtgtcccgagaaatgctggtcacaaacacccagaccggggaagaacacacagtgacacatctccagtacgtcgcatggcctgaccacggtgtgcccgatgactcctccgactttctggaatttgtaaactatgtgaggtctctgagagtggacagcgagcccgtcctagttcactgcagtgctggaataggtcgaaccggtgtgttggtcactatggaaacagccatgtgcctaactgagaggaacctgcccatttacccactggatattgtccgaaaaatgcgagaccagcgcgccatgatggtgcagacatcaagccagtacaagtttgtgtgtgaagcgattcttcgtgtgtatgaagaaggtttagtccaaatgctggatcctagttaagacaactgtgaaaaagttcattcctctttcccaagggcatcctccttgaaagaggaggacagacctctctggaagcagcaagaggaaccagtagctgtgggaaaggaatgggcacctctgaacccaggcactttaaacttctatagaaaagatatcgtgtacataggaactggtgtagataagcatgcaattatggcatcatttaggcctgtatttctatggaaagatacaaaaaggatctcagtttggggcctgtcctaatgccttcttccctaacatcaccacacacacccctgtcggcatcctggagcaattgagaccggacacccacagagctgttgtcctcccagcaacaagatggtgtggttatcttgggtcatttggatgttttgtttgtttctgtgtgtcagactgtaagggctgagctttctgtgcttctaggtggagctggaacaattcagattcacccgccctgatgctaaggaaaccctgacgtatgtactagatggcagggcactgggggtcaggctgaaggctgagcaacacctctctgccctccctccctttgtcccatctcccagcgacttccaatattcatgtttctgagaattgtgtccctcttcaggttccctcttggtgcctaacctggattagtaatgtgcattcaggtgaattttcagctgaggctctgagaactggtactctcagtgtgttctggtcatcttgtggcttagttgtagaagcaggtgtgtctcttgcctctgcttgcctcctactgcacactcagcacccaggactggaatcaccgactactgaatctcctacatgtattgctgctacttcaagctcctccacttgaaaccttatgattttcccaaggggagatgggacagtgtcatctaaatattccgaatgtttggccttctgagaaaagagcttctagtaattgaaccatgggaaacccagcttctggagggttggccgtggggctgtgtacatgtgtgtgcccaggggtgagtgtttctcaggattcctaacgattcaaattaccgttgagtatatataaagaatgagtctctgtatggaagaacaaatgtgtgcattcacccccagtcacaatggtctccattgcatttcaaaggagaggatcagactatctgaatataaacacaatctgatgttaatttattctaagaacaccatcattttgattgtcctaaagaattctgcctttgtgaataccgtgttaaatttttttaaatttgtgacaggattgtagcaaattattatttaaggaaaataaattgtgtaaacatttaatgtggtatttttgaacagcggtttttatgtactcagaagaggaagtaaagccaggttcttaatggtatttatagaaaagatgttttcatattataatgcacataaatgaagccattttgatattcagcaaattcggtgccaattgaatagtttgctggtagcaagacggatgaagacctatatgggagattctttatctctagagctagcatatttacttgcatactttgtttcttttccacatggatattttactgctaaatggcagaggtgggagggagatgtcacacagtaccataaccccatattgaaaacaagaaaccaccagaaagtttgcagctaaggggcaggggattcagttcctacgcccactcagcactaactacttgcgggcctggttgcttagaagctctacctctctttcattatctgtaaaatagaaacaatacttaggactttagttggaacatgaggattgaataagatcacgctattcatgtgactttttatcggctagaacagcaacagacactgctgtgggtgagttacttagaaaagtttagttatcagtgattagcccaaaaacacatcagtcaaaaatagaatccactggatttttgtctctctttttagagacagggtctcactgtcgcccaggctggagtacagtggcatgatcattgttcactgcagcctcaaattcctgggctcaagcaatcctcgcacctcagcctcctgagtagccgggactataggcacatgccacctcacctggcttgtgtgtgtgtgtgtgtgtgtgtgtgtgtgtgtgtgtgtgtgtgtgtgtgtgtgtgtgtgtgtagagacaggatcttgatgtgttgcctaggctggtctcaaactcctggcctcaagtgatcttcccacctcagcctccaaaactgttgggattataggcgtgagccactgtgcccagcctaactgggtttttatgagaggaaaatagaaaatgctcttctagaagagagagaacaagagcacaaaataatctggactcacaaaaattcagcaagctccaagaaagggggatggagggaacgctggcaaaaatttaaatgccattaggatatttagcaagttattactgtttggtaaaaatgcatcatcaccctgtgtgcaaaatgcttgcaaagtagtctaaatgtctttggagatgggtgttttactgcttttttccaaaaacaaattgtttattatggttgcagaaatgcagccattacggtcacataaatttctaaaaagcctaccaaaggttgcaagcagtcttctgccactgggcaggccagcagttcagacccagcgaggttgccaggaacaaatccaggaaatactgggaagaacaagacaagagaattacctaaaagagcaaacaattcaagtaaatcctgtagctattaccacttaaaatccgtagctcaagattcctgtttcaccaccttatacacttaagcaattatacttaagcctttttttagtcctaagtgaagaactacatcagaatcaggataagtattttgcctgggaaatttggctgcatatgaatggagaagacatttacatcctatgttctggcactttctgaaagatctaattaaacatgttgatgtgccaatttaatcaagatgagagatccctgctggtgtcaccctctagaacctgcacttggtgttttgactttccagaagaaaaaaatgcaactttggttagggggcagtggttggatcacacagttgtctttcgtttcctaccacagtaattcatatttaaatatgcttttagattagtgtggatactattgctgctgtgttgctacctgacctttttctggggggggtacctcagaaatgagcatttgagggcaagcgaaaaagccctcttcatcctccagaggcaacaaagaggcagcagaaatggggaaagattgtgagaggcagggcttgggtctagacctggacttaggcaagatatgttgccctcaaccctgagttttcttatatgtaaaaagggaaggttgggctggactagatgaggtcaagatttgccattctgggaggctgatattccagagaatcaaaattaatcctaaaccaaagctttatggctgctacagagacatgtcacatttctgagacttgtcaccaagagtttgtccctcagactttggcgctgttgaatgcaaagacaaggatggccaccttctggttcttgcctgttgtcctcagctgagagcagtctcggtaaaggtggcaaagattctgtgacctcagaccggggaccaaatgcttgggagtctgatggccgggctgggccaccattctcatagctctcattctgtttggagcaaccaaaggatttgtgtgaagttatttggaaaaggaccttaactgagcagtaatcttttttctgtatatttggaatgtttttcattctgacctgttctgtcagtgattctactgaaaaacaatttaatcaatataaaaatgttcaagctatgcaa

SEQ ID NO: 16893 - DNA, 781 bp, Homo sapiens
  source 1..781: mol_type = unassigned DNA
gaaagggcccctgcaagaatacttgttaggtttgccagcagtagaatctgcatctgggactgtgcctggaaaggggcactatggaaggtcccaaaattactagcaacgatttcaattcagcaaacctttctgggaaggacacttaggttgagtagaacatagcataagaagtgccaatatagccgggtgcagtgactcacgcctgtaatcccagcactttgggaggtccaggcgggcagatcagttgaggtcaggagtttgagaccagcctggccagcatgagaaaaccctgtctctactaaaaatacaaaaattagccaggcatggtgatgcacacctgtagtcccagctactcggaaggctgaggcacgagaatcgcttgaacctgggaggtggacgttacagtgagccgagatcacgtcactgcactccagcctgggcaacaaagagagaccctgtctcaggaagagaaaaaaaaagtgccacaactctacagaaaaaagccaggtttggccatcacgtttgcaaagctgcctcaaaatttggacaaaaaccgatataaagatgtgctgccttatgacaccacccgggtattattgcagggaaatgaagattatattaatgcaagttacgtgaacatggaaattcctgctgctaaccttgtgaacaagtacatcgccactcaggggcccctgccgcatacctgtgcacagttttggcaggttgtctgggatcagaagttgtcactcattgtcatgttgacgactctcacagaacgagg

SEQ ID NO: 16894 - DNA, 8765 bp, Homo sapiens
  source 1..8765: mol_type = unassigned DNA
gaagggtggtatcccgttgtggagtagaatgtaactatgaccttctgggatttgggcaccagatttatcttactgcaacaggagccatggtgggagccacccccataactcttatagagctggtgggccaccaggactgccagatatatatatatattttttgaaacagggtcttgctatgttgcccagactggcctcaaactcctggactcaaaggatcctccctcagcctcctgagtagctgggattataggcacataccaccacgactagctgccagatcatcttatcttggaccaggcttctaccattaattcacatgctttaaaaaaattaaaaattaaaaaaatgaaaaataaaaaaacttaaaagattttacctatattcctggaacatagttatcttaccccagctttgtagttcctgtttaaggaaattccctctgaaggaaattttagctctcaagagtcaaagaagatgtatagaggtggtatctgttagtttttgtttgtttgttaaggatctaggcagagaggtcattacatttttctgaagttgaggtcacaggtggggtacccacaagagaggtcattacatttctgaagttaggcatcccaggcatctcttctaaagaactatcctgtattctaattgttaaataaatatcttcttcattgtgagcctccacaactgctgtttctgataaatttagatcattctttgcagaattttatatactggcaatctcaaaactaggctccttcaagattcctaggaagtctcccaagctcgggttgggttccactattctagtttctttgtgtatgatgccatggggttgactcagaaactttgctcaatatatgacaaggcagcatttggtgagtggtgatctccacgtttatcttctcatttatatccctaggaagacatactgattagctgagcttgtcaatgaaagcccgggttcaccattggattatctataactctcctttctctttttttctctcagtagcattgtaggaggagagaacacttaattctggttgaatgtcagcttggataaacatagaaacaaactagaaagaactgatgatgttctcctaggtggaaaagatggagattccaataccaaataggtgtgaatcagcaaatgtatgttatactgtctctcaaggccaggtgttcaatacattgtgggtagttaattataatcaaagtaataatattagagttacgacatggatcctaagctttttagccattaaacatataagaaatttgtagcatagtgagtttttttataacatgatcatccaggttaaaataagacacaattgacctcacatatcctatctgagctccgattttgtcatctgtaaaaatggagatagtggtacctaccttacagagttatgaggctgagataagagggaaagttacaaagtagtaccatgtacaaagcccggaactgtgcaaataggaggttgtaatactgtttgaagcattcccatctcaaaaagccagttccttggcctttataaatttgaaggaataatgaaactgatttgtttcaattgtgaaaattatttctctcctgcccctgtgcacttctgccctgtctatattagatttcaagaggtttcccttttgtcatcttggccagacaatggaatgtctatcccgtttgaatctgggtttaaaaaagcatgggagctagtggccaagtgtcacatgtatgccgcatccctaaatagaagtctccccagggcgcttcctgacctgcgcaatgctgccgaaggcctcctttccccgctccccaggcagaggagcaaagtcacaggctgaggggcctgccacgacttgcccacaaaacaggtctggagtttggaagttacatttgctggttgcccagagatgagtgcagaattcagcttggaggtcctggaaacttctagtttactgatgtttatgcttttgctcatgcacccacagttcctgggacacagaatgctcacctgggggtttgtaccccagccaagaaggtgtcttcacagactcccctccttttagcaacttcatgcagatggagcttgggtggatggatcctggcacagtgttcagaacagtggccctgccagtgtgtgggcgccgcttgtgcagagcccctgtgggttctggtcctcaagggcaggggcgctcactgacagcggaacccatagtaccagcccatctttggtgggctgtttccaccccattcatccctgctcagctcttcataggacagcctgtgctggcagaaaattgcccccaccagtcaagacgtagggcatcaacatgagccatcagtaatgacagggcagctttgcagagcgtaaggtagcacctgataccttggaccaaaaccgtatttttatgtatctttcacatgtacagctcttgtctttgactcatcaaactttcttttttttttttttttgcttatttcagtttgagtatgaattaatgaaaacaattgtttcataggcacttgtatttcttacaactgaagatggatatttgcgaaggaaggttaacctgccctcttaactcagcagtggttctagcgtcctatgccgtacaatctcattttggagactataattcttccatacatcatccaggctatctttccgatagtcactttatacccgatcaaaatgaggactttttaacaaaagtcgaatctctgcatgagcagcacagtgggctaaaacaatcagaagcagaatcctgctatatcaacatagcgcggaccctcgacttctatggagtagaactgcacagtggtagggatctgcacaatttagacctaatgattggaattgcttccgcgggtgttgctgtgtaccgaaaatacatttgcacaagtttctatccttgggtgaacattctcaaaatttctttcaaaaggaaaaagttcttcatacatcagcgacagaaacaggctgaatccagggaacatattgtggccttcaacatgctgaattaccgatcttgcaaaaacttgtggaaatcctgtgttgagcaccatacgttctttcaggcaaagaagctactacctcaggaaaagaatgttctgtctcagtactggactatgggctctcggaacaccaaaaagtcggtaaataaccaatattgcaaaaaggtgattggcgggatggtgtggaacccagccatgcggagatccttatcagtggagcacttagaaaccaagagtctgccttctcgttcccctcccattactcccaactggcgaagtcctcggctccggcacgaaatccgaaagccacgccactcttctgcagataaccttgcaaatgaaatgacctacatcacggaaacggaagatgtattttacacgtacaagggctctctggcccctcaagacagcgattctgaagtttctcagaaccgaagcccgcaccaagagagtttatccgagaacaatccggcacaaagctacctgacccagaagtcatccagttctgtgtctccatcttcaaatgctccaggctcctgctcacctgacggcgttgatcagcagctcttagatgacttccacagggtgaccaaagggggctccaccgaggacgccagccagtactactgtgacaagaatgataatggtgacagctacttagtcttgatccgtatcacaccagatgaagatggaaaatttggatttaatcttaagggaggagtggatcaaaagatgcctcttgtggtatcaaggataaacccagagtcacctgcggacacctgcattcctaagctgaacgaaggggatcaaatcgtgttaatcaatggccgggacatctcagaacacacgcatgaccaagtggtgatgttcatcaaagccagccgggagtcccactcacgggagctggccctggtgatcaggaggagagctgtccgctcatttgctgacttcaagtctgaagatgaactgaaccagcttttccccgaagccattttccccatgtgtccggagggtggggacactttggagggatccatggcacagctaaagaagggcctcgaaagcgggacggtgctgatccagtttgagcaactctacagaaaaaagccaggtttggccatcacgtttgcaaagctgcctcaaaatttggacaaaaaccgatataaagatgtgctgccttatgacaccacccgggtattattgcagggaaatgaagattatattaatgcaagttacgtgaacatggaaattcctgctgctaaccttgtgaacaagtacatcgccactcaggggcccctgccgcatacctgtgcacagttttggcaggttgtctgggatcagaagttgtcactcattgtcatgttgacgactctcacagaacgagggcggaccaaatgtcaccagtactggccagatccccccgacgtcatgaaccacggcggctttcacatccagtgtcagtcagaggactgcaccatcgcctatgtgtcccgagaaatgctggtcacaaacacccagaccggggaagaacacacagtgacacatctccagtacgtcgcatggcctgaccacggtgtgcccgatgactcctccgactttctggaatttgtaaactatgtgaggtctctgagagtggacagcgagcccgtcctagttcactgcagtgctggaataggtcgaaccggtgtgttggtcactatggaaacagccatgtgcctaactgagaggaacctgcccatttacccactggatattgtccgaaaaatgcgagaccagcgcgccatgatggtgcagacatcaagccagtacaagtttgtgtgtgaagcgattcttcgtgtgtatgaagaaggtttagtccaaatgctggatcctagttaagacaactgtgaaaaagttcattcctctttcccaagggcatcctccttgaaagaggaggacagacctctctggaagcagcaagaggaaccagtagctgtgggaaaggaatgggcacctctgaacccaggcactttaaacttctatagaaaagatatcgtgtacataggaactggtgtagataagcatgcaattatggcatcatttaggcctgtatttctatggaaagatacaaaaaggatctcagtttggggcctgtcctaatgccttcttccctaacatcaccacacacacccctgtcggcatcctggagcaattgagaccggacacccacagagctgttgtcctcccagcaacaagatggtgtggttatcttgggtcatttggatgttttgtttgtttctgtgtgtcagactgtaagggctgagctttctgtgcttctaggtggagctggaacaattcagattcacccgccctgatgctaaggaaaccctgacgtatgtactagatggcagggcactgggggtcaggctgaaggctgagcaacacctctctgccctccctccctttgtcccatctcccagcgacttccaatattcatgtttctgagaattgtgtccctcttcaggttccctcttggtgcctaacctggattagtaatgtgcattcaggtgaattttcagctgaggctctgagaactggtactctcagtgtgttctggtcatcttgtggcttagttgtagaagcaggtgtgtctcttgcctctgcttgcctcctactgcacactcagcacccaggactggaatcaccgactactgaatctcctacatgtattgctgctacttcaagctcctccacttgaaaccttatgattttcccaaggggagatgggacagtgtcatctaaatattccgaatgtttggccttctgagaaaagagcttctagtaattgaaccatgggaaacccagcttctggagggttggccgtggggctgtgtacatgtgtgtgcccaggggtgagtgtttctcaggattcctaacgattcaaattaccgttgagtatatataaagaatgagtctctgtatggaagaacaaatgtgtgcattcacccccagtcacaatggtctccattgcatttcaaaggagaggatcagactatctgaatataaacacaatctgatgttaatttattctaagaacaccatcattttgattgtcctaaagaattctgcctttgtgaataccgtgttaaatttttttaaatttgtgacaggattgtagcaaattattatttaaggaaaataaattgtgtaaacatttaatgtggtatttttgaacagcggtttttatgtactcagaagaggaagtaaagccaggttcttaatggtatttatagaaaagatgttttcatattataatgcacataaatgaagccattttgatattcagcaaattcggtgccaattgaatagtttgctggtagcaagacggatgaagacctatatgggagattctttatctctagagctagcatatttacttgcatactttgtttcttttccacatggatattttactgctaaatggcagaggtgggagggagatgtcacacagtaccataaccccatattgaaaacaagaaaccaccagaaagtttgcagctaaggggcaggggattcagttcctacgcccactcagcactaactacttgcgggcctggttgcttagaagctctacctctctttcattatctgtaaaatagaaacaatacttaggactttagttggaacatgaggattgaataagatcacgctattcatgtgactttttatcggctagaacagcaacagacactgctgtgggtgagttacttagaaaagtttagttatcagtgattagcccaaaaacacatcagtcaaaaatagaatccactggatttttgtctctctttttagagacagggtctcactgtcgcccaggctggagtacagtggcatgatcattgttcactgcagcctcaaattcctgggctcaagcaatcctcgcacctcagcctcctgagtagccgggactataggcacatgccacctcacctggcttgtgtgtgtgtgtgtgtgtgtgtgtgtgtgtgtgtgtgtgtgtgtgtgtgtgtgtgtgtgtgtagagacaggatcttgatgtgttgcctaggctggtctcaaactcctggcctcaagtgatcttcccacctcagcctccaaaactgttgggattataggcgtgagccactgtgcccagcctaactgggtttttatgagaggaaaatagaaaatgctcttctagaagagagagaacaagagcacaaaataatctggactcacaaaaattcagcaagctccaagaaagggggatggagggaacgctggcaaaaatttaaatgccattaggatatttagcaagttattactgtttggtaaaaatgcatcatcaccctgtgtgcaaaatgcttgcaaagtagtctaaatgtctttggagatgggtgttttactgcttttttccaaaaacaaattgtttattatggttgcagaaatgcagccattacggtcacataaatttctaaaaagcctaccaaaggttgcaagcagtcttctgccactgggcaggccagcagttcagacccagcgaggttgccaggaacaaatccaggaaatactgggaagaacaagacaagagaattacctaaaagagcaaacaattcaagtaaatcctgtagctattaccacttaaaatccgtagctcaagattcctgtttcaccaccttatacacttaagcaattatacttaagcctttttttagtcctaagtgaagaactacatcagaatcaggataagtattttgcctgggaaatttggctgcatatgaatggagaagacatttacatcctatgttctggcactttctgaaagatctaattaaacatgttgatgtgccaatttaatcaagatgagagatccctgctggtgtcaccctctagaacctgcacttggtgttttgactttccagaagaaaaaaatgcaactttggttagggggcagtggttggatcacacagttgtctttcgtttcctaccacagtaattcatatttaaatatgcttttagattagtgtggatactattgctgctgtgttgctacctgacctttttctggggggggtacctcagaaatgagcatttgagggcaagcgaaaaagccctcttcatcctccagaggcaacaaagaggcagcagaaatggggaaagattgtgagaggcagggcttgggtctagacctggacttaggcaagatatgttgccctcaaccctgagttttcttatatgtaaaaagggaaggttgggctggactagatgaggtcaagatttgccattctgggaggctgatattccagagaatcaaaattaatcctaaaccaaagctttatggctgctacagagacatgtcacatttctgagacttgtcaccaagagtttgtccctcagactttggcgctgttgaatgcaaagacaaggatggccaccttctggttcttgcctgttgtcctcagctgagagcagtctcggtaaaggtggcaaagattctgtgacctcagaccggggaccaaatgcttgggagtctgatggccgggctgggccaccattctcatagctctcattctgtttggagcaaccaaaggatttgtgtgaagttatttggaaaaggaccttaactgagcagtaatcttttttctgtatatttggaatgtttttcattctgacctgttctgtcagtgattctactgaaaaacaatttaatcaatataaaaatgttcaagctatgcaacactgt

SEQ ID NO: 16895 - DNA, 8630 bp, Homo sapiens
  source 1..8630: mol_type = unassigned DNA
gaagggtggtatcccgttgtggagtagaatgtaactatgaccttctgggatttgggcaccagatttatcttactgcaacaggagccatggtgggagccacccccataactcttatagagctggtgggccaccaggactgccagatatatatatatattttttgaaacagggtcttgctatgttgcccagactggcctcaaactcctggactcaaaggatcctccctcagcctcctgagtagctgggattataggcacataccaccacgactagctgccagatcatcttatcttggaccaggcttctaccattaattcacatgctttaaaaaaattaaaaattaaaaaaatgaaaaataaaaaaacttaaaagattttacctatattcctggaacatagttatcttaccccagctttgtagttcctgtttaaggaaattccctctgaaggaaattttagctctcaagagtcaaagaagatgtatagaggtggtatctgttagtttttgtttgtttgttaaggatctaggcagagaggtcattacatttttctgaagttgaggtcacaggtggggtacccacaagagaggtcattacatttctgaagttaggcatcccaggcatctcttctaaagaactatcctgtattctaattgttaaataaatatcttcttcattgtgagcctccacaactgctgtttctgataaatttagatcattctttgcagaattttatatactggcaatctcaaaactaggctccttcaagattcctaggaagtctcccaagctcgggttgggttccactattctagtttctttgtgtatgatgccatggggttgactcagaaactttgctcaatatatgacaaggcagcatttggtgagtggtgatctccacgtttatcttctcatttatatccctaggaagacatactgattagctgagcttgtcaatgaaagcccgggttcaccattggattatctataactctcctttctctttttttctctcagtagcattgtaggaggagagaacacttaattctggttgaatgtcagcttggataaacatagaaacaaactagaaagaactgatgatgttctcctaggtggaaaagatggagattccaataccaaataggtgtgaatcagcaaatgtatgttatactgtctctcaaggccaggtgttcaatacattgtgggtagttaattataatcaaagtaataatattagagttacgacatggatcctaagctttttagccattaaacatataagaaatttgtagcatagtgagtttttttataacatgatcatccaggttaaaataagacacaattgacctcacatatcctatctgagctccgattttgtcatctgtaaaaatggagatagtggtacctaccttacagagttatgaggctgagataagagggaaagttacaaagtagtaccatgtacaaagcccggaactgtgcaaataggaggttgtaatactgtttgaagcattcccatctcaaaaagccagttccttggcctttataaatttgaaggaataatgaaactgatttgtttcaattgtgaaaattatttctctcctgcccctgtgcacttctgccctgtctatattagatttcaagaggtttcccttttgtcatcttggccagacaatggaatgtctatcccgtttgaatctgggtttaaaaaagcatgggagctagtggccaagtgtcacatgtatgccgcatccctaaatagaagtctccccagggcgcttcctgacctgcgcaatgctgccgaaggcctcctttccccgctccccaggcagaggagcaaagtcacaggctgaggggcctgccacgacttgcccacaaaacaggtctggagtttggaagttacatttgctggttgcccagagatgagtgcagaattcagcttggaggtcctggaaacttctagtttactgatgtttatgcttttgctcatgcacccacagttcctgggacacagaatgctcacctgggggtttgtaccccagccaagaaggtgtcttcacagactcccctccttttagcaacttcatgcagatggagcttgggtggatggatcctggcacagtgttcagaacagtggccctgccagtgtgtgggcgccgcttgtgcagagcccctgtgggttctggtcctcaagggcaggggcgctcactgacagcggaacccatagtaccagcccatctttggtgggctgtttccaccccattcatccctgctcagctcttcataggacagcctgtgctggcagaaaattgcccccaccagtcaagacgtagggcatcaacatgagccatcagtaatgacagggcagctttgcagagcgtaaggtagcacctgataccttggaccaaaaccgtatttttatgtatctttcacatgtacagctcttgtctttgactcatcaaactttcttttttttttttttttgcttatttcagtttgagtatgaattaatgaaaacaattgtttcataggcacttgtatttcttacaactgaagatggatatttgcgaaggaaggttaacctgccctcttaactcagcagtggttctagcgtcctatgccgtacaatctcattttggagactataattcttccatacatcatccaggctatctttccgatagtcactttatacccgatcaaaatgaggactttttaacaaaagtcgaatctctgcatgagcagcacagtgggctaaaacaatcagaagcagaatcctgctatatcaacatagcgcggaccctcgacttctatggagtagaactgcacagtggtagggatctgcacaatttagacctaatgattggaattgcttccgcgggtgttgctgtgtaccgaaaatacatttgcacaagtttctatccttgggtgaacattctcaaaatttctttcaaaaggaaaaagttcttcatacatcagcgacagaaacaggctgaatccagggaacatattgtggccttcaacatgctgaattaccgatcttgcaaaaacttgtggaaatcctgtgttgagcaccatacgttctttcaggcaaagaagctactacctcaggaaaagaatgttctgtctcagtactggactatgggctctcggaacaccaaaaagcgaagtcctcggctccggcacgaaatccgaaagccacgccactcttctgcagataaccttgcaaatgaaatgacctacatcacggaaacggaagatgtattttacacgtacaagggctctctggcccctcaagacagcgattctgaagtttctcagaaccgaagcccgcaccaagagagtttatccgagaacaatccggcacaaagctacctgacccagaagtcatccagttctgtgtctccatcttcaaatgctccaggctcctgctcacctgacggcgttgatcagcagctcttagatgacttccacagggtgaccaaagggggctccaccgaggacgccagccagtactactgtgacaagaatgataatggtgacagctacttagtcttgatccgtatcacaccagatgaagatggaaaatttggatttaatcttaagggaggagtggatcaaaagatgcctcttgtggtatcaaggataaacccagagtcacctgcggacacctgcattcctaagctgaacgaaggggatcaaatcgtgttaatcaatggccgggacatctcagaacacacgcatgaccaagtggtgatgttcatcaaagccagccgggagtcccactcacgggagctggccctggtgatcaggaggagagctgtccgctcatttgctgacttcaagtctgaagatgaactgaaccagcttttccccgaagccattttccccatgtgtccggagggtggggacactttggagggatccatggcacagctaaagaagggcctcgaaagcgggacggtgctgatccagtttgagcaactctacagaaaaaagccaggtttggccatcacgtttgcaaagctgcctcaaaatttggacaaaaaccgatataaagatgtgctgccttatgacaccacccgggtattattgcagggaaatgaagattatattaatgcaagttacgtgaacatggaaattcctgctgctaaccttgtgaacaagtacatcgccactcaggggcccctgccgcatacctgtgcacagttttggcaggttgtctgggatcagaagttgtcactcattgtcatgttgacgactctcacagaacgagggcggaccaaatgtcaccagtactggccagatccccccgacgtcatgaaccacggcggctttcacatccagtgtcagtcagaggactgcaccatcgcctatgtgtcccgagaaatgctggtcacaaacacccagaccggggaagaacacacagtgacacatctccagtacgtcgcatggcctgaccacggtgtgcccgatgactcctccgactttctggaatttgtaaactatgtgaggtctctgagagtggacagcgagcccgtcctagttcactgcagtgctggaataggtcgaaccggtgtgttggtcactatggaaacagccatgtgcctaactgagaggaacctgcccatttacccactggatattgtccgaaaaatgcgagaccagcgcgccatgatggtgcagacatcaagccagtacaagtttgtgtgtgaagcgattcttcgtgtgtatgaagaaggtttagtccaaatgctggatcctagttaagacaactgtgaaaaagttcattcctctttcccaagggcatcctccttgaaagaggaggacagacctctctggaagcagcaagaggaaccagtagctgtgggaaaggaatgggcacctctgaacccaggcactttaaacttctatagaaaagatatcgtgtacataggaactggtgtagataagcatgcaattatggcatcatttaggcctgtatttctatggaaagatacaaaaaggatctcagtttggggcctgtcctaatgccttcttccctaacatcaccacacacacccctgtcggcatcctggagcaattgagaccggacacccacagagctgttgtcctcccagcaacaagatggtgtggttatcttgggtcatttggatgttttgtttgtttctgtgtgtcagactgtaagggctgagctttctgtgcttctaggtggagctggaacaattcagattcacccgccctgatgctaaggaaaccctgacgtatgtactagatggcagggcactgggggtcaggctgaaggctgagcaacacctctctgccctccctccctttgtcccatctcccagcgacttccaatattcatgtttctgagaattgtgtccctcttcaggttccctcttggtgcctaacctggattagtaatgtgcattcaggtgaattttcagctgaggctctgagaactggtactctcagtgtgttctggtcatcttgtggcttagttgtagaagcaggtgtgtctcttgcctctgcttgcctcctactgcacactcagcacccaggactggaatcaccgactactgaatctcctacatgtattgctgctacttcaagctcctccacttgaaaccttatgattttcccaaggggagatgggacagtgtcatctaaatattccgaatgtttggccttctgagaaaagagcttctagtaattgaaccatgggaaacccagcttctggagggttggccgtggggctgtgtacatgtgtgtgcccaggggtgagtgtttctcaggattcctaacgattcaaattaccgttgagtatatataaagaatgagtctctgtatggaagaacaaatgtgtgcattcacccccagtcacaatggtctccattgcatttcaaaggagaggatcagactatctgaatataaacacaatctgatgttaatttattctaagaacaccatcattttgattgtcctaaagaattctgcctttgtgaataccgtgttaaatttttttaaatttgtgacaggattgtagcaaattattatttaaggaaaataaattgtgtaaacatttaatgtggtatttttgaacagcggtttttatgtactcagaagaggaagtaaagccaggttcttaatggtatttatagaaaagatgttttcatattataatgcacataaatgaagccattttgatattcagcaaattcggtgccaattgaatagtttgctggtagcaagacggatgaagacctatatgggagattctttatctctagagctagcatatttacttgcatactttgtttcttttccacatggatattttactgctaaatggcagaggtgggagggagatgtcacacagtaccataaccccatattgaaaacaagaaaccaccagaaagtttgcagctaaggggcaggggattcagttcctacgcccactcagcactaactacttgcgggcctggttgcttagaagctctacctctctttcattatctgtaaaatagaaacaatacttaggactttagttggaacatgaggattgaataagatcacgctattcatgtgactttttatcggctagaacagcaacagacactgctgtgggtgagttacttagaaaagtttagttatcagtgattagcccaaaaacacatcagtcaaaaatagaatccactggatttttgtctctctttttagagacagggtctcactgtcgcccaggctggagtacagtggcatgatcattgttcactgcagcctcaaattcctgggctcaagcaatcctcgcacctcagcctcctgagtagccgggactataggcacatgccacctcacctggcttgtgtgtgtgtgtgtgtgtgtgtgtgtgtgtgtgtgtgtgtgtgtgtgtgtgtgtgtgtgtgtagagacaggatcttgatgtgttgcctaggctggtctcaaactcctggcctcaagtgatcttcccacctcagcctccaaaactgttgggattataggcgtgagccactgtgcccagcctaactgggtttttatgagaggaaaatagaaaatgctcttctagaagagagagaacaagagcacaaaataatctggactcacaaaaattcagcaagctccaagaaagggggatggagggaacgctggcaaaaatttaaatgccattaggatatttagcaagttattactgtttggtaaaaatgcatcatcaccctgtgtgcaaaatgcttgcaaagtagtctaaatgtctttggagatgggtgttttactgcttttttccaaaaacaaattgtttattatggttgcagaaatgcagccattacggtcacataaatttctaaaaagcctaccaaaggttgcaagcagtcttctgccactgggcaggccagcagttcagacccagcgaggttgccaggaacaaatccaggaaatactgggaagaacaagacaagagaattacctaaaagagcaaacaattcaagtaaatcctgtagctattaccacttaaaatccgtagctcaagattcctgtttcaccaccttatacacttaagcaattatacttaagcctttttttagtcctaagtgaagaactacatcagaatcaggataagtattttgcctgggaaatttggctgcatatgaatggagaagacatttacatcctatgttctggcactttctgaaagatctaattaaacatgttgatgtgccaatttaatcaagatgagagatccctgctggtgtcaccctctagaacctgcacttggtgttttgactttccagaagaaaaaaatgcaactttggttagggggcagtggttggatcacacagttgtctttcgtttcctaccacagtaattcatatttaaatatgcttttagattagtgtggatactattgctgctgtgttgctacctgacctttttctggggggggtacctcagaaatgagcatttgagggcaagcgaaaaagccctcttcatcctccagaggcaacaaagaggcagcagaaatggggaaagattgtgagaggcagggcttgggtctagacctggacttaggcaagatatgttgccctcaaccctgagttttcttatatgtaaaaagggaaggttgggctggactagatgaggtcaagatttgccattctgggaggctgatattccagagaatcaaaattaatcctaaaccaaagctttatggctgctacagagacatgtcacatttctgagacttgtcaccaagagtttgtccctcagactttggcgctgttgaatgcaaagacaaggatggccaccttctggttcttgcctgttgtcctcagctgagagcagtctcggtaaaggtggcaaagattctgtgacctcagaccggggaccaaatgcttgggagtctgatggccgggctgggccaccattctcatagctctcattctgtttggagcaaccaaaggatttgtgtgaagttatttggaaaaggaccttaactgagcagtaatcttttttctgtatatttggaatgtttttcattctgacctgttctgtcagtgattctactgaaaaacaatttaatcaatataaaaatgttcaagctatgcaacactgt

SEQ ID NO: 16896 - DNA, 6832 bp, Homo sapiens
  source 1..6832: mol_type = unassigned DNA
atgctcagacggcggccaggtcgcgccgcgagcgagcttccgcgccgcccgcacgcgcgacctacctgggcgctccgcgcccccggatgctgcaggttattcagcgatagttatgacctcccggttacgtgcgttgggtggaagaattaataatatacgcacctcggagttacccaaagagaaaactcgatcagaagtcatttgcagcatccactttttagatggcgtggtacagacctttaaagttactaaacaagacactggccaggttcttctggatatggtgcacaaccacctgggtgtgactgaaaaggaatattttggtttacagcatgatgacgactccgtggactctcctagatggctggaagcaagcaaagccatcaggaagcagttaaaaggaggtttcccctgtaccctgcattttcgagtaagattttttatacctgatcccaacacactgcagcaagaacaaaccaggcacttgtatttcttacaactgaagatggatatttgcgaaggaaggttaacctgccctcttaactcagcagtggttctagcgtcctatgccgtacaatctcattttggagactataattcttccatacatcatccaggctatctttccgatagtcactttatacccgatcaaaatgaggactttttaacaaaagtcgaatctctgcatgagcagcacagtgggctaaaacaatcagaagcagaatcctgctatatcaacatagcgcggaccctcgacttctatggagtagaactgcacagtggtagggatctgcacaatttagacctaatgattggaattgcttccgcgggtgttgctgtgtaccgaaaatacatttgcacaagtttctatccttgggtgaacattctcaaaatttctttcaaaaggaaaaagttcttcatacatcagcgacagaaacaggctgaatccagggaacatattgtggccttcaacatgctgaattaccgatcttgcaaaaacttgtggaaatcctgtgttgagcaccatacgttctttcaggcaaagaagctactacctcaggaaaagaatgttctgtctcagtactggactatgggctctcggaacaccaaaaagtcggtaaataaccaatattgcaaaaaggtgattggcgggatggtgtggaacccagccatgcggagatccttatcagtggagcacttagaaaccaagagtctgccttctcgttcccctcccattactcccaactggcgaagtcctcggctccggcacgaaatccgaaagccacgccactcttctgcagataaccttgcaaatgaaatgacctacatcacggaaacggaagatgtattttacacgtacaagggctctctggcccctcaagacagcgattctgaagtttctcagaaccgaagcccgcaccaagagagtttatccgagaacaatccggcacaaagctacctgacccagaagtcatccagttctgtgtctccatcttcaaatgctccaggctcctgctcacctgacggcgttgatcagcagctcttagatgacttccacagggtgaccaaagggggctccaccgaggacgccagccagtactactgtgacaagaatgataatggtgacagctacttagtcttgatccgtatcacaccagatgaagatggaaaatttggatttaatcttaagggaggagtggatcaaaagatgcctcttgtggtatcaaggataaacccagagtcacctgcggacacctgcattcctaagctgaacgaaggggatcaaatcgtgttaatcaatggccgggacatctcagaacacacgcatgaccaagtggtgatgttcatcaaagccagccgggagtcccactcacgggagctggccctggtgatcaggaggagagctgtccgctcatttgctgacttcaagtctgaagatgaactgaaccagcttttccccgaagccattttccccatgtgtccggagggtggggacactttggagggatccatggcacagctaaagaagggcctcgaaagcgggacggtgctgatccagtttgagcaactctacagaaaaaagccaggtttggccatcacgtttgcaaagctgcctcaaaatttggacaaaaaccgatataaagatgtgctgccttatgacaccacccgggtattattgcagggaaatgaagattatattaatgcaagttacgtgaacatggaaattcctgctgctaaccttgtgaacaagtacatcgccactcaggggcccctgccgcatacctgtgcacagttttggcaggttgtctgggatcagaagttgtcactcattgtcatgttgacgactctcacagaacgagggcggaccaaatgtcaccagtactggccagatccccccgacgtcatgaaccacggcggctttcacatccagtgtcagtcagaggactgcaccatcgcctatgtgtcccgagaaatgctggtcacaaacacccaggtgagccgcagcctgaggggcacggtggaggggcaggtgctgaatcagcggccactgtcatcccaggtggtcacgcttctaggtgtgcactctgtttgcacctggcaagcgtgtcaaccggggaagaacacacagtgacacatctccagtacgtcgcatggcctgaccacggtgtgcccgatgactcctccgactttctggaatttgtaaactatgtgaggtctctgagagtggacagcgagcccgtcctagttcactgcagtgctggaataggtcgaaccggtgtgttggtcactatggaaacagccatgtgcctaactgagaggaacctgcccatttacccactggatattgtccgaaaaatgcgagaccagcgcgccatgatggtgcagacatcaagccagtacaagtttgtgtgtgaagcgattcttcgtgtgtatgaagaaggtttagtccaaatgctggatcctagttaagacaactgtgaaaaagttcattcctctttcccaagggcatcctccttgaaagaggaggacagacctctctggaagcagcaagaggaaccagtagctgtgggaaaggaatgggcacctctgaacccaggcactttaaacttctatagaaaagatatcgtgtacataggaactggtgtagataagcatgcaattatggcatcatttaggcctgtatttctatggaaagatacaaaaaggatctcagtttggggcctgtcctaatgccttcttccctaacatcaccacacacacccctgtcggcatcctggagcaattgagaccggacacccacagagctgttgtcctcccagcaacaagatggtgtggttatcttgggtcatttggatgttttgtttgtttctgtgtgtcagactgtaagggctgagctttctgtgcttctaggtggagctggaacaattcagattcacccgccctgatgctaaggaaaccctgacgtatgtactagatggcagggcactgggggtcaggctgaaggctgagcaacacctctctgccctccctccctttgtcccatctcccagcgacttccaatattcatgtttctgagaattgtgtccctcttcaggttccctcttggtgcctaacctggattagtaatgtgcattcaggtgaattttcagctgaggctctgagaactggtactctcagtgtgttctggtcatcttgtggcttagttgtagaagcaggtgtgtctcttgcctctgcttgcctcctactgcacactcagcacccaggactggaatcaccgactactgaatctcctacatgtattgctgctacttcaagctcctccacttgaaaccttatgattttcccaaggggagatgggacagtgtcatctaaatattccgaatgtttggccttctgagaaaagagcttctagtaattgaaccatgggaaacccagcttctggagggttggccgtggggctgtgtacatgtgtgtgcccaggggtgagtgtttctcaggattcctaacgattcaaattaccgttgagtatatataaagaatgagtctctgtatggaagaacaaatgtgtgcattcacccccagtcacaatggtctccattgcatttcaaaggagaggatcagactatctgaatataaacacaatctgatgttaatttattctaagaacaccatcattttgattgtcctaaagaattctgcctttgtgaataccgtgttaaatttttttaaatttgtgacaggattgtagcaaattattatttaaggaaaataaattgtgtaaacatttaatgtggtatttttgaacagcggtttttatgtactcagaagaggaagtaaagccaggttcttaatggtatttatagaaaagatgttttcatattataatgcacataaatgaagccattttgatattcagcaaattcggtgccaattgaatagtttgctggtagcaagacggatgaagacctatatgggagattctttatctctagagctagcatatttacttgcatactttgtttcttttccacatggatattttactgctaaatggcagaggtgggagggagatgtcacacagtaccataaccccatattgaaaacaagaaaccaccagaaagtttgcagctaaggggcaggggattcagttcctacgcccactcagcactaactacttgcgggcctggttgcttagaagctctacctctctttcattatctgtaaaatagaaacaatacttaggactttagttggaacatgaggattgaataagatcacgctattcatgtgactttttatcggctagaacagcaacagacactgctgtgggtgagttacttagaaaagtttagttatcagtgattagcccaaaaacacatcagtcaaaaatagaatccactggatttttgtctctctttttagagacagggtctcactgtcgcccaggctggagtacagtggcatgatcattgttcactgcagcctcaaattcctgggctcaagcaatcctcgcacctcagcctcctgagtagccgggactataggcacatgccacctcacctggcttgtgtgtgtgtgtgtgtgtgtgtgtgtgtgtgtgtgtgtgtgtgtgtgtgtgtgtgtgtgtgtagagacaggatcttgatgtgttgcctaggctggtctcaaactcctggcctcaagtgatcttcccacctcagcctccaaaactgttgggattataggcgtgagccactgtgcccagcctaactgggtttttatgagaggaaaatagaaaatgctcttctagaagagagagaacaagagcacaaaataatctggactcacaaaaattcagcaagctccaagaaagggggatggagggaacgctggcaaaaatttaaatgccattaggatatttagcaagttattactgtttggtaaaaatgcatcatcaccctgtgtgcaaaatgcttgcaaagtagtctaaatgtctttggagatgggtgttttactgcttttttccaaaaacaaattgtttattatggttgcagaaatgcagccattacggtcacataaatttctaaaaagcctaccaaaggttgcaagcagtcttctgccactgggcaggccagcagttcagacccagcgaggttgccaggaacaaatccaggaaatactgggaagaacaagacaagagaattacctaaaagagcaaacaattcaagtaaatcctgtagctattaccacttaaaatccgtagctcaagattcctgtttcaccaccttatacacttaagcaattatacttaagcctttttttagtcctaagtgaagaactacatcagaatcaggataagtattttgcctgggaaatttggctgcatatgaatggagaagacatttacatcctatgttctggcactttctgaaagatctaattaaacatgttgatgtgccaatttaatcaagatgagagatccctgctggtgtcaccctctagaacctgcacttggtgttttgactttccagaagaaaaaaatgcaactttggttagggggcagtggttggatcacacagttgtctttcgtttcctaccacagtaattcatatttaaatatgcttttagattagtgtggatactattgctgctgtgttgctacctgacctttttctggggggggtacctcagaaatgagcatttgagggcaagcgaaaaagccctcttcatcctccagaggcaacaaagaggcagcagaaatggggaaagattgtgagaggcagggcttgggtctagacctggacttaggcaagatatgttgccctcaaccctgagttttcttatatgtaaaaagggaaggttgggctggactagatgaggtcaagatttgccattctgggaggctgatattccagagaatcaaaattaatcctaaaccaaagctttatggctgctacagagacatgtcacatttctgagacttgtcaccaagagtttgtccctcagactttggcgctgttgaatgcaaagacaaggatggccaccttctggttcttgcctgttgtcctcagctgagagcagtctcggtaaaggtggcaaagattctgtgacctcagaccggggaccaaatgcttgggagtctgatggccgggctgggccaccattctcatagctctcattctgtttggagcaaccaaaggatttgtgtgaagttatttggaaaaggaccttaactgagcagtaatcttttttctgtatatttggaatgtttttcattctgacctgttctgtcagtgattctactgaaaaacaatttaatcaatataaaaatgttcaagctatgcaacactgt

SEQ ID NO: 16897 - DNA, 2826 bp, Homo sapiens
  source 1..2826: mol_type = unassigned DNA
ggaattctgagctaccgcaccagcatctgagacctcacaccctgcctccctaacctaagaatccagaacacagggcctccccgacccctgagctcccagccgtacagggttctcctgagaactcctgtctgtggaggcctttctaggagactactcttttgatgtacatatttgtgaggtcctctctggaaagggctttctcttggttcccttcagtcagcttttctccaaggagagtcctgaggcctccccgggcacgcagcaccggggccctgctctcagctgcccggtctggaccttagaggttcaggagcctccatgcagggccaggttgaggctgcaggtgagctctgctgggggaacacgggggaagggggccggctccatactcagcctgctcccctgtgccccagcttgcctgtggggtgctctggttcagcggttatggccacatctggtcacagaacgccacaaacctcgtctcctctttgctgacgctcctgaaacagctggaacccacggcctggcttgactctgggacgtggggagtccccagtctgctgctggtctttctgtccgtgggcctggtcctcgttaccaccctggtgtggcacctcctgaggacacccccagagccacccaccccactgccccctgaggacaggcgccagtcagtgagccgccagccctccttcacctactcagagtggatggaggagaagatcgaggatgacttcctggacctcgacccggtgcccgagactcctgtgtttgattgtgtgatggacatcaagcctgaggctgaccccacctcactcaccgtcaagtccatgggtctgcaggagaggaggggttccaatgtctccctgaccctggacatgtgcactccgggctgcaacgaggagggctttggctatctcatgtccccacgtgaggagtccgcccgcgagtacctgctcagcgcctcccgtgtcctccaagcagaagagcttcatgaaaaggccctggaccctttcctgctgcaggcggaattctttgaaatccccatgaactttgtggatccgaaagagtacgacatccctgggctggtgcggaagaaccggtacaaaaccatacttcccaaccctcacagcagagtgtgtctgacctcaccagaccctgacgaccctctgagttcctacatcaatgccaactacatccggggctatggtggggaggagaaggtgtacatcgccactcagggacccatcgtcagcacggtcgccgacttctggcgcatggtgtggcaggagcacacgcccatcattgtcatgatcaccaacatcgaggagatgaacgagaaatgcaccgagtattggccggaggagcaggtggcgtacgacggtgttgagatcactgtgcagaaagtcattcacacggaggattaccggctgcgactcatctccctcaagagtgggactgaggagcgaggcctgaagcattactggttcacatcctggcccgaccagaagaccccagaccgggcccccccactcctgcacctggtgcgggaggtggaggaggcagcccagcaggaggggccccactgtgcccccatcatcgtccactgcagtgcagggattgggaggaccggctgcttcattgccaccagcatctgctgccagcagctgcggcaggagggtgtggtggacatcctgaagaccacgtgccagctccgtcaggacaggggcggcatgatccagacatgcgagcagtaccagtttgtgcaccacgtcatgagcctctacgaaaagcagctgtcccaccagtccccagaatgactgcgcttctcctacaaggttctctgggcactgcccagcctgagtctcggccctcacccagggccctgcctcgggtcctgggcctgctccccgcttcctccccttcagtcagctccctctgtcctctgtcagcctggcctgacccctaccctccagcattgctcttcctactgtacatattggggagtggggggcagggtcgggaagggacatgccaggccaggcctggggccccggggcctgacccacaccacgcagaccccgggctccagtttttaacgatggttccatcaatacctgatccagaatgtttccgtgctacactttgtgtcctgctgcaatgtgttctgtctgtccatccatctctgccctctgtaccggacactgtgtctcctcagccaggaaggggtaatgagctccagcccctaagcaaccggacttgcctgcctcggcctcacccgcacttctcccaaaaggcagatgacggggagttaggcatggggagctccagaaggtcaccagagagctttcagctgagggagagttctctaggttggagtgggcatcacagccagggtggcctctgggtgtcagatgctctcaggagggtgcccagcctgtgaggcactggcaaggtagggggcagatggggcatggagaacccagaggatctaggccctgttggggaggggaggggagctcaaggtttgggtggggactcagcccagatctacgtgagacatttttctgtgtcactgtgggaaagccttcccagaagtctcactgcgtgttgctctgcgtgtgttcccatgtccatgcgtgtgttgagagcccatcaggagggcatgcatgactctttggcaacatgtattatcttggagccacgtgtttttattgctgactttaaatatttatcccacggcagacagagacatttggtgtctttttataattcgctcgtggtcattgaatagagcaataaacggagcattttgagcaaaactaa

SEQ ID NO: 16898 - DNA, 3135 bp, Homo sapiens
  source 1..3135: mol_type = unassigned DNA
gccggggctggggggtgccaaacccacccggcggctgcgccagcgactctgcagctgaagcgcatttggtgaggcggtcgggcgagggagcgcgcacggagcgcgggacggagcgccaggcggacggaccgaaggacggaggcaccgaaggacggacgcccccgcacacgcagacgcacagagctcggcgcggcccccgtcgcatacacactggcacagacacaagcagggacacacgcagacacacgcacactcgcgcgcgcatcctcccgccagcctgcccgcctgctcgccggcgcccggagcccgctctggccgctggatgatctgaagctgccctctctccttcatttatatcaccagcttgctttttgctgagaaagcttcctgccctggaagatggcacccttccccatccagacaccttgggaatgaattatgagggagccaggagtgagagagagaaccacgctgctgatgactccgagggaggggccctggacatgtgctgcagtgagaggctaccgggtctcccccagccgatagtgatggaggcactggacgaggctgaagggctccaggactcacagagagagatgccgccaccccctcctccctcgccgccctcagatccagctcagaagccaccacctcgaggcgctgggagccactccctcactgtcaggagcagcctgtgcctgttcgctgcctcacagttcctgcttgcctgtggggtgctctggttcagcggttatggccacatctggtcacagaacgccacaaacctcgtctcctctttgctgacgctcctgaaacagctggaacccacggcctggcttgactctgggacgtggggagtccccagtctgctgctggtctttctgtccgtgggcctggtcctcgttaccaccctggtgtggcacctcctgaggacacccccagagccacccaccccactgccccctgaggacaggcgccagtcagtgagccgccagccctccttcacctactcagagtggatggaggagaagatcgaggatgacttcctggacctcgacccggtgcccgagactcctgtgtttgattgtgtgatggacatcaagcctgaggctgaccccacctcactcaccgtcaagtccatgggtctgcaggagaggaggggttccaatgtctccctgaccctggacatgtgcactccgggctgcaacgaggagggctttggctatctcatgtccccacgtgaggagtccgcccgcgagtacctgctcagcgcctcccgtgtcctccaagcagaagagcttcatgaaaaggccctggaccctttcctgctgcaggcggaattctttgaaatccccatgaactttgtggatccgaaagagtacgacatccctgggctggtgcggaagaaccggtacaaaaccatacttcccaaccctcacagcagagtgtgtctgacctcaccagaccctgacgaccctctgagttcctacatcaatgccaactacatccggggctatggtggggaggagaaggtgtacatcgccactcagggacccatcgtcagcacggtcgccgacttctggcgcatggtgtggcaggagcacacgcccatcattgtcatgatcaccaacatcgaggagatgaacgagaaatgcaccgagtattggccggaggagcaggtggcgtacgacggtgttgagatcactgtgcagaaagtcattcacacggaggattaccggctgcgactcatctccctcaagagtgggactgaggagcgaggcctgaagcattactggttcacatcctggcccgaccagaagaccccagaccgggcccccccactcctgcacctggtgcgggaggtggaggaggcagcccagcaggaggggccccactgtgcccccatcatcgtccactgcagtgcagggattgggaggaccggctgcttcattgccaccagcatctgctgccagcagctgcggcaggagggtgtggtggacatcctgaagaccacgtgccagctccgtcaggacaggggcggcatgatccagacatgcgagcagtaccagtttgtgcaccacgtcatgagcctctacgaaaagcagctgtcccaccagtccccagaatgactgcgcttctcctacaaggttctctgggcactgcccagcctgagtctcggccctcacccagggccctgcctcgggtcctgggcctgctccccgcttcctccccttcagtcagctccctctgtcctctgtcagcctggcctgacccctaccctccagcattgctcttcctactgtacatattggggagtggggggcagggtcgggaagggacatgccaggccaggcctggggccccggggcctgacccacaccacgcagaccccgggctccagtttttaacgatggttccatcaatacctgatccagaatgtttccgtgctacactttgtgtcctgctgcaatgtgttctgtctgtccatccatctctgccctctgtaccggacactgtgtctcctcagccaggaaggggtaatgagctccagcccctaagcaaccggacttgcctgcctcggcctcacccgcacttctcccaaaaggcagatgacggggagttaggcatggggagctccagaaggtcaccagagagctttcagctgagggagagttctctaggttggagtgggcatcacagccagggtggcctctgggtgtcagatgctctcaggagggtgcccagcctgtgaggcactggcaaggtagggggcagatggggcatggagaacccagaggatctaggccctgttggggaggggaggggagctcaaggtttgggtggggactcagcccagatctacgtgagacatttttctgtgtcactgtgggaaagccttcccagaagtctcactgcgtgttgctctgcgtgtgttcccatgtccatgcgtgtgttgagagcccatcaggagggcatgcatgactctttggcaacatgtattatcttggagccacgtgtttttattgctgactttaaatatttatcccacggcagacagagacatttggtgtctttttataattcgctcgtggtcattgaatagagcaataaacggagcattttgagcaaaactaa

SEQ ID NO: 16899 - DNA, 2299 bp, Homo sapiens
  source 1..2299: mol_type = unassigned DNA
tgtggtctgctcaggctgctataacaaaataccatagaccaggtagcttgtaagcaacaggtttatttttcacagttctggagactgggaagtccaagatcaaggcaccgtgaccctggtgaggacccacttccagggtcatgtcctcacgtggcagaaggagtgaaagctccttttgtaagagcactgatcccattcgtgagggctccgttctcatgacttcatcacctcgcaaaggccctcccttcaaataccaccatgttgggatttggtttcaacatgtgaacttaaggggacacacacattcagtccaaagccacaggttttcagcaggagagcagcatgtccagatgtgtgttgtacacagactattttgactctgtggatctgagacagttggggatgaggcagaaatctcccacactcgagcaatgataaaggtcaaggtggcagtgaagcggggagtgtgaagaggtggtaaaacttgcagcactaattgcagcactaagatagaggcgagtcacgcaggcgcaggcgaggcacagcaagaggcgaagaagagtcccggggctgggttatgtgacaaagggatgactgggggaccatttgttaagataaggaaccctggagatagtaataaattggagaaggggctcttggcccctcttggatgatcctgaagttgttggggcaggaccaaaggcaagatccatgccaacgctgctgaccaacccccaaaaccaagctggctttgggtctgtgtctggtgccactgggcaatgtggcctagatggaagggtgaaggggtcccactctcagtgttcttcctgtgttcttcctccttccatctcatctctatctctgggctggtttgtgagctgaaagagttcacacatacctggggtgggcctctgtctcctcgacagagtgggactgaggagcgaggcctgaagcattactggttcacatcctggcccgaccagaagaccccagaccgggcccccccactcctgcacctggtgcgggaggtggaggaggcagcccagcaggaggggccccactgtgcccccatcatcgtccactgcagtgcagggattgggaggaccggctgcttcattgccaccagcatctgctgccagcagctgcggcaggagggtgtggtggacatcctgaagaccacgtgccagctccgtcaggacaggggcggcatgatccagacatgcgagcagtaccagtttgtgcaccacgtcatgagcctctacgaaaagcagctgtcccaccagtccccagaatgactgcgcttctcctacaaggttctctgggcactgcccagcctgagtctcggccctcacccagggccctgcctcgggtcctgggcctgctccccgcttcctccccttcagtcagctccctctgtcctctgtcagcctggcctgacccctaccctccagcattgctcttcctactgtacatattggggagtggggggcagggtcgggaagggacatgccaggccaggcctggggccccggggcctgacccacaccacgcagaccccgggctccagtttttaacgatggttccatcaatacctgatccagaatgtttccgtgctacactttgtgtcctgctgcaatgtgttctgtctgtccatccatctctgccctctgtaccggacactgtgtctcctcagccaggaaggggtaatgagctccagcccctaagcaaccggacttgcctgcctcggcctcacccgcacttctcccaaaaggcagatgacggggagttaggcatggggagctccagaaggtcaccagagagctttcagctgagggagagttctctaggttggagtgggcatcacagccagggtggcctctgggtgtcagatgctctcaggagggtgcccagcctgtgaggcactggcaaggtagggggcagatggggcatggagaacccagaggatctaggccctgttggggaggggaggggagctcaaggtttgggtggggactcagcccagatctacgtgagacatttttctgtgtcactgtgggaaagccttcccagaagtctcactgcgtgttgctctgcgtgtgttcccatgtccatgcgtgtgttgagagcccatcaggagggcatgcatgactctttggcaacatgtattatcttggagccacgtgtttttattgctgactttaaatatttatcccacggcagacagagacatttggtgtctttttataattcgctcgtggtcattgaatagagcaataaacggagcattttgagcaaaact

SEQ ID NO: 16900 - DNA, 3871 bp, Homo sapiens
  source 1..3871: mol_type = unassigned DNA
agctacgtggtggctcgcctctgattccccgtgtaaaaaatggagtttaggatccctgccctgtgtgcagcccacagcctcaagcccccatggggatggaatgccggaaacctctggccagcgcactagcagcctggagaatacggaagattgtggcaggattgtggggcacatgggcagctccctgctcgtccgggcccctggtgcccacgagaaaaccaaaacaggtgcgtgccccgcgccgcacgtcaggagggcaagactcagtggagggaggggctgtccactcgctctagctccccagaggctgaacagggagaactgggaaaaaggacgcctcctcagcgtcctagaacgagtcctcggcacctggtattgcatgcgccctagtatggggccgctccacttgcgcaggtgttggcaacatgcggggagcgccacggcatgcccccaatgagccgactccctcccccaactctgccccctttgtctcgctggcccctactccttctgtctgcctgtctgtcccgtcccaggttcagcgcgcacggccctgccggggtccctctggcagttgccgtagccgcgcggcccgacccggggctcccaagaggagaaaaaatcatgaatgaaatggatgcgctgctcccactcctccgccctccttgtccaagcaaccttggcatgggggcgacgactgcggagactccgcgcagagttgctcgggagagggaggcacctgagatgaggtcaggggttaagggtctgtgatccggcccccttcgtgccccgggagcaggccgctctcccggtcccccgccccgccagccctgcgcaattcccggcgagcggcggaagcccgcccgggggcggggcggagccggggctggggggtgccaaacccacccggcggctgcgccagcgactctgcagctgaagcgcatttggtgaggcggtcgggcgagggagcgcgcacggagcgcgggacggagcgccaggcggacggaccgaaggacggaggcaccgaaggacggacgcccccgcacacgcagacgcacagagctcggcgcggcccccgtcgcatacacactggcacagacacaagcagggacacacgcagacacacgcacactcgcgcgcgcatcctcccgccagcctgcccgcctgctcgccggcgcccggagcccgctctggccgcttgctttttgctgagaaagcttcctgccctggaagatggcacccttccccatccagacaccttgggaatgaattatgagggagccaggagtgagagagagaaccacgctgctgatgactccgagggaggggccctggacatgtgctgcagtgagaggctaccgggtctcccccagccgatagtgatggaggcactggacgaggctgaagggctccaggactcacagagagagatgccgccaccccctcctccctcgccgccctcagatccagctcagaagccaccacctcgaggcgctgggagccactccctcactgtcaggagcagcctgtgcctgttcgctgcctcacagttcctgctggaacccacggcctggcttgactctgggacgtggggagtccccagtctgctgctggtctttctgtccgtgggcctggtcctcgttaccaccctggtgtggcacctcctgaggacacccccagagccacccaccccactgccccctgaggacaggcgccagtcagtgagccgccagccctccttcacctactcagagtggatggaggagaagatcgaggatgacttcctggacctcgacccggtgcccgagactcctgtgtttgattgtgtgatggacatcaagcctgaggctgaccccacctcactcaccgtcaagtccatgggtctgcaggagaggaggggttccaatgtctccctgaccctggacatgtgcactccgggctgcaacgaggagggctttggctatctcatgtccccacgtgaggagtccgcccgcgagtacctgctcagcgcctcccgtgtcctccaagcagaagagcttcatgaaaaggccctggaccctttcctgctgcaggcggaattctttgaaatccccatgaactttgtggatccgaaagagtacgacatccctgggctggtgcggaagaaccggtacaaaaccatacttcccaaccctcacagcagagtgtgtctgacctcaccagaccctgacgaccctctgagttcctacatcaatgccaactacatccggggctatggtggggaggagaaggtgtacatcgccactcagggacccatcgtcagcacggtcgccgacttctggcgcatggtgtggcaggagcacacgcccatcattgtcatgatcaccaacatcgaggagatgaacgagaaatgcaccgagtattggccggaggagcaggtggcgtacgacggtgttgagatcactgtgcagaaagtcattcacacggaggattaccggctgcgactcatctccctcaagagtgggactgaggagcgaggcctgaagcattactggttcacatcctggcccgaccagaagaccccagaccgggcccccccactcctgcacctggtgcgggaggtggaggaggcagcccagcaggaggggccccactgtgcccccatcatcgtccactgcagtgcagggattgggaggaccggctgcttcattgccaccagcatctgctgccagcagctgcggcaggagggtgtggtggacatcctgaagaccacgtgccagctccgtcaggacaggggcggcatgatccagacatgcgagcagtaccagtttgtgcaccacgtcatgagcctctacgaaaagcagctgtcccaccagtccccagaatgactgcgcttctcctacaaggttctctgggcactgcccagcctgagtctcggccctcacccagggccctgcctcgggtcctgggcctgctccccgcttcctccccttcagtcagctccctctgtcctctgtcagcctggcctgacccctaccctccagcattgctcttcctactgtacatattggggagtggggggcagggtcgggaagggacatgccaggccaggcctggggccccggggcctgacccacaccacgcagaccccgggctccagtttttaacgatggttccatcaatacctgatccagaatgtttccgtgctacactttgtgtcctgctgcaatgtgttctgtctgtccatccatctctgccctctgtaccggacactgtgtctcctcagccaggaaggggtaatgagctccagcccctaagcaaccggacttgcctgcctcggcctcacccgcacttctcccaaaaggcagatgacggggagttaggcatggggagctccagaaggtcaccagagagctttcagctgagggagagttctctaggttggagtgggcatcacagccagggtggcctctgggtgtcagatgctctcaggagggtgcccagcctgtgaggcactggcaaggtagggggcagatggggcatggagaacccagaggatctaggccctgttggggaggggaggggagctcaaggtttgggtggggactcagcccagatctacgtgagacatttttctgtgtcactgtgggaaagccttcccagaagtctcactgcgtgttgctctgcgtgtgttcccatgtccatgcgtgtgttgagagcccatcaggagggcatgcatgactctttggcaacatgtattatcttggagccacgtgtttttattgctgactttaaatatttatcccacggcagacagagacatttggtgtctttttataattcgctcgtggtcattgaatagagcaataaacggagcattttgagcaaaact

SEQ ID NO: 16901 - DNA, 2796 bp, Homo sapiens
  source 1..2796: mol_type = unassigned DNA
catacacactggcacagacacaagcagggacacacgcagacacacgcacactcgcgcgcgcatcctcccgccagcctgcccgcctgctcgccggcgcccggagcccgctctggccggagtgagagagagaaccacgctgctgatgactccgagggaggggccctggacatgtgctgcagtgagaggctaccgggtctcccccagccgatagtgatggaggcactggacgaggctgaagggctccaggactcacagagagagatgccgccaccccctcctccctcgccgccctcagatccagctcagaagccaccacctcgaggcgctgggagccactccctcactgtcaggagcagcctgtgcctgttcgctgcctcacagttcctgcttgcctgtggggtgctctggttcagcggttatggccacatctggtcacagaacgccacaaacctcgtctcctctttgctgacgctcctgaaacagctggaacccacggcctggcttgactctgggacgtggggagtccccagtctgctgctggtctttctgtccgtgggcctggtcctcgttaccaccctggtgtggcacctcctgaggacacccccagagccacccaccccactgccccctgaggacaggcgccagtcagtgagccgccagccctccttcacctactcagagtggatggaggagaagatcgaggatgacttcctggacctcgacccggtgcccgagactcctgtgtttgattgtgtgatggacatcaagcctgaggctgaccccacctcactcaccgtcaagtccatgggtctgcaggagaggaggggttccaatgtctccctgaccctggacatgtgcactccgggctgcaacgaggagggctttggctatctcatgtccccacgtgaggagtccgcccgcgagtacctgctcagcgcctcccgtgtcctccaagcagaagagcttcatgaaaaggccctggaccctttcctgctgcaggcggaattctttgaaatccccatgaactttgtggatccgaaagagtacgacatccctgggctggtgcggaagaaccggtacaaaaccatacttcccaaccctcacagcagagtgtgtctgacctcaccagaccctgacgaccctctgagttcctacatcaatgccaactacatccggggctatggtggggaggagaaggtgtacatcgccactcagggacccatcgtcagcacggtcgccgacttctggcgcatggtgtggcaggagcacacgcccatcattgtcatgatcaccaacatcgaggagatgaacgagaaatgcaccgagtattggccggaggagcaggtggcgtacgacggtgttgagatcactgtgcagaaagtcattcacacggaggattaccggctgcgactcatctccctcaagagtgggactgaggagcgaggcctgaagcattactggttcacatcctggcccgaccagaagaccccagaccgggcccccccactcctgcacctggtgcgggaggtggaggaggcagcccagcaggaggggccccactgtgcccccatcatcgtccactgcagtgcagggattgggaggaccggctgcttcattgccaccagcatctgctgccagcagctgcggcaggagggtgtggtggacatcctgaagaccacgtgccagctccgtcaggacaggggcggcatgatccagacatgcgagcagtaccagtttgtgcaccacgtcatgagcctctacgaaaagcagctgtcccaccagtccccagaatgactgcgcttctcctacaaggttctctgggcactgcccagcctgagtctcggccctcacccagggccctgcctcgggtcctgggcctgctccccgcttcctccccttcagtcagctccctctgtcctctgtcagcctggcctgacccctaccctccagcattgctcttcctactgtacatattggggagtggggggcagggtcgggaagggacatgccaggccaggcctggggccccggggcctgacccacaccacgcagaccccgggctccagtttttaacgatggttccatcaatacctgatccagaatgtttccgtgctacactttgtgtcctgctgcaatgtgttctgtctgtccatccatctctgccctctgtaccggacactgtgtctcctcagccaggaaggggtaatgagctccagcccctaagcaaccggacttgcctgcctcggcctcacccgcacttctcccaaaaggcagatgacggggagttaggcatggggagctccagaaggtcaccagagagctttcagctgagggagagttctctaggttggagtgggcatcacagccagggtggcctctgggtgtcagatgctctcaggagggtgcccagcctgtgaggcactggcaaggtagggggcagatggggcatggagaacccagaggatctaggccctgttggggaggggaggggagctcaaggtttgggtggggactcagcccagatctacgtgagacatttttctgtgtcactgtgggaaagccttcccagaagtctcactgcgtgttgctctgcgtgtgttcccatgtccatgcgtgtgttgagagcccatcaggagggcatgcatgactctttggcaacatgtattatcttggagccacgtgtttttattgctgactttaaatatttatcccacggcagacagagacatttggtgtctttttataattcgctcgtggtcattgaatagagcaataaacggagcattttgagcaaaa

SEQ ID NO: 16902 - DNA, 797 bp, Homo sapiens
  source 1..797: mol_type = unassigned DNA
gctaatcgagggtgactgctggaagtggagccacgctgactgatcccagattgagaggcagccacagccaccccaaaaggggtggcagagccctgcctgtggacagggccggagtcatcggcccgcatggcccatcttccacaggtctcccccagccgatagtgatggaggcactggacgaggctgaagggctccaggactcacagagagagatgccgccaccccctcctccctcgccgccctcagatccagctcagaagccaccacctcgaggcgctgggagccactccctcactgtcaggagcagcctgtgcctgttcgctgcctcacagttcctgcttgcctgtggggtgctctggttcagcggttatggccacatctggtcacagaacgccacaaacctcgtctcctctttgctgacgctcctgaaacagctggaacccacggcctggcttgactctgggacgtggggagtccccagtctgctgctggtctttctgtccgtgggcctggtcctcgttaccaccctggtgtggcacctcctgaggacacccccagagccacccaccccactgccccctgaggacaggcgccagtcagtgagccgccagccctccttcacctactcagagtggatggaggagaagatcgaggatgacttcctggacctcgacccggtgcccgagactcctgtgtttgattgtgtgatggacatcaagcctgaggctgaccccacctcactcaccgtcaagtccatgggtctgcaggagaggaggggttccaatgtctccctgacc

SEQ ID NO: 16903 - DNA, 12316 bp, Homo sapiens
  source 1..12316: mol_type = unassigned DNA
ttttttttttccccaagcgaagcatgaacagttgctaagtggaaaatggaggctgaattttacatggtgattcttacctgcttgatcttcaggaactcagaagggtttcagattgtccatgtccagaaacaacagtgtcttttcaaaaatgagaaagtggtcgtgggctcatgcaacaggaccatccagaaccagcagtggatgtggactgaggatgaaaagctccttcatgttaaatctgcactgtgcttggccatctccaactcttcccgcggcccctcccgctcagccatcttggaccgctgttcccaggcaccccgatggacctgctatgatcaggaaggcttccttgaggtggaaaatgcctctctctttctccagaaacaaggctccagagtagtggtcaagaaggccaggaaatacctccatagctggatgaaaatagatgtcaacaaggagggaaaactggtcaatgaaagcctctgtttacaaaaagctggcctgggagcagaagtttcggtgaggagcactagaaacacggctccaccccagattctcactacctttaatgcagttccagatggcctggtattccttattaggaataccacagaggccttcatcagaaatgctgcagaaaactacagccaaaacagcagcgagaggcagcatcccaatctgcacatgactggaattacagacacatcatgggttttgtcgactactcagcccttctccagcaccactgaagagactggactggcggagccagagagatgtaacttcaccctggcggagtccaaggcctccagccattctgtgtctatccagtggagaattttgggctcaccctgtaactttagcctcatctatagcagtgacaccctgggggccgcgttgtgccctacctttcggatagacaacaccacatacggatgtaaccttcaagatttacaagcaggaaccatctataacttcaggattatttctctggatgaagagagaacagtggtcttgcaaacagatcctttacctcctgctaggtttggagtcagtaaagagaagacgacttcaaccagcttgcatgtttggtggactccttcttccggaaaagtcacctcatatgaggtgcaattatttgatgaaaataaccaaaagatacagggggttcaaattcaagaaagtacttcatggaatgaatacacttttttcaatctcactgctggtagtaaatacaatattgccatcacagctgtttctggaggaaaacgttctttttcagtttataccaatggatcaacagtgccatctccagtgaaagatattggtatttccacaaaagccaattctctcctgatttcctggtcccatggttctgggaatgtggaacgataccggctgatgctaatggataaagggatcctagttcatggcggtgttgtggacaaacatgctacttcctatgcttttcacgggctgacccctggctacctctacaacctcactgttatgactgaggctgcagggctgcaaaactacaggtggaaactagtcaggacagcccccatggaagtctcaaatctgaaggtgacaaatgatggcagtttgacctctctaaaagtcaaatggcaaagacctcctggaaatgtggattcttacaatatcaccctgtctcacaaagggaccatcaaggaatccagagtattagcaccttggattactgaaactcactttaaagagttagtccccggtcgactttatcaagttactgtcagctgtgtctctggtgaactgtctgctcagaagatggcagtgggcagaacatttccagacaaagttgcaaacctggaggcaaacaataatggcaggatgaggtctcttgtagtgagctggtcgccccctgctggagactgggagcagtatcggatcctactcttcaatgattctgtggtgctgctcaacatcactgtgggaaaggaagaaacacagtatgtcatggatgacacggggctcgtaccgggaagacagtatgaggtggaagtcattgttgagagtggaaatttgaagaattctgagcgttgccaaggcaggacagtccccctggctgtcctccagcttcgtgtcaaacatgccaatgaaacctcactgagtatcatgtggcagacccctgtagcagaatgggagaaatacatcatttccctagctgacagagacctcttactgatccacaagtcactctccaaagatgccaaagaattcacttttactgacctggtgcctggacgaaaatacatggctacagtcaccagtattagtggagacttaaaaaattcctcttcagtaaaaggaagaacagtgcctgcccaagtgactgacttgcatgtggccaaccaaggaatgaccagtagtctgtttactaactggacccaggcacaaggagacgtagaattttaccaagtcttactgatccatgaaaatgtggtcattaaaaatgaaagcatctccagtgagaccagcagatacagcttccactctctcaagtccggcagcctgtactccgtggtggtaacaacagtgagtggagggatctcttcccgacaagtggttgtggagggaagaacagtcccttccagtgtgagtggagtaacggtgaacaattccggtcgtaatgactacctcagcgtttcctggctgctggcgcccggagatgtggataactatgaggtaacattgtctcatgacggcaaggtggttcagtcccttgtcattgccaagtctgtcagagaatgttccttcagctccctcaccccaggccgcctctacaccgtgaccataactacaaggagtggcaagtatgaaaatcactccttcagccaagagcggacagtgcctgacaaagtccagggagtcagtgttagcaactcagccaggagtgactatttaagggtatcctgggtgcatgccactggagactttgatcactatgaagtcaccattaaaaacaaaaacaacttcattcaaactaaaagcattcccaagtcagaaaacgaatgtgtatttgttcagctagtccctggacggttgtacagtgtcactgttactacaaaaagtggacaatatgaagccaatgaacaagggaatgggagaacaattccagagcctgttaaggatctaacattgcgcaacaggagcactgaggacttgcatgtgacttggtcaggagctaatggggatgtcgaccaatatgagatccagctgctcttcaatgacatgaaagtatttcctccttttcaccttgtaaataccgcaaccgagtatcgatttacttccctaacaccaggccgccaatacaaaattcttgtcttgacgattagcggggatgtacagcagtcagccttcattgagggcttcacagttcctagtgctgtcaaaaatattcacatttctcccaatggagcaacagatagcctgacggtgaactggactcctggtgggggagacgttgattcctacacggtgtcggcattcaggcacagtcaaaaggttgactctcagactattcccaagcacgtctttgagcacacgttccacagactggaggccggggagcagtaccagatcatgattgcctcagtcagcgggtccctgaagaatcagataaatgtggttgggcggacagttccagcatctgtccaaggagtaattgcagacaatgcatacagcagttattccttaatagtaagttggcaaaaagctgctggtgtggcagaaagatatgatatcctgcttctaactgaaaatggaatccttctgcgcaacacatcagagccagccaccactaagcaacacaaatttgaagatctaacaccaggcaagaaatacaagatacagatcctaactgtcagtggaggcctctttagcaaggaagcccagactgaaggccgaacagtcccagcagctgtcaccgacctgaggatcacagagaactccaccaggcacctgtccttccgctggaccgcctcagagggggagctcagctggtacaacatctttttgtacaacccagatgggaatctccaggagagagctcaagttgacccactagtccagagcttctctttccagaacttgctacaaggcagaatgtacaagatggtgattgtaactcacagtggggagctgtctaatgagtctttcatatttggtagaacagtcccagcctctgtgagtcatctcagggggtccaatcggaacacgacagacagcctttggttcaactggagtccagcctctggggactttgacttttatgagctgattctctataatcccaatggcacaaagaaggaaaactggaaagacaaggacctgacggagtggcggtttcaaggccttgttcctggaaggaagtacgtgctgtgggtggtaactcacagtggagatctcagcaataaagtcacagcggagagcagaacagctccaagtcctcccagtcttatgtcatttgctgacattgcaaacacatccttggccatcacgtggaaagggcccccagactggacagactacaacgactttgagctgcagtggttgcccagagatgcacttactgtcttcaacccctacaacaacagaaaatcagaaggacgcattgtgtatggtcttcgtccagggagatcctatcaattcaacgtcaagactgtcagtggtgattcctggaaaacttacagcaaaccaatttttggatctgtgaggacaaagcctgacaagatacaaaacctgcattgccggcctcagaactccacggccattgcctgttcttggatccctcctgattctgactttgatggttatagtattgaatgccggaaaatggacacccaagaagttgagttttccagaaagctggagaaagaaaaatctctgctcaacatcatgatgctagtgccccataagaggtacctggtgtccatcaaagtgcagtcggccggcatgaccagcgaggtggttgaagacagcactatcacaatgatagaccgcccccctcctccacccccacacattcgtgtgaatgaaaaggatgtgctaattagcaagtcttccatcaactttactgtcaactgcagctggttcagcgacaccaatggagctgtgaaatacttcacagtggtggtgagagaggctgatggcagtgatgagctgaagccagaacagcagcaccctctcccttcctacctggagtacaggcacaatgcctccattcgggtgtatcagactaattattttgccagcaaatgtgccgaaaatcctaacagcaactccaagagttttaacattaagcttggagcagagatggagagcctaggtggaaaatgcgatcccactcagcaaaaattctgtgatggaccactgaagccacacactgcctacagaatcagcattcgagcttttacacagctctttgatgaggacctgaaggaattcacaaagccactctattcagacacatttttttctttacccatcactactgaatcagagcccttgtttggagctattgaaggtgtgagtgctggtctgtttttaattggcatgctagtggctgttgttgccttattgatctgcagacagaaagtgagccatggtcgagaaagaccctctgcccgtctgagcattcgtagggatcgaccattatctgtccacttaaacctgggccagaaaggtaaccggaaaacttcttgtccaataaaaataaatcagtttgaagggcatttcatgaagctacaggctgactccaactaccttctatccaaggaatacgaggagttaaaagacgtgggccgaaaccagtcatgtgacattgcactcttgccggagaatagagggaaaaatcgatacaacaatatattgccctatgatgccacgcgagtgaagctctccaatgtagatgatgatccttgctctgactacatcaatgccagctacatccctggcaacaacttcagaagagaatacattgtcactcagggaccgcttcctggcaccaaggatgacttctggaaaatggtgtgggaacaaaacgttcacaacatcgtcatggtgacccagtgtgttgagaagggccgagtaaagtgtgatcattactggccagcggaccaggattccctctactatggggacctcatcctgcagatgctctcagagtccgtcctgcctgagtggaccatccgggagtttaagatatgcggtgaggaacagcttgatgcacacagactcatccgccactttcactatacggtgtggccagaccatggagtcccagaaaccacccagtctctgatccagtttgtgagaactgtcagggactacatcaacagaagcccgggtgctgggcccactgtggtgcactgcagtgctggtgtgggtaggactggaacctttattgcattggaccgaatcctccagcagttagactccaaagactctgtggacatttatggagcagtgcacgacctaagacttcacagggttcacatggtccagactgagtgtcagtatgtctacctacatcagtgtgtaagagatgtcctcagagcaagaaagctacggagtgaacaagaaaaccccttgtttccaatctatgaaaatgtgaatccagagtatcacagagatccagtctattcaaggcattgagaatgtacctgaagagctcctggataaaaattattcactgtgtgatttgtttttaaaaacttgcttcatgccctacagaggtgccagctatttctgttgatactatgtataatttattaatctggagaatgtttaaaattttatataatttaaaggtaacagatattattgtacatagttgtattttgtagtttcttctgtaaatatgtatttttcataatgtttaatattaagctttatataatactatttttccacactaaagtgttcatgacttgttctacataaaactaattcaacctgtatgacaggactactggtaaaatgcatatggaggtggtggcagagacaatccttcaggccatgttttctacctgttttgatattcactggacaggaaaaagggcagggctagagagagcaaatactatggctagatttgctgcattgctgtcccatgaatctcgagagccaacagacatgtcctaacttgctattaggacaaatgtgacagtcaaaaaaaggattagagggagggagaaaaaagaattaagcagtaccaaagctgaactagatgcttgtgtctgaactagttgctctctctctcctttctccttccagggattcaagccaaagtggtcagctcagggatcatgtaacttgcagtgcaagcccaggatggtaggatgcagggttgagggttctgatagagaatgattccaaacagaagtgatgaattccttttgttaataagatgccagctatacccagactggaaacataacatgcaaagcactatctacagtgattagagatcctttcattgcattcatggtgtggagtgtgaacatccacacccatactgtaatgtatttatacacactagtttctgtctcattttcagtggtctccattcctagaaaagtcacaattatccattcctacttgatttcccattaaaagaatattatggtagcagattgtgcccctcattaaaaggcttaatgccaacattttcatagaaatgactacaaacatcatatatagtaaatttaaaaacaatagcaaaaacaaaaacagtggtcttcagtaaaattttcaaaacttcttttagtaaatcaatgaagtcaaaatgtcaagtaatcacccaaagttgcatttaataacaaaaggcactacatactgtaccaagtttatcttcaatatttgtgccttacttactttgactataacaaattccaatgagtcagaaagtatttccttcatcaaggtccagttccgacagcattcctgggaaaaatttgaaaggagtttgtacggaatcttcatagatacctgagaagatgagctggagatgtttgcctttttcacactacaaatttttctgtaataaacttgggaattagaggtcaagtttgttgatggcatagcttcctttgcataaagagtatatttcttttcaaagtatatatttttgtaacctaccataaagtccgtaagtgaatacaacgaatgtaattgacataataattgaaaatcattgactatacctaaaatagttctttataattaaataactctacacccaatctggaaatttttccaaggttatttgaagtttacaaaaatgtgaagcataatcataagcttcaaagattcacagtttcattgtgctcaatgctcttgtgaaatgacagtcttaagctctgattctgtatcaaggaactaagtgaatcttctggaaatgaaaaggaacaacatatgtgtaagtgcagtagatgtaccaccagcgagaaaatagaggtcagagatctacaacgtgtggcatccattagaaatcacctttcctacattgaaaagaaaaaagagaaaaagcagaattttacactaatgttgcttgatgcaaagcacattaatgcttggaaggatacattcattttcgacttttcattcactcagaaaacttctagtaagtatctgcaacctgctaggcactgttccagaatctacacatttctactcacataaagagaatcctcataaagttaggattgttgttactaccttcaattgagcttaaaagacagcctcatcaagggaatgggataactgagccagtctaggacagtggtcaccttccacaggccacacactggaaagtgctaatgctactttaatagcaaacctctggatctaggagagagagcaattaattgcacaaaccaggagttaaaaccataaaaaaaacctatgcatctgtaatagtaaataacactcacgtactctggcaacatctagggtagtatcagaattatgtaaatggacatgacagggaaaaatcgtaggtttttttagtctaatccaacccaggaaatgtttattcctaccctacacctaattttaaaccttcttagcaacaaatatttcactattcgctcctactcctgggaagactaaatatataattgacttatttattaaatttaggagaaaaaaaaagttttccttgacattcagctctattggatttatttccatttaattgcatcatgtgttatgtcttggtaaacactccatttcctgtcttggtgggcatcctgtctgtgtacctgtgcagtacactttaatcatcaagacttcaaagtgcttttgagctatcaaatcttgggagagtcccatctagcatcttaataattatttttccaagttcgttataattaactcctttaacctcatctcattaaatcaattttgtattgtcattctgttgttctctggaaagcagccaattgttcagctcttgaatcagaattttcaaagactcacctctcttacctgggcttgcacatatttgtcctaagtaattctctatcccttaaacctctgagtccctctgttttattacttgccccactcctcctacttgaatatgtttgttttcccagttgaatgtgatttttatctactgttcatattatcttttatacccatgagtataatttcatagtcctttcaggttccacatcatcaaagagatgaccataatttcacttttttttgaaatgaagtcttgctctgttgcccaggctggagtgcagtggcacaatctcagctcactacaacctccgcctcccaggttcaagcgattctgccttagcctcccaagtagctggaattacaggtgcctgccaccatgtctggctaatttttgtgtttttagtagagatggggtttcaccatgttggccaggctggtcttgaactcgtgaccttaggtgatccacccacctcaacctcccaaagtgctaggattacaagagtgagccaccgcacctggccaattcacttttaaatactaaaaggcacacagcacacagacattttcggggcagttttctttgggagggtctttgataaattttgtaatcacctctcggaagaaagcccaaaatgacatgtgaaaataatattaaaccatttaccagatgtccagcaatataaaaatagacctcacatgctacccttcacatgctgattctcttgccttgctgtttaaggatccagtttcttatgttaaacattttccttaccttttgcaataatattattggccatatactaaattctcattcacttagctttctaagaattctttgaggttggaatcctgaaatcataaagctaccagatctgcacaacagcagtggtagtatctgagcccaaactctgagacgctctagagttttagtttacaaacatgagccagaccaaacctgacctggtgaaaatcaataggtaataaactgcttgtatatgatagcagttcaagggctttctgggttccatttcactgaggaaatgaaaatataactgattagccaagacagagtggcaataaggaataactgatcctcctccaagttgcagtgagcaagccctcaagcctacctcattcctgaagagttgaaggagaaaatgccgtgctaattttctgccctgctatttttaacctgaaatttagaattacatcaggtattcaaagaatgttccctatcaaaggaaaatctgtaaacgatgactgcaaaaagcaagtgaaatgatgcaaagagaaaatatttgcaaaacagaatctaaccagacatcatcatgaagataaaatggcatctcttctgtgtggcctgggtgtgcttggacaatcctgtcacacgtttctattaggacatgttgcccttttgaggattcactctatgttggccagatggtttaactgattaaacaattgaatcaatttattttgctttttgaattgaccagatatttaactaaatgtactgggtttggcattttagacacactgccttagattcttgtagtgcatgatgactttgaaaatgtttggccattttagttaaaatgcagggtaacatttgatgcagccatgataacaggaaaaatctgttctgttctaaaaatgtttctagcaatagaagtatttctggctaagagaatactcttgacttgtagggaggctccctcggaataaatgtatgcaacacaaataaggcattttattttttaaaagattgtctatataagatacacttattaaataaagaaattgttggtgaatgctctgaaaatagaggcttatgtaatggaaataagagattaacaggtttaccaaagattatttttataacctctatgccaattcacatgatcttatataagacaccaaaataagttattcaaaactgtgaataatgtcagacaaatgcaatgtgtcccttctagaacagtcacaaaaagaattggttatagctattttaataaataatatcctcaccccaagaacaaacgttcagttatgctgagatgttctaatagctgtgtgcgtagataagcacctccatcaagaaaggaacacatgaaattgtggctttaagagtttgtggcagagttggacagcattccatctgcaggttagtaggaaagcctgtaccagcctttgtggaatgtcctagtctgccacactgacaagagggtgcaccagtgctctactggaagagtatttctggttttctatgcaggactattgggcttataaattcctcaagaacaaggaccaagtctttaatctcgtctcgactcctaccttgtggaaattagtgcacagctcatagacattctacacacacttcttgaaattgctcctggcctgatattttggatgttaggtagtcagtgtccaataatactgttgtccgtgcaggttaatctagccattccttcatttgtgtgaagcataaataatgtaagtaaatacagcaactgaactttttatgttctataatagagcacttttatgtttttaatatcatttattatttctctgaaaatccagttaagatggcagatgattctattttttcatattatagcatctacccacaatatttctaactaactgtatttgaacaaagaacttccttagtctttcaatttaaattatgtatttgcttaatacatttttatatttgtaactgtggtaaaaaaaaaatctatatagcatcttgcatacattctcactagtacaggaataaaactgcagtttgttgaaggag

SEQ ID NO: 16904 - DNA, 6583 bp, Homo sapiens
  source 1..6583: mol_type = unassigned DNA
aagcatgaacagttgctaagtggaaaatggaggctgaattttacatggtgattcttacctgcttgatcttcaggaactcagaagggtttcagattgtccatgtccagaaacaacagtgtcttttcaaaaatgagaaagtggtcgtgggctcatgcaacaggaccatccagaaccagcagtggatgtggactgaggatgaaaagctccttcatgttaaatctgcactgtgcttggccatctccaactcttcccgcggcccctcccgctcagccatcttggaccgctgttcccaggcaccccgatggacctgctatgatcaggaaggcttccttgaggtggaaaatgcctctctctttctccagaaacaaggctccagagtagtggtcaagaaggccaggaaatacctccatagctggatgaaaatagatgtcaacaaggagggaaaactggtcaatgaaagcctctgtttacaaaaagctggcctgggagcagaagtttcggtgaggagcactagaaacacggctccaccccagattctcactacctttaatgcagttccagatggcctggtattccttattaggaataccacagaggccttcatcagaaatgctgcagaaaactacagccaaaacagcagcgagaggcagcatcccaatctgcacatgactggaattacagacacatcatgggttttgtcgactactcagcccttctccagcaccactgaagagactggactggcggagccagagagatgtaacttcaccctggcggagtccaaggcctccagccattctgtgtctatccagtggagaattttgggctcaccctgtaactttagcctcatctatagcagtgacaccctgggggccgcgttgtgccctacctttcggatagacaacaccacatacggatgtaaccttcaagatttacaagcaggaaccatctataacttcaggattatttctctggatgaagagagaacagtggtcttgcaaacagatcctttacctcctgctaggtttggagtcagtaaagagaagacgacttcaaccagcttgcatgtttggtggactccttcttccggaaaagtcacctcatatgaggtgcaattatttgatgaaaataaccaaaagatacagggggttcaaattcaagaaagtacttcatggaatgaatacacttttttcaatctcactgctggtagtaaatacaatattgccatcacagctgtttctggaggaaaacgttctttttcagtttataccaatggatcaacagtgccatctccagtgaaagatattggtatttccacaaaagccaattctctcctgatttcctggtcccatggttctgggaatgtggaacgataccggctgatgctaatggataaagggatcctagttcatggcggtgttgtggacaaacatgctacttcctatgcttttcacgggctgacccctggctacctctacaacctcactgttatgactgaggctgcagggctgcaaaactacaggtggaaactagtcaggacagcccccatggaagtctcaaatctgaaggtgacaaatgatggcagtttgacctctctaaaagtcaaatggcaaagacctcctggaaatgtggattcttacaatatcaccctgtctcacaaagggaccatcaaggaatccagagtattagcaccttggattactgaaactcactttaaagagttagtccccggtcgactttatcaagttactgtcagctgtgtctctggtgaactgtctgctcagaagatggcagtgggcagaacatttccagacaaagttgcaaacctggaggcaaacaataatggcaggatgaggtctcttgtagtgagctggtcgccccctgctggagactgggagcagtatcggatcctactcttcaatgattctgtggtgctgctcaacatcactgtgggaaaggaagaaacacagtatgtcatggatgacacggggctcgtaccgggaagacagtatgaggtggaagtcattgttgagagtggaaatttgaagaattctgagcgttgccaaggcaggacagtccccctggctgtcctccagcttcgtgtcaaacatgccaatgaaacctcactgagtatcatgtggcagacccctgtagcagaatgggagaaatacatcatttccctagctgacagagacctcttactgatccacaagtcactctccaaagatgccaaagaattcacttttactgacctggtgcctggacgaaaatacatggctacagtcaccagtattagtggagacttaaaaaattcctcttcagtaaaaggaagaacagtgcctgcccaagtgactgacttgcatgtggccaaccaaggaatgaccagtagtctgtttactaactggacccaggcacaaggagacgtagaattttaccaagtcttactgatccatgaaaatgtggtcattaaaaatgaaagcatctccagtgagaccagcagatacagcttccactctctcaagtccggcagcctgtactccgtggtggtaacaacagtgagtggagggatctcttcccgacaagtggttgtggagggaagaacagtgcctgacaaagtccagggagtcagtgttagcaactcagccaggagtgactatttaagggtatcctgggtgcatgccactggagactttgatcactatgaagtcaccattaaaaacaaaaacaacttcattcaaactaaaagcattcccaagtcagaaaacgaatgtgtatttgttcagctagtccctggacggttgtacagtgtcactgttactacaaaaagtggacaatatgaagccaatgaacaagggaatgggagaacaattccagagcctgttaaggatctaacattgcgcaacaggagcactgaggacttgcatgtgacttggtcaggagctaatggggatgtcgaccaatatgagatccagctgctcttcaatgacatgaaagtatttcctccttttcaccttgtaaataccgcaaccgagtatcgatttacttccctaacaccaggccgccaatacaaaattcttgtcttgacgattagcggggatgtacagcagtcagccttcattgagggcttcacagttcctagtgctgtcaaaaatattcacatttctcccaatggagcaacagatagcctgacggtgaactggactcctggtgggggagacgttgattcctacacggtgtcggcattcaggcacagtcaaaaggttgactctcagactattcccaagcacgtctttgagcacacgttccacagactggaggccggggagcagtaccagatcatgattgcctcagtcagcgggtccctgaagaatcagataaatgtggttgggcggacagttccagcatctgtccaaggagtaattgcagacaatgcatacagcagttattccttaatagtaagttggcaaaaagctgctggtgtggcagaaagatatgatatcctgcttctaactgaaaatggaatccttctgcgcaacacatcagagccagccaccactaagcaacacaaatttgaagatctaacaccaggcaagaaatacaagatacagatcctaactgtcagtggaggcctctttagcaaggaagcccagactgaaggccgaacagtcccagcagctgtcaccgacctgaggatcacagagaactccaccaggcacctgtccttccgctggaccgcctcagagggggagctcagctggtacaacatctttttgtacaacccagatgggaatctccaggagagagctcaagttgacccactagtccagagcttctctttccagaacttgctacaaggcagaatgtacaagatggtgattgtaactcacagtggggagctgtctaatgagtctttcatatttggtagaacagtcccagcctctgtgagtcatctcagggggtccaatcggaacacgacagacagcctttggttcaactggagtccagcctctggggactttgacttttatgagctgattctctataatcccaatggcacaaagaaggaaaactggaaagacaaggacctgacggagtggcggtttcaaggccttgttcctggaaggaagtacgtgctgtgggtggtaactcacagtggagatctcagcaataaagtcacagcggagagcagaacagctccaagtcctcccagtcttatgtcatttgctgacattgcaaacacatccttggccatcacgtggaaagggcccccagactggacagactacaacgactttgagctgcagtggttgcccagagatgcacttactgtcttcaacccctacaacaacagaaaatcagaaggacgcattgtgtatggtcttcgtccagggagatcctatcaattcaacgtcaagactgtcagtggtgattcctggaaaacttacagcaaaccaatttttggatctgtgaggacaaagcctgacaagatacaaaacctgcattgccggcctcagaactccacggccattgcctgttcttggatccctcctgattctgactttgatggttatagtattgaatgccggaaaatggacacccaagaagttgagttttccagaaagctggagaaagaaaaatctctgctcaacatcatgatgctagtgccccataagaggtacctggtgtccatcaaagtgcagtcggccggcatgaccagcgaggtggttgaagacagcactatcacaatgatagaccgcccccctcctccacccccacacattcgtgtgaatgaaaaggatgtgctaattagcaagtcttccatcaactttactgtcaactgcagctggttcagcgacaccaatggagctgtgaaatacttcacagtggtggtgagagaggctgatggcagtgatgagctgaagccagaacagcagcaccctctcccttcctacctggagtacaggcacaatgcctccattcgggtgtatcagactaattattttgccagcaaatgtgccgaaaatcctaacagcaactccaagagttttaacattaagcttggagcagagatggagagcctaggtggaaaatgcgatcccactcagcaaaaattctgtgatggaccactgaagccacacactgcctacagaatcagcattcgagcttttacacagctctttgatgaggacctgaaggaattcacaaagccactctattcagacacatttttttctttacccatcactactgaatcagagcccttgtttggagctattgaaggtgtgagtgctggtctgtttttaattggcatgctagtggctgttgttgccttattgatctgcagacagaaagtgagccatggtcgagaaagaccctctgcccgtctgagcattcgtagggatcgaccattatctgtccacttaaacctgggccagaaaggtaaccggaaaacttcttgtccaataaaaataaatcagtttgaagggcatttcatgaagctacaggctgactccaactaccttctatccaaggaatacgaggagttaaaagacgtgggccgaaaccagtcatgtgacattgcactcttgccggagaatagagggaaaaatcgatacaacaatatattgccctatgatgccacgcgagtgaagctctccaatgtagatgatgatccttgctctgactacatcaatgccagctacatccctggcaacaacttcagaagagaatacattgtcactcagggaccgcttcctggcaccaaggatgacttctggaaaatggtgtgggaacaaaacgttcacaacatcgtcatggtgacccagtgtgttgagaagggccgagtaaagtgtgatcattactggccagcggaccaggattccctctactatggggacctcatcctgcagatgctctcagagtccgtcctgcctgagtggaccatccgggagtttaagatatgcggtgaggaacagcttgatgcacacagactcatccgccactttcactatacggtgtggccagaccatggagtcccagaaaccacccagtctctgatccagtttgtgagaactgtcagggactacatcaacagaagcccgggtgctgggcccactgtggtgcactgcagtgctggtgtgggtaggactggaacctttattgcattggaccgaatcctccagcagttagactccaaagactctgtggacatttatggagcagtgcacgacctaagacttcacagggttcacatggtccagactgagtgtcagtatgtctacctacatcagtgtgtaagagatgtcctcagagcaagaaagctacggagtgaacaagaaaaccccttgtttccaatctatgaaaatgtgaatccagagtatcacagagatccagtctattcaaggcattgagaatgtacctgaagagctcctggataaaaattattcactgtgtgatttgtttttaaaaacttgcttcatgccctacagaggtgccagctatttctgttgatactatgtataatttattaatctggagaatgtttaaaattttatataatttaaaggtaacagatattattgta

SEQ ID NO: 16905 - DNA, 5839 bp, Homo sapiens
  source 1..5839: mol_type = unassigned DNA
tctcctctggatcttaactactgagcgcaatgctgagccatggagccgggttggccttgtggatcacactgagcctgctgcagactggactggcggagccagagagatgtaacttcaccctggcggagtccaaggcctccagccattctgtgtctatccagtggagaattttgggctcaccctgtaactttagcctcatctatagcagtgacaccctgggggccgcgttgtgccctacctttcggatagacaacaccacatacggatgtaaccttcaagatttacaagcaggaaccatctataacttcaggattatttctctggatgaagagagaacagtggtcttgcaaacagatcctttacctcctgctaggtttggagtcagtaaagagaagacgacttcaaccagcttgcatgtttggtggactccttcttccggaaaagtcacctcatatgaggtgcaattatttgatgaaaataaccaaaagatacagggggttcaaattcaagaaagtacttcatggaatgaatacacttttttcaatctcactgctggtagtaaatacaatattgccatcacagctgtttctggaggaaaacgttctttttcagtttataccaatggatcaacagtgccatctccagtgaaagatattggtatttccacaaaagccaattctctcctgatttcctggtcccatggttctgggaatgtggaacgataccggctgatgctaatggataaagggatcctagttcatggcggtgttgtggacaaacatgctacttcctatgcttttcacgggctgacccctggctacctctacaacctcactgttatgactgaggctgcagggctgcaaaactacaggtggaaactagtcaggacagcccccatggaagtctcaaatctgaaggtgacaaatgatggcagtttgacctctctaaaagtcaaatggcaaagacctcctggaaatgtggattcttacaatatcaccctgtctcacaaagggaccatcaaggaatccagagtattagcaccttggattactgaaactcactttaaagagttagtccccggtcgactttatcaagttactgtcagctgtgtctctggtgaactgtctgctcagaagatggcagtgggcagaacatttccagacaaagttgcaaacctggaggcaaacaataatggcaggatgaggtctcttgtagtgagctggtcgccccctgctggagactgggagcagtatcggatcctactcttcaatgattctgtggtgctgctcaacatcactgtgggaaaggaagaaacacagtatgtcatggatgacacggggctcgtaccgggaagacagtatgaggtggaagtcattgttgagagtggaaatttgaagaattctgagcgttgccaaggcaggacagtccccctggctgtcctccagcttcgtgtcaaacatgccaatgaaacctcactgagtatcatgtggcagacccctgtagcagaatgggagaaatacatcatttccctagctgacagagacctcttactgatccacaagtcactctccaaagatgccaaagaattcacttttactgacctggtgcctggacgaaaatacatggctacagtcaccagtattagtggagacttaaaaaattcctcttcagtaaaaggaagaacagtgcctgcccaagtgactgacttgcatgtggccaaccaaggaatgaccagtagtctgtttactaactggacccaggcacaaggagacgtagaattttaccaagtcttactgatccatgaaaatgtggtcattaaaaatgaaagcatctccagtgagaccagcagatacagcttccactctctcaagtccggcagcctgtactccgtggtggtaacaacagtgagtggagggatctcttcccgacaagtggttgtggagggaagaacagtcccttccagtgtgagtggagtaacggtgaacaattccggtcgtaatgactacctcagcgtttcctggctgctggcgcccggagatgtggataactatgaggtaacattgtctcatgacggcaaggtggttcagtcccttgtcattgccaagtctgtcagagaatgttccttcagctccctcaccccaggccgcctctacaccgtgaccataactacaaggagtggcaagtatgaaaatcactccttcagccaagagcggacagtgcctgacaaagtccagggagtcagtgttagcaactcagccaggagtgactatttaagggtatcctgggtgcatgccactggagactttgatcactatgaagtcaccattaaaaacaaaaacaacttcattcaaactaaaagcattcccaagtcagaaaacgaatgtgtatttgttcagctagtccctggacggttgtacagtgtcactgttactacaaaaagtggacaatatgaagccaatgaacaagggaatgggagaacaattccagagcctgttaaggatctaacattgcgcaacaggagcactgaggacttgcatgtgacttggtcaggagctaatggggatgtcgaccaatatgagatccagctgctcttcaatgacatgaaagtatttcctccttttcaccttgtaaataccgcaaccgagtatcgatttacttccctaacaccaggccgccaatacaaaattcttgtcttgacgattagcggggatgtacagcagtcagccttcattgagggcttcacagttcctagtgctgtcaaaaatattcacatttctcccaatggagcaacagatagcctgacggtgaactggactcctggtgggggagacgttgattcctacacggtgtcggcattcaggcacagtcaaaaggttgactctcagactattcccaagcacgtctttgagcacacgttccacagactggaggccggggagcagtaccagatcatgattgcctcagtcagcgggtccctgaagaatcagataaatgtggttgggcggacagtcccagcagctgtcaccgacctgaggatcacagagaactccaccaggcacctgtccttccgctggaccgcctcagagggggagctcagctggtacaacatctttttgtacaacccagatgggaatctccaggagagagctcaagttgacccactagtccagagcttctctttccagaacttgctacaaggcagaatgtacaagatggtgattgtaactcacagtggggagctgtctaatgagtctttcatatttggtagaacagtcccagcctctgtgagtcatctcagggggtccaatcggaacacgacagacagcctttggttcaactggagtccagcctctggggactttgacttttatgagctgattctctataatcccaatggcacaaagaaggaaaactggaaagacaaggacctgacggagtggcggtttcaaggccttgttcctggaaggaagtacgtgctgtgggtggtaactcacagtggagatctcagcaataaagtcacagcggagagcagaacagctccaagtcctcccagtcttatgtcatttgctgacattgcaaacacatccttggccatcacgtggaaagggcccccagactggacagactacaacgactttgagctgcagtggttgcccagagatgcacttactgtcttcaacccctacaacaacagaaaatcagaaggacgcattgtgtatggtcttcgtccagggagatcctatcaattcaacgtcaagactgtcagtggtgattcctggaaaacttacagcaaaccaatttttggatctgtgaggacaaagcctgacaagatacaaaacctgcattgccggcctcagaactccacggccattgcctgttcttggatccctcctgattctgactttgatggttatagtattgaatgccggaaaatggacacccaagaagttgagttttccagaaagctggagaaagaaaaatctctgctcaacatcatgatgctagtgccccataagaggtacctggtgtccatcaaagtgcagtcggccggcatgaccagcgaggtggttgaagacagcactatcacaatgatagaccgcccccctcctccacccccacacattcgtgtgaatgaaaaggatgtgctaattagcaagtcttccatcaactttactgtcaactgcagctggttcagcgacaccaatggagctgtgaaatacttcacagtggtggtgagagaggctgatggcagtgatgagctgaagccagaacagcagcaccctctcccttcctacctggagtacaggcacaatgcctccattcgggtgtatcagactaattattttgccagcaaatgtgccgaaaatcctaacagcaactccaagagttttaacattaagcttggagcagagatggagagcctaggtggaaaatgcgatcccactcagcaaaaattctgtgatggaccactgaagccacacactgcctacagaatcagcattcgagcttttacacagctctttgatgaggacctgaaggaattcacaaagccactctattcagacacatttttttctttacccatcactactgaatcagagcccttgtttggagctattgaaggtgtgagtgctggtctgtttttaattggcatgctagtggctgttgttgccttattgatctgcagacagaaagtgagccatggtcgagaaagaccctctgcccgtctgagcattcgtagggatcgaccattatctgtccacttaaacctgggccagaaaggtaaccggaaaacttcttgtccaataaaaataaatcagtttgaagggcatttcatgaagctacaggctgactccaactaccttctatccaaggaatacgaggagttaaaagacgtgggccgaaaccagtcatgtgacattgcactcttgccggagaatagagggaaaaatcgatacaacaatatattgccctatgatgccacgcgagtgaagctctccaatgtagatgatgatccttgctctgactacatcaatgccagctacatccctggcaacaacttcagaagagaatacattgtcactcagggaccgcttcctggcaccaaggatgacttctggaaaatggtgtgggaacaaaacgttcacaacatcgtcatggtgacccagtgtgttgagaagggccgagtaaagtgtgatcattactggccagcggaccaggattccctctactatggggacctcatcctgcagatgctctcagagtccgtcctgcctgagtggaccatccgggagtttaagatatgcggtgaggaacagcttgatgcacacagactcatccgccactttcactatacggtgtggccagaccatggagtcccagaaaccacccagtctctgatccagtttgtgagaactgtcagggactacatcaacagaagcccgggtgctgggcccactgtggtgcactgcagtgctggtgtgggtaggactggaacctttattgcattggaccgaatcctccagcagttagactccaaagactctgtggacatttatggagcagtgcacgacctaagacttcacagggttcacatggtccagactgagtgtcagtatgtctacctacatcagtgtgtaagagatgtcctcagagcaagaaagctacggagtgaacaagaaaaccccttgtttccaatctatgaaaatgtgaatccagagtatcacagagatccagtctattcaaggcattgagaatgtacctgaagagctcctggataaaaattattcactgtgtgatttgtttttaaaaacttgcttcatgccctacagaggtgcca

SEQ ID NO: 16906 - DNA, 5839 bp, Homo sapiens
  source 1..5839: mol_type = unassigned DNA
tctcctctggatcttaactactgagcgcaatgctgagccatggagccgggttggccttgtggatcacactgagcctgctgcagactggactggcggagccagagagatgtaacttcaccctggcggagtccaaggcctccagccattctgtgtctatccagtggagaattttgggctcaccctgtaactttagcctcatctatagcagtgacaccctgggggccgcgttgtgccctacctttcggatagacaacaccacatacggatgtaaccttcaagatttacaagcaggaaccatctataacttcaggattatttctctggatgaagagagaacagtggtcttgcaaacagatcctttacctcctgctaggtttggagtcagtaaagagaagacgacttcaaccagcttgcatgtttggtggactccttcttccggaaaagtcacctcatatgaggtgcaattatttgatgaaaataaccaaaagatacagggggttcaaattcaagaaagtacttcatggaatgaatacacttttttcaatctcactgctggtagtaaatacaatattgccatcacagctgtttctggaggaaaacgttctttttcagtttataccaatggatcaacagtgccatctccagtgaaagatattggtatttccacaaaagccaattctctcctgatttcctggtcccatggttctgggaatgtggaacgataccggctgatgctaatggataaagggatcctagttcatggcggtgttgtggacaaacatgctacttcctatgcttttcacgggctgacccctggctacctctacaacctcactgttatgactgaggctgcagggctgcaaaactacaggtggaaactagtcaggacagcccccatggaagtctcaaatctgaaggtgacaaatgatggcagtttgacctctctaaaagtcaaatggcaaagacctcctggaaatgtggattcttacaatatcaccctgtctcacaaagggaccatcaaggaatccagagtattagcaccttggattactgaaactcactttaaagagttagtccccggtcgactttatcaagttactgtcagctgtgtctctggtgaactgtctgctcagaagatggcagtgggcagaacattccccctggctgtcctccagcttcgtgtcaaacatgccaatgaaacctcactgagtatcatgtggcagacccctgtagcagaatgggagaaatacatcatttccctagctgacagagacctcttactgatccacaagtcactctccaaagatgccaaagaattcacttttactgacctggtgcctggacgaaaatacatggctacagtcaccagtattagtggagacttaaaaaattcctcttcagtaaaaggaagaacagtgcctgcccaagtgactgacttgcatgtggccaaccaaggaatgaccagtagtctgtttactaactggacccaggcacaaggagacgtagaattttaccaagtcttactgatccatgaaaatgtggtcattaaaaatgaaagcatctccagtgagaccagcagatacagcttccactctctcaagtccggcagcctgtactccgtggtggtaacaacagtgagtggagggatctcttcccgacaagtggttgtggagggaagaacagtcccttccagtgtgagtggagtaacggtgaacaattccggtcgtaatgactacctcagcgtttcctggctgctggcgcccggagatgtggataactatgaggtaacattgtctcatgacggcaaggtggttcagtcccttgtcattgccaagtctgtcagagaatgttccttcagctccctcaccccaggccgcctctacaccgtgaccataactacaaggagtggcaagtatgaaaatcactccttcagccaagagcggacagtgcctgacaaagtccagggagtcagtgttagcaactcagccaggagtgactatttaagggtatcctgggtgcatgccactggagactttgatcactatgaagtcaccattaaaaacaaaaacaacttcattcaaactaaaagcattcccaagtcagaaaacgaatgtgtatttgttcagctagtccctggacggttgtacagtgtcactgttactacaaaaagtggacaatatgaagccaatgaacaagggaatgggagaacaattccagagcctgttaaggatctaacattgcgcaacaggagcactgaggacttgcatgtgacttggtcaggagctaatggggatgtcgaccaatatgagatccagctgctcttcaatgacatgaaagtatttcctccttttcaccttgtaaataccgcaaccgagtatcgatttacttccctaacaccaggccgccaatacaaaattcttgtcttgacgattagcggggatgtacagcagtcagccttcattgagggcttcacagttcctagtgctgtcaaaaatattcacatttctcccaatggagcaacagatagcctgacggtgaactggactcctggtgggggagacgttgattcctacacggtgtcggcattcaggcacagtcaaaaggttgactctcagactattcccaagcacgtctttgagcacacgttccacagactggaggccggggagcagtaccagatcatgattgcctcagtcagcgggtccctgaagaatcagataaatgtggttgggcggacagttccagcatctgtccaaggagtaattgcagacaatgcatacagcagttattccttaatagtaagttggcaaaaagctgctggtgtggcagaaagatatgatatcctgcttctaactgaaaatggaatccttctgcgcaacacatcagagccagccaccactaagcaacacaaatttgaagatctaacaccaggcaagaaatacaagatacagatcctaactgtcagtggaggcctctttagcaaggaagcccagactgaaggccgaacagtcccagcagctgtcaccgacctgaggatcacagagaactccaccaggcacctgtccttccgctggaccgcctcagagggggagctcagctggtacaacatctttttgtacaacccagatgggaatctccaggagagagctcaagttgacccactagtccagagcttctctttccagaacttgctacaaggcagaatgtacaagatggtgattgtaactcacagtggggagctgtctaatgagtctttcatatttggtagaacagtcccagcctctgtgagtcatctcagggggtccaatcggaacacgacagacagcctttggttcaactggagtccagcctctggggactttgacttttatgagctgattctctataatcccaatggcacaaagaaggaaaactggaaagacaaggacctgacggagtggcggtttcaaggccttgttcctggaaggaagtacgtgctgtgggtggtaactcacagtggagatctcagcaataaagtcacagcggagagcagaacagctccaagtcctcccagtcttatgtcatttgctgacattgcaaacacatccttggccatcacgtggaaagggcccccagactggacagactacaacgactttgagctgcagtggttgcccagagatgcacttactgtcttcaacccctacaacaacagaaaatcagaaggacgcattgtgtatggtcttcgtccagggagatcctatcaattcaacgtcaagactgtcagtggtgattcctggaaaacttacagcaaaccaatttttggatctgtgaggacaaagcctgacaagatacaaaacctgcattgccggcctcagaactccacggccattgcctgttcttggatccctcctgattctgactttgatggttatagtattgaatgccggaaaatggacacccaagaagttgagttttccagaaagctggagaaagaaaaatctctgctcaacatcatgatgctagtgccccataagaggtacctggtgtccatcaaagtgcagtcggccggcatgaccagcgaggtggttgaagacagcactatcacaatgatagaccgcccccctcctccacccccacacattcgtgtgaatgaaaaggatgtgctaattagcaagtcttccatcaactttactgtcaactgcagctggttcagcgacaccaatggagctgtgaaatacttcacagtggtggtgagagaggctgatggcagtgatgagctgaagccagaacagcagcaccctctcccttcctacctggagtacaggcacaatgcctccattcgggtgtatcagactaattattttgccagcaaatgtgccgaaaatcctaacagcaactccaagagttttaacattaagcttggagcagagatggagagcctaggtggaaaatgcgatcccactcagcaaaaattctgtgatggaccactgaagccacacactgcctacagaatcagcattcgagcttttacacagctctttgatgaggacctgaaggaattcacaaagccactctattcagacacatttttttctttacccatcactactgaatcagagcccttgtttggagctattgaaggtgtgagtgctggtctgtttttaattggcatgctagtggctgttgttgccttattgatctgcagacagaaagtgagccatggtcgagaaagaccctctgcccgtctgagcattcgtagggatcgaccattatctgtccacttaaacctgggccagaaaggtaaccggaaaacttcttgtccaataaaaataaatcagtttgaagggcatttcatgaagctacaggctgactccaactaccttctatccaaggaatacgaggagttaaaagacgtgggccgaaaccagtcatgtgacattgcactcttgccggagaatagagggaaaaatcgatacaacaatatattgccctatgatgccacgcgagtgaagctctccaatgtagatgatgatccttgctctgactacatcaatgccagctacatccctggcaacaacttcagaagagaatacattgtcactcagggaccgcttcctggcaccaaggatgacttctggaaaatggtgtgggaacaaaacgttcacaacatcgtcatggtgacccagtgtgttgagaagggccgagtaaagtgtgatcattactggccagcggaccaggattccctctactatggggacctcatcctgcagatgctctcagagtccgtcctgcctgagtggaccatccgggagtttaagatatgcggtgaggaacagcttgatgcacacagactcatccgccactttcactatacggtgtggccagaccatggagtcccagaaaccacccagtctctgatccagtttgtgagaactgtcagggactacatcaacagaagcccgggtgctgggcccactgtggtgcactgcagtgctggtgtgggtaggactggaacctttattgcattggaccgaatcctccagcagttagactccaaagactctgtggacatttatggagcagtgcacgacctaagacttcacagggttcacatggtccagactgagtgtcagtatgtctacctacatcagtgtgtaagagatgtcctcagagcaagaaagctacggagtgaacaagaaaaccccttgtttccaatctatgaaaatgtgaatccagagtatcacagagatccagtctattcaaggcattgagaatgtacctgaagagctcctggataaaaattattcactgtgtgatttgtttttaaaaacttgcttcatgccctacagaggtgcca

SEQ ID NO: 16907 - DNA, 6110 bp, Homo sapiens
  source 1..6110: mol_type = unassigned DNA
gtctcctctggatcttaactactgagcgcaatgctgagccatggagccgggttggccttgtggatcacactgagcctgctgcagactggactggcggagccagagagatgtaacttcaccctggcggagtccaaggcctccagccattctgtgtctatccagtggagaattttgggctcaccctgtaactttagcctcatctatagcagtgacaccctgggggccgcgttgtgccctacctttcggatagacaacaccacatacggatgtaaccttcaagatttacaagcaggaaccatctataacttcaggattatttctctggatgaagagagaacagtggtcttgcaaacagatcctttacctcctgctaggtttggagtcagtaaagagaagacgacttcaaccagcttgcatgtttggtggactccttcttccggaaaagtcacctcatatgaggtgcaattatttgatgaaaataaccaaaagatacagggggttcaaattcaagaaagtacttcatggaatgaatacacttttttcaatctcactgctggtagtaaatacaatattgccatcacagctgtttctggaggaaaacgttctttttcagtttataccaatggatcaacagtgccatctccagtgaaagatattggtatttccacaaaagccaattctctcctgatttcctggtcccatggttctgggaatgtggaacgataccggctgatgctaatggataaagggatcctagttcatggcggtgttgtggacaaacatgctacttcctatgcttttcacgggctgacccctggctacctctacaacctcactgttatgactgaggctgcagggctgcaaaactacaggtggaaactagtcaggacagcccccatggaagtctcaaatctgaaggtgacaaatgatggcagtttgacctctctaaaagtcaaatggcaaagacctcctggaaatgtggattcttacaatatcaccctgtctcacaaagggaccatcaaggaatccagagtattagcaccttggattactgaaactcactttaaagagttagtccccggtcgactttatcaagttactgtcagctgtgtctctggtgaactgtctgctcagaagatggcagtgggcagaacatttccagacaaagttgcaaacctggaggcaaacaataatggcaggatgaggtctcttgtagtgagctggtcgccccctgctggagactgggagcagtatcggatcctactcttcaatgattctgtggtgctgctcaacatcactgtgggaaaggaagaaacacagtatgtcatggatgacacggggctcgtaccgggaagacagtatgaggtggaagtcattgttgagagtggaaatttgaagaattctgagcgttgccaaggcaggacagtccccctggctgtcctccagcttcgtgtcaaacatgccaatgaaacctcactgagtatcatgtggcagacccctgtagcagaatgggagaaatacatcatttccctagctgacagagacctcttactgatccacaagtcactctccaaagatgccaaagaattcacttttactgacctggtgcctggacgaaaatacatggctacagtcaccagtattagtggagacttaaaaaattcctcttcagtaaaaggaagaacagtgcctgcccaagtgactgacttgcatgtggccaaccaaggaatgaccagtagtctgtttactaactggacccaggcacaaggagacgtagaattttaccaagtcttactgatccatgaaaatgtggtcattaaaaatgaaagcatctccagtgagaccagcagatacagcttccactctctcaagtccggcagcctgtactccgtggtggtaacaacagtgagtggagggatctcttcccgacaagtggttgtggagggaagaacagtcccttccagtgtgagtggagtaacggtgaacaattccggtcgtaatgactacctcagcgtttcctggctgctggcgcccggagatgtggataactatgaggtaacattgtctcatgacggcaaggtggttcagtcccttgtcattgccaagtctgtcagagaatgttccttcagctccctcaccccaggccgcctctacaccgtgaccataactacaaggagtggcaagtatgaaaatcactccttcagccaagagcggacagtgcctgacaaagtccagggagtcagtgttagcaactcagccaggagtgactatttaagggtatcctgggtgcatgccactggagactttgatcactatgaagtcaccattaaaaacaaaaacaacttcattcaaactaaaagcattcccaagtcagaaaacgaatgtgtatttgttcagctagtccctggacggttgtacagtgtcactgttactacaaaaagtggacaatatgaagccaatgaacaagggaatgggagaacaattccagagcctgttaaggatctaacattgcgcaacaggagcactgaggacttgcatgtgacttggtcaggagctaatggggatgtcgaccaatatgagatccagctgctcttcaatgacatgaaagtatttcctccttttcaccttgtaaataccgcaaccgagtatcgatttacttccctaacaccaggccgccaatacaaaattcttgtcttgacgattagcggggatgtacagcagtcagccttcattgagggcttcacagttcctagtgctgtcaaaaatattcacatttctcccaatggagcaacagatagcctgacggtgaactggactcctggtgggggagacgttgattcctacacggtgtcggcattcaggcacagtcaaaaggttgactctcagactattcccaagcacgtctttgagcacacgttccacagactggaggccggggagcagtaccagatcatgattgcctcagtcagcgggtccctgaagaatcagataaatgtggttgggcggacagttccagcatctgtccaaggagtaattgcagacaatgcatacagcagttattccttaatagtaagttggcaaaaagctgctggtgtggcagaaagatatgatatcctgcttctaactgaaaatggaatccttctgcgcaacacatcagagccagccaccactaagcaacacaaatttgaagatctaacaccaggcaagaaatacaagatacagatcctaactgtcagtggaggcctctttagcaaggaagcccagactgaaggccgaacagtcccagcagctgtcaccgacctgaggatcacagagaactccaccaggcacctgtccttccgctggaccgcctcagagggggagctcagctggtacaacatctttttgtacaacccagatgggaatctccaggagagagctcaagttgacccactagtccagagcttctctttccagaacttgctacaaggcagaatgtacaagatggtgattgtaactcacagtggggagctgtctaatgagtctttcatatttggtagaacagtcccagcctctgtgagtcatctcagggggtccaatcggaacacgacagacagcctttggttcaactggagtccagcctctggggactttgacttttatgagctgattctctataatcccaatggcacaaagaaggaaaactggaaagacaaggacctgacggagtggcggtttcaaggccttgttcctggaaggaagtacgtgctgtgggtggtaactcacagtggagatctcagcaataaagtcacagcggagagcagaacagctccaagtcctcccagtcttatgtcatttgctgacattgcaaacacatccttggccatcacgtggaaagggcccccagactggacagactacaacgactttgagctgcagtggttgcccagagatgcacttactgtcttcaacccctacaacaacagaaaatcagaaggacgcattgtgtatggtcttcgtccagggagatcctatcaattcaacgtcaagactgtcagtggtgattcctggaaaacttacagcaaaccaatttttggatctgtgaggacaaagcctgacaagatacaaaacctgcattgccggcctcagaactccacggccattgcctgttcttggatccctcctgattctgactttgatggttatagtattgaatgccggaaaatggacacccaagaagttgagttttccagaaagctggagaaagaaaaatctctgctcaacatcatgatgctagtgccccataagaggtacctggtgtccatcaaagtgcagtcggccggcatgaccagcgaggtggttgaagacagcactatcacaatgatagaccgcccccctcctccacccccacacattcgtgtgaatgaaaaggatgtgctaattagcaagtcttccatcaactttactgtcaactgcagctggttcagcgacaccaatggagctgtgaaatacttcacagtggtggtgagagaggctgatggcagtgatgagctgaagccagaacagcagcaccctctcccttcctacctggagtacaggcacaatgcctccattcgggtgtatcagactaattattttgccagcaaatgtgccgaaaatcctaacagcaactccaagagttttaacattaagcttggagcagagatggagagcctaggtggaaaatgcgatcccactcagcaaaaattctgtgatggaccactgaagccacacactgcctacagaatcagcattcgagcttttacacagctctttgatgaggacctgaaggaattcacaaagccactctattcagacacatttttttctttacccatcactactgaatcagagcccttgtttggagctattgaaggtgtgagtgctggtctgtttttaattggcatgctagtggctgttgttgccttattgatctgcagacagaaagtgagccatggtcgagaaagaccctctgcccgtctgagcattcgtagggatcgaccattatctgtccacttaaacctgggccagaaaggtaaccggaaaacttcttgtccaataaaaataaatcagtttgaagggcatttcatgaagctacaggctgactccaactaccttctatccaaggaatacgaggagttaaaagacgtgggccgaaaccagtcatgtgacattgcactcttgccggagaatagagggaaaaatcgatacaacaatatattgccctatgatgccacgcgagtgaagctctccaatgtagatgatgatccttgctctgactacatcaatgccagctacatccctggcaacaacttcagaagagaatacattgtcactcagggaccgcttcctggcaccaaggatgacttctggaaaatggtgtgggaacaaaacgttcacaacatcgtcatggtgacccagtgtgttgagaagggccgagtaaagtgtgatcattactggccagcggaccaggattccctctactatggggacctcatcctgcagatgctctcagagtccgtcctgcctgagtggaccatccgggagtttaagatatgcggtgaggaacagcttgatgcacacagactcatccgccactttcactatacggtgtggccagaccatggagtcccagaaaccacccagtctctgatccagtttgtgagaactgtcagggactacatcaacagaagcccgggtgctgggcccactgtggtgcactgcagtgctggtgtgggtaggactggaacctttattgcattggaccgaatcctccagcagttagactccaaagactctgtggacatttatggagcagtgcacgacctaagacttcacagggttcacatggtccagactgagtgtcagtatgtctacctacatcagtgtgtaagagatgtcctcagagcaagaaagctacggagtgaacaagaaaaccccttgtttccaatctatgaaaatgtgaatccagagtatcacagagatccagtctattcaaggcattgagaatgtacctgaagagctcctggataaaaattattcactgtgtgatttgtttttaaaaacttgcttcatgccctacagaggtgcca

SEQ ID NO: 16908 - DNA, 552 bp, Homo sapiens
  source 1..552: mol_type = unassigned DNA
cataatcagaataaaagttatctcccttatgtttcagccatggtcgagaaagaccctctgcccgtctgagcattcgtagggatcgaccattatctgtccacttaaacctgggccagaaaggtaaccggaaaacttcttggtaagagagagaacacattaattactatattatctgcctttgaaatatgagtcagaatagttatggcactttcccttttctgcagtaactcttttctgtttgtttcatttttaattacagtccaataaaaataaatcagtttgaagggcatttcatgaagctacaggctgactccaactaccttctatccaaggaatacgaggtacaactcaggcagaatgaagcttcagcatccctagttcttagcagaatttccttcctaatgtttactgtgtcatcataggctgattgagctcagaagttaggaggctgcttagaatctcagctgagcactcttttatgcctaaactatgccctgaatagaatataccatctaatcttagaggccagcttgagctccagaataacacagc

SEQ ID NO: 16909 - DNA, 5291 bp, Homo sapiens
  source 1..5291: mol_type = unassigned DNA
agcatgaacagttgctaagtggaaaatggaggctgaattttacatggtgattcttacctgcttgatcttcaggaactcagggtttcagattgtccatgtccagaaacaacagtgtcttttcaaaaatgagaaagtggtcgtgggctcatgcaacaggaccatccagaaccagcagtggatgtggactgaggatgaaaagctccttcatgttaaatctgcactgtgcttggccatctccaactcttcccgcggcccctcccgctcagccatcttggaccgctgttcccaggcaccccgatggacctgctatgatcaggaaggcttccttgaggtggaaaatgcctctctctttctccagaaacaaggctccagagtagtggtcaagaaggccaggaaatacctccatagctggatgaaaatagatgtcaacaaggagggaaaactggtcaatgaaagcctctgtttacaaaaagctggcctgggagcagaagtttcggtgaggagcactagaaacacggctccaccccagattctcactacctttaatgcagttccagatggcctggtattccttattaggaataccacagaggccttcatcagaaatgctgcagaaaactacagccaaaacagcagcgagaggcagcatcccaatctgcacatgactggaattacagacacatcatgggttttgtcgactactcagcccttctccagcaccactgaagagactggactggcggagccagagagatgtaacttcaccctggcggagtccaaggcctccagccattctgtgtctatccagtggagaattttgggctcaccctgtaactttagcctcatctatagcagtgacaccctgggggccgcgttgtgccctacctttcggatagacaacaccacatacggatgtaaccttcaagatttacaagcaggaaccatctataacttcaggattatttctctggatgaagagagaacagtggtcttgcaaacagatcctttacctcctgctaggtttggagtcagtaaagagaagacgacttcaaccagcttgcatgtttggtggactccttcttccggaaaagtcacctcatatgaggtgcaattatttgatgaaaataaccaaaagatacagggggttcaaattcaagaaagtacttcatggaatgaatacacttttttcaatctcactgctggtagtaaatacaatattgccatcacagctgtttctggaggaaaacgttctttttcagtttataccaatggatcaacagtgccatctccagtgaaagatattggtatttccacaaaagccaattctctcctgatttcctggtcccatggttctgggaatgtggaacgataccggctgatgctaatggataaagggatcctagttcatggcggtgttgtggacaaacatgctacttcctatgcttttcacgggctgacccctggctacctctacaacctcactgttatgactgaggctgcagggctgcaaaactacaggtggaaactagtcaggacagcccccatggaagtctcaaatctgaaggtgacaaatgatggcagtttgacctctctaaaagtcaaatggcaaagacctcctggaaatgtggattcttacaatatcaccctgtctcacaaagggaccatcaaggaatccagagtattagcaccttggattactgaaactcactttaaagagttagtccccggtcgactttatcaagttactgtcagctgtgtctctggtgaactgtctgctcagaagatggcagtgggcagaacatttccagacaaagttgcaaacctggaggcaaacaataatggcaggatgaggtctcttgtagtgagctggtcgccccctgctggagactgggagcagtatcggatcctactcttcaatgattctgtggtgctgctcaacatcactgtgggaaaggaagaaacacagtatgtcatggatgacacggggctcgtaccgggaagacagtatgaggtggaagtcattgttgagagtggaaatttgaagaattctgagcgttgccaaggcaggacagtccccctggctgtcctccagcttcgtgtcaaacatgccaatgaaacctcactgagtatcatgtggcagacccctgtagcagaatgggagaaatacatcatttccctagctgacagagacctcttactgatccacaagtcactctccaaagatgccaaagaattcacttttactgacctggtgcctggacgaaaatacatggctacagtcaccagtattagtggagacttaaaaaattcctcttcagtaaaaggaagaacagtgcctgcccaagtgactgacttgcatgtggccaaccaaggaatgaccagtagtctgtttactaactggacccaggcacaaggagacgtagaattttaccaagtcttactgatccatgaaaatgtggtcattaaaaatgaaagcatctccagtgagaccagcagatacagcttccactctctcaagtccggcagcctgtactccgtggtggtaacaacagtgagtggagggatctcttcccgacaagtggttgtggagggaagaacagtcccttccagtgtgagtggagtaacggtgaacaattccggtcgtaatgactacctcagcgtttcctggctgctggcgcccggagatgtggataactatgaggtaacattgtctcatgacggcaaggtggttcagtcccttgtcattgccaagtctgtcagagaatgttccttcagctccctcaccccaggccgcctctacaccgtgaccataactacaaggagtggcaagtatgaaaatcactccttcagccaagagcggacagtgcctgacaaagtccagggagtcagtgttagcaactcagccaggagtgactatttaagggtatcctgggtgcatgccactggagactttgatcactatgaagtcaccattaaaaacaaaaacaacttcattcaaactaaaagcattcccaagtcagaaaacgaatgtgtatttgttcagctagtccctggacggttgtacagtgtcactgttactacaaaaagtggacaatatgaagccaatgaacaagggaatgggagaacaattccagagcctgttaaggatctaacattgcgcaacaggagcactgaggacttgcatgtgacttggtcaggagctaatggggatgtcgaccaatatgagatccagctgctcttcaatgacatgaaagtatttcctccttttcaccttgtaaataccgcaaccgagtatcgatttacttccctaacaccaggccgccaatacaaaattcttgtcttgacgattagcggggatgtacagcagtcagccttcattgagggcttcacagttcctagtgctgtcaaaaatattcacatttctcccaatggagcaacagatagcctgacggtgaactggactcctggtgggggagacgttgattcctacacggtgtcggcattcaggcacagtcaaaaggttgactctcagactattcccaagcacgtctttgagcacacgttccacagactggaggccggggagcagtaccagatcatgattgcctcagtcagcgggtccctgaagaatcagataaatgtggttgggcggacagttccagcatctgtccaaggagtaattgcagacaatgcatacagcagttattccttaatagtaagttggcaaaaagctgctggtgtggcagaaagatatgatatcctgcttctaactgaaaatggaatccttctgcgcaacacatcagagccagccaccactaagcaacacaaatttgaagatctaacaccaggcaagaaatacaagatacagatcctaactgtcagtggaggcctctttagcaaggaagcccagactgaaggccgaacagtcccagcagctgtcaccgacctgaggatcacagagaactccaccaggcacctgtccttccgctggaccgcctcagagggggagctcagctggtacaacatctttttgtacaacccagatgggaatctccaggagagagctcaagttgacccactagtccagagcttctctttccagaacttgctacaaggcagaatgtacaagatggtgattgtaactcacagtggggagctgtctaatgagtctttcatatttggtagaacagtcccagcctctgtgagtcatctcagggggtccaatcggaacacgacagacagcctttggttcaactggagtccagcctctggggactttgacttttatgagctgattctctataatcccaatggcacaaagaaggaaaactggaaagacaaggacctgacggagtggcggtttcaaggccttgttcctggaaggaagtacgtgctgtgggtggtaactcacagtggagatctcagcaataaagtcacagcggagagcagaacagctccaagtcctcccagtcttatgtcatttgctgacattgcaaacacatccttggccatcacgtggaaagggcccccagactggacagactacaacgactttgagctgcagtggttgcccagagatgcacttactgtcttcaacccctacaacaacagaaaatcagaaggacgcattgtgtatggtcttcgtccagggagatcctatcaattcaacgtcaagactgtcagtggtgattcctggaaaacttacagcaaaccaatttttggatctgtgaggacaagtatgacatgttttgctactcttatttctcaaatggagtagaggaagtatatgttcaacatcttactcaaatagggcttggattaaatccatatttttacatgggattggtctggatttgaattcaggcagaagtctctgtagatttgttcgttcattcaacattaacaacaagggacaataaatctctctctgccctcatggggcttacaattaggtaggacgtactatttgtaaatagacattatattttgggtgtgatgagggaagtaaatggtactatggagacacttgttaggtaatctgacccaatacaagagaacttcttggaaaaggaaacatccaaatagaaacctaaagcaagagatttaccaggtagaggtaggggaagaagtggagaatattccaggtagagagaataaaatattccaagatgagagaggagggagagtacaagatctaccaataggggaacagaaagaagtttatttggccatagcataaaaggtgaggattaagggaatcagataataaaatattttgtattccatggtaa

SEQ ID NO: 16910 - DNA, 4237 bp, Homo sapiens
  source 1..4237: mol_type = unassigned DNA
agttgctaagtggaaaatggaggctgaattttacatggtgattcttacctgcttgatcttcaggaactcagaagggtttcagattgtccatgtccagaaacaacagtgtcttttcaaaaatgagaaagtggtcgtgggctcatgcaacaggaccatccagaaccagcagtggatgtggactgaggatgaaaagctccttcatgttaaatctgcactgtgcttggccttcatcagaaatgctgcagaaaactacagccaaaacagcagcgagaggcagcatcccaatctgcacatgactggaattacagacacatcatgggttttgtcgactactcagcccttctccagcaccactgaagagactggactggcggagccagagagatgtaacttcaccctggcggagtccaaggcctccagccattctgtgtctatccagtggagaattttgggctcaccctgtaactttagcctcatctatagcagtgacaccctgggggccgcgttgtgccctacctttcggatagacaacaccacatacggatgtaaccttcaagatttacaagcaggaaccatctataacttcaggattatttctctggatgaagagagaacagtggtcttgcaaacagatcctttacctcctgctaggtttggagtcagtaaagagaagacgacttcaaccagcttgcatgtttggtggactccttcttccggaaaagtcacctcatatgaggtgcaattatttgatgaaaataaccaaaagatacagggggttcaaattcaagaaagtacttcatggaatgaatacacttttttcaatctcactgctggtagtaaatacaatattgccatcacagctgtttctggaggaaaacgttctttttcagtttataccaatggatcaacagtgccatctccagtgaaagatattggtatttccacaaaagccaattctctcctgatttcctggtcccatggttctgggaatgtggaacgataccggctgatgctaatggataaagggatcctagttcatggcggtgttgtggacaaacatgctacttcctatgcttttcacgggctgacccctggctacctctacaacctcactgttatgactgaggctgcagggctgcaaaactacaggtggaaactagtcaggacagcccccatggaagtctcaaatctgaaggtgacaaatgatggcagtttgacctctctaaaagtcaaatggcaaagacctcctggaaatgtggattcttacaatatcaccctgtctcacaaagggaccatcaaggaatccagagtattagcaccttggattactgaaactcactttaaagagttagtccccggtcgactttatcaagttactgtcagctgtgtctctggtgaactgtctgctcagaagatggcagtgggcagaacatttccagacaaagttgcaaacctggaggcaaacaataatggcaggatgaggtctcttgtagtgagctggtcgccccctgctggagactgggagcagtatcggatcctactcttcaatgattctgtggtgctgctcaacatcactgtgggaaaggaagaaacacagtatgtcatggatgacacggggctcgtaccgggaagacagtatgaggtggaagtcattgttgagagtggaaatttgaagaattctgagcgttgccaaggcaggacagtccccctggctgtcctccagcttcgtgtcaaacatgccaatgaaacctcactgagtatcatgtggcagacccctgtagcagaatgggagaaatacatcatttccctagctgacagagacctcttactgatccacaagtcactctccaaagatgccaaagaattcacttttactgacctggtgcctggacgaaaatacatggctacagtcaccagtattagtggagacttaaaaaattcctcttcagtaaaaggaagaacagtgcctgcccaagtgactgacttgcatgtggccaaccaaggaatgaccagtagtctgtttactaactggacccaggcacaaggagacgtagaattttaccaagtcttactgatccatgaaaatgtggtcattaaaaatgaaagcatctccagtgagaccagcagatacagcttccactctctcaagtccggcagcctgtactccgtggtggtaacaacagtgagtggagggatctcttcccgacaagtggttgtggagggaagaacagtcccttccagtgtgagtggagtaacggtgaacaattccggtcgtaatgactacctcagcgtttcctggctgctggcgcccggagatgtggataactatgaggtaacattgtctcatgacggcaaggtggttcagtcccttgtcattgccaagtctgtcagagaatgttccttcagctccctcaccccaggccgcctctacaccgtgaccataactacaaggagtggcaagtatgaaaatcactccttcagccaagagcggacagtgcctgacaaagtccagggagtcagtgttagcaactcagccaggagtgactatttaagggtatcctgggtgcatgccactggagactttgatcactatgaagtcaccattaaaaacaaaaacaacttcattcaaactaaaagcattcccaagtcagaaaacgaatgtgtatttgttcagctagtccctggacggttgtacagtgtcactgttactacaaaaagtggacaatatgaagccaatgaacaagggaatgggagaacaattccagagcctgttaaggatctaacattgcgcaacaggagcactgaggacttgcatgtgacttggtcaggagctaatggggatgtcgaccaatatgagatccagctgctcttcaatgacatgaaagtatttcctccttttcaccttgtaaataccgcaaccgagtatcgatttacttccctaacaccaggccgccaatacaaaattcttgtcttgacgattagcggggatgtacagcagtcagccttcattgagggcttcacagttcctagtgctgtcaaaaatattcacatttctcccaatggagcaacagatagcctgacggtgaactggactcctggtgggggagacgttgattcctacacggtgtcggcattcaggcacagtcaaaaggttgactctcagactattcccaagcacgtctttgagcacacgttccacagactggaggccggggagcagtaccagatcatgattgcctcagtcagcgggtccctgaagaatcagataaatgtggttgggcggacagttccagcatctgtccaaggagtaattgcagacaatgcatacagcagttattccttaatagtaagttggcaaaaagctgctggtgtggcagaaagatatgatatcctgcttctaactgaaaatggaatccttctgcgcaacacatcagagccagccaccactaagcaacacaaatttgaagatctaacaccaggcaagaaatacaagatacagatcctaactgtcagtggaggcctctttagcaaggaagcccagactgaaggccgaacagtcccagcagctgtcaccgacctgaggatcacagagaactccaccaggcacctgtccttccgctggaccgcctcagagggggagctcagctggtacaacatctttttgtacaacccagatgggaatctccaggagagagctcaagttgacccactagtccagagcttctctttccagaacttgctacaaggcagaatgtacaagatggtgattgtaactcacagtggggagctgtctaatgagtctttcatatttggtagaacagtcccagcctctgtgagtcatctcagggggtccaatcggaacacgacagacagcctttggttcaactggagtccagcctctggggactttgacttttatgagctgattctctataatcccaatggcacaaagaaggaaaactggaaagacaaggacctgacggagtggcggtttcaaggccttgttcctggaaggaagtacgtgctgtgggtggtaactcacagtggagatctcagcaataaagtcacagcggagagcagaacagctccaagtcctcccagtcttatgtcatttgctgacattgcaaacacatccttggccatcacgtggaaagggcccccagactggacagactacaacgactttgagctgcagtggttgcccagagatgcacttactgtcttcaacccctacaac

SEQ ID NO: 16911 - DNA, 2661 bp, Homo sapiens
  source 1..2661: mol_type = unassigned DNA
aacagttgctaagtggaaaatggaggctgaattttacatggtgattcttacctgcttgatcttcaggaactcagaagggtttcagattgtccatgtccagaaacaacagtgtcttttcaaaaatgagaaagtggtcgtgggctcatgcaacaggaccatccagaaccagcagtggatgtggactgaggatgaaaagctccttcatgttaaatctgcactgtgcttggccatctccaactcttcccgcggcccctcccgctcagccatcttggaccgctgttcccaggcaccccgatggacctgctatgatcaggaaggcttccttgaggtggaaaatgcctctctctttctccagaaacaaggctccagagtagtggtcaagaaggccaggaaatacctccatagctggatgaaaatagatgtcaacaaggagggaaaactggtcaatgaaagcctctgtttacaaaaagctggcctgggagcagaagtttcggtgaggagcactagaaacacggctccaccccagattctcactacctttaatgcagttccagatggcctggtattccttattaggaataccacagaggccttcatcagaaatgctgcagaaaactacagccaaaacagcagcgagaggcagcatcccaatctgcacatgactggaattacagacacatcatgggttttgtcgactactcagcccttctccagcaccactgaagagactggactggcggagccagagagatgtaacttcaccctggcggagtccaaggcctccagccattctgtgtctatccagtggagaattttgggctcaccctgtaactttagcctcatctatagcagtgacaccctgggggccgcgttgtgccctacctttcggatagacaacaccacatacggatgtaaccttcaagatttacaagcaggaaccatctataacttcaggattatttctctggatgaagagagaacagtggtcttgcaaacagatcctttacctcctgctaggtttggagtcagtaaagagaagacgacttcaaccagcttgcatgtttggtggactccttcttccggaaaagtcacctcatatgaggtgcaattatttgatgaaaataaccaaaagatacagggggttcaaattcaagaaagtacttcatggaatgaatacacttttttcaatctcactgctggtagtaaatacaatattgccatcacagctgtttctggaggaaaacgttctttttcagtttataccaatggatcaacagtgccatctccagtgaaagatattggtatttccacaaaagccaattctctcctgatttcctggtcccatggttctgggaatgtggaacgataccggctgatgctaatggataaagggatcctagttcatggcggtgttgtggacaaacatgctacttcctatgcttttcacgggctgacccctggctacctctacaacctcactgttatgactgaggctgcagggctgcaaaactacaggtggaaactagtcaggacagcccccatggaagtctcaaatctgaaggtgacaaatgatggcagtttgacctctctaaaagtcaaatggcaaagacctcctggaaatgtggattcttacaatatcaccctgtctcacaaagggaccatcaaggaatccagagtattagcaccttggattactgaaactcactttaaagagttagtccccggtcgactttatcaagttactgtcagctgtgtctctggtgaactgtctgctcagaagatggcagtgggcagaacatttccagacaaagttgcaaacctggaggcaaacaataatggcaggatgaggtctcttgtagtgagctggtcgccccctgctggagactgggagcagtatcggatcctactcttcaatgattctgtggtgctgctcaacatcactgtgggaaaggaagaaacacagtatgtcatggatgacacggggctcgtaccgggaagacagtatgaggtggaagtcattgttgagagtggaaatttgaagaattctgagcgttgccaaggcaggacagtccccctggctgtcctccagcttcgtgtcaaacatgccaatgaaacctcactgagtatcatgtggcagacccctgtagcagaatgggagaaatacatcatttccctagctgacagagacctcttactgatccacaagtcactctccaaagatgccaaagaattcacttttactgacctggtgcctggacgaaaatacatggctacagtcaccagtattagtggagacttaaaaaattcctcttcagtaaaaggaagaacagtgtaattggaagcaaagtcatcaagatttccctttttagttggacgccgtggctcacatctgtaatcccagcactttgggaggccgagatgggtggatcttgaggccaggaattcaagaccagcctggccaacatggcaagacactgtctctactaaaaacacaaaaattagctgggagtggtggcacatacctgtaatcccagatactcgggaggctgaggcataagaatcacttaaacccaggaggtggaggttgcatgagtcgagatcctgccactgcacactagcctgggtgatagagcgagaacctgcctcaaaaaaaaaaaaaaa

SEQ ID NO: 16912 - DNA, 2373 bp, Homo sapiens
  source 1..2373: mol_type = unassigned DNA
ttttttttttccccaagcgaagcatgaacagttgctaagtggaaaatggaggctgaattttacatggtgattcttacctgcttgatcttcaggaactcagaagggtttcagattgtccatgtccagaaacaacagtgtcttttcaaaaatgagaaagtggtcgtgggctcatgcaacaggaccatccagaaccagcagtggatgtggactgaggatgaaaagctccttcatgttaaatctgcactgtgcttggccatctccaactcttcccgcggcccctcccgctcagccatcttggaccgctgttcccaggcaccccgatggacctgctatgatcaggaaggcttccttgaggtggaaaatgcctctctctttctccagaaacaaggctccagagtagtggtcaagaaggccaggaaatacctccatagctggatgaaaatagatgtcaacaaggagggaaaactggtcaatgaaagcctctgtttacaaaaagctggcctgggagcagaagtttcggtgaggagcactagaaacacggctccaccccagattctcactacctttaatgcagttccagatggcctggtattccttattaggaataccacagaggccttcatcagaaatgctgcagaaaactacagccaaaacagcagcgagaggcagcatcccaatctgcacatgactggaattacagacacatcatgggttttgtcgactactcagcccttctccagcaccactgaagagactggactggcggagccagagagatgtaacttcaccctggcggagtccaaggcctccagccattctgtgtctatccagtggagaattttgggctcaccctgtaactttagcctcatctatagcagtgacaccctgggggccgcgttgtgccctacctttcggatagacaacaccacatacggatgtaaccttcaagatttacaagcaggaaccatctataacttcaggattatttctctggatgaagagagaacagtggtcttgcaaacagatcctttacctcctgctaggtttggagtcagtaaagagaagacgacttcaaccagcttgcatgtttggtggactccttcttccggaaaagtcacctcatatgaggtgcaattatttgatgaaaataaccaaaagatacagggggttcaaattcaagaaagtacttcatggaatgaatacacttttttcaatctcactgctggtagtaaatacaatattgccatcacagctgtttctggaggaaaacgttctttttcagtttataccaatggatcaacagtgccatctccagtgaaagatattggtatttccacaaaagccaattctctcctgatttcctggtcccatggttctgggaatgtggaacgataccggctgatgctaatggataaagggatcctagttcatggcggtgttgtggacaaacatgctacttcctatgcttttcacgggctgacccctggctacctctacaacctcactgttatgactgaggctgcagggctgcaaaactacaggtggaaactagtcaggacagcccccatggaagtctcaaatctgaaggtgacaaatgatggcagtttgacctctctaaaagtcaaatggcaaagacctcctggaaatgtggattcttacaatatcaccctgtctcacaaagggaccatcaaggaatccagagtattagcaccttggattactgaaactcactttaaagagttagtccccggtcgactttatcaagttactgtcagctgtgtctctggtgaactgtctgctcagaagatggcagtgggcagaacatgtgagtcttgggctccagaatgttccttggttgctcaaatcactctctgatccaccttaaaataggacaaaataagtcagcaggaaaactcctttcccaatctgagaagtggagcctatgtaactgaaggtgtctgtagtatggcccattcttctgagtcacttaggcaactgagtttggatttctgaatgatctgcatgttgtttctgtcttatgctttttcatgtcacgtcacttaagtagcataaatgcattagcattgataccagtatataaaacatttctgattcattcttacagtgagaaccagttagcatttaaccatgttttccatacattattttattaatttatgtcctcacttatctatccagtgccttatatatgtaaattactgtactattgttaaaacgactaagacatgctacttgcctttaaggcaggatccagcagactaccccatctggtgccaaatctggtctgtggcctgattttgtttagccctcaagctaagagtggtttttacatgtttaaagggttgtacaaac

SEQ ID NO: 16913 - DNA, 639 bp, Homo sapiens
  source 1..639: mol_type = unassigned DNA
cttgtggatcacactgagcctgctgcagactggactggcggagccagagagatgtaacttcaccctggcggagtccaaggcctccagccattctgtgtctatccagtggagaattttgggctcaccctgtaactttagcctcatctatagcagtgacaccctgggggccgcgttgtgccctacctttcggatagacaacaccacatacggatgtaaccttcaagatttacaagcaggaaccatctataacttcaggattatttctctggatgaagagagaacagtggtcttgcaaacaggtaaaggatgacaggtgcaattggatggccaagccacacggggttgggccctgccttttcaagctggtgtttcatttgagttccagggatacaaaaaatgaaggtaaaaatacctgtgaagataaatattgacagaaatgtctggtttcctcggatctagccagaagcagcttggtggactttcagagactcccttagtgctgaaaacagccaactagctactgaaagggtcggggtggggtgcagggcggtcagcaaagagaaactttgggctgcggtgggaattttttaaagtgatgtggtttacgcttccattgcattaaattgtcaaaccctggaa

SEQ ID NO: 16914 - DNA, 5331 bp, Homo sapiens
  source 1..5331: mol_type = unassigned DNA
agccggagctggagccgaggcggcggcgggacgcggccggccggacaaatttcctgctaggctgcggacagcgggcggcaggagccggcgcgagcggcttcaggaacccacggcctctgcgcgtccccgcgacccttcttcgcgcccggcgaagacagccgggcgccccggagggcggcgggcaggcgcccgggagatgcggagcctccgctgcagcgcgatctgcgcgaccagaccggcccccccgagactatagccttcactttccctcggtccaccatggagcccttgtgtccactcctgctggtgggttttagcttgccgctcgccagggctctcaggggcaacgagaccactgccgacagcaacgagacaaccacgacctcaggccctccggacccgggcgcctcccagccgctgctggcctggctgctactgccgctgctgctcctcctcctcgtgctccttctcgccgcctacttcttcaggttcaggaagcagaggaaagctgtggtcagcaccagcgacaagaagatgcccaacggaatcttggaggagcaagagcagcaaagggtgatgctgctcagcaggtcaccctcagggcccaagaagtattttcccatccccgtggagcacctggaggaggagatccgtatcagatccgccgacgactgcaagcagtttcgggaggagttcaactcattgccatctggacacatacaaggaacttttgaactggcaaataaagaagaaaacagagaaaaaaacagatatcccaacatccttcccaatgaccattctagggtgattctgagccaactggatggaattccctgttcagactacatcaatgcttcctacatagatggttacaaagagaagaataaattcatagcagctcaaggtcccaaacaggaaacggttaacgacttctggagaatggtctgggagcaaaagtctgcgaccatcgtcatgttaacaaacttgaaagaaaggaaagaggaaaagtgccatcagtactggcccgaccaaggctgctggacctatggaaacatccgggtgtgcgtggaggactgcgtggttttggtcgactacaccatccggaagttctgcatacagccacagctccccgacggctgcaaagcccccaggctggtctcacagctgcacttcaccagctggcccgacttcggagtgccttttacccccattgggatgctgaagttcctcaagaaagtaaagacgctcaaccccgtgcacgctgggcccatcgtggtccactgtagcgcgggcgtgggccggacgggcaccttcattgtgatcgatgccatgatggccatgatgcacgcggagcagaaggtggatgtgtttgaatttgtgtctcgaatccgtaatcagcgccctcagatggttcaaacggatatgcagtacacgttcatctaccaagccttactcgagtactacctctacggggacacagagctggacgtgtcctccctggagaagcacctgcagaccatgcacggcaccaccacccacttcgacaagatcgggctggaggaggagttcaggaaattgacaaatgtccggatcatgaaggagaacatgaggacgggcaacttgccggcaaacatgaagaaggccagggtcatccagatcatcccgtatgacttcaaccgagtgatcctttccatgaaaaggggtcaagaatacacagactacatcaacgcatccttcatagacggctaccgacagaaggactatttcatcgccacccaggggccactggcacacacggttgaggacttctggaggatgatctgggaatggaaatcccacactatcgtgatgctgacggaggtgcaggagagagagcaggataaatgctaccagtattggccaaccgagggctcagttactcatggagaaataacgattgagataaagaatgataccctttcagaagccatcagtatacgagactttctggtcactctcaatcagccccaggcccgccaggaggagcaggtccgagtagtgcgccagtttcacttccacggctggcctgagatcgggattcccgccgagggcaaaggcatgattgacctcatcgcagccgtgcagaagcagcagcagcagacaggcaaccaccccatcaccgtgcactgcagtgccggagctgggcgaacaggtacattcatagccctcagcaacattttggagcgagtaaaagccgagggacttttagatgtatttcaagctgtgaagagtttacgacttcagagaccacatatggtgcaaaccctggaacagtatgaattctgctacaaagtggtacaagattttattgatatattttctgattatgctaatttcaaatgaagattcctgccttaaaatattttttaatttaatggtcagtatattttgtaaaaatcatgttaatttatttcatagttgacattaatatcttccctaatttctttgtatatattttgttatgccttaaaggccacctgctatacagttgttaaatcttaaatatgctttttaaaaattggaataatgtattaaggtcaaataatatcccataaaatatatatttctgctaatattagtaaatatcttaatttttcattagattcatatcatttaatttcacatattcaacacctttaaatgttgtaatcttaatatgcgaagtgtgcctctgcaagatactaacacaaagctcatgttaagaaaacagttgaggactcagaagtcagttcgaaaatgcactttcctaacagtgaattcacaaccctgaacagcagcatttttggaaggcaaactgttcgtgatggtacaatgtaaatggggacttctgtaaagttctcagtttcggtccatgtggtttatctttacattttaaagatcaaagaagtctttacaacctgaatccaggtctaaaacacactagagtagctggtgactataaataatattttaaaatgctgtgtctacaccatcaagactgtgtctacactatcttggctgaacgagaagagatgtaaatgctgggtggtcccgttgacccacggcgttgggtacaacaaaaccagccatcggagttacaccccaaagcaccatttgctgtccagctgcctgtcgtttggcccagaccaccctcagaaaaaaaccagctgcctctcccattctcccctcccgttctgccacagcggcctgggctggtccagtgctatgcctggaggctcaacacaaaacttcccatccaaacattcagatgaactgagcgtcttacacacgcagtacagaggagcacacattaggatagaaacagtagaataaccacgggcaattaaactttaaattttctgagcagcattttggtatttaaacatttcttgtaaaaagctgagacagtttgtaagaaaagaatccttaaaatctagatttataccattttttaaagtcccacctttcaatgtttaataaaacaaaaagagaaatccttaatctaaaagctaaattatttttgaatggaaatactactgagaccattgacactggataacagtaatgatcccattaccagataagattgactgacggggaaaaaaaaaaaaaaagaatggggtgtgaatgtaccaacactgaatcttacagcagttatctttctatggccattaggtacctagcagatgtgcacaatataaacaaaaagatatctggcctaccttactactaaaagcatttaacacgtgcatttttggtacttttttttttgttttctaaaagctacataaaggccttatttgacattttcactgataactgatcgcaccctcatgttgcagtgttcgtcccctattcattaacagtgtgtgcaaatgcaaccccaggacacattattgttctgatagatgctcacagggaatcaagcttctcgcccactccacggctctgagccccatccaagggcaagacttggtgcccagctggaaggacgaaagcacactttgtgaccgccatcctcaccagctgcatgcctgggctgcacactgctgaacgtgctcctctctccttctctgtacaatgattcagcatctcggcggaagaggaaaatggagctttttgaggctcgccaggtcccttttgttttcaccattaaaattccaaacccaaagcctttgtttgactgaaggagaagagagggaagtaagcttctgttcagcacctgaaccctagaaaaagagccagtttgctacgatgaaggtgacatttctctggtcatttatttgagagttcgaagtcaaagtcgaggggcaccggctttggttcatgtctaggagccctctgtcagaatccttgaagccctttaatggtctaactggcatctcttgtatcaagaagtacctttaaggtagaccttttcagggtgccctcaggaaagggccctgctcatgtttttttcctgtccccttagaccaaccccaggtgtccactgcaggggttctgcctgttcccaaactttttccattccaggaacaaaggagaagccactttccccaggacgcaagactctcccctccactgtccgggacagcgttcgccctttagcggggaggtcattacagcctcatggcctctaccaaggccccagatcacaggatctcctgggccttggagcacctcacgctgggggaatcaatccctgagggactcagaatcttctccgtgcaacctggaaagttcatctcttgtttccttcagtcaaagaaagtccattgtacataacaaaacagcccccaaacagcccagtgccgacaccattgttcctttcacactttcctttgttgcatgcagttgggttcaaatgccaaatagtgattagaagacgaccattctgatctgtgtgtgatctggtcactatgtgactgcctttacggtttctctccatgtgctatatgaatgaagaatgcataccagtgttttaaaaggtatttttatgtgtttttaaacacttttttaaatgagcctgacacctgtgtttcagcatttggagacatccccatgttattcttttaagtgtataattactgatacttttttgtttgtttgtttaactaagttgtgtttaacttatgtgcagtctttataatgtatgtatgttattacagtttcaactatcatattttctttgattacatttataatttgatcttgctctgattataatgccagtgaatgttgctgaactctttgtatatgcaaattgcaagatttaaaccattctgatgcaaggataaacctttactttgactacca

SEQ ID NO: 16915 - DNA, 779 bp, Homo sapiens
  source 1..779: mol_type = unassigned DNA
gagcggcttcaggaacccacggcctctgcgcgtccccgcgacccttcttcgcgcccggcgaagacagccgggcgccccggagggcggcgggcaggcgcccgggagatgcggagcctccgctgcagcgcgatctgcgcgaccagaccggcccccccgagtaagcgcttgcagccagttgtctagttgtcagaagccgagctcatcagcgggctcctggtgtcggcgttctgctgctggaaggtcagggagttccctggaccccacggaagaagctgtctccatgaaggacagggaccgtgccgtgaaccttttattctcccactgacatgactatagccttcactttccctcggtccaccatggagcccttgtgtccactcctgctggtgggttttagcttgccgctcgccagggctctcaggggcaacgagaccactgccgacagcaacgagacaaccacgacctcaggccctccggacccgggcgcctcccagccgctgctggcctggctgctactgccgctgctgctcctcctcctcgtgctccttctcgccgcctacttcttcaggttcaggaagcagaggaaagctgtggtcagcaccagcgacaagaagatgcccaacggaatcttggaggagcaagagcagcaaagggtgatgctgctcagcaggtcaccctcagggcccaagaagtattttcccatccccgtggagcacctggaggaggagatccgtatcagatccgccgacgactgcaagcagtttcgggaggagttcaac

SEQ ID NO: 16916 - DNA, 522 bp, Homo sapiens
  source 1..522: mol_type = unassigned DNA
ggattctccaaggccaggatggtttcccagcgtcttcccaggaagacaagaggtccaccatggagcccttgtgtccactcctgctggtgggttttagcttgccgctcgccagggctctcaggggcaacgagaccactgccgacagcaacgagacaaccacgacctcaggccctccggacccgggcgcctcccagccgctgctggcctggctgctactgccgctgctgctcctcctcctcgtgctccttctcgccgcctacttcttcaggttcaggaagcagaggaaagctgtggtcagcaccagcgacaagaagatgcccaacggaatcttggaggagcaagcaaagggtgatgctgctcagcaggtcaccctcagggcccaagaagtattttcccatccccgtggagcacctggaggaggagatccgtatcagatccgccgacgactgcaagcagtttcgggaggagttcaactcattgccatctggacacatacaaggaacttttgaactggcaaataaa

SEQ ID NO: 16917 - DNA, 2304 bp, Homo sapiens
  source 1..2304: mol_type = unassigned DNA
atctcaaatcctgttgcagtcagtagcgctggctgtctgcagtagagatggttttcaatgattgtttcagaaattccttatcaacagaaaatgaacgagacggggagttttcagaaaataaatggatttgcagacaacttaacgtcatcatcgaagtcaccaaagaaagcaaagcagcgactggggaagctgaggctgaagtagcaagggcatgccacccaggctgctattccagtcgctgtgaaagcctggtcactgtctttgccacgcagaacacatctctgggaatgctgtcgatctatgcctccatcttttaaaggctttccatttctgtctggattttttctttatgggaggcagaaataatagtgaattgaatgaaatggagtatataagtgtctagcacagtccttggcacatagaaagtgctctgtaaacagtacttcgcatcaaattcttgggatgaatgaaagtgagtgcctggcgctgcacataagaaaagacgtggcagcaaaccatcctcccgacatgacgtgctgcgttggtgcgtttacgtccctgttccttctgaaagactcaaaattgtgttggagctactggtgcacctttgtaagacctgcactaacgaccgcgccactgggaagggcacttctttatgaagtcgccgtattcccagggagactggtcaacccatacaatgtgaaaaaaaaagaagctatgtgaaaaaatattcccctttgtcatagagaaggagaacttggtgaggctgggcagctgcaggagcctcagtttttcagataacagaacagagtagaccttgagggtccatttccctttttgttttaggaagtgctgtagaagggggcaaagagatctttgatatgagaaggtatttcttcaaagcagcatcgtgcctgaaatagcattgttctttacgctgagagaggaggaaatgggaatttggtgttcaacgggtttaaagtttcagttacaagaaatggacaagtccgagagctctgctgtgccacatcatgcctaaagtcaccgagactgtgttgtacacttttttgttaaaaggtaaatctcatgttaaatgttgttactacaattaaaaagaagccctaggctgtgtttgcagaaaggcactaaccatacatgtgctcaagagcccttttgtgttttcttcacttcatgttgtagttcaatttagttttgctttgcaaggatcctcggaaagtgtatcatcagcaatgacttttattttagaactaaatgtgaaccacggggggaatcatgatcgacattgctcgttgtcctttcttcctccctgtgggctgtgaatccaactcgtcctgggagcagggcgctctcgccttctgttcctctccgagctcagtgcacagaagcattctgcttacccagctgggactgctgactgcaccatcgagcacgcaggttgcactgttctcagcagctacactggattatatgccgcctttcttactgactgattatgaacttaaaacaaattcactctgctgctgtgaattatacatttatttttaagcatttatttcaactcgagatgagcggtctctcctgtaaatttctccctgctggatctttgctctggtttctggtgacatagtgtgagtgccggcagccgcgagcctcagaaggaaaattacaaagggaatactcagtaaatgatgtattgcctttcgcatcagtagcctgcttggaaatgttcaaattatcagcccaggagactccagtgctgtggacatgggtctgaacgaattgatcacctaggggctactgagaacgcggtgctctgtccaccatggagcccttgtgtccactcctgctggtgggttttagcttgccgctcgccagggctctcaggggcaacgagaccactgccgacagcaacgagacaaccacgacctcaggccctccggacccgggcgcctcccagccgctgctggcctggctgctactgccgctgctgctcctcctcctcgtgctccttctcgccgcctacttcttcaggttcaggaagcagaggaaagctgtggtcagcaccagcgacaagaagatgcccaacggaatcttggaggagcaagagcagcaaagggtgatgctgctcagcaggtcaccctcagggcccaagaagtattttcccatccccgtggagcacctggaggaggagatccgtatcagatccgccgacgactgcaagcagtttcgggaggagttcaactcattgccatctggacacatacaaggaacttttgaactggc

SEQ ID NO: 16918 - DNA, 338 bp, Homo sapiens
  source 1..338: mol_type = unassigned DNA
cgcctcccagccgctgctggcctggctgctactgccgctgctgctcctcctcctcgtgctccttctcgccgcctacttcttcaggaagcagaggaaagctgtggtcagcaccagcgacaagaagatgcccaacggaatcttggaggagcaagagcagcaaagggtgatgctgctcagcaggtcaccctcagggcccaagaagtattttcccatccccgtggagcacctggaggaggagatccgtatcagatccgccgacgactgcaagcagtttcgggaggagttcaactcattgccatctggacacatacaaggaacttttgaactggcaaataaag

SEQ ID NO: 16919 - DNA, 4957 bp, Homo sapiens
  source 1..4957: mol_type = unassigned DNA
gtgcagcagagggcagctgagaggctgggtggctgggcctgggagacacacagaggccaggccttagcgcggctcagccatgagcaacaggagtagcttttcccggctcacctggttcaggaagcagaggaaagctgtggtcagcaccagcgacaagaagatgcccaacggaatcttggaggagcaagagcagcaaagggtgatgctgctcagcaggtcaccctcagggcccaagaagtattttcccatccccgtggagcacctggaggaggagatccgtatcagatccgccgacgactgcaagcagtttcgggaggagttcaactcattgccatctggacacatacaaggaacttttgaactggcaaataaagaagaaaacagagaaaaaaacagatatcccaacatccttcccaatgaccattctagggtgattctgagccaactggatggaattccctgttcagactacatcaatgcttcctacatagatggttacaaagagaagaataaattcatagcagctcaaggtcccaaacaggaaacggttaacgacttctggagaatggtctgggagcaaaagtctgcgaccatcgtcatgttaacaaacttgaaagaaaggaaagaggaaaagtgccatcagtactggcccgaccaaggctgctggacctatggaaacatccgggtgtgcgtggaggactgcgtggttttggtcgactacaccatccggaagttctgcatacagccacagctccccgacggctgcaaagcccccaggctggtctcacagctgcacttcaccagctggcccgacttcggagtgccttttacccccattgggatgctgaagttcctcaagaaagtaaagacgctcaaccccgtgcacgctgggcccatcgtggtccactgtagcgcgggcgtgggccggacgggcaccttcattgtgatcgatgccatgatggccatgatgcacgcggagcagaaggtggatgtgtttgaatttgtgtctcgaatccgtaatcagcgccctcagatggttcaaacggatatgcagtacacgttcatctaccaagccttactcgagtactacctctacggggacacagagctggacgtgtcctccctggagaagcacctgcagaccatgcacggcaccaccacccacttcgacaagatcgggctggaggaggagttcaggaaattgacaaatgtccggatcatgaaggagaacatgaggacgggcaacttgccggcaaacatgaagaaggccagggtcatccagatcatcccgtatgacttcaaccgagtgatcctttccatgaaaaggggtcaagaatacacagactacatcaacgcatccttcatagacggctaccgacagaaggactatttcatcgccacccaggggccactggcacacacggttgaggacttctggaggatgatctgggaatggaaatcccacactatcgtgatgctgacggaggtgcaggagagagagcaggataaatgctaccagtattggccaaccgagggctcagttactcatggagaaataacgattgagataaagaatgataccctttcagaagccatcagtatacgagactttctggtcactctcaatcagccccaggcccgccaggaggagcaggtccgagtagtgcgccagtttcacttccacggctggcctgagatcgggattcccgccgagggcaaaggcatgattgacctcatcgcagccgtgcagaagcagcagcagcagacaggcaaccaccccatcaccgtgcactgcagtgccggagctgggcgaacaggtacattcatagccctcagcaacattttggagcgagtaaaagccgagggacttttagatgtatttcaagctgtgaagagtttacgacttcagagaccacatatggtgcaaaccctggaacagtatgaattctgctacaaagtggtacaagattttattgatatattttctgattatgctaatttcaaatgaagattcctgccttaaaatattttttaatttaatggtcagtatattttgtaaaaatcatgttaatttatttcatagttgacattaatatcttccctaatttctttgtatatattttgttatgccttaaaggccacctgctatacagttgttaaatcttaaatatgctttttaaaaattggaataatgtattaaggtcaaataatatcccataaaatatatatttctgctaatattagtaaatatcttaatttttcattagattcatatcatttaatttcacatattcaacacctttaaatgttgtaatcttaatatgcgaagtgtgcctctgcaagatactaacacaaagctcatgttaagaaaacagttgaggactcagaagtcagttcgaaaatgcactttcctaacagtgaattcacaaccctgaacagcagcatttttggaaggcaaactgttcgtgatggtacaatgtaaatggggacttctgtaaagttctcagtttcggtccatgtggtttatctttacattttaaagatcaaagaagtctttacaacctgaatccaggtctaaaacacactagagtagctggtgactataaataatattttaaaatgctgtgtctacaccatcaagactgtgtctacactatcttggctgaacgagaagagatgtaaatgctgggtggtcccgttgacccacggcgttgggtacaacaaaaccagccatcggagttacaccccaaagcaccatttgctgtccagctgcctgtcgtttggcccagaccaccctcagaaaaaaaccagctgcctctcccattctcccctcccgttctgccacagcggcctgggctggtccagtgctatgcctggaggctcaacacaaaacttcccatccaaacattcagatgaactgagcgtcttacacacgcagtacagaggagcacacattaggatagaaacagtagaataaccacgggcaattaaactttaaattttctgagcagcattttggtatttaaacatttcttgtaaaaagctgagacagtttgtaagaaaagaatccttaaaatctagatttataccattttttaaagtcccacctttcaatgtttaataaaacaaaaagagaaatccttaatctaaaagctaaattatttttgaatggaaatactactgagaccattgacactggataacagtaatgatcccattaccagataagattgactgacggggaaaaaaaaaaaaaaagaatggggtgtgaatgtaccaacactgaatcttacagcagttatctttctatggccattaggtacctagcagatgtgcacaatataaacaaaaagatatctggcctaccttactactaaaagcatttaacacgtgcatttttggtacttttttttttgttttctaaaagctacataaaggccttatttgacattttcactgataactgatcgcaccctcatgttgcagtgttcgtcccctattcattaacagtgtgtgcaaatgcaaccccaggacacattattgttctgatagatgctcacagggaatcaagcttctcgcccactccacggctctgagccccatccaagggcaagacttggtgcccagctggaaggacgaaagcacactttgtgaccgccatcctcaccagctgcatgcctgggctgcacactgctgaacgtgctcctctctccttctctgtacaatgattcagcatctcggcggaagaggaaaatggagctttttgaggctcgccaggtcccttttgttttcaccattaaaattccaaacccaaagcctttgtttgactgaaggagaagagagggaagtaagcttctgttcagcacctgaaccctagaaaaagagccagtttgctacgatgaaggtgacatttctctggtcatttatttgagagttcgaagtcaaagtcgaggggcaccggctttggttcatgtctaggagccctctgtcagaatccttgaagccctttaatggtctaactggcatctcttgtatcaagaagtacctttaaggtagaccttttcagggtgccctcaggaaagggccctgctcatgtttttttcctgtccccttagaccaaccccaggtgtccactgcaggggttctgcctgttcccaaactttttccattccaggaacaaaggagaagccactttccccaggacgcaagactctcccctccactgtccgggacagcgttcgccctttagcggggaggtcattacagcctcatggcctctaccaaggccccagatcacaggatctcctgggccttggagcacctcacgctgggggaatcaatccctgagggactcagaatcttctccgtgcaacctggaaagttcatctcttgtttccttcagtcaaagaaagtccattgtacataacaaaacagcccccaaacagcccagtgccgacaccattgttcctttcacactttcctttgttgcatgcagttgggttcaaatgccaaatagtgattagaagacgaccattctgatctgtgtgtgatctggtcactatgtgactgcctttacggtttctctccatgtgctatatgaatgaagaatgcataccagtgttttaaaaggtatttttatgtgtttttaaacacttttttaaatgagcctgacacctgtgtttcagcatttggagacatccccatgttattcttttaagtgtataattactgatacttttttgtttgtttgtttaactaagttgtgtttaacttatgtgcagtctttataatgtatgtatgttattacagtttcaactatcatattttctttgattacatttataatttgatcttgctctgattataatgccagtgaatgttgctgaactctttgtatatgcaaattgcaagatttaaaccattctgatgcaaggataaacctttactttgactacca

SEQ ID NO: 16920 - DNA, 325 bp, Homo sapiens
  source 1..325: mol_type = unassigned DNA
acagaggccaggccttagcgcggctcagccatgagcaacaggagtagcttttcccggctcacctggtgggtatcactgtgccgagcgctgttggctctcggggaacctagaagtgtggaaacctaacgcatcctgtgtctctaaggttcaggaagcagaggaaagctgtggtcagcaccagcgacaagaagatgcccaacggaatcttggaggagcaagagcagcaaagggtgatgctgctcagcaggtcaccctcagggcccaagaagtattttcccatccccgtggagcacctggaggaggagatccgtatcagatccgccga

SEQ ID NO: 16921 - DNA, 987 bp, Homo sapiens
  source 1..987: mol_type = unassigned DNA
ggccttagcgcggctcagccatgagcaacaggagtagcttttcccggctcacctggttcaggaagcagaggaaagctgtggtcagcaccagcgacaagaagatgcccaacggaatcttggaggagcaagagcagcaaagggtgatgctgctcagcaggtcaccctcagggcccaagaagtattttcccatccccgtggagcacctggaggaggagatccgtatcagatccgccgacgactgcaagcagtttcgggaggagttcaactcattgccatctggacacatacaaggaacttttgaactggcaaataaagaagaaaacagagaaaaaaacagatatcccaacatccttcccaggttacaaagagaagaataaattcatagcagctcaaggtcccaaacaggaaacggttaacgacttctggagaatggtctgggagcaaaagtctgcgaccatcgtcatgttaacaaacttgaaagaaaggaaagaggaaaagtgccatcagtactggcccgaccaaggctgctggacctatggaaacatccgggtgtgcgtggaggactgcgtggttttggtcgactacaccatccggaagttctgcatacagccacagctccccgacggctgcaaagcccccaggctggtctcacagctgcacttcaccagctggcccgacttcggagtgccttttacccccattgggatgctgaagttcctcaagaaagtaaagacgctcaaccccgtgcacgctgggcccatcgtggtccactgtagcgcgggcgtgggccggacgggcaccttcattgtgatcgatgccatgatggccatgatgcacgcggagcagaaggtggatgtgtttgaatttgtgtctcgaatccgtaatcagcgccctcagatggttcaaacggatatgcagtacacgttcatctaccaagccttactcgagtactacctctacggggacacagagctggacgtgtcctcc

SEQ ID NO: 16922 - DNA, 5736 bp, Homo sapiens
  source 1..5736: mol_type = unassigned DNA
ccttagcgcggctcagccatgagcaacaggagtagcttttcccggctcacctggttcaggaagcagaggaaagctgtggtcagcaccagcgacaagaagatgcccaacggaatcttggaggagcaagagcagcaaagggtgatgctgctcagcaggtcaccctcagggcccaagaagtattttcccatccccgtggagcacctggaggaggagatccgtatcagatccgccgacgactgcaagcagtttcgggaggagttcaactcattgccatctggacacatacaaggaacttttgaactggcaaataaagaagaaaacagagaaaaaaacagatatcccaacatccttcccaatgaccattctagggtgattctgagccaactggatggaattccctgttcagactacatcaatgcttcctacatagatggttacaaagagaagaataaattcatagcagctcaaggtcccaaacaggaaacggttaacgacttctggagaatggtctgggagcaaaagtctgcgaccatcgtcatgttaacaaacttgaaagaaaggaaagaggaaaagtgccatcagtactggcccgaccaaggctgctggacctatggaaacatccgggtgtgcgtggaggactgcgtggttttggtcgactacaccatccggaagttctgcatacagccacagctccccgacggctgcaaagcccccaggctggtctcacagctgcacttcaccagctggcccgacttcggagtgccttttacccccattgggatgctgaagttcctcaagaaagtaaagacgctcaaccccgtgcacgctgggcccatcgtggtccactgtagcgcgggcgtgggccggacgggcaccttcattgtgatcgatgccatgatggccatgatgcacgcggagcagaaggtggatgtgtttgaatttgtgtctcgaatccgtaatcagcgccctcagatggttcaaacggatatgcagtacacgttcatctaccaagccttactcgagtactacctctacggggacacagagctggacgtgtcctccctggagaagcacctgcagaccatgcacggcaccaccacccacttcgacaagatcgggctggaggaggagttcaggaaattgacaaatgtccggatcatgaaggagaacatgaggacgggcaacttgccggcaaacatgaagaaggccagggtcatccagatcatcccgtgtaaggcacccgtggcgtggcttgggcagggctggggcggggctggtgccggaggctttcatcctggagaagccattgaccgcttacccctgtgcaccagggtcaaaagcagggtgtcctctggcctcaggctaagggctcctgtgtgctgtaccaaatgtcaggtagaaaagacacctgtgaagcaccagctgacccagacagtcctgcatgggtctcaggcaagctgcttcggatatgagcttgcagatgcgggagggcagccgaggctgatttcaggggagggcttcacagaagctggagatttgcggcaggcacgacttgggattccttgtctcattccttgtctccccaagcctgggcagaggcccgcctcccccttacacagaggggcctgagccacccagccgaggccatgcaggtgaactcagctgagaccacctaggaaaaggctgtggccttgaggaggacaagaaatgggcctagggtagagtcaggacactggtctgccacccaggtcatgggagagggaaggaggacctggcaggtgtgggaggagtggaggcaaagctggcaagaagacagggccacatgcagtgggcaggggagtgggaatcgggaggctcaccaagtgggaaaaagagaaacttgagaaacccggccccaaagcagactccacagggatccgaggaactagggagggaggtgggagatgccccgcttgggaggagggtgtgcctcgttatagacttgtcctcgacagagtcacagctcaacaaacaccatctggaaacagctgggagcaggcctgctgcagcagggtctccccgagcactgcagatgacttcaaccgagtgatcctttccatgaaaaggggtcaagaatacacagactacatcaacgcatccttcatagacggctaccgacagaaggactatttcatcgccacccaggggccactggcacacacggttgaggacttctggaggatgatctgggaatggaaatcccacactatcgtgatgctgacggaggtgcaggagagagagcaggataaatgctaccagtattggccaaccgagggctcagttactcatggagaaataacgattgagataaagaatgataccctttcagaagccatcagtatacgagactttctggtcactctcaatcagccccaggcccgccaggaggagcaggtccgagtagtgcgccagtttcacttccacggctggcctgagatcgggattcccgccgagggcaaaggcatgattgacctcatcgcagccgtgcagaagcagcagcagcagacaggcaaccaccccatcaccgtgcactgcagtgccggagctgggcgaacaggtacattcatagccctcagcaacattttggagcgagtaaaagccgagggacttttagatgtatttcaagctgtgaagagtttacgacttcagagaccacatatggtgcaaaccctggaacagtatgaattctgctacaaagtggtacaagattttattgatatattttctgattatgctaatttcaaatgaagattcctgccttaaaatattttttaatttaatggtcagtatattttgtaaaaatcatgttaatttatttcatagttgacattaatatcttccctaatttctttgtatatattttgttatgccttaaaggccacctgctatacagttgttaaatcttaaatatgctttttaaaaattggaataatgtattaaggtcaaataatatcccataaaatatatatttctgctaatattagtaaatatcttaatttttcattagattcatatcatttaatttcacatattcaacacctttaaatgttgtaatcttaatatgcgaagtgtgcctctgcaagatactaacacaaagctcatgttaagaaaacagttgaggactcagaagtcagttcgaaaatgcactttcctaacagtgaattcacaaccctgaacagcagcatttttggaaggcaaactgttcgtgatggtacaatgtaaatggggacttctgtaaagttctcagtttcggtccatgtggtttatctttacattttaaagatcaaagaagtctttacaacctgaatccaggtctaaaacacactagagtagctggtgactataaataatattttaaaatgctgtgtctacaccatcaagactgtgtctacactatcttggctgaacgagaagagatgtaaatgctgggtggtcccgttgacccacggcgttgggtacaacaaaaccagccatcggagttacaccccaaagcaccatttgctgtccagctgcctgtcgtttggcccagaccaccctcagaaaaaaaccagctgcctctcccattctcccctcccgttctgccacagcggcctgggctggtccagtgctatgcctggaggctcaacacaaaacttcccatccaaacattcagatgaactgagcgtcttacacacgcagtacagaggagcacacattaggatagaaacagtagaataaccacgggcaattaaactttaaattttctgagcagcattttggtatttaaacatttcttgtaaaaagctgagacagtttgtaagaaaagaatccttaaaatctagatttataccattttttaaagtcccacctttcaatgtttaataaaacaaaaagagaaatccttaatctaaaagctaaattatttttgaatggaaatactactgagaccattgacactggataacagtaatgatcccattaccagataagattgactgacggggaaaaaaaaaaaaaaagaatggggtgtgaatgtaccaacactgaatcttacagcagttatctttctatggccattaggtacctagcagatgtgcacaatataaacaaaaagatatctggcctaccttactactaaaagcatttaacacgtgcatttttggtacttttttttttgttttctaaaagctacataaaggccttatttgacattttcactgataactgatcgcaccctcatgttgcagtgttcgtcccctattcattaacagtgtgtgcaaatgcaaccccaggacacattattgttctgatagatgctcacagggaatcaagcttctcgcccactccacggctctgagccccatccaagggcaagacttggtgcccagctggaaggacgaaagcacactttgtgaccgccatcctcaccagctgcatgcctgggctgcacactgctgaacgtgctcctctctccttctctgtacaatgattcagcatctcggcggaagaggaaaatggagctttttgaggctcgccaggtcccttttgttttcaccattaaaattccaaacccaaagcctttgtttgactgaaggagaagagagggaagtaagcttctgttcagcacctgaaccctagaaaaagagccagtttgctacgatgaaggtgacatttctctggtcatttatttgagagttcgaagtcaaagtcgaggggcaccggctttggttcatgtctaggagccctctgtcagaatccttgaagccctttaatggtctaactggcatctcttgtatcaagaagtacctttaaggtagaccttttcagggtgccctcaggaaagggccctgctcatgtttttttcctgtccccttagaccaaccccaggtgtccactgcaggggttctgcctgttcccaaactttttccattccaggaacaaaggagaagccactttccccaggacgcaagactctcccctccactgtccgggacagcgttcgccctttagcggggaggtcattacagcctcatggcctctaccaaggccccagatcacaggatctcctgggccttggagcacctcacgctgggggaatcaatccctgagggactcagaatcttctccgtgcaacctggaaagttcatctcttgtttccttcagtcaaagaaagtccattgtacataacaaaacagcccccaaacagcccagtgccgacaccattgttcctttcacactttcctttgttgcatgcagttgggttcaaatgccaaatagtgattagaagacgaccattctgatctgtgtgtgatctggtcactatgtgactgcctttacggtttctctccatgtgctatatgaatgaagaatgcataccagtgttttaaaaggtatttttatgtgtttttaaacacttttttaaatgagcctgacacctgtgtttcagcatttggagacatccccatgttattcttttaagtgtataattactgatacttttttgtttgtttgtttaactaagttgtgtttaacttatgtgcagtctttataatgtatgtatgttattacagtttcaactatcatattttctttgattacatttataatttgatcttgctctgattataatgccagtgaatgttgctgaactctttgtatatgcaaattgcaagatttaaaccattctgatgcaaggataaacctttactttgactacca

SEQ ID NO: 16923 - DNA, 866 bp, Homo sapiens
  source 1..866: mol_type = unassigned DNA
cctaccggttccggaacgcttcagggcatgacgtgtgtgtccccaacaagcctgagaagggagtgaacagctgtccaggggccaacggccagggtgccggggctgggaccccaaagggacttcccttcatgccttttgacttcgaaattgtcctctacacacaggtcccaaacaggaaacggttaacgacttctggagaatggtctgggagcaaaagtctgcgaccatcgtcatgttaacaaacttgaaagaaaggaaagaggaaaagtgccatcagtactggcccgaccaaggctgctggacctatggaaacatccgggtgtgcgtggaggactgcgtggttttggtcgactacaccatccggaagttctgcatacagccacagctccccgacggctgcaaagcccccaggctggtctcacagctgcacttcaccagctggcccgacttcggagtgccttttacccccattgggatgctgaagttcctcaagaaagtaaagacgctcaaccccgtgcacgctgggcccatcgtggtccactgtagcgcgggcgtgggccggacgggcaccttcattgtgatcgatgccatgatggccatgatgcacgcggagcagaaggtggatgtgtttgaatttgtgtctcgaatccgtaatcagcgccctcagatggttcaaacggatatgcagtacacgttcatctaccaagccttactcgagtactacctctacggggacacagagctggacgtgtcctccctggagaagcacctgcagaccatgcacggcaccaccacccacttcgacaagatcgggctggaggaggagttcaggaaattgacaaatgtccggatcatgaaggagaaca

SEQ ID NO: 16924 - DNA, 3944 bp, Homo sapiens
  source 1..3944: mol_type = unassigned DNA
gggcagaggtttgggcagggctgatgtgaacacaaatgtcagtgactgagccaggccccaagaaccctacaggagaatgttcagagagccccctcttcatcccagtcgataaaacccaccaaagccaggaggctccggttgatggtgggaatggagttctgggcaggtctgcttggccgccctcacctctccccgggaatcccaagtcacctctgggaaccaagatggaaatgagagaaagccccctggtttctacaggaagccccccaacaacacacaagtcgttatggaagagcacaccatgctcagatgggcccccacagcagagtcttccagaacacgctgtcctggagaccagggtccgaggaccaggctgcccctcgccagctgccacttcagcctcggtttcctcacctgtgatgggaaggacagcctcggcggagcctgtgactggcatctgggtgggctttgcacaacatgaagaattactcaaatgtacagccaaggccaccccacaaccccctgtccacagagagccccacttgttcctggcagtgattggcctcaccagggtatcactttgattagatactaagtttccatctgttacagacaggttcattctgagtatcacagcactgccagggacaaaagccacctgcacgcagtgatgcaggcgctctgcacctgtcatgcaggtgttcacgagaagccgtccaggaacccccgaagaacgggctttccccaagtctgagcaacactcgcttgctggggccaagcagaggctggaccccaccccacccaccctccagtgtagctcatactgggaagaatttgcagggtcagataacagtaatctgacagatgccacctcacttaatgccccgagtcagatgacttggtttgcccagtttgacagagagggaggctggataccagagctgttgcatagttgatctgaggtccctctgctcccagggggacagatctaggatgccaatcacacatataagaagaagacactgtttggtaagtgagaaaaattctccacacagcctaatccgaggcttactgcaccagctgttaatgtgcctcttagtagagtgtcggtggctatcagaggaccggcctgagatcactttactgagaccacagctccctctggtggctgcactgtagctttgctcctaattaaccaaaaaaacaaaaagttgcatccagtgacctgggtgcgcaggccccttcggggcctttcatttacttcgggaggagtgtgactcacgacgcagcatctttctctttccccaaagcgcgggcgtgggccggacgggcaccttcattgtgatcgatgccatgatggccatgatgcacgcggagcagaaggtggatgtgtttgaatttgtgtctcgaatccgtaatcagcgccctcagatggttcaaacggatgtgagtcatgccttcctcttgccctgatctagcttcccaaagcaaacccgatgccttcgccacacaggtgtgcagggccctggctctgatgggcacgtggcaaccagcctgggcctggcctggcttcgctccccatagccttccctgcccacgcgtgggacctcagggactccctcgtcctcatctttccctcgtatcctcatgtgagatggggcaatcctactcccccaaacggtgcatgtacacagtgcgtggcgtgctcaccaatgtgaggctctgctgctaccgttctccttactcaagggcataaatggtcgttatccgtggccggtactctgactcttgcctcacacctccttgtgttggcaaaaagagaaaaagaagaaagccgccctctttggtctgccaagctccacgtgggccaagactgcagggcagagttgagggtgtgggcacccctggcctctctgcagatgcagtacacgttcatctaccaagccttactcgagtactacctctacggggacacagagctggacgtgtcctccctggagaagcacctgcagaccatgcacggcaccaccacccacttcgacaagatcgggctggaggaggagttcaggaaattgacaaatgtccggatcatgaaggagaacatgaggacgggcaacttgccggcaaacatgaagaaggccagggtcatccagatcatcccgtgtaaggcacccgtggcgtggcttgggcagggctggggcggggctggtgccggaggctttcatcctggagaagccattgaccgcttacccctgtgcaccagggtcaaaagcagggtgtcctctggcctcaggctaagggctcctgtgtgctgtaccaaatgtcaggtagaaaagacacctgtgaagcaccagctgacccagacagtcctgcatgggtctcaggcaagctgcttcggatatgagcttgcagatgcgggagggcagccgaggctgatttcaggggagggcttcacagaagctggagatttgcggcaggcacgacttgggattccttgtctcattccttgtctccccaagcctgggcagaggcccgcctcccccttacacagaggggcctgagccacccagccgaggccatgcaggtgaactcagctgagaccacctaggaaaaggctgtggccttgaggaggacaagaaatgggcctagggtagagtcaggacactggtctgccacccaggtcatgggagagggaaggaggacctggcaggtgtgggaggagtggaggcaaagctggcaagaagacagggccacatgcagtgggcaggggagtgggaatcgggaggctcaccaagtgggaaaaagagaaacttgagaaacccggccccaaagcagactccacagggatccgaggaactagggagggaggtgggagatgccccgcttgggaggagggtgtgcctcgttatagacttgtcctcgacagagtcacagctcaacaaacaccatctggaaacagctgggagcaggcctgctgcagcagggtctccccgagcactgcaggcgagtagagctccccggggtgctgccatcttcagactctggcccttggttttctggggccccggtgtcctgctggccactctagattgcttgcctggccacattccatttactccttcagcgcaatatttttagtgcttgtattttggtatgtattatatcgattcctgaaaaatgaaaatgataattgggtggttttcagagttttccttcaaaaagaaaaatacccctgagccactttaattatcgtctctcataacgtaaactttccaaagagttggctttacgtagtgattttattaataggatctatattttgcaagcttgtagcaatggattaaagttagcaaggtgggaccctttttgtaataactaaaggaagataatgctttgcagatgacttcaaccgagtgatcctttccatgaaaaggggtcaagaatacacagactacatcaacgcatccttcatagacgtacgtatgctggcctgggttgtgtttatgcagatgtgtttccttcacatgtgaccacagacttgattagcttgttttcacaatgagaaagaattgacatgtttccagaaactcagccatttttgttagcagaattacttgcttaaaaaaaaaagtggcaaggcacgatggctcacacctgtaatcccaacactttgggaagctaaggcgggcagatcacttggggtcaggagtttgaaactagcctggccaatatggcaaaacccgtctctactaaaaatacaaaaattagctgggcgtgatggcaggtgcctgtaatcccagctacttgggaagctgaggcaggagaattgcttgaatccgggaggctgaggttgcagtgagctgagattacaccactgtactccaacctgggcaacagagtgagagcgagaccccctctcaaaaaaaaaaaaaaaaaaaaaaaaa

SEQ ID NO: 16925 - DNA, 5122 bp, Homo sapiens
  source 1..5122: mol_type = unassigned DNA
ccccagccgcatgacgcgcggaggaggcagcgggagcagccgcgggagccgggaccgggtagccgcgcgctgggggtgggcgccgctcgctccgccccgcgaagcccctgcgcgctcagggacgcggcccccccgcggcagccgcgctaggctccggcgtgtggccgcggccgccgccgccgctgccatgtctccggggaagcccggggcgggcggagcggggacgaggcggaccggctggcggaggaggaggcgaaggagacggcaggaggcggcgacgacggtgcccgggctcgggcgcacggcggggcccgattcgcgcgtccggggcacgttccagggcgcgcggggcatgaagccggcggcgcgggaggcgcggctgcctccgcgctcgcccgggctgcgctgggcgctgccgctgctgctgctgctgctgcgcctgggccagatcctgtgcgcaggtggcacccctagtccaattcctgacccttcagtagcaactgttgccacaggggaaaatggcataacgcagatcagcagtacagcagaatcctttcataaacagaatggaactggaacacctcaggtggaaacaaacaccagtgaggatggtgaaagctctggagccaacgatagtttaagaacacctgaacaaggatctaatgggactgatggggcatctcaaaaaactcccagtagcactgggcccagtcctgtgtttgacattaaagctgtttccatcagtccaaccaatgtgatcttaacttggaaaagtaatgacacagctgcttctgagtacaagtatgtagtaaagcataagatggaaaatgagaagacaattactgttgtgcatcaaccatggtgtaacatcacaggcttacgtccagcgacttcatatgtattctccatcactccaggaataggcaatgagacttggggagatcccagagtcataaaagtcatcacagagccgatcccagtttctgatctccgtgttgccctcacgggtgtgaggaaggctgctctctcctggagcaatggcaatggcactgcctcctgccgggttcttcttgaaagcattggaagccatgaggagttgactcaagactcaagacttcaggtcaatatctcgggcctgaagccaggggttcaatacaacatcaacccgtatcttctacaatcaaataagacaaagggagaccccttgggcacagaaggtggcttggatgccagcaatacagagagaagccgggcagggagccccaccgcccctgtgcatgatgagtccctcgtgggacctgtggacccatcctccggccagcagtcccgagacacggaagtcctgcttgtcgggttagagcctggcacccgatacaatgccaccgtttattcccaagcagcgaatggcacagaaggacagccccaggccatagagttcaggacaaatgctattcaggtttttgacgtcaccgctgtgaacatcagtgccacaagcctgaccctgatctggaaagtcagcgataacgagtcgtcatctaactatacctacaagatacatgtggcgggggagacagattcttccaatctcaacgtcagtgagcctcgcgctgtcatccccggactccgctccagcaccttctacaacatcacagtgtgtcctgtcctaggtgacatcgagggcacgccgggcttcctccaagtgcacaccccccctgttccagtttctgacttccgagtgacagtggtcagcacgacggagatcggcttagcatggagcagccatgatgcagaatcatttcagatgcatatcacacaggagggagctggcaattctcgggtagaaataaccaccaaccaaagtattatcattggtggcttgttccctggaaccaagtattgctttgaaatagttccaaaaggaccaaatgggactgaaggggcatctcggacagtttgcaatagaactgttcccagtgcagtgtttgacatccacgtggtctacgtcaccaccacggagatgtggctggactggaagagccctgacggtgcttccgagtatgtctaccatttagtcatagagtccaagcatggctctaaccacacaagcacgtatgacaaagcgattactctccagggcctgattccgggcaccttatataacatcaccatctctccagaagtggaccacgtctggggggaccccaactccactgcacagtacacacggcccagcaatgtgtccaacattgatgtaagtaccaacaccacagcagcaactttaagttggcagaactttgatgacgcctctcccacgtactcctactgccttcttattgagaaggctggaaattccagcaacgcaacacaagtagtcacggacattggaattactgacgctacagtcactgaattaatacctggctcatcatacacagtggagatctttgcacaagtaggggatgggatcaagtcactggaacctggccggaagtcattctgtacagatcctgcgtccatggcctccttcgactgcgaagtggtccccaaagagccagccctggttctcaaatggacctgccctcctggcgccaatgcaggctttgagctggaggtcagcagtggagcctggaacaatgcgacccacctggagagctgctcctctgagaatggcactgagtatagaacggaagtcacgtatttgaatttttctacctcgtacaacatcagcatcaccactgtgtcctgtggaaagatggcagcccccacccggaacacctgcactactggcatcacagatccccctcctccagatggatcccctaatattacatctgtcagtcacaattcagtaaaggtcaagttcagtggatttgaagccagccacggacccatcaaagcctatgctgtcattctcaccaccggggaagctggtcacccttctgcagatgtcctgaaatacacgtatgaggatttcaaaaagggagcctcagatacttatgtgacatacctcataagaacagaagaaaagggacgttctcagagcttgtctgaagttttgaaatatgaaattgacgttgggaatgagtcaaccacacttggttattacaatgggaagctggaacctctgggctcctaccgggcttgtgtggctggcttcaccaacattaccttccaccctcaaaacaaggggctcattgatggggctgagagctatgtgtccttcagtcgctactcagatgctgtttccttgccccaggatccaggtgtcatctgtggagcggtttttggctgtatctttggtgccctggttattgtgactgtgggaggcttcatcttctggagaaagaagaggaaagatgcaaagaataatgaagtgtccttttctcaaattaaacctaaaaaatctaagttaatcagagtggagaattttgaggcctacttcaagaagcagcaagctgactccaactgtgggttcgcagaggaatacgaagatctgaagcttgttggaattagtcaacctaaatatgcagcagaactggctgagaatagaggaaagaatcgctataataatgttctgccctatgatatttcccgtgtcaaactttcggtccagacccattcaacggatgactacatcaatgccaactacatgcctggctaccactccaagaaagattttattgccacacaaggacctttaccgaacactttgaaagatttttggcgtatggtttgggagaaaaatgtatatgccatcattatgttgactaaatgtgttgaacagggaagaaccaaatgtgaggagtattggccctccaagcaggctcaggactatggagacataactgtggcaatgacatcagaaattgttcttccggaatggaccatcagagatttcacagtgaaaaatatccagacaagtgagagtcaccctctgagacagttccatttcacctcctggccagaccacggtgttcccgacaccactgacctgctcatcaacttccggtacctcgttcgtgactacatgaagcagagtcctcccgaatcgccgattctggtgcattgcagtgctggggtcggaaggacgggcactttcattgccattgatcgtctcatctaccagatagagaatgagaacaccgtggatgtgtatgggattgtgtatgaccttcgaatgcataggcctttaatggtgcagacagaggaccagtatgttttcctcaatcagtgtgttttggatattgtcagatcccagaaagactcaaaagtagatcttatctaccagaacacaactgcaatgacaatctatgaaaaccttgcgcccgtgaccacatttggaaagaccaatggttacatcgcctaattccaaaggaataacctttctggagtgaaccagaccgtcgcacccacagcgaaggcacatgccccgatgtcgacatgtttttatatgtctaatatcttaattctttgttctgttttgtgagaactaattttgagggcatgaagctgcatatgatagatgacaaattggggctgtcgggggctgtggatgggtggggagcaaatcatctgcattcctgatgaccaatgggatgaggtcactttttttttttttcccccttgaggattgtggaaaaccaggaaaagggagctatgatttttttttccaaaacaatttcttttttaaaaaagactattttatatgattcacatgctaaagccaggattgtgttgggttgaatatattttaagtatcagaggtctatttttacctactgtgtcttggaatctagccgatggaaaatacctaattgtggatgatgattgcgcagggaggggtacgtggcacctcttccgaatgggttttctatttgaacatgtgccttttctgaattatgcttccacaggcaaaactcagtagagatctatatttttgtactgaatctcataattggaatatacggaatatttaaacagtagcttagcatcagaggtttgcttcctcagtaacatttctgttctcatttgatcaggggaggcctctttgccccgactccgcttcccctgccccctgtacatttgtgctccattttttcttcccttttccctcccagttttc

SEQ ID NO: 16926 - DNA, 3158 bp, Homo sapiens
  source 1..3158: mol_type = unassigned DNA
ggaggaggcagcgggagcagccgcgggagccgggaccgggtagccgcgcgctgggggtgggcgccgctcgctccgccccgcgaagcccctgcgcgctcagggacgcggcccccccgcggcagccgcgctaggctccggcgtgtggccgcggccgccgccgccgctgccatgtctccggggaagcccggggcgggcggagcggggacgaggcggaccggctggcggaggaggaggcgaaggagacggcaggaggcggcgacgacggtgcccgggctcgggcgcacggcggggcccgattcgcgcgtccggggcacgttccagggcgcgcggggcatgaagccggcggcgcgggaggcgcggctgcctccgcgctcgcccgggctgcgctgggcgctgccgctgctgctgctgctgctgcgcctgggccagatcctgtgcgcaggtggcacccctagtccaattcctgacccttcagtagcaactgttgccacaggggaaaatggcataacgcagatcagcagtacagcagaatcctttcataaacagaatggaactggaacacctcaggtggaaacaaacaccagtgaggatggtgaaagctctggagccaacgatagtttaagaacacctgaacaaggatctaatgggactgatggggcatctcaaaaaactcccagtagcactgggcccagtcctgtgtttgacattaaagctgtttccatcagtccaaccaatgtgatcttaacttggaaaagtaatgacacagctgcttctgagtacaagtatgtagtaaagcataagatggaaaatgagaagacaattactgttgtgcatcaaccatggtgtaacatcacaggcttacgtccagcgacttcatatgtattctccatcactccaggaataggcaatgagacttggggagatcccagagtcataaaagtcatcacagagccgatcccagtttctgatctccgtgttgccctcacgggtgtgaggaaggctgctctctcctggagcaatggcaatggcactgcctcctgccgggttcttcttgaaagcattggaagccatgaggagttgactcaagactcaagacttcaggtcaatatctcgggcctgaagccaggggttcaatacaacatcaacccgtatcttctacaatcaaataagacaaagggagaccccttgggcacagaaggtggcttggatgccagcaatacagagagaagccgggcagggagccccaccgcccctgtgcatgatgagtccctcgtgggacctgtggacccatcctccggccagcagtcccgagacacggaagtcctgcttgtcgggttagagcctggcacccgatacaatgccaccgtttattcccaagcagcgaatggcacagaaggacagccccaggccatagagttcaggacaaatgctattcaggtttttgacgtcaccgctgtgaacatcagtgccacaagcctgaccctgatctggaaagtcagcgataacgagtcgtcatctaactatacctacaagatacatgtggcgggggagacagattcttccaatctcaacgtcagtgagcctcgcgctgtcatccccggactccgctccagcaccttctacaacatcacagtgtgtcctgtcctaggtgacatcgagggcacgccgggcttcctccaagtgcacaccccccctgttccagtttctgacttccgagtgacagtggtcagcacgacggagatcggcttagcatggagcagccatgatgcagaatcatttcagatgcatatcacacaggagggagctggcaattctcgggtagaaataaccaccaaccaaagtattatcattggtggcttgttccctggaaccaagtattgctttgaaatagttccaaaaggaccaaatgggactgaaggggcatctcggacagtttgcaatagaactggatgatttgaacacctgcctggaattccatcatctgaaacagagttggcagataagaatggcccctatgccaaatttggctcattgtctgtttttgtaaataaagttttattggatcacagccatgttcatttgcttatgtactgtctatggctactttggtgctagaattgagtagtggcagcagagaacgtgtggcttgtgaagcctgagatatttattttctggccattacagagaatgtttgctgacctctgggctagatcagtggttttcaaattgtggtccagggctctctagggatccctaggttctttcaaggggtctccaaggtagtattatcataacaatactaaaatgttatttggctttttcattctcattctcttttggagttttccaactttgatccgatatgggatgacattgtctctcaggtctaatggaatatatgctgtggattcttacattttaaaaatttcttcattttaaatccctgatatagtaaatattaataaatataacctatgtaaatacaaattctctgagagccttaataacttttaagatggtaaagaagtcctgagagcaaaaagtttaagaacctctggtcaagatgtgttagaaattaactactgtgctgtgttgggcaggtggactgttcacagtctttcctaaacaacactgtgatgagatactttgttagttctagaaggctaattgaaattgataaaatcattttatagtcagctacggtggcctgcacccatcgtcccagctacttgagaggctgcggcaggaggattgcttggcccaacagttgcagactagcaccagcctgggagaccctgtctcaaaaaaaaatttttttttatagaaacagtttaaattattaaattatttctaggcctacaggagaaacttctgggaaatcctagagagtaatgttcattattgttgttttaaaattttgaaataattgttttttggaaaggttgaaaaacatacagtcttccttgatctaagattcaagatagttgaaatcttttatacagagggtagaataaagatatacctaatgtaaatgatgagttaatgggtgcagcacaccaacatggcacatgtatacatatgtaacaaacctgcacgttgtgcacatgtaccctagaacttaaagtataataaaaacatatatatatatataaaagaaa

SEQ ID NO: 16927 - DNA, 546 bp, Homo sapiens
  source 1..546: mol_type = unassigned DNA
gcggccgccgccgccgctgccatgtctccggggaagcccggggcgggcggagcggggacgaggcggaccggctggcggaggaggaggcgaaggagacggcaggaggcggcgacgacggtgcccgggctcgggcgcacggcggggcccgattcgcgcgtccggggcacgttccagggcgcgcggggcatgaagccggcggcgcgggaggcgcggctgcctccgcgctcgcccgggctgcgctgggcgctgccgctgctgctgctgctgctgcgcctgggccagatcctgtgcgcaggtggcaggcccagtcctgtgtttgacattaaagctgtttccatcagtccaaccaatgtgatcttaacttggaaaagtaatgacacagctgcttctgagtacaagtatgtagtaaagcataagatggaaaatgagaagacaattactgttgtgcatcaaccatggtgtaacatcacaggcttacgtccagcgacttcatatgtattctccatcactccaggaataggcaatgagacttggggagatcccaga

SEQ ID NO: 16928 - DNA, 626 bp, Homo sapiens
  source 1..626: mol_type = unassigned DNA
gcggccgccgccgccgctgccatgtctccggggaagcccggggcgggcggagcggggacgaggcggaccggctggcggaggaggaggcgaaggagacggcaggaggcggcgacgacggtgcccgggctcgggcgcacggcggggcccgattcgcgcgtccggggcacgttccagggcgcgcggggcatgaagccggcggcgcgggaggcgcggctgcctccgcgctcgcccgggctgcgctgggcgctgccgctgctgctgctgctgctgcgcctgggccagatcctgtgcgcaggtggcacccctagtccaattcctgacccttcagtagcaactgttgccacaggggaaaatggcataacgcagatcagcagtacagcagaatcctttcataaacagaatggaactggaacacctcaggtggaaacaaacaccagtgaggatggtgaaagctctggagccaacgatagtttaagaacacctgaacaaggatctaatgggactgatggggcatctcaaaaaactcccagtagcactgagccgatcccagtttctgatctccgtgttgccctcacgggtgtgaggaaggctgctctctcctggagcaatggcaatggcactgcctc

SEQ ID NO: 16929 - DNA, 571 bp, Homo sapiens
  source 1..571: mol_type = unassigned DNA
cttcacggttggcgttggccttgttcactgctgtgtgccaagctgctgacagcatctggctatcgcagtagagatggggttttgccatgttgcccatgctggtcttgaactcccggcctcaagagatcctcttgtctccaaatcgcttcgcagaagtgctgggattacagatcctgtgcgcaggtggcacccctagtccaattcctgacccttcagtagcaactgttgccacaggggaaaatggcataacgcagatcagcagtacagcagaatcctttcataaacagaatggaactggaacacctcaggtggaaacaaacaccagtgaggatggtgaaagctctggagccaacgatagtttaagaacacctgaacaaggatctaatgggactgatggggcatctcaaaaaactcccagtagcactgggcccagtcctgtgtttgacattaaagctgtttccatcagtccaaccaatgtgatcttaacttggaaaagtaatgacacagctgcttctgagtacaagtatgtagtaaagcataagatggaaaatgagaagacaattactgttgt

SEQ ID NO: 16930 - DNA, 555 bp, Homo sapiens
  source 1..555: mol_type = unassigned DNA
gtccttcagtcgctactcagatgctgtttccttgccccaggatccaggtgtcatctgtggagcggtttttggctgtatctttggtgccctggttattgtgactgtgggaggcttcatcttctggagaaagaagaggaaagatgcaaagaataatgaagtgtccttttctcaaattaagtaagtctctcaaattatgagctttattttaaatcctccaatctgttcggtgactatctataaataatttttgatggaacttgctgtcatttttcctgattggcacattttgaccatgaccatctggaagtttttgctagctctgttttctgcaaggaatctatgttttattagtctcctgaagctggcttccttgtcatgttctactcttctaccaataaatacggatttcttgattaaaaaaacgtcaaataggttatcaagatccaggggagagaagaacttacttaaagtcacaaaaccaattagttacaaagtagggtctagaaatcagatttcctgaatcatattttagtgttttgtgaataatagtactct

SEQ ID NO: 16931 - DNA, 7851 bp, Homo sapiens
  source 1..7851: mol_type = unassigned DNA
cagccccagccgcatgacgcgcggaggaggcagcgggagcagccgcgggagccgggaccgggtagccgcgcgctgggggtgggcgccgctcgctccgccccgcgaagcccctgcgcgctcagggacgcggcccccccgcggcagccgcgctaggctccggcgtgtggccgcggccgccgccgccgctgccatgtctccggggaagcccggggcgggcggagcggggacgaggcggaccggctggcggaggaggaggcgaaggagacggcaggaggcggcgacgacggtgcccgggctcgggcgcacggcggggcccgattcgcgcgtccggggcacgttccagggcgcgcggggcatgaagccggcggcgcgggaggcgcggctgcctccgcgctcgcccgggctgcgctgggcgctgccgctgctgctgctgctgctgcgcctgggccagatcctgtgcgcaggtggcacccctagtccaattcctgacccttcagtagcaactgttgccacaggggaaaatggcataacgcagatcagcagtacagcagaatcctttcataaacagaatggaactggaacacctcaggtggaaacaaacaccagtgaggatggtgaaagctctggagccaacgatagtttaagaacacctgaacaaggatctaatgggactgatggggcatctcaaaaaactcccagtagcactgggcccagtcctgtgtttgacattaaagctgtttccatcagtccaaccaatgtgatcttaacttggaaaagtaatgacacagctgcttctgagtacaagtatgtagtaaagcataagatggaaaatgagaagacaattactgttgtgcatcaaccatggtgtaacatcacaggcttacgtccagcgacttcatatgtattctccatcactccaggaataggcaatgagacttggggagatcccagagtcataaaagtcatcacagagccgatcccagtttctgatctccgtgttgccctcacgggtgtgaggaaggctgctctctcctggagcaatggcaatggcactgcctcctgccgggttcttcttgaaagcattggaagccatgaggagttgactcaagactcaagacttcaggtcaatatctcgggcctgaagccaggggttcaatacaacatcaacccgtatcttctacaatcaaataagacaaagggagaccccttgggcacagaaggtggcttggatgccagcaatacagagagaagccgggcagggagccccaccgcccctgtgcatgatgagtccctcgtgggacctgtggacccatcctccggccagcagtcccgagacacggaagtcctgcttgtcgggttagagcctggcacccgatacaatgccaccgtttattcccaagcagcgaatggcacagaaggacagccccaggccatagagttcaggacaaatgctattcaggtttttgacgtcaccgctgtgaacatcagtgccacaagcctgaccctgatctggaaagtcagcgataacgagtcgtcatctaactatacctacaagatacatgtggcgggggagacagattcttccaatctcaacgtcagtgagcctcgcgctgtcatccccggactccgctccagcaccttctacaacatcacagtgtgtcctgtcctaggtgacatcgagggcacgccgggcttcctccaagtgcacaccccccctgttccagtttctgacttccgagtgacagtggtcagcacgacggagatcggcttagcatggagcagccatgatgcagaatcatttcagatgcatatcacacaggagggagctggcaattctcgggtagaaataaccaccaaccaaagtattatcattggtggcttgttccctggaaccaagtattgctttgaaatagttccaaaaggaccaaatgggactgaaggggcatctcggacagtttgcaatagaactgttcccagtgcagtgtttgacatccacgtggtctacgtcaccaccacggagatgtggctggactggaagagccctgacggtgcttccgagtatgtctaccatttagtcatagagtccaagcatggctctaaccacacaagcacgtatgacaaagcgattactctccagggcctgattccgggcaccttatataacatcaccatctctccagaagtggaccacgtctggggggaccccaactccactgcacagtacacacggcccagcaatgtgtccaacattgatgtaagtaccaacaccacagcagcaactttaagttggcagaactttgatgacgcctctcccacgtactcctactgccttcttattgagaaggctggaaattccagcaacgcaacacaagtagtcacggacattggaattactgacgctacagtcactgaattaatacctggctcatcatacacagtggagatctttgcacaagtaggggatgggatcaagtcactggaacctggccggaagtcattctgtacagatcctgcgtccatggcctccttcgactgcgaagtggtccccaaagagccagccctggttctcaaatggacctgccctcctggcgccaatgcaggctttgagctggaggtcagcagtggagcctggaacaatgcgacccacctggagagctgctcctctgagaatggcactgagtatagaacggaagtcacgtatttgaatttttctacctcgtacaacatcagcatcaccactgtgtcctgtggaaagatggcagcccccacccggaacacctgcactactggcatcacagatccccctcctccagatggatcccctaatattacatctgtcagtcacaattcagtaaaggtcaagttcagtggatttgaagccagccacggacccatcaaagcctatgctgtcattctcaccaccggggaagctggtcacccttctgcagatgtcctgaaatacacgtatgaggatttcaaaaagggagcctcagatacttatgtgacatacctcataagaacagaagaaaagggacgttctcagagcttgtctgaagttttgaaatatgaaattgacgttgggaatgagtcaaccacacttggttattacaatgggaagctggaacctctgggctcctaccgggcttgtgtggctggcttcaccaacattaccttccaccctcaaaacaaggggctcattgatggggctgagagctatgtgtccttcagtcgctactcagatgctgtttccttgccccaggatccaggtgtcatctgtggagcggtttttggctgtatctttggtgccctggttattgtgactgtgggaggcttcatcttctggagaaagaagaggaaagatgcaaagaataatgaagtgtccttttctcaaattaagtctctcaaaagatctaagttaatcagagtggagaattttgaggcctacttcaagaagcagcaagctgactccaactgtgggttcgcagaggaatacgaagatctgaagcttgttggaattagtcaacctaaatatgcagcagaactggctgagaatagaggaaagaatcgctataataatgttctgccctatgatatttcccgtgtcaaactttcggtccagacccattcaacggatgactacatcaatgccaactacatgcctggctaccactccaagaaagattttattgccacacaaggacctttaccgaacactttgaaagatttttggcgtatggtttgggagaaaaatgtatatgccatcattatgttgactaaatgtgttgaacagggaagaaccaaatgtgaggagtattggccctccaagcaggctcaggactatggagacataactgtggcaatgacatcagaaattgttcttccggaatggaccatcagagatttcacagtgaaaaatatccagacaagtgagagtcaccctctgagacagttccatttcacctcctggccagaccacggtgttcccgacaccactgacctgctcatcaacttccggtacctcgttcgtgactacatgaagcagagtcctcccgaatcgccgattctggtgcattgcagtgctggggtcggaaggacgggcactttcattgccattgatcgtctcatctaccagatagagaatgagaacaccgtggatgtgtatgggattgtgtatgaccttcgaatgcataggcctttaatggtgcagacagaggaccagtatgttttcctcaatcagtgtgttttggatattgtcagatcccagaaagactcaaaagtagatcttatctaccagaacacaactgcaatgacaatctatgaaaaccttgcgcccgtgaccacatttggaaagaccaatggttacatcgcctaattccaaaggaataacctttctggagtgaaccagaccgtcgcacccacagcgaaggcacatgccccgatgtcgacatgtttttatatgtctaatatcttaattctttgttctgttttgtgagaactaattttgagggcatgaagctgcatatgatagatgacaaattggggctgtcgggggctgtggatgggtggggagcaaatcatctgcattcctgatgaccaatgggatgaggtcactttttttttttttcccccttgaggattgtggaaaaccaggaaaagggagctatgatttttttttccaaaacaatttcttttttaaaaaagactattttatatgattcacatgctaaagccaggattgtgttgggttgaatatattttaagtatcagaggtctatttttacctactgtgtcttggaatctagccgatggaaaatacctaattgtggatgatgattgcgcagggaggggtacgtggcacctcttccgaatgggttttctatttgaacatgtgccttttctgaattatgcttccacaggcaaaactcagtagagatctatatttttgtactgaatctcataattggaatatacggaatatttaaacagtagcttagcatcagaggtttgcttcctcagtaacatttctgttctcatttgatcaggggaggcctctttgccccgactccgcttcccctgccccctgtacatttgtgctccattttttcttcccttttccctcccagttttctccaaagactcttctgttggcaacattttcaacccattggttgggtgagaatggcgactcaaatatcaccttgagaatttctgtgggtgggaatgggagaagcagaggaatcctacagtggcagaaatccttttcttgtccctgtattatcctttttctcatgtctgtatttggtatgaaggattatttaaaggtgcaatatgtgaattagtgattcatgatgttctaggtttttagtaacgttttactcaggttggcattttatgtgtctgtgtctgtatgtgtgtgtgtatgttcagaagcgtggcaatctgtgaacacttcagcgtgaattcagtgtcagattaatccctccttccccaaagtccactggctttcgtctctctctgccgtgacacatatcggaatctactgtgtatatatatatatatatatatatatatatatatatatatatatatatacactaagctctcaaaaacagtcattcctatgaattgaggtgtacaaagtttgaatttgtatcaaagatgtaattattatttttaaaaccttttcactatactgctgctgtaattactttgatttttaaaatgtagattaatttttttttttttgcttcaggtgtgtatccaccaagaatttcaaatttatgtggatttattttattggtacataatctgtaaacttcttaaggcattaacatgaaaagattttttctttttattttatattgtggctcaggttatattttgaagatgttttgagtttatcctccaataggcaatgaagttgacaaggttttatgaaggaataaccaagtccctggagtcctgtggctgttgccacagtaatgtgtcctgctgtaaacaggacaggtgtgtcctgttgagaatgtgagcgggctcttccagcctcctggtccctcctgactctgccacgcccctcacctcactggcacttcgataactgactggacgtgttaatgggtcttttagggttctaaagggtgaaccacacttttaaagccccggctgtggttcggagggttagtgctgtatgccttttatttccctttccctttgaggtactgaaaggatgaaaaggtggtgtcatgttttggggagaatcttacttctcaaatggaaattgcactttttgctgaatcctttgcatttttttggtagtaagcagttcattgagtatcaggtcctcaaaggaatgagttggcccggctagggtgggccctcttgacctaacttcagagggggccttggctcagtaggtgtgaatcagggaagccacattgtcctcagggtgctgtatgaagctgggtgtgggcggattcctcccacaccttcacactggcctgcctccaactcatacagatctcggagcggtcggtacttcattcataggtccctgttcaggcagcagttctgtgggctgtggccctctcccctccaatatgtccgaaaccattgtgatgggtggcaaatcccagggagctcctaagccctgctctgcccacatcactgccacagagaagtcagaggaagggacttgttgctaaaaaatcctttaaaaggttaaatactttaaaagattaaagcaacataactgtaaacatattgtataaaaatgaaaaacacaggaaccctcttcccttccgcctggtgtgggcttgggaaatgggcaagcggccccagcaatcatgggaggaactcttgcgggggagcggtctgggattccaaatgggcaggtcacacgaaggtcacgatgcttctctgcatcctgaaaagggctggggacagggccagtgggggtggtaagggtatttatagcacagtgcttgaaaagggaagattaatgtgtaaatataaaggacacacaggctgggggttggtcagaggcaagaggagggtgcctctgagcttcaacccctcccaggaacaatgagctcaaattggaagagtccagtggaatcggggggatggtgtgagcacccctgttcagtctttgacaattgcatacagaaaagcagctggtatgggtttgggtgtcaatgaaagggccaaagactggtggccagctggtttgggggatttgggccattgatagcatctcccaggaacaacgactttttgcctccaaagttggatctagtgatgatcagcaccagcaggaaatgacatttggtgtctgcccactgcagccatactgtgacctccagccagacttccgcctaattgactccactggatttgtgctctgttgagtcagaggctcccgggggttggggatcgaggggcgggggtcagctatgcagcccatcacgtgtgtttttcatctgggatgaaaaagcctggttctcttttgaaatgcttgattgtacttattgagctaaacaagtcttggtgactgttgttgatttgcctcaaaagttttaagtcctgggttttcagactactgtgtagcagctgtgtgtttaacatactgtagctttttctcccttgggggcacatacaaataggatgtgttgatgtggactctaaactgtaattttcctgtaactattttggaatgatgcatatttctaatgtttgttatacttgtacagagtattgctgttggttgctttttttttttttaaggaaaaaatggcctgaaaacatttttttaaagacttacaaataccaaatataaaaaaatgtcaatgcatt

SEQ ID NO: 16932 - DNA, 4773 bp, Homo sapiens
  source 1..4773: mol_type = unassigned DNA
gcatgacgcgcggaggaggcagcgggagcagccgcgggagccgggaccgggtagccgcgcgctgggggtgggcgccgctcgctccgccccgcgaagcccctgcgcgctcagggacgcggcccccccgcggcagccgcgctaggctccggcgtgtggccgcggccgccgccgccgctgccatgtctccggggaagcccggggcgggcggagcggggacgaggcggaccggctggcggaggaggaggcgaaggagacggcaggaggcggcgacgacggtgcccgggctcgggcgcacggcggggcccgattcgcgcgtccggggcacgttccagggcgcgcggggcatgaagccggcggcgcgggaggcgcggctgcctccgcgctcgcccgggctgcgctgggcgctgccgctgctgctgctgctgctgcgcctgggccagatcctgtgcgcaggtggcacccctagtccaattcctgacccttcagtagcaactgttgccacaggggaaaatggcataacgcagatcagcagtacagcagaatcctttcataaacagaatggaactggaacacctcaggtggaaacaaacaccagtgaggatggtgaaagctctggagccaacgatagtttaagaacacctgaacaaggatctaatgggactgatggggcatctcaaaaaactcccagtagcactgggcccagtcctgtgtttgacattaaagctgtttccatcagtccaaccaatgtgatcttaacttggaaaagtaatgacacagctgcttctgagtacaagtatgtagtaaagcataagatggaaaatgagaagacaattactgttgtgcatcaaccatggtgtaacatcacaggcttacgtccagcgacttcatatgtattctccatcactccaggaataggcaatgagacttggggagatcccagagtcataaaagtcatcacagagccgatcccagtttctgatctccgtgttgccctcacgggtgtgaggaaggctgctctctcctggagcaatggcaatggcactgcctcctgccgggttcttcttgaaagcattggaagccatgaggagttgactcaagactcaagacttcaggtcaatatctcgggcctgaagccaggggttcaatacaacatcaacccgtatcttctacaatcaaataagacaaagggagaccccttgggcacagaaggtggcttggatgccagcaatacagagagaagccgggcagggagccccaccgcccctgtgcatgatgagtccctcgtgggacctgtggacccatcctccggccagcagtcccgagacacggaagtcctgcttgtcgggttagagcctggcacccgatacaatgccaccgtttattcccaagcagcgaatggcacagaaggacagccccaggccatagagttcaggacaaatgctattcaggtttttgacgtcaccgctgtgaacatcagtgccacaagcctgaccctgatctggaaagtcagcgataacgagtcgtcatctaactatacctacaagatacatgtggcgggggagacagattcttccaatctcaacgtcagtgagcctcgcgctgtcatccccggactccgctccagcaccttctacaacatcacagtgtgtcctgtcctaggtgacatcgagggcacgccgggcttcctccaagtgcacaccccccctgttccagtttctgacttccgagtgacagtggtcagcacgacggagatcggcttagcatggagcagccatgatgcagaatcatttcagatgcatatcacacaggagggagctggcaattctcgggtagaaataaccaccaaccaaagtattatcattggtggcttgttccctggaaccaagtattgctttgaaatagttccaaaaggaccaaatgggactgaaggggcatctcggacagtttgcaatagaactgttcccagtgcagtgtttgacatccacgtggtctacgtcaccaccacggagatgtggctggactggaagagccctgacggtgcttccgagtatgtctaccatttagtcatagagtccaagcatggctctaaccacacaagcacgtatgacaaagcgattactctccagggcctgattccgggcaccttatataacatcaccatctctccagaagtggaccacgtctggggggaccccaactccactgcacagtacacacggcccagcaatgtgtccaacattgatgtaagtaccaacaccacagcagcaactttaagttggcagaactttgatgacgcctctcccacgtactcctactgccttcttattgagaaggctggaaattccagcaacgcaacacaagtagtcacggacattggaattactgacgctacagtcactgaattaatacctggctcatcatacacagtggagatctttgcacaagtaggggatgggatcaagtcactggaacctggccggaagtcattctgtacagatcctgcgtccatggcctccttcgactgcgaagtggtccccaaagagccagccctggttctcaaatggacctgccctcctggcgccaatgcaggctttgagctggaggtcagcagtggagcctggaacaatgcgacccacctggagagctgctcctctgagaatggcactgagtatagaacggaagtcacgtatttgaatttttctacctcgtacaacatcagcatcaccactgtgtcctgtggaaagatggcagcccccacccggaacacctgcactactggcatcacagatccccctcctccagatggatcccctaatattacatctgtcagtcacaattcagtaaaggtcaagttcagtggatttgaagccagccacggacccatcaaagcctatgctgtcattctcaccaccggggaagctggtcacccttctgcagatgtcctgaaatacacgtatgaggatttcaaaaagggagcctcagatacttatgtgacatacctcataagaacagaagaaaagggacgttctcagagcttgtctgaagttttgaaatatgaaattgacgttgggaatgagtcaaccacacttggttattacaatgggaagctggaacctctgggctcctaccggtgtcttctgagggcttgtgtggctggcttcaccaacattaccttccaccctcaaaacaaggggctcattgatggggctgagagctatgtgtccttcagtcgctactcagatgctgtttccttgccccaggatccaggtgtcatctgtggagcggtttttggctgtatctttggtgccctggttattgtgactgtgggaggcttcatcttctggagaaagaagaggaaagatgcaaagaataatgaagtgtccttttctcaaattaagtctctcaaaagatctaagttaatcagagtggagaattttgaggcctacttcaagaagcagcaagctgactccaactgtgggttcgcagaggaatacgaagatctgaagcttgttggaattagtcaacctaaatatgcagcagaactggctgagaatagaggaaagaatcgctataataatgttctgccctatgatatttcccgtgtcaaactttcggtccagacccattcaacggatgactacatcaatgccaactacatgcctggctaccactccaagaaagattttattgccacacaaggacctttaccgaacactttgaaagatttttggcgtatggtttgggagaaaaatgtatatgccatcattatgttgactaaatgtgttgaacagggaagaaccaaatgtgaggagtattggccctccaagcaggctcaggactatggagacataactgtggcaatgacatcagaaattgttcttccggaatggaccatcagagatttcacagtgaaaaatatccagacaagtgagagtcaccctctgagacagttccatttcacctcctggccagaccacggtgttcccgacaccactgacctgctcatcaacttccggtacctcgttcgtgactacatgaagcagagtcctcccgaatcgccgattctggtgcattgcagtgctggggtcggaaggacgggcactttcattgccattgatcgtctcatctaccagatagagaatgagaacaccgtggatgtgtatgggattgtgtatgaccttcgaatgcataggcctttaatggtgcagacagaggaccagtatgttttcctcaatcagtgtgttttggatattgtcagatcccagaaagactcaaaagtagatcttatctaccagaacacaactgcaatgacaatctatgaaaaccttgcgcccgtgaccacatttggaaagaccaatggttacatcgcctaattccaaaggaataacctttctggagtgaaccagaccgtcgcacccacagcgaaggcacatgccccgatgtcgacatgtttttatatgtctaatatcttaattctttgttctgttttgtgagaactaattttgagggcatgaagctgcatatgatagatgacaaattggggctgtcgggggctgtggatgggtggggagcaaatcatctgcattcctgatgaccaatgggatgaggtcactttttttttttttcccccttgaggattgtggaaaaccaggaaaagggagctatgatttttttttccaaaacaatttcttttttaaaaaagactattttatatgattcacatgctaaagccaggattgtgttgggttgaatatattttaagtatcagaggtc

SEQ ID NO: 16933 - DNA, 6087 bp, Homo sapiens
  source 1..6087: mol_type = unassigned DNA
agaagcgcccggagcccgcggggcgacgtcacccccggctccgcccccgtccctccccgagcaaagtaactcttgactaacaggagcagcctccgccgagcatggagagctgccgccgcggccggccggcgacgctggcgacgctttcgcccctgaggtagtttggcgaccgcgaagaaggaaaaagggcgggcgggcggctgtcctctcaccgtcctcaccccgcgaggcccggcccgctcctccgtcgtggatttcgcggcgatccccccggcagctctttgcaaagctgcttgaaacttctcccaaactcggcatggatacgactgcggcggcggcgctgcctgcttttgtggcgctcttgctcctctctccttggcctctcctgggatcggcccaaggccagttctccgcaggtggctgtacttttgatgatggtccaggggcctgtgattaccaccaggatctgtatgatgactttgaatgggtgcatgttagtgctcaagagcctcattatctaccacccgagatgccccaaggttcctatatgatagtggactcttcagatcacgaccctggagaaaaagccagacttcagctgcctacaatgaaggagaacgacactcactgcattgatttcagttacctattatatagccagaaaggactgaatcctggcactttgaacatattagttagggtgaataaaggacctcttgccaatccaatttggaatgtgactggattcacgggtagagattggcttcgggctgagctagcagtgagcaccttttggcccaatgaatatcaggtaatatttgaagctgaagtctcaggagggagaagtggttatattgccattgatgacatccaagtactgagttatccttgtgataaatctcctcatttcctccgtctaggggatgtagaggtgaatgcagggcaaaacgctacatttcagtgcattgccacagggagagatgctgtgcataacaagttatggctccagagacgaaatggagaagatataccagtagcccagactaagaacatcaatcatagaaggtttgccgcttccttcagattgcaagaagtgacaaaaactgaccaggatttgtatcgctgtgtaactcagtcagaacgaggttccggtgtgtccaattttgctcaacttattgtgagagaaccgccaagacccattgctcctcctcagcttcttggtgttgggcctacatatttgctgatccaactaaatgccaactcgatcattggcgatggtcctatcatcctgaaagaagtagagtaccgaatgacatcaggatcctggacagaaacccatgcagtcaatgctccaacttacaaattatggcatttagatccagataccgaatatgagatccgagttctacttacaagacctggtgaaggtggaacggggctcccaggacctccactaatcaccagaacaaaatgtgcagaacctatgagaaccccaaagacattaaagattgctgaaatacaggcaagacggattgctgtggactgggaatccttgggttacaacattacgcgttgccacacttttaatgtcactatctgctaccattacttccgtggtcacaacgagagcaaggcagactgtttggacatggaccccaaagcccctcagcatgttgtgaaccatctgccaccttatacaaatgtcagcctcaagatgatcctaaccaatccagagggaaggaaggagagtgaagagacaattattcaaactgatgaagatgtgcctggtcccgtaccagtaaaatctcttcaaggaacatcctttgaaaataagatcttcttgaactggaaagaacctttggatccaaatggaatcatcactcaatatgagatcagctatagcagtataagatcatttgatcctgcagttccagtggctggacctccccagactgtatcaaatttatggaacagtacacaccatgtctttatgcatctccaccctggaaccacgtaccagtttttcataagagccagcacggtcaaaggctttggtccagccacagccatcaatgtcaccaccaatatctcagctccaactttacctgactatgaaggagttgatgcctctctcaatgaaactgccaccacaataactgtattgttgagaccagcacaagccaaaggtgctcctatcagtgcttatcagattgttgtggaagaactgcacccacaccgaaccaagagagaagccggagccatggaatgctaccaggttcctgtcacataccaaaatgccatgagtgggggtgcaccgtattactttgctgcagaactccccccgggaaacctacctgagcctgccccgttcactgtgggtgacaatcggacctaccaaggcttttggaaccctcctttggctccgcgcaaaggatacaacatctatttccaggcgatgagcagtgtggagaaggaaactaaaacccagtgcgtacgcattgctacaaaagcagcagcaacagaagaaccagaagtgatcccagatcccgccaagcagacagacagagtggtgaaaatagcaggaattagtgctggaattttggtgttcatcctccttctcctagttgtcatattaattgtaaaaaagagcaaacttgctaaaaaacgcaaagatgccatggggaatacccggcaggagatgactcacatggtgaatgcaatggatcgaagttatgctgatcagagcactctgcatgcagaagatcctctttccatcaccttcatggaccaacataactttagtccaagatatgagaaccacagtgctacagcagagtccagtcgccttctagacgtacctcgctacctctgtgaggggacggaatccccttaccagacaggacagctgcatccagccatcagggtagctgatttactgcagcacattaatctcatgaagacatcagacagctatgggttcaaagaggaatatgagagcttttttgaaggacagtcagcatcttgggatgtagctaaaaaagatcaaaatagagcaaaaaaccgatatggaaacattatagcatatgatcactccagagtgattttgcaacccgtagaggatgatccttcctcagattatattaatgccaactatattgatggctaccagagaccaagtcattacattgcaacccaaggtcccgttcatgaaacagtgtatgatttctggaggatgatttggcaagaacaatctgcttgcattgtgatggttacaaatttagttgaggttggccgggttaaatgctataaatattggcctgatgatactgaagtttatggtgacttcaaagtaacgtgtgtagaaatggaaccacttgctgaatatgtagttaggacattcaccctggaaaggagggggtacaatgaaatccgtgaagttaaacagttccatttcacgggctggcctgaccatggagtgccctaccatgctacagggctgctttcctttatccggcgagtcaagttatcaaaccctcccagtgctggccccatcgttgtacattgcagtgctggtgctggacgaactggctgctacattgtgattgacatcatgctagacatggctgaaagagagggtgttgttgatatttacaattgtgtcaaagccttaagatctcggcgtattaatatggtccagacagaggaacagtacatttttattcatgatgccattttagaagcctgcttatgtggagaaactgccatacctgtctgtgaatttaaagctgcatattttgatatgattagaatagactcccagactaactcttcacatctcaaggatgaatttcagactctgaattcagtcacccctcgactacaagctgaagactgcagtatagcgtgcctgccaaggaaccatgacaagaaccgtttcatggacatgctgccacctgacagatgtctgccttttttaattacaattgatggggagagcagtaactacatcaatgctgctcttatggacagctacaggcaaccagctgctttcatcgtcacacaataccctctgccaaacactgtaaaagacttctggagattagtgtatgattatggctgtacctccattgtgatgttaaacgaagtcgacttgtcccagggctgccctcagtactggccagaggaagggatgctacgatatggccccatccaagtggaatgtatgtcttgttcaatggactgtgatgtgatcaaccggatttttaggatatgcaatctaacaagaccacaggaaggttatctgatggtgcaacagtttcagtacctaggatgggcttctcatcgagaagtgcctggatccaaaaggtcattcttgaaactgatacttcaggtggaaaagtggcaggaggaatgcgaggaaggggaaggccggacgattatccactgcctaaatggtggcgggcgaagtggcatgttctgtgctataggcatcgttgttgaaatggtgaaacggcaaaatgttgtcgatgttttccatgcagtaaagacactgaggaacagcaagccaaacatggtggaagccccggagcaataccgtttctgctatgatgtagctttggagtacctggaatcatcttagttgggtgagactctttaaagtgcatccatgaagaaacctgtccatctattgagccagcagctgttgtacctgttacacttgtgcagaaagattttaatgtggggggtgggagacttttacatttgagaggtaaaagtattttttttatgaagttgtgtatcttaataaaaaggactgaattagtttttattactatattaaagcatcaacatttcatgccacataaattatatttaataagaaccagattgaaatgagaacgtattggtgtttgtacagtgaacatgccaccttttttctcatggtttcagtagagcagctaccacatgttgcatgagttcatactttctacgtggcatttttctccctttctaaaatgaaagctgatgaatcttaaaaggaagaagaaaagaaaagctgtgcaaattcatagtaaagttcgttttttatatgtttccagtgtagcagatctctatataaatatataaatatatataactggcttattttcttttaatgtgcaatgatggctggatcatttaaagttctttttagaaaataacataagccaaagactcaagtgtaaatatgtctatatggagaaagcacattatatttattggttacttacattccttttttgatggctaaaatactaccaccacacaatcatcttttttttcctgaagaaagctttttctttagctaaaatcaattgtaaacgatttttgtagattattttttgtatgttttagtgtaagtagaagataaactttttattcataaaccaggaagcaatgttctttatagtgattctcttgtgtacatgcttgtgaattaaatttgtgtaaaatcccttggcaattgggtcttttaatataggaccaaattaaaacattttgctgaatatgtatagtttttcacaatttcattaggtaaataatggtttggtgatcatacatgagaaatgtacacattaaaaggccttgctgacaacttgcacaatgttgaacatagcctttaagcatcatttaaattttaaaggaatggagtttttcagcctgtggcccagcactggtcaagaaaacaagatggcaacatatatgctttcagggtcaaatttgagcaaactgtaaactgtcagggtgataaaatgtttctcttgatgtttacatgcacaagctttgcgttctgactataaaaagtgtgaacaaatcaatgccagattcctgttttgcgcattgtcatgggattcttaagtgaacctttctaaatgtggtcttgttcacatgctccacgtagctgtaacttcacatcatcagcttgcagtttgtaattgactaaagcattccagtgtcctctttctagattgccagctcatgacatggtgcttataaagatttaattaaagtaagaatgaaataaagtttttataattataacagtta

SEQ ID NO: 16934 - DNA, 5757 bp, Homo sapiens
  source 1..5757: mol_type = unassigned DNA
ggctgtcctctcaccgtcctcaccccgcgaggcccggcccgctcctccgtcgtggatttcgcggcgatccccccggcagctctttgcaaagctgcttgaaacttctcccaaactcggcatggatacgactgcggcggcggcgctgcctgcttttgtggcgctcttgctcctctctccttggcctctcctgggatcggcccaaggccagttctccgcaggtggctgtacttttgatgatggtccaggggcctgtgattaccaccaggatctgtatgatgactttgaatgggtgcatgttagtgctcaagagcctcattatctaccacccgagatgccccaaggttcctatatgatagtggactcttcagatcacgaccctggagaaaaagccagacttcagctgcctacaatgaaggagaacgacactcactgcattgatttcagttacctattatatagccagaaaggactgaatcctggcactttgaacatattagttagggtgaataaaggacctcttgccaatccaatttggaatgtgactggattcacgggtagagattggcttcgggctgagctagcagtgagcaccttttggcccaatgaatatcaggtaatatttgaagctgaagtctcaggagggagaagtggttatattgccattgatgacatccaagtactgagttatccttgtgataaatctcctcatttcctccgtctaggggatgtagaggtgaatgcagggcaaaacgctacatttcagtgcattgccacagggagagatgctgtgcataacaagttatggctccagagacgaaatggagaagatataccagtagcccagactaagaacatcaatcatagaaggtttgccgcttccttcagattgcaagaagtgacaaaaactgaccaggatttgtatcgctgtgtaactcagtcagaacgaggttccggtgtgtccaattttgctcaacttattgtgagagaaccgccaagacccattgctcctcctcagcttcttggtgttgggcctacatatttgctgatccaactaaatgccaactcgatcattggcgatggtcctatcatcctgaaagaagtagagtaccgaatgacatcaggatcctggacagaaacccatgcagtcaatgctccaacttacaaattatggcatttagatccagataccgaatatgagatccgagttctacttacaagacctggtgaaggtggaacggggctcccaggacctccactaatcaccagaacaaaatgtgcagaacctatgagaaccccaaagacattaaagattgctgaaatacaggcaagacggattgctgtggactgggaatccttgggttacaacattacgcgttgccacacttttaatgtcactatctgctaccattacttccgtggtcacaacgagagcaaggcagactgtttggacatggaccccaaagcccctcagcatgttgtgaaccatctgccaccttatacaaatgtcagcctcaagatgatcctaaccaatccagagggaaggaaggagagtgaagagacaattattcaaactgatgaagatgtgcctggtcccgtaccagtaaaatctcttcaaggaacatcctttgaaaataagatcttcttgaactggaaagaacctttggatccaaatggaatcatcactcaatatgagatcagctatagcagtataagatcatttgatcctgcagttccagtggctggacctccccagactgtatcaaatttatggaacagtacacaccatgtctttatgcatctccaccctggaaccacgtaccagtttttcataagagccagcacggtcaaaggctttggtccagccacagccatcaatgtcaccaccaatatctcagctccaactttacctgactatgaaggagttgatgcctctctcaatgaaactgccaccacaataactgtattgttgagaccagcacaagccaaaggtgctcctatcagtgcttatcagattgttgtggaagaactgcacccacaccgaaccaagagagaagccggagccatggaatgctaccaggttcctgtcacataccaaaatgccatgagtgggggtgcaccgtattactttgctgcagaactccccccgggaaacctacctgagcctgccccgttcactgtgggtgacaatcggacctaccaaggcttttggaaccctcctttggctccgcgcaaaggatacaacatctatttccaggcgatgagcagtgtggagaaggaaactaaaacccagtgcgtacgcattgctacaaaagcagcagcaacagaagaaccagaagtgatcccagatcccgccaagcagacagacagagtggtgaaaatagcaggaattagtgctggaattttggtgttcatcctccttctcctagttgtcatattaattgtaaaaaagagcaaacttgctaaaaaacgcaaagatgccatggggaatacccggcaggagatgactcacatggtgaatgcaatggatcgaagttatgctgatcagagcactctgcatgcagaagatcctctttccatcaccttcatggaccaacataactttagtccaagattgcccaatgatccacttgtaccgactgctgtgttagttcctataacagatgagaaccacagtgctacagcagagtccagtcgccttctagacgtacctcgctacctctgtgaggggacggaatccccttaccagacaggacagctgcatccagccatcagggtagctgatttactgcagcacattaatctcatgaagacatcagacagctatgggttcaaagaggaatatgagagcttttttgaaggacagtcagcatcttgggatgtagctaaaaaagatcaaaatagagcaaaaaaccgatatggaaacattatagcatatgatcactccagagtgattttgcaacccgtagaggatgatccttcctcagattatattaatgccaactatattgatatttggctgtacagggatggctaccagagaccaagtcattacattgcaacccaaggtcccgttcatgaaacagtgtatgatttctggaggatgatttggcaagaacaatctgcttgcattgtgatggttacaaatttagttgaggttggccgggttaaatgctataaatattggcctgatgatactgaagtttatggtgacttcaaagtaacgtgtgtagaaatggaaccacttgctgaatatgtagttaggacattcaccctggaaaggagggggtacaatgaaatccgtgaagttaaacagttccatttcacgggctggcctgaccatggagtgccctaccatgctacagggctgctttcctttatccggcgagtcaagttatcaaaccctcccagtgctggccccatcgttgtacattgcagtgctggtgctggacgaactggctgctacattgtgattgacatcatgctagacatggctgaaagagagggtgttgttgatatttacaattgtgtcaaagccttaagatctcggcgtattaatatggtccagacagaggaacagtacatttttattcatgatgccattttagaagcctgcttatgtggagaaactgccatacctgtctgtgaatttaaagctgcatattttgatatgattagaatagactcccagactaactcttcacatctcaaggatgaatttcagactctgaattcagtcacccctcgactacaagctgaagactgcagtatagcgtgcctgccaaggaaccatgacaagaaccgtttcatggacatgctgccacctgacagatgtctgccttttttaattacaattgatggggagagcagtaactacatcaatgctgctcttatggacagctacaggcaaccagctgctttcatcgtcacacaataccctctgccaaacactgtaaaagacttctggagattagtgtatgattatggctgtacctccattgtgatgttaaacgaagtcgacttgtcccagggctgccctcagtactggccagaggaagggatgctacgatatggccccatccaagtggaatgtatgtcttgttcaatggactgtgatgtgatcaaccggatttttaggatatgcaatctaacaagaccacaggaaggttatctgatggtgcaacagtttcagtacctaggatgggcttctcatcgagaagtgcctggatccaaaaggtcattcttgaaactgatacttcaggtggaaaagtggcaggaggaatgcgaggaaggggaaggccggacgattatccactgcctaaatggtggcgggcgaagtggcatgttctgtgctataggcatcgttgttgaaatggtgaaacggcaaaatgttgtcgatgttttccatgcagtaaagacactgaggaacagcaagccaaacatggtggaagccccggagcaataccgtttctgctatgatgtagctttggagtacctggaatcatcttagttgggtgagactctttaaagtgcatccatgaagaaacctgtccatctattgagccagcagctgttgtacctgttacacttgtgcagaaagattttaatgtggggggtgggagacttttacatttgagaggtaaaagtattttttttatgaagttgtgtatcttaataaaaaggactgaattagtttttattactatattaaagcatcaacatttcatgccacataaattatatttaataagaaccagattgaaatgagaacgtattggtgtttgtacagtgaacatgccaccttttttctcatggtttcagtagagcagctaccacatgttgcatgagttcatactttctacgtggcatttttctccctttctaaaatgaaagctgatgaatcttaaaaggaagaagaaaagaaaagctgtgcaaattcatagtaaagttcgttttttatatgtttccagtgtagcagatctctatataaatatataaatatatataactggcttattttcttttaatgtgcaatgatggctggatcatttaaagttctttttagaaaataacataagccaaagactcaagtgtaaatatgtctatatggagaaagcacattatatttattggttacttacattccttttttgatggctaaaatactaccaccacacaatcatcttttttttcctgaagaaagctttttctttagctaaaatcaattgtaaacgatttttgtagattattttttgtatgttttagtgtaagtagaagataaactttttattcataaaccaggaagcaatgttctttatagtgattctcttgtgtacatgcttgtgaattaaatttgtgtaaaatcccttggcaattgggtcttttaatataggaccaaattaaaacattttgctgaatatgtatagtttttcacaatttcattaggtaaataatggtttggtgatcatacatgagaaatgtacacattaaaaggccttgctgacaacttgcacaatgttgaacatagcctttaagcatcatttaaattttaaaggaatggagtttttcagcctgtggcccagcactggtcaagaaaacaagatggcaacatatatgctttcagggtcaaatttgagcaaactgtaaactgtcagggtgataaaatgtttctcttgatgtttacatgcacaagctttgcgttctgactataaaaagtgtgaacaaatcaatgccagattcctgttttgcgcattgtcatgg

SEQ ID NO: 16935 - DNA, 5816 bp, Homo sapiens
  source 1..5816: mol_type = unassigned DNA
tccgccgagcatggagagctgccgccgcggccggccggcgacgctggcgacgctttcgcccctgaggtagtttggcgaccgcgaagaaggaaaaagggcgggcgggcggctgtcctctcaccgtcctcaccccgcgaggcccggcccgctcctccgtcgtggatttcgcggcgatccccccggcagctctttgcaaagctgcttgaaacttctcccaaactcggcatggatacgactgcggcggcggcgctgcctgcttttgtggcgctcttgctcctctctccttggcctctcctgggatcggcccaaggccagttctccgcaggtggctgtacttttgatgatggtccaggggcctgtgattaccaccaggatctgtatgatgactttgaatgggtgcatgttagtgctcaagagcctcattatctaccacccgagatgccccaaggttcctatatgatagtggactcttcagatcacgaccctggagaaaaagccagacttcagctgcctacaatgaaggagaacgacactcactgcattgatttcagttacctattatatagccagaaaggactgaatcctggcactttgaacatattagttagggtgaataaaggacctcttgccaatccaatttggaatgtgactggattcacgggtagagattggcttcgggctgagctagcagtgagcaccttttggcccaatgaatatcaggtaatatttgaagctgaagtctcaggagggagaagtggttatattgccattgatgacatccaagtactgagttatccttgtgataaatctcctcatttcctccgtctaggggatgtagaggtgaatgcagggcaaaacgctacatttcagtgcattgccacagggagagatgctgtgcataacaagttatggctccagagacgaaatggagaagatataccagtagcccagactaagaacatcaatcatagaaggtttgccgcttccttcagattgcaagaagtgacaaaaactgaccaggatttgtatcgctgtgtaactcagtcagaacgaggttccggtgtgtccaattttgctcaacttattgtgagagaaccgccaagacccattgctcctcctcagcttcttggtgttgggcctacatatttgctgatccaactaaatgccaactcgatcattggcgatggtcctatcatcctgaaagaagtagagtaccgaatgacatcaggatcctggacagaaacccatgcagtcaatgctccaacttacaaattatggcatttagatccagataccgaatatgagatccgagttctacttacaagacctggtgaaggtggaacggggctcccaggacctccactaatcaccagaacaaaatgtgcagaacctatgagaaccccaaagacattaaagattgctgaaatacaggcaagacggattgctgtggactgggaatccttgggttacaacattacgcgttgccacacttttaatgtcactatctgctaccattacttccgtggtcacaacgagagcaaggcagactgtttggacatggaccccaaagcccctcagcatgttgtgaaccatctgccaccttatacaaatgtcagcctcaagatgatcctaaccaatccagagggaaggaaggagagtgaagagacaattattcaaactgatgaagatgtgcctggtcccgtaccagtaaaatctcttcaaggaacatcctttgaaaataagatcttcttgaactggaaagaacctttggatccaaatggaatcatcactcaatatgagatcagctatagcagtataagatcatttgatcctgcagttccagtggctggacctccccagactgtatcaaatttatggaacagtacacaccatgtctttatgcatctccaccctggaaccacgtaccagtttttcataagagccagcacggtcaaaggctttggtccagccacagccatcaatgtcaccaccaatatctcagctccaactttacctgactatgaaggagttgatgcctctctcaatgaaactgccaccacaataactgtattgttgagaccagcacaagccaaaggtgctcctatcagtgcttatcagattgttgtggaagaactgcacccacaccgaaccaagagagaagccggagccatggaatgctaccaggttcctgtcacataccaaaatgccatgagtgggggtgcaccgtattactttgctgcagaactccccccgggaaacctacctgagcctgccccgttcactgtgggtgacaatcggacctaccaaggcttttggaaccctcctttggctccgcgcaaaggatacaacatctatttccaggcgatgagcagtgtggagaaggaaactaaaacccagtgcgtacgcattgctacaaaagcagcagcaacagaagaaccagaagtgatcccagatcccgccaagcagacagacagagtggtgaaaatagcaggaattagtgctggaattttggtgttcatcctccttctcctagttgtcatattaattgtaaaaaagagcaaacttgctaaaaaacgcaaagatgccatggggaatacccggcaggagatgactcacatggtgaatgcaatggatcgaagttatgctgatcagagcactctgcatgcagaagatcctctttccatcaccttcatggaccaacataactttagtccaagatatgagaaccacagtgctacagcagagtccagtcgccttctagacgtacctcgctacctctgtgaggggacggaatccccttaccagacaggacagctgcatccagccatcagggtagctgatttactgcagcacattaatctcatgaagacatcagacagctatgggttcaaagaggaatatgagagcttttttgaaggacagtcagcatcttgggatgtagctaaaaaagatcaaaatagagcaaaaaaccgatatggaaacattatagcatatgatcactccagagtgattttgcaacccgtagaggatgatccttcctcagattatattaatgccaactatattgatatttggctgtacagggatggctaccagagaccaagtcattacattgcaacccaaggtcccgttcatgaaacagtgtatgatttctggaggatgatttggcaagaacaatctgcttgcattgtgatggttacaaatttagttgaggttggccgggttaaatgctataaatattggcctgatgatactgaagtttatggtgacttcaaagtaacgtgtgtagaaatggaaccacttgctgaatatgtagttaggacattcaccctggaaaggagggggtacaatgaaatccgtgaagttaaacagttccatttcacgggctggcctgaccatggagtgccctaccatgctacagggctgctttcctttatccggcgagtcaagttatcaaaccctcccagtgctggccccatcgttgtacattgcagtgctggtgctggacgaactggctgctacattgtgattgacatcatgctagacatggctgaaagagagggtgttgttgatatttacaattgtgtcaaagccttaagatctcggcgtattaatatggtccagacagaggaacagtacatttttattcatgatgccattttagaagcctgcttatgtggagaaactgccatacctgtctgtgaatttaaagctgcatattttgatatgattagaatagactcccagactaactcttcacatctcaaggatgaatttcagactctgaattcagtcacccctcgactacaagctgaagactgcagtatagcgtgcctgccaaggaaccatgacaagaaccgtttcatggacatgctgccacctgacagatgtctgccttttttaattacaattgatggggagagcagtaactacatcaatgctgctcttatggacagctacaggcaaccagctgctttcatcgtcacacaataccctctgccaaacactgtaaaagacttctggagattagtgtatgattatggctgtacctccattgtgatgttaaacgaagtcgacttgtcccagggctgccctcagtactggccagaggaagggatgctacgatatggccccatccaagtggaatgtatgtcttgttcaatggactgtgatgtgatcaaccggatttttaggatatgcaatctaacaagaccacaggaaggttatctgatggtgcaacagtttcagtacctaggatgggcttctcatcgagaagtgcctggatccaaaaggtcattcttgaaactgatacttcaggtggaaaagtggcaggaggaatgcgaggaaggggaaggccggacgattatccactgcctaaatggtggcgggcgaagtggcatgttctgtgctataggcatcgttgttgaaatggtgaaacggcaaaatgttgtcgatgttttccatgcagtaaagacactgaggaacagcaagccaaacatggtggaagccccggagcaataccgtttctgctatgatgtagctttggagtacctggaatcatcttagttgggtgagactctttaaagtgcatccatgaagaaacctgtccatctattgagccagcagctgttgtacctgttacacttgtgcagaaagattttaatgtggggggtgggagacttttacatttgagaggtaaaagtattttttttatgaagttgtgtatcttaataaaaaggactgaattagtttttattactatattaaagcatcaacatttcatgccacataaattatatttaataagaaccagattgaaatgagaacgtattggtgtttgtacagtgaacatgccaccttttttctcatggtttcagtagagcagctaccacatgttgcatgagttcatactttctacgtggcatttttctccctttctaaaatgaaagctgatgaatcttaaaaggaagaagaaaagaaaagctgtgcaaattcatagtaaagttcgttttttatatgtttccagtgtagcagatctctatataaatatataaatatatataactggcttattttcttttaatgtgcaatgatggctggatcatttaaagttctttttagaaaataacataagccaaagactcaagtgtaaatatgtctatatggagaaagcacattatatttattggttacttacattccttttttgatggctaaaatactaccaccacacaatcatcttttttttcctgaagaaagctttttctttagctaaaatcaattgtaaacgatttttgtagattattttttgtatgttttagtgtaagtagaagataaactttttattcataaaccaggaagcaatgttctttatagtgattctcttgtgtacatgcttgtgaattaaatttgtgtaaaatcccttggcaattgggtcttttaatataggaccaaattaaaacattttgctgaatatgtatagtttttcacaatttcattaggtaaataatggtttggtgatcatacatgagaaatgtacacattaaaaggccttgctgacaacttgcacaatgttgaacatagcctttaagcatcatttaaattttaaaggaatggagtttttcagcctgtggcccagcactggtcaagaaaacaagatggcaacatatatgctttcagggtcaaatttgagcaaactgtaaactgtcagggtgataaaatgtttctcttgatgtttacatgcacaagctttgcgttctgactataaaaagtgtgaacaaatcaatgccagattcctgttttgcgcattgtcatgg

SEQ ID NO: 16936 - DNA, 5025 bp, Homo sapiens
  source 1..5025: mol_type = unassigned DNA
gagcaaagtaactcttgactaacaggagcagcctccgccgagcatggagagctgccgccgcggccggccggcgacgctggcgacgctttcgcccctgaggtagtttggcgaccgcgaagaaggaaaaagggcgggcgggcggctgtcctctcaccgtcctcaccccgcgaggcccggcccgctcctccgtcgtggatttcgcggcgatccccccggcagctctttgcaaagctgcttgaaacttctcccaaactcggcatggatacgactgcggcggcggcgctgcctgcttttgtggcgctcttgctcctctctccttggcctctcctgggatcggcccaaggccagttctccgcaggtggctgtacttttgatgatggtccaggggcctgtgattaccaccaggatctgtatgatgactttgaatgggtgcatgttagtgctcaagagcctcattatctaccacccgagatgccccaaggttcctatatgatagtggactcttcagatcacgaccctggagaaaaagccagacttcagctgcctacaatgaaggagaacgacactcactgcattgatttcagttacctattatatagccagaaaggactgaatcctggcactttgaacatattagttagggtgaataaaggacctcttgccaatccaatttggaatgtgactggattcacgggtagagattggcttcgggctgagctagcagtgagcaccttttggcccaatgaatatcaggtaatatttgaagctgaagtctcaggagggagaagtggttatattgccattgatgacatccaagtactgagttatccttgtgataaatctcctcatttcctccgtctaggggatgtagaggtgaatgcagggcaaaacgctacatttcagtgcattgccacagggagagatgctgtgcataacaagttatggctccagagacgaaatggagaagatataccagtagcccagactaagaacatcaatcatagaaggtttgccgcttccttcagattgcaagaagtgacaaaaactgaccaggatttgtatcgctgtgtaactcagtcagaacgaggttccggtgtgtccaattttgctcaacttattgtgagagaaccgccaagacccattgctcctcctcagcttcttggtgttgggcctacatatttgctgatccaactaaatgccaactcgatcattggcgatggtcctatcatcctgaaagaagtagagtaccgaatgacatcaggatcctggacagaaacccatgcagtcaatgctccaacttacaaattatggcatttagatccagataccgaatatgagatccgagttctacttacaagacctggtgaaggtggaacggggctcccaggacctccactaatcaccagaacaaaatgtgcagaacctatgagaaccccaaagacattaaagattgctgaaatacaggcaagacggattgctgtggactgggaatccttgggttacaacattacgcgttgccacacttttaatgtcactatctgctaccattacttccgtggtcacaacgagagcaaggcagactgtttggacatggaccccaaagcccctcagcatgttgtgaaccatctgccaccttatacaaatgtcagcctcaagatgatcctaaccaatccagagggaaggaaggagagtgaagagacaattattcaaactgatgaagatgtgcctggtcccgtaccagtaaaatctcttcaaggaacatcctttgaaaataagatcttcttgaactggaaagaacctttggatccaaatggaatcatcactcaatatgagatcagctatagcagtataagatcatttgatcctgcagttccagtggctggacctccccagactgtatcaaatttatggaacagtacacaccatgtctttatgcatctccaccctggaaccacgtaccagtttttcataagagccagcacggtcaaaggctttggtccagccacagccatcaatgtcaccaccaatatctcagctccaactttacctgactatgaaggagttgatgcctctctcaatgaaactgccaccacaataactgtattgttgagaccagcacaagccaaaggtgctcctatcagtgcttatcagattgttgtggaagaactgcacccacaccgaaccaagagagaagccggagccatggaatgctaccaggttcctgtcacataccaaaatgccatgagtgggggtgcaccgtattactttgctgcagaactccccccgggaaacctacctgagcctgccccgttcactgtgggtgacaatcggacctaccaaggcttttggaaccctcctttggctccgcgcaaaggatacaacatctatttccaggcgatgagcagtgtggagaaggaaactaaaacccagtgcgtacgcattgctacaaaagcagcagcaacagaagaaccagaagtgatcccagatcccgccaagcagacagacagagtggtgaaaatagcaggaattagtgctggaattttggtgttcatcctccttctcctagttgtcatattaattgtaaaaaagagcaaacttgctaaaaaacgcaaagatgccatggggaatacccggcaggagatgactcacatggtgaatgcaatggatcgaagttatgctgatcagagcactctgcatgcagaagatcctctttccatcaccttcatggaccaacataactttagtccaagattgcccaatgatccacttgtaccgactgctgtgttagatgagaaccacagtgctacagcagagtccagtcgccttctagacgtacctcgctacctctgtgaggggacggaatccccttaccagacaggacagctgcatccagccatcagggtagctgatttactgcagcacattaatctcatgaagacatcagacagctatgggttcaaagaggaatatgagagcttttttgaaggacagtcagcatcttgggatgtagctaaaaaagatcaaaatagagcaaaaaaccgatatggaaacattatagcatatgatcactccagagtgattttgcaacccgtagaggatgatccttcctcagattatattaatgccaactatattgatatttggctgtacagggatggctaccagagaccaagtcattacattgcaacccaaggtcccgttcatgaaacagtgtatgatttctggaggatgatttggcaagaacaatctgcttgcattgtgatggttacaaatttagttgaggttggccgggttaaatgctataaatattggcctgatgatactgaagtttatggtgacttcaaagtaacgtgtgtagaaatggaaccacttgctgaatatgtagttaggacattcaccctggaaaggagggggtacaatgaaatccgtgaagttaaacagttccatttcacgggctggcctgaccatggagtgccctaccatgctacagggctgctttcctttatccggcgagtcaagttatcaaaccctcccagtgctggccccatcgttgtacattgcagtgctggtgctggacgaactggctgctacattgtgattgacatcatgctagacatggctgaaagagagggtgttgttgatatttacaattgtgtcaaagccttaagatctcggcgtattaatatggtccagacagaggaacagtacatttttattcatgatgccattttagaagcctgcttatgtggagaaactgccatacctgtctgtgaatttaaagctgcatattttgatatgattagaatagactcccagactaactcttcacatctcaaggatgaatttcagactctgaattcagtcacccctcgactacaagctgaagactgcagtatagcgtgcctgccaaggaaccatgacaagaaccgtttcatggacatgctgccacctgacagatgtctgccttttttaattacaattgatggggagagcagtaactacatcaatgctgctcttatggacagctacaggcaaccagctgctttcatcgtcacacaataccctctgccaaacactgtaaaagacttctggagattagtgtatgattatggctgtacctccattgtgatgttaaacgaagtcgacttgtcccagggctgccctcagtactggccagaggaagggatgctacgatatggccccatccaagtggaatgtatgtcttgttcaatggactgtgatgtgatcaaccggatttttaggatatgcaatctaacaagaccacaggaaggttatctgatggtgcaacagtttcagtacctaggatgggcttctcatcgagaagtgcctggatccaaaaggtcattcttgaaactgatacttcaggtggaaaagtggcaggaggaatgcgaggaaggggaaggccggacgattatccactgcctaaatggtggcgggcgaagtggcatgttctgtgctataggcatcgttgttgaaatggtgaaacggcaaaatgttgtcgatgttttccatgcagtaaagacactgaggaacagcaagccaaacatggtggaagccccggagcaataccgtttctgctatgatgtagctttggagtacctggaatcatcttagttgggtgagactctttaaagtgcatccatgaagaaacctgtccatctattgagccagcagctgttgtacctgttacacttgtgcagaaagattttaatgtggggggtgggagacttttacatttgagaggtaaaagtattttttttatgaagttgtgtatcttaataaaaaggactgaattagtttttattactatattaaagcatcaacatttcatgccacataaattatatttaataagaaccagattgaaatgagaacgtattggtgtttgtacagtgaacatgccaccttttttctcatggtttcagtagagcagctaccacatgttgcatgagttcatactttctacgtggcatttttctccctttctaaaatgaaagctgatga

SEQ ID NO: 16937 - DNA, 4651 bp, Homo sapiens
  source 1..4651: mol_type = unassigned DNA
atggatacgactgcggcggcggcgctgcctgcttttgtggcgctcttgctcctctctccttggcctctcctgggatcggcccaaggccagttctccgcaggtggctgtacttttgatgatggtccaggggcctgtgattaccaccaggatctgtatgatgactttgaatgggtgcatgttagtgctcaagagcctcattatctaccacccgagatgccccaaggttcctatatgatagtggactcttcagatcacgaccctggagaaaaagccagacttcagctgcctacaatgaaggagaacgacactcactgcattgatttcagttacctattatatagccagaaaggactgaatcctggcactttgaacatattagttagggtgaataaaggacctcttgccaatccaatttggaatgtgactggattcacgggtagagattggcttcgggctgagctagcagtgagcaccttttggcccaatgaatatcaggtaatatttgaagctgaagtctcaggagggagaagtggttatattgccattgatgacatccaagtactgagttatccttgtgataaatctcctcatttcctccgtctaggggatgtagaggtgaatgcagggcaaaacgctacatttcagtgcattgccacagggagagatgctgtgcataacaagttatggctccagagacgaaatggagaagatataccagtagcccagactaagaacatcaatcatagaaggtttgccgcttccttcagattgcaagaagtgacaaaaactgaccaggatttgtatcgctgtgtaactcagtcagaacgaggttccggtgtgtccaattttgctcaacttattgtgagagaaccgccaagacccattgctcctcctcagcttcttggtgttgggcctacatatttgctgatccaactaaatgccaactcgatcattggcgatggtcctatcatcctgaaagaagtagagtaccgaatgacatcaggatcctggacagaaacccatgcagtcaatgctccaacttacaaattatggcatttagatccagataccgaatatgagatccgagttctacttacaagacctggtgaaggtggaacggggctcccaggacctccactaatcaccagaacaaaatgtgcagaacctatgagaaccccaaagacattaaagattgctgaaatacaggcaagacggattgctgtggactgggaatccttgggttacaacattacgcgttgccacacttttaatgtcactatctgctaccattacttccgtggtcacaacgagagcaaggcagactgtttggacatggaccccaaagcccctcagcatgttgtgaaccatctgccaccttatacaaatgtcagcctcaagatgatcctaaccaatccagagggaaggaaggagagtgaagagacaattattcaaactgatgaagatgtgcctggtcccgtaccagtaaaatctcttcaaggaacatcctttgaaaataagatcttcttgaactggaaagaacctttggatccaaatggaatcatcactcaatatgagatcagctatagcagtataagatcatttgatcctgcagttccagtggctggacctccccagactgtatcaaatttatggaacagtacacaccatgtctttatgcatctccaccctggaaccacgtaccagtttttcataagagccagcacggtcaaaggctttggtccagccacagccatcaatgtcaccaccaatatctcagctccaactttacctgactatgaaggagttgatgcctctctcaatgaaactgccaccacaataactgtattgttgagaccagcacaagccaaaggtgctcctatcagtgcttatcagattgttgtggaagaactgcacccacaccgaaccaagagagaagccggagccatggaatgctaccaggttcctgtcacataccaaaatgccatgagtgggggtgcaccgtattactttgctgcagaactccccccgggaaacctacctgagcctgccccgttcactgtgggtgacaatcggacctaccaaggcttttggaaccctcctttggctccgcgcaaaggatacaacatctatttccaggcgatgagcagtgtggagaaggaaactaaaacccagtgcgtacgcattgctacaaaagcagcaacagaagaaccagaagtgatcccagatcccgccaagcagacagacagagtggtgaaaatagcaggaattagtgctggaattttggtgttcatcctccttctcctagttgtcatattaattgtaaaaaagagcaaacttgctaaaaaacgcaaagatgccatggggaatacccggcaggagatgactcacatggtgaatgcaatggatcgaagttatgctgatcagagcactctgcatgcagaagatcctctttccatcaccttcatggaccaacataactttagtccaagatatgagaaccacagtgctacagcagagtccagtcgccttctagacgtacctcgctacctctgtgaggggacggaatccccttaccagacaggacagctgcatccagccatcagggtagctgatttactgcagcacattaatctcatgaagacatcagacagctatgggttcaaagaggaatatgagagcttttttgaaggacagtcagcatcttgggatgtagctaaaaaagatcaaaatagagcaaaaaaccgatatggaaacattatagcatatgatcactccagagtgattttgcaacccgtagaggatgatccttcctcagattatattaatgccaactatattgatggctaccagagaccaagtcattacattgcaacccaaggtcccgttcatgaaacagtgtatgatttctggaggatgatttggcaagaacaatctgcttgcattgtgatggttacaaatttagttgaggttggccgggttaaatgctataaatattggcctgatgatactgaagtttatggtgacttcaaagtaacgtgtgtagaaatggaaccacttgctgaatatgtagttaggacattcaccctggaaaggagggggtacaatgaaatccgtgaagttaaacagttccatttcacgggctggcctgaccatggagtgccctaccatgctacagggctgctttcctttatccggcgagtcaagttatcaaaccctcccagtgctggccccatcgttgtacattgcagtgctggtgctggacgaactggctgctacattgtgattgacatcatgctagacatggctgaaagagagggtgttgttgatatttacaattgtgtcaaagccttaagatctcggcgtattaatatggtccagacagaggaacagtacatttttattcatgatgccattttagaagcctgcttatgtggagaaactgccatacctgtctgtgaatttaaagctgcatattttgatatgattagaatagactcccagactaactcttcacatctcaaggatgaatttcagactctgaattcagtcacccctcgactacaagctgaagactgcagtatagcgtgcctgccaaggaaccatgacaagaaccgtttcatggacatgctgccacctgacagatgtctgccttttttaattacaattgatggggagagcagtaactacatcaatgctgctcttatggacagctacaggcaaccagctgctttcatcgtcacacaataccctctgccaaacactgtaaaagacttctggagattagtgtatgattatggctgtacctccattgtgatgttaaacgaagtcgacttgtcccagggctgccctcagtactggccagaggaagggatgctacgatatggccccatccaagtggaatgtatgtcttgttcaatggactgtgatgtgatcaaccggatttttaggatatgcaatctaacaagaccacaggaaggttatctgatggtgcaacagtttcagtacctaggatgggcttctcatcgagaagtgcctggatccaaaaggtcattcttgaaactgatacttcaggtggaaaagtggcaggaggaatgcgaggaaggggaaggccggacgattatccactgcctaaatggtggcgggcgaagtggcatgttctgtgctataggcatcgttgttgaaatggtgaaacggcaaaatgttgtcgatgttttccatgcagtaaagacactgaggaacagcaagccaaacatggtggaagccccggagcaataccgtttctgctatgatgtagctttggagtacctggaatcatcttagttgggtgagactctttaaagtgcatccatgaagaaacctgtccatctattgagccagcagctgttgtacctgttacacttgtgcagaaagattttaatgtggggggtgggagacttttacatttgagaggtaaaagtattttttttatgaagttgtgtatcttaataaaaaggactgaattagtttttattactatattaaagcatcaacatttcatgccacataaattatatttaataagaaccagattgaaatgagaacgtattggtgtttgtacagtgaacatgccaccttttttctcatggtttcagtagagcagctaccacatgtt

SEQ ID NO: 16938 - DNA, 4758 bp, Homo sapiens
  source 1..4758: mol_type = unassigned DNA
tccgccgagcatggagagctgccgccgcggccggccggcgacgctggcgacgctttcgcccctgaggtagtttggcgaccgcgaagaaggaaaaagggcgggcgggcggctgtcctctcaccgtcctcaccccgcgaggcccggcccgctcctccgtcgtggatttcgcggcgatccccccggcagctctttgcaaagctgcttgaaacttctcccaaactcggcatggatacgactgcggcggcggcgctgcctgcttttgtggcgctcttgctcctctctccttggcctctcctgggatcggcccaaggccagttctccgcaggtggctgtacttttgatgatggtccaggggcctgtgattaccaccaggatctgtatgatgactttgaatgggtgcatgttagtgctcaagagcctcattatctaccacccgagatgccccaaggttcctatatgatagtggactcttcagatcacgaccctggagaaaaagccagacttcagctgcctacaatgaaggagaacgacactcactgcattgatttcagttacctattatatagccagaaaggactgaatcctggcactttgaacatattagttagggtgaataaaggacctcttgccaatccaatttggaatgtgactggattcacgggtagagattggcttcgggctgagctagcagtgagcaccttttggcccaatgaatatcaggtaatatttgaagctgaagtctcaggagggagaagtggttatattgccattgatgacatccaagtactgagttatccttgtgataaatctcctcatttcctccgtctaggggatgtagaggtgaatgcagggcaaaacgctacatttcagtgcattgccacagggagagatgctgtgcataacaagttatggctccagagacgaaatggagaagatataccagtagcccagactaagaacatcaatcatagaaggtttgccgcttccttcagattgcaagaagtgacaaaaactgaccaggatttgtatcgctgtgtaactcagtcagaacgaggttccggtgtgtccaattttgctcaacttattgtgagagaaccgccaagacccattgctcctcctcagcttcttggtgttgggcctacatatttgctgatccaactaaatgccaactcgatcattggcgatggtcctatcatcctgaaagaagtagagtaccgaatgacatcaggatcctggacagaaacccatgcagtcaatgctccaacttacaaattatggcatttagatccagataccgaatatgagatccgagttctacttacaagacctggtgaaggtggaacggggctcccaggacctccactaatcaccagaacaaaatgtgcagaacctatgagaaccccaaagacattaaagattgctgaaatacaggcaagacggattgctgtggactgggaatccttgggttacaacattacgcgttgccacacttttaatgtcactatctgctaccattacttccgtggtcacaacgagagcaaggcagactgtttggacatggaccccaaagcccctcagcatgttgtgaaccatctgccaccttatacaaatgtcagcctcaagatgatcctaaccaatccagagggaaggaaggagagtgaagagacaattattcaaactgatgaagatgtgcctggtcccgtaccagtaaaatctcttcaaggaacatcctttgaaaataagatcttcttgaactggaaagaacctttggatccaaatggaatcatcactcaatatgagatcagctatagcagtataagatcatttgatcctgcagttccagtggctggacctccccagactgtatcaaatttatggaacagtacacaccatgtctttatgcatctccaccctggaaccacgtaccagtttttcataagagccagcacggtcaaaggctttggtccagccacagccatcaatgtcaccaccaatatctcagctccaactttacctgactatgaaggagttgatgcctctctcaatgaaactgccaccacaataactgtattgttgagaccagcacaagccaaaggtgctcctatcagtgcttatcagattgttgtggaagaactgcacccacaccgaaccaagagagaagccggagccatggaatgctaccaggttcctgtcacataccaaaatgccatgagtgggggtgcaccgtattactttgctgcagaactccccccgggaaacctacctgagcctgccccgttcactgtgggtgacaatcggacctaccaaggcttttggaaccctcctttggctccgcgcaaaggatacaacatctatttccaggcgatgagcagtgtggagaaggaaactaaaacccagtgcgtacgcattgctacaaaagcagcagcaacagaagaaccagaagtgatcccagatcccgccaagcagacagacagagtggtgaaaatagcaggaattagtgctggaattttggtgttcatcctccttctcctagttgtcatattaattgtaaaaaagaggaggagctactattcttactcctactacctcaaacttgctaaaaaacgcaaagatgccatggggaatacccggcaggagatgactcacatggtgaatgcaatggatcgaagttatgctgatcagagcactctgcatgcagaagatcctctttccatcaccttcatggaccaacataactttagtccaagattgcccaatgatccacttgtaccgactgctgtgttagttcctataacagatgagaaccacagtgctacagcagagtccagtcgccttctagacgtacctcgctacctctgtgaggggacggaatccccttaccagacaggacagctgcatccagccatcagggtagctgatttactgcagcacattaatctcatgaagacatcagacagctatgggttcaaagaggaatatgagagcttttttgaaggacagtcagcatcttgggatgtagctaaaaaagatcaaaatagagcaaaaaaccgatatggaaacattatagcatatgatcactccagagtgattttgcaacccgtagaggatgatccttcctcagattatattaatgccaactatattgatatttggctgtacagggatggctaccagagaccaagtcattacattgcaacccaaggtcccgttcatgaaacagtgtatgatttctggaggatgatttggcaagaacaatctgcttgcattgtgatggttacaaatttagttgaggttggccgggttaaatgctataaatattggcctgatgatactgaagtttatggtgacttcaaagtaacgtgtgtagaaatggaaccacttgctgaatatgtagttaggacattcaccctggaaaggagggggtacaatgaaatccgtgaagttaaacagttccatttcacgggctggcctgaccatggagtgccctaccatgctacagggctgctttcctttatccggcgagtcaagttatcaaaccctcccagtgctggccccatcgttgtacattgcagtgctggtgctggacgaactggctgctacattgtgattgacatcatgctagacatggctgaaagagagggtgttgttgatatttacaattgtgtcaaagccttaagatctcggcgtattaatatggtccagacagaggaacagtacatttttattcatgatgccattttagaagcctgcttatgtggagaaactgccatacctgtctgtgaatttaaagctgcatattttgatatgattagaatagactcccagactaactcttcacatctcaaggatgaatttcagactctgaattcagtcacccctcgactacaagctgaagactgcagtatagcgtgcctgccaaggaaccatgacaagaaccgtttcatggacatgctgccacctgacagatgtctgccttttttaattacaattgatggggagagcagtaactacatcaatgctgctcttatggacagctacaggcaaccagctgctttcatcgtcacacaataccctctgccaaacactgtaaaagacttctggagattagtgtatgattatggctgtacctccattgtgatgttaaacgaagtcgacttgtcccagggctgccctcagtactggccagaggaagggatgctacgatatggccccatccaagtggaatgtatgtcttgttcaatggactgtgatgtgatcaaccggatttttaggatatgcaatctaacaagaccacaggaaggttatctgatggtgcaacagtttcagtacctaggatgggcttctcatcgagaagtgcctggatccaaaaggtcattcttgaaactgatacttcaggtggaaaagtggcaggaggaatgcgaggaaggggaaggccggacgattatccactgcctaaatggtggcgggcgaagtggcatgttctgtgctataggcatcgttgttgaaatggtgaaacggcaaaatgttgtcgatgttttccatgcagtaaagacactgaggaacagcaagccaaacatggtggaagccccggagcaataccgtttctgctatgatgtagctttggagtacctggaatcatcttagttgggtgagactctttaaagtgcatccatgaagaaacctgtccatctattgagccagcagctgttgtacctgttacacttgtgcagaaagattttaatgtggggggtgggagac

SEQ ID NO: 16939 - DNA, 1029 bp, Homo sapiens
  source 1..1029: mol_type = unassigned DNA
caaaagcagcagcaacagaagaaccagaagtgatcccagatcccgccaagcagacagacagagtggtgaaaatagcaggaattagtgctggaattttggtgttcatcctccttctcctagttgtcatattaattgtaaaaaagaggaggagctactattcttactcctactacctcaaacttgctaaaaaacgcaaagatgccatggggaatacccggcaggagatgactcacatggtgaatgcaatggatcgaagttatgctgatcagagcactctgcatgcagaagatcctctttccatcaccttcatggaccaacataactttagtccaagattgcccaatgatccacttgtaccgactgctgtgttagatgagaaccacagtgctacagcagagtccagtcgccttctagacgtacctcgctacctctgtgaggggacggaatccccttaccagacaggacagctgcatccagccatcagggtagctgatttactgcagcacattaatctcatgaagacatcagacagctatgggttcaaagaggaatatgagagcttttttgaaggacagtcagcatcttgggatgtagctaaaaaagatcaaaatagagcaaaaaaccgatatggaaacattatagcatatgatcactccagagtgattttgcaacccgtagaggatgatccttcctcagattatattaatgccaactatattgatggctaccagagaccaagtcattacattgcaacccaaggtcccgttcatgaaacagtgtatgatttctggaggatgatttggcaagaacaatctgcttgcattgtgatggttacaaatttagttgaggttggccgggttaaatgctataaatattggcctgatgatactgaagtttatggtgacttcaaagtaacgtgtgtagaaatggaaccacttgctgaatatgtagttaggacattcaccctggaaaggagggggtacaatgaaatccgtgaagttaaacagttccatttcacgggctggcctg

SEQ ID NO: 16940 - DNA, 782 bp, Homo sapiens
  source 1..782: mol_type = unassigned DNA
tggagaagacacatctgcattagaaacattaggaggagctactattcttactcctactacctcaaacttgctaaaaaacgcaaagatgccatggggaatacccggcaggagatgactcacatggtgaatgcaatggatcgaagttatgctgatcagagcactctgcatgcagaagatcctctttccatcaccttcatggaccaacataactttagtccaagattgcccaatgatccacttgtaccgactgctgtgttagttcctataacagatgagaaccacagtgctacagcagagtccagtcgccttctagacgtacctcgctacctctgtgaggggacggaatccccttaccagacaggacagctgcatccagccatcagggtagctgatttactgcagcacattaatctcatgaagacatcagacagctatgggttcaaagaggaatatgagagcttttttgaaggacagtcagcatcttgggatgtagctaaaaaagatcaaaatagagcaaaaaaccgatatggaaacattatagcatatgatcactccagagtgattttgcaacccgtagaggatgatccttcctcagattatattaatgccaactatattgatggctaccagagaccaagtcattacattgcaacccaaggtcccgttcatgaaacagtgtatgatttctggaggatgatttggcaagaacaatctgcttgcattgtgatggttacaaatttagttgaggttggccgggttaaatgctataaatattggcctga

SEQ ID NO: 16941 - DNA, 2515 bp, Homo sapiens
  source 1..2515: mol_type = unassigned DNA
gtgcatgttagtgctcaagagcctcattatctaccacccgagatgccccaaggtaatatttgaagctgaagtctcaggagggagaagtggttatattgccattgatgacatccaagtactgagttatccttgtgataaatctcctcatttcctccgtctaggggatgtagaggtgaatgcagggcaaaacgctacatttcagtgcattgccacagggagagatgctgtgcataacaagttatggctccagagacgaaatggagaagatataccagtagcccagactaagaacatcaatcatagaaggtttgccgcttccttcagattgcaagaagtgacaaaaactgaccaggatttgtatcgctgtgtaactcagtcagaacgaggttccggtgtgtccaattttgctcaacttattgtgagagaaccgccaagacccattgctcctcctcagcttcttggtgttgggcctacatatttgctgatccaactaaatgccaactcgatcattggcgatggtcctatcatcctgaaagaagtagagtaccgaatgacatcaggatcctggacagaaacccatgcagtcaatgctccaacttacaaattatggcatttagatccagataccgaatatgagatccgagttctacttacaagacctggtgaaggtggaacggggctcccaggacctccactaatcaccagaacaaaatgtgcagaacctatgagaaccccaaagacattaaagattgctgaaatacaggcaagacggattgctgtggactgggaatccttgggttacaacattacgcgttgccacacttttaatgtcactatctgctaccattacttccgtggtcacaacgagagcaaggcagactgtttggacatggaccccaaagcccctcagcatgttgtgaaccatctgccaccttatacaaatgtcagcctcaagatgatcctaaccaatccagagggaaggaaggagagtgaagagacaattattcaaactgatgaagatgtgcctggtcccgtaccagtaaaatctcttcaaggaacatcctttgaaaataagatcttcttgaactggaaagaacctttggatccaaatggaatcatcactcaatatgagatcagctatagcagtataagatcatttgatcctgcagttccagtggctggacctccccagactgtatcaaatttatggaacagtacacaccatgtctttatgcatctccaccctggaaccacgtaccagtttttcataagagccagcacggtcaaaggctttggtccagccacagccatcaatgtcaccaccaatatctcagctccaactttacctgactatgaaggagttgatgcctctctcaatgaaactgccaccacaataactgtattgttgagaccagcacaagccaaaggtgctcctatcagtgcttatcagattgttgtggaagaactgcacccacaccgaaccaagagagaagccggagccatggaatgctaccaggttcctgtcacataccaaaatgccatgagtgggggtgcaccgtattactttgctgcagaactccccccgggaaacctacctgagcctgccccgttcactgtgggtgacaatcggacctaccaaggcttttggaaccctcctttggctccgcgcaaaggatacaacatctatttccaggcgatgagcagtgtggagaaggaaactaaaacccagtgcgtacgcattgctacaaaagcagcagcaacagaagaaccagaagtgatcccagatcccgccaagcagacagacagagtggtgaaaatagcaggaattagtgctggaattttggtgttcatcctccttctcctagttgtcatattaattgtaaaaaagagatatatatgttggagaagacacatctgcattagaaacattaggaggagctactattcttactcctactacctcaaacttgctaaaaaacgcaaagatgccatggggaatacccggcaggagatgactcacatggtgaatgcaatggatcgaagttatgctgatcagagcactctgcatgcagaagatcctctttccatcaccttcatggaccaacataactttagtccaagattgcccaatgatccacttgtaccgactgctgtgttagttcctataacaggaagaaaaaatgtttatcatggggacaacaattcattttttgctatatcctatttgtagagttggtgatagaacaggcaaatgtactagcacttgaaatatgtttatctgttaattaaatatcattctctacagtatgcattatcattaaaaaaaaagttcccctaagagtgtattttctcttctgttaatgagtatgacggtataatgcttttcaaagtaacaccccttaaaacatttgtttttttttttaagtggtaagtttaaatgtgataaatatgagcatgcttctcgttgtaatgtttagtacttcggtcattaaagtactgtttattcttcataggc

SEQ ID NO: 16942 - DNA, 3157 bp, Homo sapiens
  source 1..3157: mol_type = unassigned DNA
actaacaggagcagcctccgccgagcatggagagctgccgccgcggccggccggcgacgctggcgacgctttcgcccctgaggtagtttggcgaccgcgaagaaggaaaaagggcgggcgggcggctgtcctctcaccgtcctcaccccgcgaggcccggcccgctcctccgtcgtggatttcgcggcgatccccccggcagctctttgcaaagctgcttgaaacttctcccaaactcggcatggatacgactgcggcggcggcgctgcctgcttttgtggcgctcttgctcctctctccttggcctctcctgggatcggcccaaggccagttctccgcaggtggctgtacttttgatgatggtccaggggcctgtgattaccaccaggatctgtatgatgactttgaatgggtgcatgttagtgctcaagagcctcattatctaccacccgagatgccccaaggttcctatatgatagtggactcttcagatcacgaccctggagaaaaagccagacttcagctgcctacaatgaaggagaacgacactcactgcattgatttcagttacctattatatagccagaaaggactgaatcctggcactttgaacatattagttagggtgaataaaggacctcttgccaatccaatttggaatgtgactggattcacgggtagagattggcttcgggctgagctagcagtgagcaccttttggcccaatgaatatcaggtaatatttgaagctgaagtctcaggagggagaagtggttatattgccattgatgacatccaagtactgagttatccttgtgataaatctcctcatttcctccgtctaggggatgtagaggtgaatgcagggcaaaacgctacatttcagtgcattgccacagggagagatgctgtgcataacaagttatggctccagagacgaaatggagaagatataccagtagcccagactaagaacatcaatcatagaaggtttgccgcttccttcagattgcaagaagtgacaaaaactgaccaggatttgtatcgctgtgtaactcagtcagaacgaggttccggtgtgtccaattttgctcaacttattgtgagagaaccgccaagacccattgctcctcctcagcttcttggtgttgggcctacatatttgctgatccaactaaatgccaactcgatcattggcgatggtcctatcatcctgaaagaagtagagtaccgaatgacatcaggatcctggacagaaacccatgcagtcaatgctccaacttacaaattatggcatttagatccagataccgaatatgagatccgagttctacttacaagacctggtgaaggtggaacggggctcccaggacctccactaatcaccagaacaaaatgtgcagaacctatgagaaccccaaagacattaaagattgctgaaatacaggcaagacggattgctgtggactgggaatccttgggttacaacattacgcgttgccacacttttaatgtcactatctgctaccattacttccgtggtcacaacgagagcaaggcagactgtttggacatggaccccaaagcccctcagcatgttgtgaaccatctgccaccttatacaaatgtcagcctcaagatgatcctaaccaatccagagggaaggaaggagagtgaagagacaattattcaaactgatgaagatgtgcctggtcccgtaccagtaaaatctcttcaaggaacatcctttgaaaataagatcttcttgaactggaaagaacctttggatccaaatggaatcatcactcaatatgagatcagctatagcagtataagatcatttgatcctgcagttccagtggctggacctccccagactgtatcaaatttatggaacagtacacaccatgtctttatgcatctccaccctggaaccacgtaccagtttttcataagagccagcacggtcaaaggctttggtccagccacagccatcaatgtcaccaccaatatctcagctccaactttacctgactatgaaggagttgatgcctctctcaatgaaactgccaccacaataactgtattgttgagaccagcacaagccaaaggtgctcctatcagtgcttatcagattgttgtggaagaactgcacccacaccgaaccaagagagaagccggagccatggaatgctaccaggttcctgtcacataccaaaatgccatgagtgggggtgcaccgtattactttgctgcagaactccccccgggaaacctacctgagcctgccccgttcactgtgggtgacaatcggacctaccaaggcttttggaaccctcctttggctccgcgcaaaggatacaacatctatttccaggcgatgagcagtgtggagaaggaaactaaaacccagtgcgtacgcattgctacaaaagcagcagcaacagaagaaccagaagtgatcccagatcccgccaagcagacagacagagtggtgaaaatagcaggaattagtgctggaattttggtgttcatcctccttctcctagttgtcatattaattgtaaaaaagaggaggagctactattcttactcctactacctcaaacttgctaaaaaacgcaaagatgccatggggaatacccggcaggagatgactcacatggtgaatgcaatggatcgaagttatgctgatcagagcactctgcatgcagaagatcctctttccatcaccttcatggaccaacataactttagtccaagattgcccaatgatccacttgtaccgactgctgtgttagttcctataacaggaagaaaaaatgtttatcatggggacaacaattcattttttgctatatcctatttgtagagttggtgatagaacaggcaaatgtactagcacttgaaatatgtttatctgttaattaaatatcattctctacagtatgcattatcattaaaaaaaaagttcccctaagagtgtattttctcttctgttaatgagtatgacggtataatgcttttcaaagtaacaccccttaaaacatttgtttttttttttaagtggtaagtttaaatgtgataaatatgagcatgcttctcgttgtaatgtttagtacttcggtcattaaagtactgtttattcttcataggc

SEQ ID NO: 16943 - DNA, 311 bp, Homo sapiens
  source 1..311: mol_type = unassigned DNA
tcatcctccttctcctagttgtcatattaattgtaaaaaagagcaaacttgctaaaaaacgcaaagatgccatggggaatacccggcaggagatgactcacatggtgaatgcaatggatcgaagttatgctgatcagagcactctgcatgcagaagatcctctttccatcaccttcatggaccaacataactttagtccaagatgtaagtttttcattaaaattttaataaatgatgttacaactcatttcactttgaattctacacgataccttttgagtaatgagagagagtaggaaagtgaggggaga

SEQ ID NO: 16944 - DNA, 555 bp, Homo sapiens
  source 1..555: mol_type = unassigned DNA
ccgtattactttgctgcagaactccccccgggaaacctacctgagcctgccccgttcactgtgggtgacaatcggacctaccaaggcttttggaaccctcctttggctccgcgcaaaggatacaacatctatttccaggcgatgagcagtgtggagaaggaaactaaaacccagtgcgtacgcattgctacaaaagcatttttccacatatgaaaagctaaccctgtttctacaaaaactaaaaaaaatgagccaggcatggtgacttgtgcctgtagctccagctacttggaagatgggaagattgcttcagcctaggaatttgaggctgcagtgagctatgattgtaccactgcactccagcctgggtgacagagtgagactatgtctcaaaaggaaaaaaaaaagaaaagaaaagaaatgaaaaagaaaaactaccacatttgttaaagtaacatcaacttattgcctgactacattttaaactaacatgcaagtatggtcagctttggtgtgaaatttttcaatatgaaaataaaaagttttctgacaggg

SEQ ID NO: 16945 - DNA, 2441 bp, Homo sapiens
  source 1..2441: mol_type = unassigned DNA
agtttggcgaccgcgaagaaggaaaaagggcgggcgggcggctgtcctctcaccgtcctcaccccgcgaggcccggcccgctcctccgtcgtggatttcgcggcgatccccccggcagctctttgcaaagctgcttgaaacttctcccaaactcggcatggatacgactgcggcggcggcgctgcctgcttttgtggcgctcttgctcctctctccttggcctctcctgggatcggcccaaggccagttctccgcaggtggctgtacttttgatgatggtccaggggcctgtgattaccaccaggatctgtatgatgactttgaatgggtgcatgttagtgctcaagagcctcattatctaccacccgagatgccccaaggttcctatatgatagtggactcttcagatcacgaccctggagaaaaagccagacttcagctgcctacaatgaaggagaacgacactcactgcattgatttcagttacctattatatagccagaaaggactgaatcctggcactttgaacatattagttagggtgaataaaggacctcttgccaatccaatttggaatgtgactggattcacgggtagagattggcttcgggctgagctagcagtgagcaccttttggcccaatgaatatcaggtaatatttgaagctgaagtctcaggagggagaagtggttatattgccattgatgacatccaagtactgagttatccttgtgataaatctcctcatttcctccgtctaggggatgtagaggtgaatgcagggcaaaacgctacatttcagtgcattgccacagggagagatgctgtgcataacaagttatggctccagagacgaaatggagaagatataccagtagcccagactaagaacatcaatcatagaaggtttgccgcttccttcagattgcaagaagtgacaaaaactgaccaggatttgtatcgctgtgtaactcagtcagaacgaggttccggtgtgtccaattttgctcaacttattgtgagagaaccgccaagacccattgctcctcctcagcttcttggtgttgggcctacatatttgctgatccaactaaatgccaactcgatcattggcgatggtcctatcatcctgaaagaagtagagtaccgaatgacatcaggatcctggacagaaacccatgcagtcaatgctccaacttacaaattatggcatttagatccagataccgaatatgagatccgagttctacttacaagacctggtgaaggtggaacggggctcccaggacctccactaatcaccagaacaaaatgtgcagaacctatgagaaccccaaagacattaaagattgctgaaatacaggcaagacggattgctgtggactgggaatccttgggttacaacattacgcgttgccacacttttaatgtcactatctgctaccattacttccgtggtcacaacgagagcaaggcagactgtttggacatggaccccaaagcccctcagcatgttgtgaaccatctgccaccttatacaaatgtcagcctcaagatgatcctaaccaatccagagggaaggaaggagagtgaagagacaattattcaaactgatgaagatgtgcctggtcccgtaccagtaaaatctcttcaaggaacatcctttgaaaataagatcttcttgaactggaaagaacctttggatccaaatggaatcatcactcaatatgagatcagctatagcagtataagatcatttgatcctgcagttccagtggctggacctccccagactgtatcaaatttatggaacagtacacaccatgtctttatgcatctccaccctggaaccacgtaccagtttttcataagagccagcacggtcaaaggctttggtccagccacagccatcaatgtcaccaccaatatctcagctccaactttacctgactatgaaggagttgatgcctctctcaatgaaactgccaccacaataactgtattgttgagaccagcacaagccaaaggtgctcctatcagtgcttatcagattgttgtggaagaactgcacccacaccgaaccaagagagaagccggagccatggaatgctaccaggttcctgtcacataccaaaatgccatgagtgggggtgcaccgtattactttgctgcagaactccccccgggaaacctacctgagcctgccccgttcactgtgggtgacaatcggacctaccaaggcttttggaaccctcctttggctccgcgcaaaggatacaacatctatttccaggcgatgagcagtgtggagaaggaaactaaaacccagtgcgtacgcattgctacaaaagatttaaagtagaaccaaaattgtaaaagtgtcccacattgacctctgaagttctttagatatgtcatgctatgtttctgtaactgagaaa

SEQ ID NO: 16946 - DNA, 662 bp, Homo sapiens
  source 1..662: mol_type = unassigned DNA
agttcgtaaattgagaactgctgctttagttcatgttctaactcaagaattccttattttaaatctcttcctgagagataaatctcctcatttcctccgtctaggggatgtagaggtgaatgcagggcaaaacgctacatttcagtgcattgccacagggagagatgctgtgcataacaagttatggctccagagacgaaatggagaagatataccagtagcccagactaagaacatcaatcatagaaggtttgccgcttccttcagattgcaagaagtgacaaaaactgaccaggatttgtatcgctgtgtaactcagtcagaacgaggttccggtgtgtccaattttgctcaacttattgtgagagaaccgccaagacccattgctcctcctcagcttcttggtgttgggcctacatatttgctgatccaactaaatgccaactcgatcattggcgatggtcctatcatcctgaaagaagtagagtaccgaatgacatcaggatcctggacagaaacccatgcagtcaatgctccaacttacaaattatggcatttagatccagataccgaatatgagatccgagttctacttacaagacctggtgaaggtggaacggggctcccaggacctccactaatcaccagaacaaaatgtgcag

SEQ ID NO: 16947 - DNA, 612 bp, Homo sapiens
  source 1..612: mol_type = unassigned DNA
tgaatcctggcactttgaacatattagttagggtgaataaaggacctcttgccaatccaatttggaatgtgactggattcacgggtagagattggcttcgggctgagctagcagtgagcaccttttggcccaatgaatatcagagacgaaatggagaagatataccagtagcccagactaagaacatcaatcatagaaggtttgccgcttccttcagattgcaagaagtgacaaaaactgaccaggatttgtatcgctgtgtaactcagtcagaacgaggttccggtgtgtccaattttgctcaacttattgtgagagaaccgccaagacccattgctcctcctcagcttcttggtgttgggcctacatatttgctgatccaactaaatgccaactcgatcattggcgatggtcctatcatcctgaaagaagtagagtaccgaatgacatcaggatcctggacagaaacccatgcagtcaatgctccaacttacaaattatggcatttagatccagataccgaatatgagatccgagttctacttacaagacctggtgaaggtggaacggggctcccaggacctccactaatcaccagaacaaaatgtgcag

SEQ ID NO: 16948 - DNA, 524 bp, Homo sapiens
  source 1..524: mol_type = unassigned DNA
tgggataggaaccgaaggagaaggatcttactgaagtggaaggttcaccatgaggagtggaggactatacaagcctggcagtcatggaagttcaaggattgctttttatcgatatctagaaataatttacttctctttctgtgcaagaacaatatgctctcctgtttgcagagctgccccttcagtgtgtttctagagacgaaatggagaagatataccagtagcccagactaagaacatcaatcatagaaggtttgccgcttccttcagattgcaagaagtgacaaaaactgaccaggatttgtatcgctgtgtaactcagtcagaacgaggttccggtgtgtccaattttgctcaacttattgtgagagaaccgccaagacccattgctcctcctcagcttcttggtgttgggcctacatatttgctgatccaactaaatgccaactcgatcattggcgatggtcctatcatcctgaaagaagtagagtaccgaatgacatcaggatcctggacagaaaccc

SEQ ID NO: 16949 - DNA, 746 bp, Homo sapiens
  source 1..746: mol_type = unassigned DNA
gttttcagtgtctgtgcttgtggtcggtaacttttgctgctgttgttctgctgctgtctgccattccattcgccatctatcacgcacacagaaccctggccaggatcatgaagggcgattgaaaaggtggctgtacttttgatgatggtccaggggcctgtgattaccaccaggatctgtatgatgactttgaatgggtgcatgttagtgctcaagagcctcattatctaccacccgagatgccccaaggttcctatatgatagtggactcttcagatcacgaccctggagaaaaagccagacttcagctgcctacaatgaaggagaacgacactcactgcattgatttcagttacctattatatagccagaaaggactgaatcctggcactttgaacatattagttagggtgaataaaggacctcttgccaatccaatttggaatgtgactggattcacgggtagagattggcttcgggctgagctagcagtgagcaccttttggcccaatgaatatcaggtaatatttgaagctgaagtctcaggagggagaagtggttatattgccattgatgacatccaagtactgagttatccttgtgataaatctcctcatttcctccgtctaggggatgtagaggtgaatgcagggcaaaacgctacatttcagtgcattgccacagggagagatgctgtgcataacaagttatggctccagagacgaaatggagaagatataccagta

SEQ ID NO: 16950 - DNA, 558 bp, Homo sapiens
  source 1..558: mol_type = unassigned DNA
ggcactttgaacatattagttagggtgaataaaggacctcttgccaatccaatttggaatgtgactggattcacgggtagagattggcttcgggctgagctagcagtgagcaccttttggcccaatgaatatcaggtaatatttgaagctgaagtctcaggagggagaagtggttatattgccattgatgacatccaagtactgagttatccttgtgataaatctcctcatttcctccgtctaggggatgtagaggtgaatgcagggcaaaacgctacatttcagtgcattgccacagggagagatgctgtgcataacaagttatggctccagattttcagactgtgattgacagaaggtaactgcaactgcccaaagtgcgaccttggataaggaaggatgtctgtattcctgaggaacgttcaatgatacggaatttgtgattcataacttgaagctatgataaagctctacttatgggaaataagatcaaaagtgaaattataacatataatttatactgaaatgaaataataaaaagcatttggttatattctt

SEQ ID NO: 16951 - DNA, 1722 bp, Homo sapiens
  source 1..1722: mol_type = unassigned DNA
agcctccgccgagcatggagagctgccgccgcggccggccggcgacgctggcgacgctttcgcccctgaggtagtttggcgaccgcgaagaaggaaaaagggcgggcgggcggctgtcctctcaccgtcctcaccccgcgaggcccggcccgctcctccgtcgtggatttcgcggcgatccccccggcagctctttgcaaagctgcttgaaacttctcccaaactcggcatggatacgactgcggcggcggcgctgcctgcttttgtggcgctcttgctcctctctccttggcctctcctgggatcggcccaaggccagttctccgcaggtggctgtacttttgatgatggtccaggggcctgtgattaccaccaggatctgtatgatgactttgaatgggtgcatgttagtgctcaagagcctcattatctaccacccgagatgccccaaggttcctatatgatagtggactcttcagatcacgaccctggagaaaaagccagacttcagctgcctacaatgaaggagaacgacactcactgcattgatttcagttacctattatatagccagaaaggactgaatcctggcactttgaacatattagttagggtgaataaaggacctcttgccaatccaatttggaatgtgactggattcacgggtagagattggcttcgggctgagctagcagtgagcaccttttggcccaatgaatatcaggtaatcatctgtacttttctggtgtatgttttgatgtcatcagttctcactatatgtgtaatacatagatgtaaatatgcatctcatggtaatgagagattgccctcttgcctcccccacccccattattggggaagtgtcatacatagatatacatatgcatcccatggtaatgagagattgcccctctttcttccccaccctgttgatgaggaagtgtttggagacattggcacaaaaccttcaaactagagaaagtatttctatgtgttaaaataagtttaggtccaaaatttgttggtggtttgacaaagagctacttattgacagattctttcctacagctttgttcaggaagaaatagcctttttgagtttattgtaatcttcagactggactgatttactgactttttgaaagtaacatttgggaaataaatgtgatgtagagtttcatgaactatgttaagggggaggcattttcattaattattttaattttgattaattaattgaataaattaaatgacatataaaaataagccaaaaaggataagttattcacaaagctttggatgtttgtttcagaaatgattcattgaattatgattaaatcagacaatcaatagtgtcagtacccactttatgattctgtgactgagtttatatgctcttaacaaaaaaaaggttcatttactagtttggagagtttgttcagtaaccctcactatgaggttccgtccctggatgctgttatttctttaaaaggtcaattttgtgttagaccttgagatttaaacttttaaaggacttgtttatttgtagcttattataaagcctaaagagaatacatttatgtaaaagtatattttatgatggtcagcaagcaatatataaactaatagttttatttctgccttttaaaaatgaattatgtctttaagttaggtttgtctttattcttgaaggggaaaaaagaaatgctttgctttaattgct

SEQ ID NO: 16952 - DNA, 1456 bp, Homo sapiens
  source 1..1456: mol_type = unassigned DNA
ctgccgccgcggccggccggcgacgctggcgacgctttcgcccctgaggtagtttggcgaccgcgaagaaggaaaaagggcgggcgggcggctgtcctctcaccgtcctcaccccgcgaggcccggcccgctcctccgtcgtggatttcgcggcgatccccccggcagctctttgcaaagctgcttgaaacttctcccaaactcggcatggatacgactgcggcggcggcgctgcctgcttttgtggcgctcttgctcctctctccttggcctctcctgggatcggcccaaggccagttctccgcagtgtctgtgcttgtggtcggtaacttttgctgctgttgttctgctgctgtctgccattccattcgccatctatcacgcacacagaaccctggccaggatcatgaagggcgattgaaaaggtggctgtacttttgatgatggtccaggggcctgtgattaccaccaggatctgtatgatgactttgaatgggtgcatgttagtgctcaagagcctcattatctaccacccgagatgccccaaggttcctatatgatagtggactcttcagatcacgaccctggagaaaaagccagacttcagctgcctacaatgaaggagaacgacactcactgcattgatttcagttacctattatatagccagaaaggactgaatcctggcactttgaacatattagttagggtgaataaaggacctcttgccaatccaatttggaatgtgactggattcacgggtagagattggcttcgggctgagctagcagtgagcaccttttggcccaatgaatatcaggtaatcatctgtacttttctggtgtatgttttgatgtcatcagttctcactatatgtgtaatacatagatgtaaatatgcatctcatggtaatgagagattgccctcttgcctcccccacccccattattggggaagtgtcatacatagatatacatatgcatcccatggtaatgagagattgcccctctttcttccccaccctgttgatgaggaagtgtttggagacattggcacaaaaccttcaaactagagaaagtatttctatgtgttaaaataagtttaggtccaaaatttgttggtggtttgacaaagagctacttattgacagattctttcctacagctttgttcaggaagaaatagcctttttgagtttattgtaatcttcagactggactgatttactgactttttgaaagtaacatttgggaaataaatgtgatgtagagtttcatgaactatgttaagggggaggcattttcattaattattttaattttgattaattaattgaataaattaaatgacatataaaaataagccaaaaaggataagttattcacaaagctttggatgtttgtttcagaaatgattcattgaattatgattaaatcagacaatcaatagtgtcagta

SEQ ID NO: 16953 - DNA, 563 bp, Homo sapiens
  source 1..563: mol_type = unassigned DNA
actaacaggagcagcctccgccgagcatggagagctgccgccgcggccggccggcgacgctggcgacgctttcgcccctgaggtagtttggcgaccgcgaagaaggaaaaagggcgggcgggcggctgtcctctcaccgtcctcaccccgcgaggcccggcccgctcctccgtcgtggatttcgcggcgatccccccggcagctctttgcaaagctgcttgaaacttctcccaaactcggcatggatacgactgcggcggcggcgctgcctgcttttgtggcgctcttgctcctctctccttggcctctcctgggatcggcccaaggccagttctccgcagaaaaggcctgcagttactgaaatgacaagtgaaaaggaggtggctgtacttttgatgatggtccaggggcctgtgattaccaccaggatctgtatgatgactttgaatgggtgcatgttagtgctcaagagcctcattatctaccacccgagatgccccaaggttcctatatgatagtggactcttcagatcacgaccctggagaaaaagccagacttcagc

SEQ ID NO: 16954 - DNA, 526 bp, Homo sapiens
  source 1..526: mol_type = unassigned DNA
gagagctgccgccgcggccggccggcgacgctggcgacgctttcgcccctgaggtagtttggcgaccgcgaagaaggaaaaagggcgggcgggcggctgtcctctcaccgtcctcaccccgcgaggcccggcccgctcctccgtcgtggatttcgcggcgatccccccggcagctctttgcaaagctgcttgaaacttctcccaaactcggcatggatacgactgcggcggcggcgctgcctgcttttgtggcgctcttgctcctctctccttggcctctcctgggatcggcccaaggccagttctccgcagcttcgcttggctggcgagcgcatctgctgctggggttcgcggtgcagatggagacgcagtggtggccagagggtgatggagaagacgggaaaagcgacagccacgctcctggctgaagccgcaggacgcaaataacttactttgtacctgacagtttctcacgttgttgtggaggccctgtttcctggaaataaactcaaattgttgttttctg

SEQ ID NO: 16955 - DNA, 6087 bp, Homo sapiens; identical to SEQ ID NO: 16933
  source 1..6087: mol_type = unassigned DNA

SEQ ID NO: 16956 - DNA, 5757 bp, Homo sapiens; identical to SEQ ID NO: 16934
  source 1..5757: mol_type = unassigned DNA

SEQ ID NO: 16957 - DNA, 5816 bp, Homo sapiens; identical to SEQ ID NO: 16935
  source 1..5816: mol_type = unassigned DNA

SEQ ID NO: 16958 - DNA, 5025 bp, Homo sapiens; identical to SEQ ID NO: 16936
  source 1..5025: mol_type = unassigned DNA

SEQ ID NO: 16959 - DNA, 4651 bp, Homo sapiens; identical to SEQ ID NO: 16937
  source 1..4651: mol_type = unassigned DNA

SEQ ID NO: 16960 - DNA, 4758 bp, Homo sapiens; identical to SEQ ID NO: 16938
  source 1..4758: mol_type = unassigned DNA

SEQ ID NO: 16961 - DNA, 941 bp, Homo sapiens
  source 1..941: mol_type = unassigned DNA
cagcagcaacagaagaaccagaagtgatcccagatcccgccaagcagacagacagagtggtgaaaatagcaggaattagtgctggaattttggtgttcatcctccttctcctagttgtcatattaattgtaaaaaagaggaggagctactattcttactcctactacctcaaacttgctaaaaaacgcaaagatgccatggggaatacccggcaggagatgactcacatggtgaatgcaatggatcgaagttatgctgatcagagcactctgcatgcagaagatcctctttccatcaccttcatggaccaacataactttagtccaagattgcccaatgatccacttgtaccgactgctgtgttagatgagaaccacagtgctacagcagagtccagtcgccttctagacgtacctcgctacctctgtgaggggacggaatccccttaccagacaggacagctgcatccagccatcagggtagctgatttactgcagcacattaatctcatgaagacatcagacagctatgggttcaaagaggaatatgagagcttttttgaaggacagtcagcatcttgggatgtagctaaaaaagatcaaaatagagcaaaaaaccgatatggaaacattatagcatatgatcactccagagtgattttgcaacccgtagaggatgatccttcctcagattatattaatgccaactatattgatggctaccagagaccaagtcattacattgcaacccaaggtcccgttcatgaaacagtgtatgatttctggaggatgatttggcaagaacaatctgcttgcattgtgatggttacaaatttagttgaggttggccgggttaaatgctataaatattggcctgatgatactgaagtttatggtgacttcaaagtaacgtgtgtagaaatggaaccacttgctgaatat

SEQ ID NO: 16962 - DNA, 782 bp, Homo sapiens; identical to SEQ ID NO: 16940
  source 1..782: mol_type = unassigned DNA

SEQ ID NO: 16963 - DNA, 2515 bp, Homo sapiens; identical to SEQ ID NO: 16941
  source 1..2515: mol_type = unassigned DNA

SEQ ID NO: 16964 - DNA, 3157 bp, Homo sapiens; identical to SEQ ID NO: 16942
  source 1..3157: mol_type = unassigned DNA

SEQ ID NO: 16965 - DNA, 311 bp, Homo sapiens; identical to SEQ ID NO: 16943
  source 1..311: mol_type = unassigned DNA

SEQ ID NO: 16966 - DNA, 555 bp, Homo sapiens; identical to SEQ ID NO: 16944
  source 1..555: mol_type = unassigned DNA

SEQ ID NO: 16967 - DNA, 2441 bp, Homo sapiens; identical to SEQ ID NO: 16945
  source 1..2441: mol_type = unassigned DNA

SEQ ID NO: 16968 - DNA, 662 bp, Homo sapiens; identical to SEQ ID NO: 16946
  source 1..662: mol_type = unassigned DNA

SEQ ID NO: 16969 - DNA, 612 bp, Homo sapiens; identical to SEQ ID NO: 16947
  source 1..612: mol_type = unassigned DNA

SEQ ID NO: 16970 - DNA, 524 bp, Homo sapiens; identical to SEQ ID NO: 16948
  source 1..524: mol_type = unassigned DNA

SEQ ID NO: 16971 - DNA, 746 bp, Homo sapiens; identical to SEQ ID NO: 16949
  source 1..746: mol_type = unassigned DNA

SEQ ID NO: 16972 - DNA, 558 bp, Homo sapiens; identical to SEQ ID NO: 16950
  source 1..558: mol_type = unassigned DNA

SEQ ID NO: 16973 - DNA, 1722 bp, Homo sapiens; identical to SEQ ID NO: 16951
  source 1..1722: mol_type = unassigned DNA

SEQ ID NO: 16974 - DNA, 1456 bp, Homo sapiens; identical to SEQ ID NO: 16952
  source 1..1456: mol_type = unassigned DNA

SEQ ID NO: 16975 - DNA, 563 bp, Homo sapiens; identical to SEQ ID NO: 16953
  source 1..563: mol_type = unassigned DNA

SEQ ID NO: 16976 - DNA, 526 bp, Homo sapiens; identical to SEQ ID NO: 16954
  source 1..526: mol_type = unassigned DNA

SEQ ID NO: 16977 - DNA, 5941 bp, Homo sapiens
  source 1..5941: mol_type = unassigned DNA
gcggcgtagagaagctcgcagccctccggagcctcagcgatctcctggctcgcttttcccgcagccgccgagcagcgcaggcccggcgactccgggtgcagctggccctgtgcggtgacatcgccgtccggcgccaggctcgaagccgcctggccgcgcccgcggggtcgcaggccgctggtcccgcccggccgcgctcacaaactactcgcggctcgtgacccgggacaaacttctggcggcggcgcagcctcttccacagtcaccctccccagagccagctaccaaaatagaagacgcggccggggcgaggaggtgggcggggggagcccggtggccgctcctccccgcgcggctgacgcccgcttcggcggcggtagtggctgtggccgcggggccgcccccagccgagctcccggaggcgctcgggcgcgggccggcggggcacgggcgctcacgccctctagcgggccgcggcggcgccgggcggccgtgacgtgagcgctcccttcagccggcctgcggggcaccgccagtcagtcggggagcaagagccccgcgcgcagccggcgcgggctcggtcatcggcgcgccgccgcccggggctgggcttggggctgcctgtggagaggcggcgggcggaacgcgcgcggccacggccacggccaccgccacggccacggccggcagctcgggtcccgggtcccgggcaggggaaggggagaggcggcgagctcagcaaccggaaccgagggaagattttggctccgcgggctcgccctccgctccctctgccagcggcgccagacgccgagtggggccagggacaggggaggaggacccaggaccctgtgcccgcgcccctggagccgctggagttcggacttctgcaactgttggcactttgggggcttggcttagcgctctgctgtttacccgtctctcctcgctgcctcggaaccaaagctcccggccccctccgccctcgcgcgcccacccaccgccgccggggagcggcccggcccgcactcagcaccatgaggggacttgggacttgcctggcgactttggccggacttttgctaactgcggcgggcgagacgttctcaggtggctgcctctttgatgagccgtatagcacatgtggatatagtcaatctgaaggtgatgacttcaattgggagcaagtgaacaccttgactaaaccgacttctgatccatggatgccatcaggttctttcatgctggtgaatgcctctgggagacctgaggggcagagagcccacctgctcttaccccaacttaaagaaaatgacacccactgcatcgattttcactattttgtgtccagcaagagtaattctcctccggggttactcaatgtctacgtgaaggtcaataacgggccactggggaatcctatctggaatatatctggagacccaacacgtacatggaacagggcagaactggccattagtactttctggcctaacttttatcaggtgatttttgaagtgataacttctggacatcaaggctatctcgctatcgatgaggtgaaggtgttaggacatccatgtaccaggactcctcacttcctgcggattcagaatgtggaagttaatgctggccagtttgctaccttccagtgcagtgccatcggcaggaccgtggcaggagacaggctctggttacagggcattgatgtgcgagatgctcctctgaaggaaatcaaggtgaccagctcccgacgcttcattgcttcatttaatgttgtgaataccaccaaacgagatgctggaaagtaccgctgcatgattcgcactgaaggaggtgttggaatatcaaactatgcagagttggtagttaaagaaccacccgttcctattgccccacctcagctcgcctctgtaggagccacctacctgtggatacagctcaacgccaactccatcaatggggatgggcccattgtggcccgagaggtggagtactgcacggccagtgggagctggaatgaccggcagccagtcgattccacgagctataaaattggacaccttgacccagatacagaatatgagattagtgtgctcctgaccaggccaggggagggtggcactggctctcctggtccagctctcaggacaagaacaaagtgtgctgatcccatgcgaggcccaagaaaactagaagtagtggaggtcaaatctcggcaaatcactatccgctgggagccatttggatataatgtaactcgttgccacagttataatctcactgtccactactgttaccaagttggaggacaagaacaagtgcgagaagaagtaagctgggatacagaaaactcacaccctcaacacacgatcactaacctgtcaccatacaccaatgtcagtgtgaaactgatcctcatgaacccagagggccggaaggaaagccaagaactcatagtgcagacagatgaagacctcccaggtgctgttcccactgaatccatacaaggaagtacctttgaagagaagatatttcttcagtggagagaaccaactcaaacatatggtgtaatcactttatatgagatcacctacaaagcagtcagttcctttgacccagaaatagatttatccaatcagagtggaagagtttcaaagctgggaaatgaaacccattttctgttttttggactgtatccggggaccacatactcctttaccatccgagctagcacagctaagggttttgggcctccagcaacaaaccagttcaccaccaaaatatcagcaccctctatgccagcttatgaacttgagacacctttgaatcaaactgacaataccgtgacagtcatgctgaaacctgcccacagcagaggagcacctgtcagtgtctatcaaatagttgttgaggaagaacgtcctcgaagaactaaaaagacgacagaaatcttaaagtgctacccagtgccaattcacttccagaatgcttctctgctgaactcacagtactactttgctgcagaatttcctgcagacagcctccaagctgcgcagccttttacaattggtgataataagacatataatggatactggaacactccccttctcccctataaaagctacagaatttatttccaagctgctagtagagccaatggggaaaccaaaatagactgtgtccaagtggccacaaaaggagctgccactccgaaaccagtcccagaacccgagaaacagacagaccatacagttaaaattgctggagtcatcgcgggcatcttgctgttcgtgattatatttcttggagttgtgttggtaatgaagaaaaggaaactggccaagaagcggaaagagaccatgagcagcacccgacaggagatgactgtgatggtgaactcaatggacaagagctatgctgagcagggcacaaactgcgacgaggctttctcattcatggacacgcacaatctgaatgggagatctgtgtcttcaccatcgtccttcacaatgaaaacaaatacactgagcacatcggtgcctaattcctattacccagacccatttgtgccaactgcaattttagtgccaataaatgatgaaacccacacaatggccagcgataccagcagcctggtgcagtcccatacttacaagaagcgagagccggccgacgtgccctatcagactgggcagctccaccccgccatccgggtggcagacctccttcagcacatcacacagatgaagtgtgcggagggctacggcttcaaggaggaatacgagagcttctttgaagggcagtctgcaccatgggactcggctaagaaagatgagaacagaatgaagaacagatacgggaatatcattgcatacgatcattcccgagtgaggctgcagacaatagaaggagacacaaactcagactatatcaatggcaattatatcgatggttatcatcgacccaatcattacattgctacccaagggccaatgcaggaaaccatctatgacttctggaggatggtgtggcacgaaaacactgcaagtatcatcatggtgaccaatcttgtggaagtgggaagggtcaaatgctgcaaatactggccagatgacacagagatatataaagacattaaagttaccctaatagaaacagaactactggcagaatatgtgataagaacatttgctgttgaaaagagaggtgtgcatgaaatccgagagatcagacagtttcacttcactggctggccggatcatggggtcccctaccatgccaccggcctgctgggattcgtgcggcaagtcaagtccaagagcccgcccagtgcaggcccactggtggtgcactgcagtgctggtgcagggaggactggctgtttcatcgtcattgatatcatgttggacatggccgaaagggaaggggtcgtagacatctacaactgcgtcagggagctgcggtcacggagggtgaacatggtgcaaacagaggagcagtatgtgtttatccacgatgcgatcctggaagcctgtctttgtggggacacctctgtgcctgcttcccaagttaggtctctgtattatgacatgaacaaactggatccacagacaaactcaagccagattaaagaggaattccggacgctaaacatggtgacaccaacgctgcgagtagaggactgcagcatcgcactgttgccccggaaccatgagaaaaaccggtgcatggacatcctgcccccagaccgctgcctgcccttcctcatcaccatcgatggggagagcagcaactacatcaatgctgccctcatggacagctataaacagccttcagcttttatagtcacccagcatcctttgccaaacacagtgaaagacttttggagactggtcctggattatcactgcacatccgtagttatgctaaatgatgtggatcctgcccagttgtgtccacagtactggccagaaaacggagtacacagacacggccccatccaggtggaatttgtctctgctgacctggaagaggacatcatcagcaggatattccgcatttacaatgccgccagaccccaagatggatatcggatggtgcagcaattccagttcctgggctggccgatgtacagggacacaccagtgtctaagcgctccttcttgaagctcattcgccaggtggacaagtggcaagaggagtacaatggcggggaaggccgcacggttgtgcactgcttgaacgggggaggccgcagtgggacgttctgcgccatcagcatcgtatgtgagatgctccggcaccagagaaccgtggatgtctttcacgctgtgaagacactgaggaacaacaagcccaacatggtcgacctcctggatcagtacaagttctgctacgaggtggccctggaatacttgaattctggctgatggtgtaaacagctctgcaaacaatccctttcataccacaaagccaagacgttccatggtatttgtgcaaaagagatgaagacttctcaatatgcttattttgctttgcataattggctctttttaagagcccaagaaagtgtttctaaaattgcttgcactgcccaatcccagtaatgctgctgcctgacagaaacacacacacagccacagttgccaaatcccgtactccttgccaccggcttcctagagcagcgtagacagctggtaaactgaagagcacaactatattcttatgaaggaatttgtacctttggggtattattttgtggcccgtgaccctcgttattgttacagctgagtgtatgtttttgttctgtggagaatgctatctggcattatggtaatatattattttaggtaatatttgtactttaacatgttgcataatatatgcttatgtagctttccaggactaacagataaatgtgtaatgaacaaagata

SEQ ID NO: 16978 - DNA, 6095 bp, Homo sapiens
  source 1..6095: mol_type = unassigned DNA
gcggcgtagagaagctcgcagccctccggagcctcagcgatctcctggctcgcttttcccgcagccgccgagcagcgcaggcccggcgactccgggtgcagctggccctgtgcggtgacatcgccgtccggcgccaggctcgaagccgcctggccgcgcccgcggggtcgcaggccgctggtcccgcccggccgcgctcacaaactactcgcggctcgtgacccgggacaaacttctggcggcggcgcagcctcttccacagtcaccctccccagagccagctaccaaaatagaagacgcggccggggcgaggaggtgggcggggggagcccggtggccgctcctccccgcgcggctgacgcccgcttcggcggcggtagtggctgtggccgcggggccgcccccagccgagctcccggaggcgctcgggcgcgggccggcggggcacgggcgctcacgccctctagcgggccgcggcggcgccgggcggccgtgacgtgagcgctcccttcagccggcctgcggggcaccgccagtcagtcggggagcaagagccccgcgcgcagccggcgcgggctcggtcatcggcgcgccgccgcccggggctgggcttggggctgcctgtggagaggcggcgggcggaacgcgcgcggccacggccacggccaccgccacggccacggccggcagctcgggtcccgggtcccgggcaggggaaggggagaggcggcgagctcagcaaccggaaccgagggaagattttggctccgcgggctcgccctccgctccctctgccagcggcgccagacgccgagtggggccagggacaggggaggaggacccaggaccctgtgcccgcgcccctggagccgctggagttcggacttctgcaactgttggcactttgggggcttggcttagcgctctgctgtttacccgtctctcctcgctgcctcggaaccaaagctcccggccccctccgccctcgcgcgcccacccaccgccgccggggagcggcccggcccgcactcagcaccatgaggggacttgggacttgcctggcgactttggccggacttttgctaactgcggcgggcgagacgttctcaggtggctgcctctttgatgagccgtatagcacatgtggatatagtcaatctgaaggtgatgacttcaattgggagcaagtgaacaccttgactaaaccgacttctgatccatggatgccatcaggttctttcatgctggtgaatgcctctgggagacctgaggggcagagagcccacctgctcttaccccaacttaaagaaaatgacacccactgcatcgattttcactattttgtgtccagcaagagtaattctcctccggggttactcaatgtctacgtgaaggtcaataacgggccactggggaatcctatctggaatatatctggagacccaacacgtacatggaacagggcagaactggccattagtactttctggcctaacttttatcaggtgatttttgaagtgataacttctggacatcaaggctatctcgctatcgatgaggtgaaggtgttaggacatccatgtaccaggactcctcacttcctgcggattcagaatgtggaagttaatgctggccagtttgctaccttccagtgcagtgccatcggcaggaccgtggcaggagacaggctctggttacagggcattgatgtgcgagatgctcctctgaaggaaatcaaggtgaccagctcccgacgcttcattgcttcatttaatgttgtgaataccaccaaacgagatgctggaaagtaccgctgcatgattcgcactgaaggaggtgttggaatatcaaactatgcagagttggtagttaaagaaccacccgttcctattgccccacctcagctcgcctctgtaggagccacctacctgtggatacagctcaacgccaactccatcaatggggatgggcccattgtggcccgagaggtggagtactgcacggccagtgggagctggaatgaccggcagccagtcgattccacgagctataaaattggacaccttgacccagatacagaatatgagattagtgtgctcctgaccaggccaggggagggtggcactggctctcctggtccagctctcaggacaagaacaaagtgtgctgatcccatgcgaggcccaagaaaactagaagtagtggaggtcaaatctcggcaaatcactatccgctgggagccatttggatataatgtaactcgttgccacagttataatctcactgtccactactgttaccaagttggaggacaagaacaagtgcgagaagaagtaagctgggatacagaaaactcacaccctcaacacacgatcactaacctgtcaccatacaccaatgtcagtgtgaaactgatcctcatgaacccagagggccggaaggaaagccaagaactcatagtgcagacagatgaagacctcccaggtgctgttcccactgaatccatacaaggaagtacctttgaagagaagatatttcttcagtggagagaaccaactcaaacatatggtgtaatcactttatatgagatcacctacaaagcagtcagttcctttgacccagaaatagatttatccaatcagagtggaagagtttcaaagctgggaaatgaaacccattttctgttttttggactgtatccggggaccacatactcctttaccatccgagctagcacagctaagggttttgggcctccagcaacaaaccagttcaccaccaaaatatcagcaccctctatgccagcttatgaacttgagacacctttgaatcaaactgacaataccgtgacagtcatgctgaaacctgcccacagcagaggagcacctgtcagtgtctatcaaatagttgttgaggaagaacgtcctcgaagaactaaaaagacgacagaaatcttaaagtgctacccagtgccaattcacttccagaatgcttctctgctgaactcacagtactactttgctgcagaatttcctgcagacagcctccaagctgcgcagccttttacaattggtgataataagacatataatggatactggaacactccccttctcccctataaaagctacagaatttatttccaagctgctagtagagccaatggggaaaccaaaatagactgtgtccaagtggccacaaaaggagctgccactccgaaaccagtcccagaacccgagaaacagacagaccatacagttaaaattgctggagtcatcgcgggcatcttgctgttcgtgattatatttcttggagttgtgttggtaatgaagaaaaggaaactggccaagaagcggaaagagaccatgagcagcacccgacaggagatgactgtgatggtgaactcaatggacaagagctatgctgagcagggcacaaactgcgacgaggctttctcattcatggacacgcacaatctgaatgggagatctgtgtcttcaccatcgtccttcacaatgaaaacaaatacactgagcacatcggtgcctaattcctattacccagatgaaacccacacaatggccagcgataccagcagcctggtgcagtcccatacttacaagaagcgagagccggccgacgtgccctatcagactgggcagctccaccccgccatccgggtggcagacctccttcagcacatcacacagatgaagtgtgcggagggctacggcttcaaggaggaatacgagagcttctttgaagggcagtctgcaccatgggactcggctaagaaagatgagaacagaatgaagaacagatacgggaatatcattgcatacgatcattcccgagtgaggctgcagacaatagaaggagacacaaactcagactatatcaatggcaattatatcgatggttatcatcgacccaatcattacattgctacccaagggccaatgcaggaaaccatctatgacttctggaggatggtgtggcacgaaaacactgcaagtatcatcatggtgaccaatcttgtggaagtgggaagggtcaaatgctgcaaatactggccagatgacacagagatatataaagacattaaagttaccctaatagaaacagaactactggcagaatatgtgataagaacatttgctgttgaaaagagaggtgtgcatgaaatccgagagatcagacagtttcacttcactggctggccggatcatggggtcccctaccatgccaccggcctgctgggattcgtgcggcaagtcaagtccaagagcccgcccagtgcaggcccactggtggtgcactgcagtgctggtgcagggaggactggctgtttcatcgtcattgatatcatgttggacatggccgaaagggaaggggtcgtagacatctacaactgcgtcagggagctgcggtcacggagggtgaacatggtgcaaacagaggagcagtatgtgtttatccacgatgcgatcctggaagcctgtctttgtggggacacctctgtgcctgcttcccaagttaggtctctgtattatgacatgaacaaactggatccacagacaaactcaagccagattaaagaggaattccggacgctaaacatggtgacaccaacgctgcgagtagaggactgcagcatcgcactgttgccccggaaccatgagaaaaaccggtgcatggacatcctgcccccagaccgctgcctgcccttcctcatcaccatcgatggggagagcagcaactacatcaatgctgccctcatggacagctataaacagccttcagcttttatagtcacccagcatcctttgccaaacacagtgaaagacttttggagactggtcctggattatcactgcacatccgtagttatgctaaatgatgtggatcctgcccagttgtgtccacagtactggccagaaaacggagtacacagacacggccccatccaggtggaatttgtctctgctgacctggaagaggacatcatcagcaggatattccgcatttacaatgccgccagaccccaagatggatatcggatggtgcagcaattccagttcctgggctggccgatgtacagggacacaccagtgtctaagcgctccttcttgaagctcattcgccaggtggacaagtggcaagaggagtacaatggcggggaaggccgcacggttgtgcactgcttgaacgggggaggccgcagtgggacgttctgcgccatcagcatcgtatgtgagatgctccggcaccagagaaccgtggatgtctttcacgctgtgaagacactgaggaacaacaagcccaacatggtcgacctcctggatcagtacaagttctgctacgaggtggccctggaatacttgaattctggctgatggtgtaaacagctctgcaaacaatccctttcataccacaaagccaagacgttccatggtatttgtgcaaaagagatgaagacttctcaatatgcttattttgctttgcataattggctctttttaagagcccaagaaagtgtttctaaaattgcttgcactgcccaatcccagtaatgctgctgcctgacagaaacacacacacagccacagttgccaaatcccgtactccttgccaccggcttcctagagcagcgtagacagctggtaaactgaagagcacaactatattcttatgaaggaatttgtacctttggggtattattttgtggcccgtgaccctcgttattgttacagctgagtgtatgtttttgttctgtggagaatgctatctggcattatggtaatatattattttaggtaatatttgtactttaacatgttgcataatatatgcttatgtagctttccaggactaacagataaatgtgtaatgaacaaagatatgttgtatgagtcgtcgtttctgtcagatttgtattgtttccaagggaaaagcttgggggaggactcagttcacaaaatgcaaaactcaacgatcagattcacggacccagagcttttccatgtgtttatattgtaaatatttttgatttcatcaaattatttattcattaaaagaaatttttgtgaagcaca

SEQ ID NO: 16979 - DNA, 5292 bp, Homo sapiens
  source 1..5292: mol_type = unassigned DNA
gtgctgtggcccaatcctgtgcgtgtctcctcttcaggctcctgccggagcatgcttctctaatcttaccatttatcactgacccttcggtgaaactctcttctgtttaaatttaccagggtacactttgtaatacttgggaccaagaatttgaagatagtaatcagacaaatcaaacaactagtagtagtggagagacacgtagccctacaggaaggggtagaattatcattaaaaacacagacaaaccagagactgcctgaaaaaaaaaaaaagatgaactggaaagattcaaagtaggctctattggaggtggctgcctctttgatgagccgtatagcacatgtggatatagtcaatctgaaggtgatgacttcaattgggagcaagtgaacaccttgactaaaccgacttctgatccatggatgccatcaggttctttcatgctggtgaatgcctctgggagacctgaggggcagagagcccacctgctcttaccccaacttaaagaaaatgacacccactgcatcgattttcactattttgtgtccagcaagagtaattctcctccggggttactcaatgtctacgtgaaggtcaataacgggccactggggaatcctatctggaatatatctggagacccaacacgtacatggaacagggcagaactggccattagtactttctggcctaacttttatcaggtgatttttgaagtgataacttctggacatcaaggctatctcgctatcgatgaggtgaaggtgttaggacatccatgtaccaggactcctcacttcctgcggattcagaatgtggaagttaatgctggccagtttgctaccttccagtgcagtgccatcggcaggaccgtggcaggagacaggctctggttacagggcattgatgtgcgagatgctcctctgaaggaaatcaaggtgaccagctcccgacgcttcattgcttcatttaatgttgtgaataccaccaaacgagatgctggaaagtaccgctgcatgattcgcactgaaggaggtgttggaatatcaaactatgcagagttggtagttaaagaaccacccgttcctattgccccacctcagctcgcctctgtaggagccacctacctgtggatacagctcaacgccaactccatcaatggggatgggcccattgtggcccgagaggtggagtactgcacggccagtgggagctggaatgaccggcagccagtcgattccacgagctataaaattggacaccttgacccagatacagaatatgagattagtgtgctcctgaccaggccaggggagggtggcactggctctcctggtccagctctcaggacaagaacaaagtgtgctgatcccatgcgaggcccaagaaaactagaagtagtggaggtcaaatctcggcaaatcactatccgctgggagccatttggatataatgtaactcgttgccacagttataatctcactgtccactactgttaccaagttggaggacaagaacaagtgcgagaagaagtaagctgggatacagaaaactcacaccctcaacacacgatcactaacctgtcaccatacaccaatgtcagtgtgaaactgatcctcatgaacccagagggccggaaggaaagccaagaactcatagtgcagacagatgaagacctcccaggtgctgttcccactgaatccatacaaggaagtacctttgaagagaagatatttcttcagtggagagaaccaactcaaacatatggtgtaatcactttatatgagatcacctacaaagcagtcagttcctttgacccagaaatagatttatccaatcagagtggaagagtttcaaagctgggaaatgaaacccattttctgttttttggactgtatccggggaccacatactcctttaccatccgagctagcacagctaagggttttgggcctccagcaacaaaccagttcaccaccaaaatatcagcaccctctatgccagcttatgaacttgagacacctttgaatcaaactgacaataccgtgacagtcatgctgaaacctgcccacagcagaggagcacctgtcagtgtctatcaaatagttgttgaggaagaacgtcctcgaagaactaaaaagacgacagaaatcttaaagtgctacccagtgccaattcacttccagaatgcttctctgctgaactcacagtactactttgctgcagaatttcctgcagacagcctccaagctgcgcagccttttacaattggtgataataagacatataatggatactggaacactccccttctcccctataaaagctacagaatttatttccaagctgctagtagagccaatggggaaaccaaaatagactgtgtccaagtggccacaaaaggagctgccactccgaaaccagtcccagaacccgagaaacagacagaccatacagttaaaattgctggagtcatcgcgggcatcttgctgttcgtgattatatttcttggagttgtgttggtaatgaagaaaaggaaactggccaagaagcggaaagagaccatgagcagcacccgacaggagatgactgtgatggtgaactcaatggacaagagctatgctgagcagggcacaaactgcgacgaggctttctcattcatggacacgcacaatctgaatgggagatctgtgtcttcaccatcgtccttcacaatgaaaacaaatacactgagcacatcggtgcctaattcctattacccagatgaaacccacacaatggccagcgataccagcagcctggtgcagtcccatacttacaagaagcgagagccggccgacgtgccctatcagactgggcagctccaccccgccatccgggtggcagacctccttcagcacatcacacagatgaagtgtgcggagggctacggcttcaaggaggaatacgagagcttctttgaagggcagtctgcaccatgggactcggctaagaaagatgagaacagaatgaagaacagatacgggaatatcattgcatacgatcattcccgagtgaggctgcagacaatagaaggagacacaaactcagactatatcaatggcaattatatcgatggttatcatcgacccaatcattacattgctacccaagggccaatgcaggaaaccatctatgacttctggaggatggtgtggcacgaaaacactgcaagtatcatcatggtgaccaatcttgtggaagtgggaagggtcaaatgctgcaaatactggccagatgacacagagatatataaagacattaaagttaccctaatagaaacagaactactggcagaatatgtgataagaacatttgctgttgaaaagagaggtgtgcatgaaatccgagagatcagacagtttcacttcactggctggccggatcatggggtcccctaccatgccaccggcctgctgggattcgtgcggcaagtcaagtccaagagcccgcccagtgcaggcccactggtggtgcactgcagtgctggtgcagggaggactggctgtttcatcgtcattgatatcatgttggacatggccgaaagggaaggggtcgtagacatctacaactgcgtcagggagctgcggtcacggagggtgaacatggtgcaaacagaggagcagtatgtgtttatccacgatgcgatcctggaagcctgtctttgtggggacacctctgtgcctgcttcccaagttaggtctctgtattatgacatgaacaaactggatccacagacaaactcaagccagattaaagaggaattccggacgctaaacatggtgacaccaacgctgcgagtagaggactgcagcatcgcactgttgccccggaaccatgagaaaaaccggtgcatggacatcctgcccccagaccgctgcctgcccttcctcatcaccatcgatggggagagcagcaactacatcaatgctgccctcatggacagctataaacagccttcagcttttatagtcacccagcatcctttgccaaacacagtgaaagacttttggagactggtcctggattatcactgcacatccgtagttatgctaaatgatgtggatcctgcccagttgtgtccacagtactggccagaaaacggagtacacagacacggccccatccaggtggaatttgtctctgctgacctggaagaggacatcatcagcaggatattccgcatttacaatgccgccagaccccaagatggatatcggatggtgcagcaattccagttcctgggctggccgatgtacagggacacaccagtgtctaagcgctccttcttgaagctcattcgccaggtggacaagtggcaagaggagtacaatggcggggaaggccgcacggttgtgcactgcttgaacgggggaggccgcagtgggacgttctgcgccatcagcatcgtatgtgagatgctccggcaccagagaaccgtggatgtctttcacgctgtgaagacactgaggaacaacaagcccaacatggtcgacctcctggatcagtacaagttctgctacgaggtggccctggaatacttgaattctggctgatggtgtaaacagctctgcaaacaatccctttcataccacaaagccaagacgttccatggtatttgtgcaaaagagatgaagacttctcaatatgcttattttgctttgcataattggctctttttaagagcccaagaaagtgtttctaaaattgcttgcactgcccaatcccagtaatgctgctgcctgacagaaacacacacacagccacagttgccaaatcccgtactccttgccaccggcttcctagagcagcgtagacagctggtaaactgaagagcacaactatattcttatgaaggaatttgtacctttggggtattattttgtggcccgtgaccctcgttattgttacagctgagtgtatgtttttgttctgtggagaatgctatctggcattatggtaatatattattttaggtaatatttgtactttaacatgttgcataatatatgcttatgtagctttccaggactaacagataaatgtgtaatgaacaaagatatgttgtatgagtcgtcgtttctgtcagatttgtattgtttccaagggaaaagcttgggggaggactcagttcacaaaatgcaaaactcaacgatcagattcacggacccagagcttttccatgtgtttatattgtaaatatttttgatttcatcaaattatttattcattaaaagaaatttttgtgaa

SEQ ID NO: 16980 - DNA, 604 bp, Homo sapiens
  source 1..604: mol_type = unassigned DNA
tttctcactgcccaagctgaagctgcctgggaggaagggctgagcatgcctagcccagccccttctttggggagctgactgcctatgggaaccctctccctccatcctggcattgatgtgcgagatgctcctctgaaggaaatcaaggtgaccagctcccgacgcttcattgcttcatttaatgttgtgaataccaccaaacgagatgctggaaagtaccgctgcatgattcgcactgaaggaggtgttggaatatcaaactatgcagagttggtagttaaagaaccacccgttcctattgccccacctcagctcgcctctgtaggagccacctacctgtggatacagctcaacgccaactccatcaatggggatgggcccattgtggcccgagaggtggagtactgcacggccagtgggagctggaatgaccggcagccagtcgattccacgagctataaaattggacaccttgacccagatacagaatatgagattagtgtgctcctgaccaggccaggggagggtggcactggctctcctggtccagctctcaggacaagaacaaagtgtgctgatcccatgcgaggcccaagaaaactag

SEQ ID NO: 16981 - DNA, 578 bp, Homo sapiens
  source 1..578: mol_type = unassigned DNA
aagaactttgtagctcaaaggtctctgcactacatccaccaagcattcatggaaaacctgggacgtaaatagggaactgtgcttgggaagtacagagataaaacaattctggccccacctcgcaaggagcttacagccttaaaaagaatgatcatagaaactgttaggtacaaatggaaacttcttgctaaatacaagaactactaaaatgttacatgacccaagagaatgggccaatgctgaagcccatgtcagctaaggctgaggtgaggaagtggtctttttgccaagccttgaaggacagatcccatgcgaggcccaagaaaactagaagtagtggaggtcaaatctcggcaaatcactatccgctgggagccatttggatataatgtaactcgttgccacagttataatctcactgtccactactgttaccaagttggaggacaagaacaagtgcgagaagaagtaagctgggatacagaaaactcacaccctcaacacacgatcactaacctgtcaccatacaccaatgtcagtgtgaaactgatcctcatgaacccagagggccggaagga

SEQ ID NO: 16982 - DNA, 1106 bp, Homo sapiens
  source 1..1106: mol_type = unassigned DNA
acatccaccaagcattcatggaaaacctgggacgtaaatagggaactgtgcttgggaagtacagagataaaacaattctggccccacctcgcaaggagcttacagccttaaaaagaatgatcatagaaactgttaggtacaaatggaaacttcttgctaaatacaagaactactaaaatgttacatgacccaagagaatgggccaatgctgaagcccatgtcagctaaggctgagatcccatgcgaggcccaagaaaactagaagtagtggaggtcaaatctcggcaaatcactatccgctgggagccatttggatataatgtaactcgttgccacagttataatctcactgtccactactgttaccaagttggaggacaagaacaagtgcgagaagaagtaagctgggatacagaaaactcacaccctcaacacacgatcactaacctgtcaccatacaccaatgtcagtgtgaaactgatcctcatgaacccagagggccggaaggaaagccaagaactcatagtgcagacagatgaagacctcccaggtgctgttcccactgaatccatacaaggaagtacctttgaagagaagatatttcttcagtggagagaaccaactcaaacatatggtgtaatcactttatatgagatcacctacaaagcagtcagttcctttgacccagaaatagatttatccaatcagagtggaagagtttcaaagctgggaaatgaaacccattttctgttttttggactgtatccggggaccacatactcctttaccatccgagctagcacagctaagggttttgggcctccagcaacaaaccagttcaccaccaaaatatcagcaccctctatgccagcttatgaacttgagacacctttgaatcaaactgacaataccgtgacagtcatgctgaaacctgcccacagcagaggagcacctgtcagtgtctatcaaatagttgttgaggaagaacgtcctcgaagaactaaaaagacgacagaaatcttaaagtgctacccagtgccaattcacttccagaatgcttctctgctgaactcacagtactactttgctgcagaatttcctgcaga

SEQ ID NO: 16983 - DNA, 486 bp, Homo sapiens
  source 1..486: mol_type = unassigned DNA
acagaaaagcacaacagagatgtgagtcacaacacagaaacttggaaaggcttttcacagaaaatagatcccatgcgaggcccaagaaaactagaagtagtggaggtcaaatctcggcaaatcactatccgctgggagccatttggatataatgtaactcgttgccacagttataatctcactgtccactactgttaccaagttggaggacaagaacaagtgcgagaagaagtaagctgggatacagaaaactcacaccctcaacacacgatcactaacctgtcaccatacaccaatgtcagtgtgaaactgatcctcatgaacccagagggccggaaggaaagccaagaactcatagtgcagacagatgaagacctcccaggtgctgttcccactgaatccatacaaggaagtacctttgaagagaagatatttcttcagtggagagaaccaactcaaacatatggtgtaatcactttatatgag

SEQ ID NO: 16984 - DNA, 792 bp, Homo sapiens
  source 1..792: mol_type = unassigned DNA
cagaaatagatttatccaatcagagtggaagagtttcaaagctgggaaatgaaacccattttctgttttttggactgtatccggggaccacatactcctttaccatccgagctagcacagctaagggttttgggcctccagcaacaaaccagttcaccaccaaaatatcagcaccctctatgccagcttatgaacttgagacacctttgaatcaaactgacaataccgtgacagtcatgctgaaacctgcccacagcagaggagcacctgtcagtgtctatcaaatagttgttgaggaagaacgtcctcgaagaactaaaaagacgacagaaatcttaaagtgctacccagtgccaattcacttccagaatgcttctctgctgaactcacagtactactttgctgcagaatttcctgcagacagcctccaagctgcgcagccttttacaattggtgataataagacatataatggatactggaacactccccttctcccctataaaagctacagaatttatttccaagctgctagtagagccaatggggaaaccaaaatagactgtgtccaagtggccacaaaagctgcgataatcgtgactcagcttacaacaccttacattcgcatcgcccccgctgcaggcgacggccaactaacaggagctgccactccgaaaccagtcccagaacccgagaaacagacagaccatacagttaaaattgctggagtcatcgcgggcatcttgctgttcgtgattatatttcttggagttgtgttggtaatgaagaaaa

SEQ ID NO: 16985 - DNA, 701 bp, Homo sapiens
  source 1..701: mol_type = unassigned DNA
cacttccagaatgcttctctgctgaactcacagtactactttgctgcagaatttcctgcagacagcctccaagctgcgcagccttttacaattggtgataataagacatataatggatactggaacactccccttctcccctataaaagctacagaatttatttccaagctgctagtagagccaatggggaaaccaaaatagactgtgtccaagtggccacaaaaggagctgccactccgaaaccagtcccagaacccgagaaacagacagaccatacagttaaaattgctggagtcatcgcgggcatcttgctgttcgtgattatatttcttggagttgtgttggtaatgaagaaaaggaaactggccaagaagcggaaagagaccatgagcagcacccgacaggagatgactgtgatggtgaactcaatggacaagagctatgctgagcagggcacaaactgcgacgaggctttctcattcatggacacgcacaatctgaatgggagatctgtgtcttcaccatcgtccttcacaatgaaaacaaatacactgagcacatcggtgcctaattcctattacccagacccatttgtgccaactgcaattttagagcttctttgaagggcagtctgcaccatgggactcggctaagaaagatgagaacagaatgaagaacagatacgggaatatcattgcat

SEQ ID NO: 16986 - DNA, 4640 bp, Homo sapiens
  source 1..4640: mol_type = unassigned DNA
accagaattaacaatgaatctttcagcaccacactcaatttcaattggaaacactgctcagtcttcacctttatttaggatgaatgtttttggttttgttttcctttttttcttcttcagttgatctatccaagatctcagccaaaccttgcaactgtgtcatagttagaaatccaactgcctgactagagcttgtttaagggaaaagaattcagaatattcagcaccttgctatgttttttttttctttttttccttttctttttgttgttgttagaacaaagttgagacaatttgatatactgatggggattcttcttgctagcctagcttcagtctggcttttttttccctcatgcatgctgacctggaaatcctcctttgccttagctgcgataatcgtgactcagcttacaacaccttacattcgcatcgcccccgctgcaggcgacggccaactaacaggagctgccactccgaaaccagtcccagaacccgagaaacagacagaccatacagttaaaattgctggagtcatcgcgggcatcttgctgttcgtgattatatttcttggagttgtgttggtaatgaagaaaaggaaactggccaagaagcggaaagagaccatgagcagcacccgacaggagatgactgtgatggtgaactcaatggacaagagctatgctgagcagggcacaaactgcgacgaggctttctcattcatggacacgcacaatctgaatgggagatctgtgtcttcaccatcgtccttcacaatgaaaacaaatacactgagcacatcggtgcctaattcctattacccagagcttctttgaagggcagtctgcaccatgggactcggctaagaaagatgagaacagaatgaagaacagatacgggaatatcattgcatacgatcattcccgagtgaggctgcagacaatagaaggagacacaaactcagactatatcaatggcaattatatcgatggttatcatcgacccaatcattacattgctacccaagggccaatgcaggaaaccatctatgacttctggaggatggtgtggcacgaaaacactgcaagtatcatcatggtgaccaatcttgtggaagtgggaagggtcaaatgctgcaaatactggccagatgacacagagatatataaagacattaaagttaccctaatagaaacagaactactggcagaatatgtgataagaacatttgctgttgaaaagagaggtgtgcatgaaatccgagagatcagacagtttcacttcactggctggccggatcatggggtcccctaccatgccaccggcctgctgggattcgtgcggcaagtcaagtccaagagcccgcccagtgcaggcccactggtggtgcactgcagtgctggtgcagggaggactggctgtttcatcgtcattgatatcatgttggacatggccgaaagggaaggggtcgtagacatctacaactgcgtcagggagctgcggtcacggagggtgaacatggtgcaaacagaggtactcccgctcatcacctagcctggggccttggtccctgggctccctcctgcatctccccatttcagggccaagggcacaaggaatccaggcaattatctgttcaagtgatctacctggcattccctgttccttccctccctccctcccttccccctttttgtttttcctctcataaacaaaccaaacaaacccaggagttttccaggtaacagaatcaagagcccaaatttgcacacttttctgtattaagggacccaaaaaagtctctgttaagtgctcagactttcaataccatttccttttattatctcttttaaactagctggtaaccagagcaagaccgctcctgagaatagtggctgaagggttatctctgtgcactttgttcttctcccagggtcctgggaagaacagaagcctcctgaccctaaaaattctgcccagtgtctggcgtcctggggatttgcccattttgtgaagtactgtatactaactagtaactctgtaagtggaaattcaaggtatatcgggaatttccattttttcagaagcaatgttacatcctgctcttaggacattcgtatttttactcatatttgattgttttaagtaggcgtcacaccgaccacctggaaaatgattcatgaagtgaagtgaagaagaagtaagaatcccttacatttagatggtgcatttaagtttatgaaagcctctgggaaacctaatcccatttttttagctaacataaaaataacagaaactttaaatgctgctttcatgggttcttttccttagaaaggggatactgtgtttgaaagataataatcgtaataatttatcttttaatgtactttatagtcaatcaaatgttgccactcgcatttctcacttggatcttccattttcaggtgttgtttactggtagtgtgctgtttttgggaatcaatctgttggacaagaggttgttgaaaaaaaataattaaaggtcatatttatgtatagaaaaaaccgaattaactgtaataagaggctttttaaacttcccatataactaaagattaataataaatatgataagactctaccaatgaattttaagaaaagtcagtgccaaatcagaattagaggccccatatttacactgtgaactcattgaagatatatatgagaacagctctctgtacttctaagaggtttcataatcatattaacttttatgttctgaaataagaacttctaagtacttttatgttttgaattaagaacttccagacttcttgtcttcacagtaatgccaagtttttctggaccttctttgcactattattttgaccagcaaatcctaccatagacaaaattctgctcattcctcatgtgaaatactgagttccaagtgagtaggatcagaatgacagaggtcttcagccacagttttcatggtgctgcagtgcgtgtggtggtttgtattgggtccgattggttttaatcaatctgtgtaatatttggcattgcaccccagtctcctagcacttgagcccttggaccgtgtttctctctggaggaactgtctccactctcttgatgatgtggggctaaaattgataccgtctttcctccttctctggttctctaaagttagtaactcgttccatctccttctccaggagcagtatgtgtttatccacgatgcgatcctggaagcctgtctttgtggggacacctctgtgcctgcttcccaagttaggtctctgtattatgacatgaacaaactggatccacagacaaactcaagccagattaaagaggaattccggacgctaaacatggtgacaccaacgctgcgagtagaggactgcagcatcgcactgttgccccggaaccatgagaaaaaccggtgcatggacatcctgcccccagaccgctgcctgcccttcctcatcaccatcgatggggagagcagcaactacatcaatgctgccctcatggacagctataaacagccttcagcttttatagtcacccagcatcctttgccaaacacagtgaaagacttttggagactggtcctggattatcactgcacatccgtagttatgctaaatgatgtggatcctgcccagttgtgtccacagtactggccagaaaacggagtacacagacacggccccatccaggtggaatttgtctctgctgacctggaagaggacatcatcagcaggatattccgcatttacaatgccgccagaccccaagatggatatcggatggtgcagcaattccagttcctgggctggccgatgtacagggacacaccagtgtctaagcgctccttcttgaagctcattcgccaggtggacaagtggcaagaggagtacaatggcggggaaggccgcacggttgtgcactgcttgaacgggggaggccgcagtgggacgttctgcgccatcagcatcgtatgtgagatgctccggcaccagagaaccgtggatgtctttcacgctgtgaagacactgaggaacaacaagcccaacatggtcgacctcctggatcagtacaagttctgctacgaggtggccctggaatacttgaattctggctgatggtgtaaacagctctgcaaacaatccctttcataccacaaagccaagacgttccatggtatttgtgcaaaagagatgaagacttctcaatatgcttattttgctttgcataattggctctttttaagagcccaagaaagtgtttctaaaattgcttgcactgcccaatcccagtaatgctgctgcctgacagaaacacacacacagccacagttgccaaatcccgtactccttgccaccggcttcctagagcagcgtagacagctggtaaactgaagagcacaactatattcttatgaaggaatttgtacctttggggtattattttgtggcccgtgaccctcgttattgttacagctgagtgtatgtttttgttctgtggagaatgctatctggcattatggtaatatattattttaggtaatatttgtactttaacatgttgcataatatatgcttatgtagctttccaggactaacagataaatgtgtaatgaacaaaga

SEQ ID NO: 16987 - DNA, 464 bp, Homo sapiens
  source 1..464: mol_type = unassigned DNA
ggaaactggccaagaagcggaaagagaccatgagcagcacccgacaggagatgactgtgatggtgaactcaatggacaagagctatgctgagcagggcacaaactgcgacgaggctttctcattcatggacacgcacaatctgaatgggagatctgtgtcttcaccatcgtccttcacaatgaaaacaaatacactgagcacatcggtgcctaattcctattacccagacccatttgtgccaactgcaattttagccacgttgtagtgatccaggtgccatttcagcaacagcaacatagctacacacttgtgtaccacctttcataccatgcatccccaggtgctttgcgatgcagatagaagtgaggttcccaaaccaggccctgctcatcaagcacccttggactaaattttcttcagagctgaacttctccgtaaaaaataaataacatatgaataacta

SEQ ID NO: 16988 - DNA, 676 bp, Homo sapiens
  source 1..676: mol_type = unassigned DNA
aaaacaaatacactgagcacatcggtgcctaattcctattacccagatgaaacccacacaatggccagcgataccagcagcctggtgcagtcccatacttacaagaagcgagagccggccgacgtgccctatcagactgggcagctccaccccgccatccgggtggcagacctccttcagcacatcacacagatgaagtgtgcggagggctacggcttcaaggaggaatacgaggacccactacaaagcagtcaatgacattttcgatatgaaacaaagacataagcaacaaaaccaaaagtagcaagtaggtttatatcaaagtacaaaacttctgtacagcaaaggaaacaatcaacaaagagaaaaagcaacctacagaatgagagcatatatttgaagaccgtatatctgataagagggttaatattcaagatatataagaaattcatacaactcaatagcaaaaaaaaaaaaatccttaagaatgagcaaataacctgatacatttttccaaggaagatatacaaatggtcaataggtataataaaaggtgattaacatcactaatcatcaaggaaatgcaaatcaaaaccacaatgagatatcacctcacacctttcagaatgacaaatcaacctaagtgttggcaaggatgtggaggaaaaggaactct

SEQ ID NO: 16989 - DNA, 713 bp, Homo sapiens
  source 1..713: mol_type = unassigned DNA
aagacattaaagttaccctaatagaaacagaactactggcagaatatgtgataagaacatttgctgttgaaaagggaggggccggaggtgaagcaaactgcagtccatccagagaagtgtcacagagaggtgtgcatgaaatccgagagatcagacagtttcacttcactggctggccggatcatggggtcccctaccatgccaccggcctgctgggattcgtgcggcaagtcaagtccaagagcccgcccagtgcaggcccactggtggtgcactgcagtgctggtgcagggaggactggctgtttcatcgtcattgatatcatgttggacatggccgaaagggaaggggtcgtagacatctacaactgcgtcagggagctgcggtcacggagggtgaacatggtgcaaacagaggagcagtatgtgtttatccacgatgcgatcctggaagcctgtctttgtggggacacctctgtgcctgcttcccaagttaggtctctgtattatgacatgaacaaactggatccacagacaaactcaagccagattaaagaggaattccggacgctaaacatggtgacaccaacgctgcgagtagaggactgcagcatcgcactgttgccccggaaccatgagaaaaaccggtgcatggacatcctgcccccagaccgctgcctgcccttcctcatcaccatcgatggggagagcagc

SEQ ID NO: 16990 - DNA, 687 bp, Homo sapiens
  source 1..687: mol_type = unassigned DNA
agatccggatccctcctcccagctccaagcctgctgatgttcaaccaccctacaaggagccccccaagctttctcccagcctagaggctggacaccagcggggctctcagggttcatgatgtgtggaaaaggatcagtacaagttctgctacgaggtggccctggaatacttgaattctggctgatggtgtaaacagctctgcaaacaatccctttcataccacaaagccaagacgttccatggtatttgtgcaaaagagatgaagacttctcaatatgcttattttgctttgcataattggctctttttaagagcccaagaaagtgtttctaaaattgcttgcactgcccaatcccagtaatgctgctgcctgacagaaacacacacacagccacagttgccaaatcccgtactccttgccaccggcttcctagagcagcgtagacagctggtaaactgaagagcacaactatattcttatgaaggaatttgtacctttggggtattattttgtggcccgtgaccctcgttattgttacagctgagtgtatgtttttgttctgtggagaatgctatctggcattatggtaatatattattttaggtaatatttgtactttaacatgttgcataatatatgcttatgtagctttccaggactaacagataaatgtgtaatgaacaaa

SEQ ID NO: 16991 - DNA, 5030 bp, Homo sapiens
  source 1..5030: mol_type = unassigned DNA
acattttaggtggctgcctctttgatgagccgtatagcacatgtggatatagtcaatctgaaggtgatgacttcaattgggagcaagtgaacaccttgactaaaccgacttctgatccatggatgccatcaggttctttcatgctggtgaatgcctctgggagacctgaggggcagagagcccacctgctcttaccccaacttaaagaaaatgacacccactgcatcgattttcactattttgtgtccagcaagagtaattctcctccggggttactcaatgtctacgtgaaggtcaataacgggccactggggaatcctatctggaatatatctggagacccaacacgtacatggaacagggcagaactggccattagtactttctggcctaacttttatcaggtgatttttgaagtgataacttctggacatcaaggctatctcgctatcgatgaggtgaaggtgttaggacatccatgtaccaggactcctcacttcctgcggattcagaatgtggaagttaatgctggccagtttgctaccttccagtgcagtgccatcggcaggaccgtggcaggagacaggctctggttacagggcattgatgtgcgagatgctcctctgaaggaaatcaaggtgaccagctcccgacgcttcattgcttcatttaatgttgtgaataccaccaaacgagatgctggaaagtaccgctgcatgattcgcactgaaggaggtgttggaatatcaaactatgcagagttggtagttaaagaaccacccgttcctattgccccacctcagctcgcctctgtaggagccacctacctgtggatacagctcaacgccaactccatcaatggggatgggcccattgtggcccgagaggtggagtactgcacggccagtgggagctggaatgaccggcagccagtcgattccacgagctataaaattggacaccttgacccagatacagaatatgagattagtgtgctcctgaccaggccaggggagggtggcactggctctcctggtccagctctcaggacaagaacaaagtgtgctgatcccatgcgaggcccaagaaaactagaagtagtggaggtcaaatctcggcaaatcactatccgctgggagccatttggatataatgtaactcgttgccacagttataatctcactgtccactactgttaccaagttggaggacaagaacaagtgcgagaagaagtaagctgggatacagaaaactcacaccctcaacacacgatcactaacctgtcaccatacaccaatgtcagtgtgaaactgatcctcatgaacccagagggccggaaggaaagccaagaactcatagtgcagacagatgaagacctcccaggtgctgttcccactgaatccatacaaggaagtacctttgaagagaagatatttcttcagtggagagaaccaactcaaacatatggtgtaatcactttatatgagatcacctacaaagcagtcagttcctttgacccagaaatagatttatccaatcagagtggaagagtttcaaagctgggaaatgaaacccattttctgttttttggactgtatccggggaccacatactcctttaccatccgagctagcacagctaagggttttgggcctccagcaacaaaccagttcaccaccaaaatatcagcaccctctatgccagcttatgaacttgagacacctttgaatcaaactgacaataccgtgacagtcatgctgaaacctgcccacagcagaggagcacctgtcagtgtctatcaaatagttgttgaggaagaacgtcctcgaagaactaaaaagacgacagaaatcttaaagtgctacccagtgccaattcacttccagaatgcttctctgctgaactcacagtactactttgctgcagaatttcctgcagacagcctccaagctgcgcagccttttacaattggtgataataagacatataatggatactggaacactccccttctcccctataaaagctacagaatttatttccaagctgctagtagagccaatggggaaaccaaaatagactgtgtccaagtggccacaaaaggagctgccactccgaaaccagtcccagaacccgagaaacagacagaccatacagttaaaattgctggagtcatcgcgggcatcttgctgttcgtgattatatttcttggagttgtgttggtaatgaagaaaaggaaactggccaagaagcggaaagagaccatgagcagcacccgacaggagatgactgtgatggtgaactcaatggacaagagctatgctgagcagggcacaaactgcgacgaggctttctcattcatggacacgcacaatctgaatgggagatctgtgtcttcaccatcgtccttcacaatgaaaacaaatacactgagcacatcggtgcctaattcctattacccagacccatttgtgccaactgcaattttagtgccaataaatgatgaaacccacacaatggccagcgataccagcagcctggtgcagtcccatacttacaagaagcgagagccggccgacgtgccctatcagactgggcagctccaccccgccatccgggtggcagacctccttcagcacatcacacagatgaagtgtgcggagggctacggcttcaaggaggaatacgagagcttctttgaagggcagtctgcaccatgggactcggctaagaaagatgagaacagaatgaagaacagatacgggaatatcattgcatacgatcattcccgagtgaggctgcagacaatagaaggagacacaaactcagactatatcaatggcaattatatcgatggttatcatcgacccaatcattacattgctacccaagggccaatgcaggaaaccatctatgacttctggaggatggtgtggcacgaaaacactgcaagtatcatcatggtgaccaatcttgtggaagtgggaagggtcaaatgctgcaaatactggccagatgacacagagatatataaagacattaaagttaccctaatagaaacagaactactggcagaatatgtgataagaacatttgctgttgaaaagagaggtgtgcatgaaatccgagagatcagacagtttcacttcactggctggccggatcatggggtcccctaccatgccaccggcctgctgggattcgtgcggcaagtcaagtccaagagcccgcccagtgcaggcccactggtggtgcactgcagtgctggtgcagggaggactggctgtttcatcgtcattgatatcatgttggacatggccgaaagggaaggggtcgtagacatctacaactgcgtcagggagctgcggtcacggagggtgaacatggtgcaaacagaggagcagtatgtgtttatccacgatgcgatcctggaagcctgtctttgtggggacacctctgtgcctgcttcccaagttaggtctctgtattatgacatgaacaaactggatccacagacaaactcaagccagattaaagaggaattccggacgctaaacatggtgacaccaacgctgcgagtagaggactgcagcatcgcactgttgccccggaaccatgagaaaaaccggtgcatggacatcctgcccccagaccgctgcctgcccttcctcatcaccatcgatggggagagcagcaactacatcaatgctgccctcatggacagctataaacagccttcagcttttatagtcacccagcatcctttgccaaacacagtgaaagacttttggagactggtcctggattatcactgcacatccgtagttatgctaaatgatgtggatcctgcccagttgtgtccacagtactggccagaaaacggagtacacagacacggccccatccaggtggaatttgtctctgctgacctggaagaggacatcatcagcaggatattccgcatttacaatgccgccagaccccaagatggatatcggatggtgcagcaattccagttcctgggctggccgatgtacagggacacaccagtgtctaagcgctccttcttgaagctcattcgccaggtggacaagtggcaagaggagtacaatggcggggaaggccgcacggttgtgcactgcttgaacgggggaggccgcagtgggacgttctgcgccatcagcatcgtatgtgagatgctccggcaccagagaaccgtggatgtctttcacgctgtgaagacactgaggaacaacaagcccaacatggtcgacctcctggatcagtacaagttctgctacgaggtggccctggaatacttgaattctggctgatggtgtaaacagctctgcaaacaatccctttcataccacaaagccaagacgttccatggtatttgtgcaaaagagatgaagacttctcaatatgcttattttgctttgcataattggctctttttaagagcccaagaaagtgtttctaaaattgcttgcactgcccaatcccagtaatgctgctgcctgacagaaacacacacacagccacagttgccaaatcccgtactccttgccaccggcttcctagagcagcgtagacagctggtaaactgaagagcacaactatattcttatgaaggaatttgtacctttggggtattattttgtggcccgtgaccctcgttattgttacagctgagtgtatgtttttgttctgtggagaatgctatctggcattatggtaatatattattttaggtaatatttgtactttaacatgttgcataatatatgcttatgtagctttccaggactaacagataaatgtgtaatgaacaaagatatgttgtatgagtcgtcgtttctgtcagatttgtattgtttccaagggaaaagcttgggggaggactcagttcacaaaatgcaaaactcaacgatcagattcacggacccagagcttttccatgtgtttatattgtaaatatttttgatttcatcaaattatttattcattaaaagaaatttttgtgaagc

SEQ ID NO: 16992 - DNA, 3622 bp, Homo sapiens
  source 1..3622: mol_type = unassigned DNA
gtcgtcagcacccgcctgcggttggccgcgttgcagcgagaggggcatgtagaccccgcctcgtagggaggtggggagcggcaagccccgcctcagcccctctggcaggctcccgccagcgtcgctgcggctccggcccgggagcgagcgcccggagctcggaaagatgcggcgcccgcggcggcctgggggtctcgggggatccgggggtctccggctgctcctctgcctcctgctgctgagcagccgcccggggggctgcagcgccgttagtgcccacggctgtctatttgaccgcaggctctgctctcacctggaagtctgtattcaggatggcttgtttgggcagtgccaggtgggagtggggcaggcccggccccttttgcaagtcacctccccagttctccaacgcttacaaggtgtgctccgacaactcatgtcccaaggattgtcctggcacgatgacctcacccagtatgtgatctctcaggagatggagcgcatccccaggcttcgccccccagagccccgtccaagggacaggtctggcttggcacccaagagacctggtcctgctggagagctgcttttacaggacatccccactggctccgcccctgctgcccagcatcggcttccacaaccaccagtgggcaaaggtggagctggggccagctcctctctgtcccctctgcaggctgagctgctcccgcctctcttggagcacctgctgctgcccccacagcctccccacccttcactgagttacgaacctgccttgctgcagccctacctgttccaccagtttggctcccgtgatggctccagggtctcagagggctccccagggatggtcagtgtcggccccctgcccaaggctgaagcccctgccctcttcagcagaactgcctccaagggcatatttggggaccaccctggccactcctacggggaccttccagggccttcacctgcccagctttttcaagactctgggctgctctatctggcccaggagttgccagcacccagcagggccagggtgccaaggctgccagagcaagggagcagcagccgggcagaggactccccagagggctatgagaaggaaggactaggggatcgtggagagaagcctgcttccccagctgtgcagccagatgcggctctgcagaggctggccgctgtgctggcgggctatggggtagagctgcgtcagctgacccctgagcagctctccacactcctgaccctgctgcagctactgcccaagggtgcaggaagaaatccgggaggggttgtaaatgttggagctgatatcaagaaaacaatggaggggccggtggagggcagagacacagcagagcttccagcccgcacatcccccatgcctggacaccccactgccagccctacctccagtgaagtccagcaggtgccaagccctgtctcctctgagcctcccaaagctgccagaccccctgtgacacctgtcctgctagagaagaaaagcccactgggccagagccagcccacggtggcaggacagccctcagcccgcccagcagcagaggaatatggctacatcgtcactgatcagaatgtggtgggaccagccctcaccttccgcatccggcacaatgagcagaacctgtctttggctgatgtgacccaacaagcagggctggtgaagtctgaactggaagcacagacagggctccaaatcttgcagacaggagtgggacagagggaggaggcagctgcagtccttccccaaactgcgcacagcacctcacccatgcgctcagtgctgctcactctggtggccctggcaggtgtggctgggctgctggtggctctggctgtggctctgtgtgtgcggcagcatgcgcggcagcaagacaaggagcgcctggcagccctggggcctgagggggcccatggtgacactacctttgagtaccaggacctgtgccgccagcacatggccacgaagtccttgttcaaccgggcagagggtccaccggagccttcacgggtgagcagtgtgtcctcccagttcagcgacgcagcccaggccagccccagctcccacagcagcaccccgtcctggtgcgaggagccggcccaagccaacatggacatctccacgggacacatgattctggcatacatggaggatcacctgcggaaccgggaccgccttgccaaggagtggcaggccctctgtgcctaccaagcagagccaaacacctgtgccaccgcgcagggggagggcaacatcaaaaagaaccggcatcctgacttcctgccctatgaccatgcccgcataaaactgaaggtggagagcagcccttctcggagcgattacatcaacgccagccccattattgagcatgaccctcggatgccagcctacatagccacgcagggcccgctgtcccataccatcgcagacttctggcagatggtgtgggagagcggctgcaccgtcatcgtcatgctgaccccgctggtggaggatggtgtcaagcagtgtgaccgctactggccagatgagggtgcctccctctaccacgtatatgaggtgaacctggtgtcggagcacatctggtgcgaggactttctggtgcggagcttctacctgaagaacgtgcagacccaggagacgcgcacgctcacgcagttccacttcctcagctggccggcagagggcacaccggcctccacgcggcccctgctggacttccgcaggaaggtgaacaagtgctaccggggccgctcctgccccatcatcgtgcactgcagtgatggtgcggggaggaccggcacctacatcctcatcgacatggtcctgaaccgcatggcaaaaggagtgaaggagattgacatcgctgccaccctggagcatgtccgtgaccagcggcctggccttgtccgctctaaggaccagtttgaatttgccctgacagccgtggcggaggaagtgaatgccatcctcaaggccctgccccagtgagaccctggggccccttggcgggcagcccagcctctgtccctctttgcctgtgtgagcatctctgtgtacccactcctcactgccccaccagccacctcttgggcatgctcagcccttcctagaagagtcaggaagggaaagccagaaggggcacgcctgcccagcctcgcatgccagagcctggggcatcccagagcccagggcatcccatgggggtgctgcagccaggaggagaggaaaggacatgggtagcaattctacccagagccttctcctgcctacattccctggcctggctctcctgtagctctcctggggttctgggagttccctgaacatctgtgtgtgtccccctatgctccagtatggaagaatggggtggagggtcgccacacccggctccccctgcttctcagccccgggcctgcctctgactcacacttgggcgctctgccctccctggcctcacgcccagcctcctcccaccaccctcccaccatgcgctgctcaacctctctccttctggcgcaagagaacatttctagaaaaaactacttttgtaccagtgtgaataaagttagtgtgttgtctgtgcagctgcaa

SEQ ID NO: 16993 - DNA, 3784 bp, Homo sapiens
  source 1..3784: mol_type = unassigned DNA
aggtaggtcccccgctccgacagggctcttacgccatatgtgacgcaaattagcttacgagccgggggtggaggtgtcgtcagcacccgcctgcggttggccgcgttgcagcgagaggggcatgtagaccccgcctcgtagggaggtggggagcggcaagccccgcctcagcccctctggcaggctcccgccagcgtcgctgcggctccggcccgggagcgagcgcccggagctcggaaagatgcggcgcccgcggcggcctgggggtctcgggggatccgggggtctccggctgctcctctgcctcctgctgctgagcagccgcccggggggctgcagcgccgttagtgcccacggctgtctatttgaccgcaggctctgctctcacctggaagtctgtattcaggatggcttgtttgggcagtgccaggtgggagtggggcaggcccggccccttttgcaagtcacctccccagttctccaacgcttacaaggtgtgctccgacaactcatgtcccaaggattgtcctggcacgatgacctcacccagtatgtgatctctcaggagatggagcgcatccccaggcttcgccccccagagccccgtccaagggacaggtctggcttggcacccaagagacctggtcctgctggagagctgcttttacaggacatccccactggctccgcccctgctgcccagcatcggcttccacaaccaccagtgggcaaaggtggagctggggccagctcctctctgtcccctctgcaggctgagctgctcccgcctctcttggagcacctgctgctgcccccacagcctccccacccttcactgagttacgaacctgccttgctgcagccctacctgttccaccagtttggctcccgtgatggctccagggtctcagagggctccccagggatggtcagtgtcggccccctgcccaaggctgaagcccctgccctcttcagcagaactgcctccaagggcatatttggggaccaccctggccactcctacggggaccttccagggccttcacctgcccagctttttcaagactctgggctgctctatctggcccaggagttgccagcacccagcagggccagggtgccaaggctgccagagcaagggagcagcagccgggcagaggactccccagagggctatgagaaggaaggactaggggatcgtggagagaagcctgcttccccagctgtgcagccagatgcggctctgcagaggctggccgctgtgctggcgggctatggggtagagctgcgtcagctgacccctgagcagctctccacactcctgaccctgctgcagctactgcccaagggtgcaggaagaaatccgggaggggttgtaaatgttggagctgatatcaagaaaacaatggaggggccggtggagggcagagacacagcagagcttccagcccgcacatcccccatgcctggacaccccactgccagccctacctccagtgaagtccagcaggtgccaagccctgtctcctctgagcctcccaaagctgccagaccccctgtgacacctgtcctgctagagaagaaaagcccactgggccagagccagcccacggtggcaggacagccctcagcccgcccagcagcagaggaatatggctacatcgtcactgatcagaagcccctgagcctggctgcaggagtgaagctgctggagatcctggctgagcatgtgcacatgtcctcaggcagcttcatcaacatcagtgtggtgggaccagccctcaccttccgcatccggcacaatgagcagaacctgtctttggctgatgtgacccaacaagcagggctggtgaagtctgaactggaagcacagacagggctccaaatcttgcagacaggagtgggacagagggaggaggcagctgcagtccttccccaaactgcgcacagcacctcacccatgcgctcagtgctgctcactctggtggccctggcaggtgtggctgggctgctggtggctctggctgtggctctgtgtgtgcggcagcatgcgcggcagcaagacaaggagcgcctggcagccctggggcctgagggggcccatggtgacactacctttgagtaccaggacctgtgccgccagcacatggccacgaagtccttgttcaaccgggcagagggtccaccggagccttcacgggtgagcagtgtgtcctcccagttcagcgacgcagcccaggccagccccagctcccacagcagcaccccgtcctggtgcgaggagccggcccaagccaacatggacatctccacgggacacatgattctggcatacatggaggatcacctgcggaaccgggaccgccttgccaaggagtggcaggccctctgtgcctaccaagcagagccaaacacctgtgccaccgcgcagggggagggcaacatcaaaaagaaccggcatcctgacttcctgccctatgaccatgcccgcataaaactgaaggtggagagcagcccttctcggagcgattacatcaacgccagccccattattgagcatgaccctcggatgccagcctacatagccacgcagggcccgctgtcccataccatcgcagacttctggcagatggtgtgggagagcggctgcaccgtcatcgtcatgctgaccccgctggtggaggatggtgtcaagcagtgtgaccgctactggccagatgagggtgcctccctctaccacgtatatgaggtgaacctggtgtcggagcacatctggtgcgaggactttctggtgcggagcttctacctgaagaacgtgcagacccaggagacgcgcacgctcacgcagttccacttcctcagctggccggcagagggcacaccggcctccacgcggcccctgctggacttccgcaggaaggtgaacaagtgctaccggggccgctcctgccccatcatcgtgcactgcagtgatggtgcggggaggaccggcacctacatcctcatcgacatggtcctgaaccgcatggcaaaaggagtgaaggagattgacatcgctgccaccctggagcatgtccgtgaccagcggcctggccttgtccgctctaaggaccagtttgaatttgccctgacagccgtggcggaggaagtgaatgccatcctcaaggccctgccccagtgagaccctggggccccttggcgggcagcccagcctctgtccctctttgcctgtgtgagcatctctgtgtacccactcctcactgccccaccagccacctcttgggcatgctcagcccttcctagaagagtcaggaagggaaagccagaaggggcacgcctgcccagcctcgcatgccagagcctggggcatcccagagcccagggcatcccatgggggtgctgcagccaggaggagaggaaaggacatgggtagcaattctacccagagccttctcctgcctacattccctggcctggctctcctgtagctctcctggggttctgggagttccctgaacatctgtgtgtgtccccctatgctccagtatggaagaatggggtggagggtcgccacacccggctccccctgcttctcagccccgggcctgcctctgactcacacttgggcgctctgccctccctggcctcacgcccagcctcctcccaccaccctcccaccatgcgctgctcaacctctctccttctggcgcaagagaacatttctagaaaaaactacttttgtaccagtgtgaataaagttagtgtgttgtctgtgcagctgcaa

SEQ ID NO: 16994 - DNA, 2239 bp, Homo sapiens
  source 1..2239: mol_type = unassigned DNA
cacaacctagatccctcacatgtgcaggtcacgatagggttcgcacttctgtgagaatctattgcaatggctgatctaacaggaggcggagctcaggtggtaatgttcgcttgcctcctgctatgcggctcggttcccaacaggccatagactgacactggtccatggcccagggattggggacccctgctttagagggctgttgcaagatttgataaagtatgtaaaatctagtgtaagtgcctgatacatagcaagggctccgttaattctagatgctgcctattatcattattaaatgagcaaaaacaactattgtgattactcttctaccctagccctctgacgtaacagccaatgagctagaaaaccatgtggactcctatgaagccattctaagtcacctggtcctatagctgaaggactgtgaagttccaaacttcaatctgacaacccctaagaaggtcttccctggttctggcttgcagggatatcaggagtatgcaggtgactcccaaagcagaaaggtcataaaggacaagggcaggttagatgggtccattgagagacggagaagccccctgctcctcactgagttgtggtcaggggcagtggagaaaggtctgaggtccaaggggaccccaagtctgaatataacgcagccacagaatgcctgtgctgaagtgagactgctccagggagacaagcagtagcacaatgtcccgagttgaggggttggggttgtcctcccctggcccagggaacactatgcccagggcagcctgatgtcacaactggtaaggaccactggagcctgagtcgggaggaaaacagcctgggtggtcataaagaatggcagagggccagagcagggatgtggcaagactgacacccttgaagtcaccagaaagctatccccttggacttgggcagaagtgtctcttaatatgatgatgtattatcattaatagttgccacctgctaccatgtattgagcacctattgtgtgccagacctagcacttagctctttacatgggttatctcatgtgatcattgtaagaaccctaaggaggtttttcttactatcctccattttacaggtaagaaaactgaggctcaaagaggttaaatcagttgttccaggtgcatagcttgggcacctagcttgcaagtgacaaggcgagcccaatgccacccacaccagctctggttctttgcctccagccctggctcctttctccaaccatcttccctctctgccccgggcaggtggggagaaaaggaagaaagagaggcccacgtcatgtgtttcagcttccctttccctctctgctggtgcccactggccctcacacccatttcttgttgcaggaaggtgaacaagtgctaccggggccgctcctgccccatcatcgtgcactgcagtgatggtgcggggaggaccggcacctacatcctcatcgacatggtcctgaaccgcatggcaaaaggagtgaaggagattgacatcgctgccaccctggagcatgtccgtgaccagcggcctggccttgtccgctctaaggaccagtttgaatttgccctgacagccgtggcggaggaagtgaatgccatcctcaaggccctgccccagtgagaccctggggccccttggcgggcagcccagcctctgtccctctttgcctgtgtgagcatctctgtgtacccactcctcactgccccaccagccacctcttgggcatgctcagcccttcctagaagagtcaggaagggaaagccagaaggggcacgcctgcccagcctcgcatgccagagcctggggcatcccagagcccagggcatcccatgggggtgctgcagccaggaggagaggaaaggacatgggtagcaattctacccagagccttctcctgcctacattccctggcctggctctcctgtagctctcctggggttctgggagttccctgaacatctgtgtgtgtccccctatgctccagtatggaagaatggggtggagggtcgccacacccggctccccctgcttctcagccccgggcctgcctctgactcacacttgggcgctctgccctccctggcctcacgcccagcctcctcccaccaccctcccaccatgcgctgctcaacctctctccttctggcgcaagagaacatttctagaaaaaactacttttgtaccagtgtgaataaagttagtgtgttgtctgtgcagctgc

SEQ ID NO: 16995 - DNA, 5099 bp, Homo sapiens
  source 1..5099: mol_type = unassigned DNA
aggatgcttttccatatttgggaaggaaattcctctttcagaatttggccaaaacctctcctgcagtaattctatgaatctctctccctgcacctggaaggtttcttccctatcactcagttaagcaaacagaggcttttaaggatacagactcacaaattcttaaaatccaaaacaagatcccatgcttccttttaagaaattcaggcctgattcctactctcctcccagcttaaggccttctttagaatgaaagaataaattgcatctgcttctcccgttcccagcctgtccacccatctgcccattctctgtgagtgggtgtctgagcctctgctcaccttttcctctacaggctgtctatttgaccgcaggctctgctctcacctggaagtctgtattcagggtgagtgaggcccaagcatagaactcacaagatcggggggagaggggcaataaaaaacaagaaggggagagaaggcccagaaaggaagagggctactgggcttgagaagaaggaagacttgcctggaggaggagaggtaggggagaaagtgaagagagtacagtccatttgcaacctggactttggaaggcctcttattcaagccccctgctgacaccacttttgtgcccttagatggcttgtttgggcagtgccaggtgggagtggggcaggcccggccccttttgcaagtcacctccccagttctccaacgcttacaaggtgtgctccgacaactcatgtcccaaggattgtcctggcacgatgacctcacccagtatgtgatctctcaggagatggagcgcatccccaggcttcgccccccagagccccgtccaagggacaggtctggcttggcacccaagagacctggtcctgctggagagctgcttttacaggacatccccactggctccgcccctgctgcccagcatcggcttccacaaccaccagtgggcaaaggtggagctggggccagctcctctctgtcccctctgcaggctgagctgctcccgcctctcttggagcacctgctgctgcccccacagcctccccacccttcactgagttacgaacctgccttgctgcagccctacctgttccaccagtttggctcccgtgatggctccagggtctcagagggctccccagggatggtcagtgtcggccccctgcccaaggctgaagcccctgccctcttcagcagaactgcctccaagggcatatttggggaccaccctggccactcctacggggaccttccagggccttcacctgcccagctttttcaagactctgggctgctctatctggcccaggagttgccagcacccagcagggccagggtgccaaggctgccagagcaagggagcagcagccgggcagaggactccccagagggctatgagaaggaaggactaggggatcgtggagagaagcctgcttccccagctgtgcagccagatgcggctctgcagaggctggccgctgtgctggcgggctatggggtagagctgcgtcagctgacccctgagcagctctccacactcctgaccctgctgcagctactgcccaagggtgcaggaagaaatccgggaggggttgtaaatgttggagctgatatcaagaaaacaatggaggggccggtggagggcagagacacagcagagcttccagcccgcacatcccccatgcctggacaccccactgccagccctacctccagtgaagtccagcaggtgccaagccctgtctcctctgagcctcccaaagctgccagaccccctgtgacacctgtcctgctagagaagaaaagcccactgggccagagccagcccacggtggcaggacagccctcagcccgcccagcagcagaggaatatggctacatcgtcactgatcagaagcccctgagcctggctgcaggagtgaagctgctggagatcctggctgagcatgtgcacatgtcctcaggcagcttcatcaacatcagtgtggtgggaccagccctcaccttccgcatccggcacaatgagcagaacctgtctttggctgatgtgacccaacaagcagggctggtgaagtctgaactggaagcacagacagggctccaaatcttgcagacaggagtgggacagagggaggaggcagctgcagtccttccccaaactgcgcacagcacctcacccatgcgctcagtgctgctcactctggtggccctggcaggtgtggctgggctgctggtggctctggctgtggctctgtgtgtgcggcagcatgcgcggcagcaagacaaggagcgcctggcagccctggggcctgagggggcccatggtgacactacctttgagtaccaggacctgtgccgccagcacatggccacgaagtccttgttcaaccgggcagagggtccaccggagccttcacgggtgagcagtgtgtcctcccagttcagcgacgcagcccaggccagccccagctcccacagcagcaccccgtcctggtgcgaggagccggcccaagccaacatggacatctccacgggacacatgattctggcatacatggaggatcacctgcggaaccgggaccgccttgccaaggagtggcaggccctctgtgcctaccaagcagagccaaacacctgtgccaccgcgcagggggagggcaacatcaaaaagaaccggcatcctgacttcctgccctatgaccatgcccgcataaaactgaaggtggagagcagcccttctcggagcgattacatcaacgccagccccattattgagcatgaccctcggatgccagcctacatagccacgcagggcccgctgtcccataccatcgcagacttctggcagatggtgtgggagagcggctgcaccgtcatcgtcatgctgaccccgctggtggaggatggtgtcaagcagtgtgaccgctactggccagatgagggtgcctccctctaccacgtatatgaggtcagcagggccccacagcaaggggacaatggatgtgggaagagtagatgatggccttttcgtaacgttttcttcaccaaatgagcactcaacagtctttttaaaaaggcttttattggccctgctcatgattcatacatatatgaatatatataaacacatatatgcatacccatatattcacatatatacatgtgtgtgtcctgtttacagaacatacatgtgtgtgtgtgtgtgtgtgtgtgtgtgtcctgtctagagtcaaaaagcgttcatagagacttatgataaaggcacagagatcaaactataaaaccaccaaaaccgaggtaagaagctaacagctaagtgtatattagacagggaagataaggatacccaaagactgagattaagacctacgttaattgaacctaatttagctctgagtttcctggtggccaaagcaaagaaagacataccacccgttacatacgttactaatgtaaaagagaaacaaactttttcattaggagagagactaggtggaggggtggagaaggagggggaactgggcagaggccaagcaggggaaagagaaatatttcagacaaatgggagaacgtgagtccccactaagacaaaaaaaccttaagaacacagcagaagcttctcatcaccagatgagcctgaatagtaattttttccccaccaaataagcacatgacggtttttttaaaaagcctttcattggtcctgctggtggttaacgaaaaaaatccagtaagaatactacagaatttcatccaagtttatggcacgtgtagcaccgatactctggtagaccctgcgaggaagagggaggagaaactccgacctcgagaggctcacaatagctgtgtctgggtggaaaagctactagtggtcctgagcagtagataagtgacaggcagccagggttcctgggaccgctggaacttagaatttgaaccggcctgggaggccgggcggtggttggagagaccgagaaggtcgcgaggagagcgcgcgcaacgcggggactggggcagcccgcggcgctcaggcctgggcccctgccgggcaggtgaacctggtgtcggagcacatctggtgcgaggactttctggtgcggagcttctacctgaagaacgtgcagacccaggagacgcgcacgctcacgcagttccacttcctcagctggccggcagagggcacaccggcctccacgcggcccctgctggacttccgcaggaaggtgaacaagtgctaccggggccgctcctgccccatcatcgtgcactgcagtgatggtgcggggaggaccggcacctacatcctcatcgacatggtcctgaaccgcatggcaaaaggagtgaaggagattgacatcgctgccaccctggagcatgtccgtgaccagcggcctggccttgtccgctctaaggaccagtttgaatttgccctgacagccgtggcggaggaagtgaatgccatcctcaaggccctgccccagtgagaccctggggccccttggcgggcagcccagcctctgtccctctttgcctgtgtgagcatctctgtgtacccactcctcactgccccaccagccacctcttgggcatgctcagcccttcctagaagagtcaggaagggaaagccagaaggggcacgcctgcccagcctcgcatgccagagcctggggcatcccagagcccagggcatcccatgggggtgctgcagccaggaggagaggaaaggacatgggtagcaattctacccagagccttctcctgcctacattccctggcctggctctcctgtagctctcctggggttctgggagttccctgaacatctgtgtgtgtccccctatgctccagtatggaagaatggggtggagggtcgccacacccggctccccctgcttctcagccccgggcctgcctctgactcacacttgggcgctctgccctccctggcctcacgcccagcctcctcccaccaccctcccaccatgcgctgctcaacctctctccttctggcgcaagagaacatttctagaaaaaactacttttgtaccagtgtgaataaagttagtgtgttgtctgtgcagctgc

SEQ ID NO: 16996 - DNA, 1051 bp, Homo sapiens
  source 1..1051: mol_type = unassigned DNA
tgtgggagagcggctgcaccgtcatcgtcatgctgaccccgctggtggaggatggtgtcaagcagtgtgaccgctactggccagatgagggtgcctccctctaccacgtatatgaggtgaacctggtgtcggagcacatctggtgcgaggactttctggtgcggagcttctacctgaagaacgtgcagacccaggagacgcgcacgctcacgcagttccacttcctcagctggccggcagagggcacaccggcctccacgcggcccctgctggacttccgcaggaaggtgaacaagtgctaccggggccgctcctgccccatcatcgtgcactgcagtgatggtgcggggaggaccggcacctacatcctcatcgacatggtcctgaaccgcatggcaaaaggaccagtttgaatttgccctgacagccgtggcggaggaagtgaatgccatcctcaaggccctgccccagtgagaccctggggccccttggcgggcagcccagcctctgtccctctttgcctgtgtgagcatctctgtgtacccactcctcactgccccaccagccacctcttgggcatgctcagcccttcctagaagagtcaggaagggaaagccagaaggggcacgcctgcccagcctcgcatgccagagcctggggcatcccagagcccagggcatcccatgggggtgctgcagccaggaggagaggaaaggacatgggtagcaattctacccagagccttctcctgcctacattccctggcctggctctcctgtagctctcctggggttctgggagttccctgaacatctgtgtgtgtccccctatgctccagtatggaagaatggggtggagggtcgccacacccggctccccctgcttctcagccccgggcctgcctctgactcacacttgggcgctctgccctccctggcctcacgcccagcctcctcccaccaccctcccaccatgcgctgctcaacctctctccttctggcgcaagagaacatttctagaaaaaactacttttgtaccagtgtgaataaag

SEQ ID NO: 16997 - DNA, 3313 bp, Homo sapiens
  source 1..3313: mol_type = unassigned DNA
attgcaggttcgggagaaggacacggggtgcatgtgggcagagggacttagagaccggctgcgagaccacaggagaagccacttgctccgaggcgcctgggaggctgtctatttgaccgcaggctctgctctcacctggaagtctgtattcaggatggcttgtttgggcagtgccaggtgggagtggggcaggcccggccccttttgcaagtcacctccccagttctccaacgcttacaaggtgtgctccgacaactcatgtcccaaggattgtcctggcacgatgacctcacccagtatgtgatctctcaggagatggagcgcatccccaggcttcgccccccagagccccgtccaagggacaggtctggcttggcacccaagagacctggtcctgctggagagctgcttttacaggacatccccactggctccgcccctgctgcccagcatcggcttccacaaccaccagtgggcaaaggtggagctggggccagctcctctctgtcccctctgcaggctgagctgctcccgcctctcttggagcacctgctgctgcccccacagcctccccacccttcactgagttacgaacctgccttgctgcagccctacctgttccaccagtttggctcccgtgatggctccagggtctcagagggctccccagggatggtcagtgtcggccccctgcccaaggctgaagcccctgccctcttcagcagaactgcctccaagggcatatttggggaccaccctggccactcctacggggaccttccagggccttcacctgcccagctttttcaagactctgggctgctctatctggcccaggagttgccagcacccagcagggccagggtgccaaggctgccagagcaagggagcagcagccgggcagaggactccccagagggctatgagaaggaaggactaggggatcgtggagagaagcctgcttccccagctgtgcagccagatgcggctctgcagaggctggccgctgtgctggcgggctatggggtagagctgcgtcagctgacccctgagcagctctccacactcctgaccctgctgcagctactgcccaagggtgcaggaagaaatccgggaggggttgtaaatgttggagctgatatcaagaaaacaatggaggggccggtggagggcagagacacagcagagcttccagcccgcacatcccccatgcctggacaccccactgccagccctacctccagtgaagtccagcaggtgccaagccctgtctcctctgagcctcccaaagctgccagaccccctgtgacacctgtcctgctagagaagaaaagcccactgggccagagccagcccacggtggcaggacagccctcagcccgcccagcagcagaggaatatggctacatcgtcactgatcagaagcccctgagcctggctgcaggagtgaagctgctggagatcctggctgagcatgtgcacatgtcctcaggcagcttcatcaacatcagtgtggtgggaccagccctcaccttccgcatccggcacaatgagcagaacctgtctttggctgatgtgacccaacaagcagggctggtgaagtctgaactggaagcacagacagggctccaaatcttgcagacaggagtgggacagagggaggaggcagctgcagtccttccccaaactgcgcacagcacctcacccatgcgctcagtgctgctcactctggtggccctggcaggtgtggctgggctgctggtggctctggctgtggctctgtgtgtgcggcagcatgcgcggcagcaagacaaggagcgcctggcagccctggggcctgagggggcccatggtgacactacctttgagtaccaggacctgtgccgccagcacatggccacgaagtccttgttcaaccgggcagagggtccaccggagccttcacgggtgagcagtgtgtcctcccagttcagcgacgcagcccaggccagccccagctcccacagcagcaccccgtcctggtgcgaggagccggcccaagccaacatggacatctccacgggacacatgattctggcatacatggaggatcacctgcggaaccgggaccgccttgccaaggagtggcaggccctctgtgcctaccaagcagagccaaacacctgtgccaccgcgcagggggagggcaacatcaaaaagaaccggcatcctgacttcctgccctatgaccatgcccgcataaaactgaaggtggagagcagcccttctcggagcgattacatcaacgccagccccattattgagcatgaccctcggatgccagcctacatagccacgcagggcccgctgtcccataccatcgcagacttctggcagatggtgtgggagagcggctgcaccgtcatcgtcatgctgaccccgctggtggaggatggtgtcaagcagtgtgaccgctactggccagatgagggtgcctccctctaccacgtatatgaggtgaacctggtgtcggagcacatctggtgcgaggactttctggtgcggagcttctacctgaagaacgtgcagacccaggagacgcgcacgctcacgcagttccacttcctcagctggccggcagagggcacaccggcctccacgcggcccctgctggacttccgcaggaaggtgaacaagtgctaccggggccgctcctgccccatcatcgtgcactgcagtgatggtgcggggaggaccggcacctacatcctcatcgacatggtcctgaaccgcatggcaaaaggagtgaaggagattgacatcgctgccaccctggagcatgtccgtgaccagcggcctggccttgtccgctctaaggaccagtttgaatttgccctgacagccgtggcggaggaagtgaatgccatcctcaaggccctgccccagtgagaccctggggccccttggcgggcagcccagcctctgtccctctttgcctgtgtgagcatctctgtgtacccactcctcactgccccaccagccacctcttgggcatgctcagcccttcctagaagagtcaggaagggaaagccagaaggggcacgcctgcccagcctcgcatgccagagcctggggcatcccagagcccagggcatcccatgggggtgctgcagccaggaggagaggaaaggacatgggtagcaattctacccagagccttctcctgcctacattccctggcctggctctcctgtagctctcctggggttctgggagttccctgaacatctgtgtgtgtccccctatgctccagtatggaagaatggggtggagg

SEQ ID NO: 16998 - DNA, 701 bp, Homo sapiens
  source 1..701: mol_type = unassigned DNA
cagccccattattgagcatgaccctcggatgccagcctacatagccacgcagggcccgctgtcccataccatcgcagacttctggcagatggtgtgggagagcggctgcaccgtcatcgtcatgctgaccccgctggtggaggatggtgtcaagcagtgtgaccgctactggccagatgagggtgcctccctctaccacgtatatgagctggccggcagagggcacaccggcctccacgcggcccctgctggacttccgcaggaaggtgaacaagtgctaccggggccgctcctgccccatcatcgtgcactgcagtgatggtgcggggaggaccggcacctacatcctcatcgacatggtcctgaaccgcatggcaaaaggagtgaaggagattgacatcgctgccaccctggagcatgtccgtgaccagcggcctggccttgtccgctctaaggaccagtttgaatttgccctgacagccgtggcggaggaagtgaatgccatcctcaaggccctgccccagtgagaccctggggccccttggcgggcagcccagcctctgtccctctttgcctgtgtgagcatctctgtgtacccactcctcactgccccaccagccacctcttgggcatgctcagcccttcctagaagagtcaggaagggaaagccagaaggggcacgcctgcccagcctcgcatgc

SEQ ID NO: 16999 - DNA, 563 bp, Homo sapiens
  source 1..563: mol_type = unassigned DNA
tgaaggtacagccacacccagcccgttgctggccccacccagcatcttccttgcctaagatgcccctgtagggcatccccgatctgctccagccccatcctctaacggggagagggccagagctggcctcttttttgaagtctgcggtctggggtggagaaggcagtaacatagctcctatctggcagtgtggtgggaccagccctcaccttccgcatccggcacaatgagcagaacctgtctttggctgatgtgacccaacaagcagggctggtgaagtctgaactggaagcacagacagggctccaaatcttgcagacaggagtgggacagagggaggaggcagctgcagtccttccccaaactgcgcacagcacctcacccatgcgctcagtgctgctcactctggtggccctggcaggtgtggctgggctgctggtggctctggctgtggctctgtgtgtgcggcagcatgcgcggcagcaagacaaggagcgcctggcagccctggggcctgagggggcccatggtgacactacctttgagtaccaggacctgtgccg

SEQ ID NO: 17000 - DNA, 571 bp, Homo sapiens
  source 1..571: mol_type = unassigned DNA
gatctgctccagccccatcctctaacggggagagggccagagctggcctcttttttgaagtctgcggtctggggtggagaaggcagtaacatagctcctatctggcagtgtggtgggaccagccctcaccttccgcatccggcacaatgagcagaacctgtctttggctgatgtgacccaacaagcaggtaaatatctctgcgacctcaatcccaggcttggccccagccccactcctaagaggatatatccaggcctgttgctgatgcccccttgaaatgttcccagcccacatgggccctgcctgctgcttggcagagcaagacagaggatggagaccacatggggctggagcaagcctgacctttgtcctccctgcagggctggtgaagtctgaactggaagcacagacagggctccaaatcttgcagacaggagtgggacagagggaggaggcagctgcagtccttccccaaactgcgcacagcacctcacccatgcgctcagtgctgctcactctggtggccctggcaggtgtggctgggctgctggtggctctggctgtggctct

SEQ ID NO: 17001 - DNA, 563 bp, Homo sapiens
  source 1..563: mol_type = unassigned DNA
ctaagagaattgggctctggggaaaattgcaggctgtctatttgaccgcaggctctgctctcacctggaagtctgtattcaggatggcttgtttgggcagtgccaggtgggagtggggcaggcccggccccttttgcaagtcacctccccagttctccaacgcttacaaggtgtgctccgacaactcatgtcccaaggattgtcctggcacgatgacctcacccagtatgtgatctctcaggagatggagcgcatccccaggcttcgccccccagagccccgtccaagggacaggtctggcttggcacccaagagacctggtcctgctggagagctgcttttacaggacatccccactggctccgcccctgctgcccagcatcggcttccacaaccaccagtgggcaaaggtggagctggggccagctcctctctgtcccctctgcaggctgagctgctcccgcctctcttggagcacctgctgctgcccccacagcctccccacccttcactgagttacgaacctgccttgctgcagccctacctgttccaccagtttggct

SEQ ID NO: 17002 - DNA, 606 bp, Homo sapiens
  source 1..606: mol_type = unassigned DNA
gaagagggctacagggatggggccaagtgggaattctagcgaggcgcctactatttgatggaggagggatgggctaggctgtctatttgaccgcaggctctgctctcacctggaagtctgtattcaggatggcttgtttgggcagtgccaggtgggagtggggcaggcccggccccttttgcaagtcacctccccagttctccaacgcttacaaggtgtgctccgacaactcatgtcccaaggattgtcctggcacgatgacctcacccagtatgtgatctctcaggagatggagcgcatccccaggcttcgccccccagagccccgtccaagggacaggtctggcttggcacccaagagacctggtcctgctggagagctgcttttacaggacatccccactggctccgcccctgctgcccagcatcggcttccacaaccaccagtgggcaaaggtggagctggggccagctcctctctgtcccctctgcaggctgagctgctcccgcctctcttggagcacctgctgctgcccccacagcctccccacccttcactgagttacgaacctgccttgctgcagccctacctgttccaccagtttgg

SEQ ID NO: 17003 - DNA, 579 bp, Homo sapiens
  source 1..579: mol_type = unassigned DNA
agcttggggcctggagcgaaactcggtgggggtgagggtgaaatgtcatgaagctcggggagaatatgggttgggggaggcatgcgagatgaggaaggctgtctatttgaccgcaggctctgctctcacctggaagtctgtattcaggatggcttgtttgggcagtgccaggtgggagtggggcaggcccggccccttttgcaagtcacctccccagttctccaacgcttacaaggtgtgctccgacaactcatgtcccaaggattgtcctggcacgatgacctcacccagtatgtgatctctcaggagatggagcgcatccccaggcttcgccccccagagccccgtccaagggacaggtctggcttggcacccaagagacctggtcctgctggagagctgcttttacaggacatccccactggctccgcccctgctgcccagcatcggcttccacaaccaccagtgggcaaaggtggagctggggccagctcctctctgtcccctctgcaggctgagctgctcccgcctctcttggagcacctgctgctgcccccacagcctccccacccttcactg

SEQ ID NO: 17004 - DNA, 582 bp, Homo sapiens
  source 1..582: mol_type = unassigned DNA
taacaatcctaggaggtataaatccccattttattgatgagggaattgaggcttggagaggttcagcaacttgcccaaggttacataattcatcagtagcaaaggcaggattcaaacccaggtggtctggctccaatagctgtacctgagggtgggaagaagacagctcagatcacccactgagtttgtccctctactctgacaaaccccatgagctgcagggcagagggtacagttctgatccccagtggtccccgttactggatccccagactcctgaaccaacttacgctgtcctctttcctgacaggattgtcctggcacgatgacctcacccagtatgtgatctctcaggagatggagcgcatccccaggcttcgccccccagagccccgtccaagggacaggtctggcttggcacccaagagacctggtcctgctggagagctgcttttacaggacatccccactggctccgcccctgctgcccagcatcggcttccacaaccaccagtgggcaaaggtggagctggggccagctcctctctgtcccctctgcaggctgagctgctcccgcctctc

SEQ ID NO: 17005 - DNA, 541 bp, Homo sapiens
  source 1..541: mol_type = unassigned DNA
aagagaattgggctctggggaaaattgcaggttcgggagaaggacacggggtgcatgtgggcagagggacttagagaccggctgcgagaccacaggagaagccacttgctccgaggcgcctgggaggctgtctatttgaccgcaggctctgctctcacctggaagtctgtattcaggatggcttgtttgggcagtgccaggtgggagtggggcaggcccggccccttttgcaagtcacctccccagttctccaacgcttacaaggtgtgctccgacaactcatgtcccaaggattgtcctggcacgatgacctcacccagtatgtgatctctcaggagatggagcgcatccccaggcttcgccccccagagccccgtccaagggacaggtctggcttggcacccaagagacctggtcctgctggagagctgcttttacaggacatccccactggctccgcccctgctgcccagcatcggcttccacaaccaccagtgggcaaaggtggagctggggccagctcctctctgtcccctctgca

SEQ ID NO: 17006 - DNA, 466 bp, Homo sapiens
  source 1..466: mol_type = unassigned DNA
atatgtgacgcaaattagcttacgagccgggggtggaggtgtcgtcagcacccgcctgcggttggccgcgttgcagcgagaggggcatgtagaccccgcctcgtagggaggctgtctatttgaccgcaggctctgctctcacctggaagtctgtattcaggatggcttgtttgggcagtgccaggtgggagtggggcaggcccggccccttttgcaagtcacctccccagttctccaacgcttacaaggtgtgctccgacaactcatgtcccaaggattgtcctggcacgatgacctcacccagtatgtgatctctcaggagatggagcgcatccccaggcttcgccccccagagccccgtccaagggacaggtctggcttggcacccaagagacctggtcctgctggagagctgcttttacaggacatccccactggctccgcccctgctgcccagcatcggctt

SEQ ID NO: 17007 - DNA, 592 bp, Homo sapiens
  source 1..592: mol_type = unassigned DNA
agcgtcgctgcggctccggcccgggagcgagcgcccggagctcggaaagatgcggcgcccgcggcggcctgggggtctcgggggatccgggggtctccggctgctcctctgcctcctgctgctgagcagccgcccggggggctgcagcgccgttagtgcccacggttcgggagaaggacacggggtgcatgtgggcagagggacttagagaccggctgcgagaccacaggagaagccacttgctccgaggcgcctgggaggctgtctatttgaccgcaggctctgctctcacctggaagtctgtattcaggatggcttgtttgggcagtgccaggtgggagtggggcaggcccggccccttttgcaagtcacctccccagttctccaacgcttacaaggtgtgctccgacaactcatgtcccaaggattgtcctggcacgatgacctcacccagtatgtgatctctcaggagatggagcgcatccccaggcttcgccccccagagccccgtccaagggacaggtctggcttggcacccaagagacctggtcctgctggagagctgcttttacaggacatccccactggctcc

SEQ ID NO: 17008 - DNA, 504 bp, Homo sapiens
  source 1..504: mol_type = unassigned DNA
cgagaccacaggagaagccacttgctccgaggcgcctgggaggctgtctatttgaccgcaggctctgctctcacctggaagtctgtattcaggatggcttgtttgggcagtgccaggtgggagtggggcaggcccggccccttttgcaagtcacctccccagttctccaacgcttacaaggtgtgctccgacaactcatgtcccaagagtaagaggtggaaccctagagatgggctattcacatttggactctctggagaagcccagaggagccttctaagaagaagtcactggaaaaggccagcttccatcttcttaggaccagttcctctcactggcattgtctgagtgctacagagccaagaactctggaatcctcagccaggataatattccactcacccaattcctcattcaacaagtatttattgagtacttactatgtagcaggcatagttttaggtatttggaatgtatcgggaataaaacaaagatctctgctta

SEQ ID NO: 17009 - DNA, 545 bp, Homo sapiens
  source 1..545: mol_type = unassigned DNA
cccctctggcaggctcccgccagcgtcgctgcggctccggcccgggagcgagcgcccggagctcggaaagatgcggcgcccgcggcggcctgggggtctcgggggatccgggggtctccggctgctcctctgcctcctgctgctgagcagccgcccggggggctgcagcgccgttagtgcccacggctgtctatttgaccgcaggctctgctctcacctggaagtctgtattcagggtgagtgaggcccaagcatagaactcacaagatcggggggagaggggcaataaaaaacaagaaggggagagaaggcccagaaaggaagagggctactgggcttgagaagaaggaagacttgcctggaggaggagaggtaggggagaaagtgaagagagtacagtccatttgcaacctggactttggaaggcctcttattcaagccccctgctgacaccacttttgtgcccttagatggcttgtttgggcagtgccaggtgggagtggggcaggcccggccccttttgcaagtcacctccccagttctcc

SEQ ID NO: 17010 - DNA, 579 bp, Homo sapiens
  source 1..579: mol_type = unassigned DNA
cttcagcaccgcggacagcgccagcggctcgggacagcgcgaggagagatgcctaagagacaccctccccagccccacccatgccctctttcccccgaccgggggaagtgtgctagaacctcttctgagttccaggccattataggatgcttttccatatttgggaaggaaattcctctttcagaatttggccaaaacctctcctgcagtaattctatgaatctctctccctgcacctggaaggtttcttccctatcactcagttaagcaaacagaggcttttaaggatacagactcacaaattcttaaaatccaaaacaagatcccatgcttccttttaagaaattcaggcctgattcctactctcctcccagcttaaggccttctttagaatgaaagaataaattgcatctgcttctcccgttcccagcctgtccacccatctgcccattctctgtgagtgggtgtctgagcctctgctcaccttttcctctacaggctgtctatttgaccgcaggctctgctctcacctggaagtctgtattcaggatggcttgtttgggcagtgccaggtgggag

SEQ ID NO: 17011 - DNA, 5301 bp, Homo sapiens
  source 1..5301: mol_type = unassigned DNA
cgcggggtccccgcctctcgctcaccacacagaccccgcgcctcctctggcagccgcggtggtggcggcggcagagcctcgcccactccaatccccaccctctccatccttagtcattaaagaacagcagcgcctggcacgttcttggaggaccccgggcgcagaggaggaaagggagcaggcgcagggggactggaaaggcagcatgcgctcgccaggagcaacctcggcgcccagggtctgaggctgcagccccagttcgccattgtgagccgccgccgggggagtccgctagcgcagccgtgcccccgagtccccgtccgcgcagcgatggggcacctgcccacggggatacacggcgcccgccgcctcctgcctctgctctggctctttgtgctgttcaagaatgctacagctttccatgtaactgtccaagatgataataacatcgttgtctcattagaagcttcagacgtcatcagtccagcatctgtgtatgttgtgaagataactggtgaatccaaaaattatttcttcgaatttgaggaattcaacagcactttgcctcctcctgttattttcaaggccagttatcatggcctttattatataatcactctggtagtggtaaatggaaatgtggtgaccaagccatccagatcaatcactgtgttaacaaaacctctacctgtaaccagtgtttccatatatgactataaaccttctcctgaaacaggagtcctgtttgaaatacattatccagaaaaatataacgttttcacaagagtgaacattagctactgggaaggtaaagacttccggacaatgctatataaagatttctttaagggaaaaacagtatttaatcactggctgccaggaatgtgttatagtaatatcacctttcagctggtatctgaggcaacttttaataaaagtacccttgttgagtacagtggtgtcagtcacgaacccaaacagcacagaactgccccttatccacctcaaaatatttccgttcgtatcgtaaacttgaacaaaaacaactgggaagaacagagtggcaatttcccagaagaatccttcatgagatcacaagatacaataggaaaagaaaaactcttccattttacagaagaaacccctgaaattccctcgggcaacatttcttccggttggcctgattttaatagcagtgactatgaaactacgtctcagccatattggtgggacagtgcatctgcagctcctgaaagtgaagatgaatttgtcagcgtacttcccatggaatacgaaaataacagtacactcagtgagacagagaagtcaacatcaggctctttctcctttttccctgtgcaaatgatattgacctggttaccacccaaaccacccactgcttttgatgggttccatatccatattgaacgagaagagaactttactgaatatttgatggtggatgaagaagcacatgaatttgttgcagaactgaaggaacctgggaaatataagttatctgtgacaacctttagttcctcaggatcttgtgaaactcgaaaaagtcagtcagcaaaatcactcagcttttatatcagtccttcaggagagtggattgaagaactgaccgagaagccgcagcacgtgagtgtccacgttttaagctcaaccactgccttgatgtcctggacatcttcccaagagaactacaacagcaccattgtgtctgtggtgtcgctgacctgccagaaacaaaaggagagccagaggcttgaaaagcagtactgcactcaggtgaactcaagcaaacctattattgaaaatctggttcctggtgcccagtaccaggttgtaatatacctaaggaaaggccctttgattggaccaccttcagatcctgtgacatttgctattgttcccacaggaataaaggatttaatgctctatcctttgggtcctacggccgtggttctgagctggaccagaccttatttaggcgtgttcagaaaatacgtggttgaaatgttttatttcaaccctgctacaatgacatcagagtggaccacctactatgaaatagcagcaactgtttccttaactgcatccgtgagaatagctaatctgctgccagcatggtactacaacttccgggttaccatggtgacgtggggagatccagaattgagctgctgtgacagctctaccatcagcttcataacagccccagtggctccggaaatcacttctgtggaatatttcaacagtctgttatatatcagttggacatatggggatgatacaacggacttgtcccattctagaatgcttcactggatggtggttgcagaaggaaaaaagaaaattaaaaagagtgtaacacgcaatgtcatgactgcaattctcagcttgcctccaggcgacatctataacctctcagtaactgcttgtactgaaagaggaagtaatacctccatgctccgccttgtcaagctagaaccagctccacccaaatcactcttcgcagtgaacaaaacccagacttcagtgactttgctgtgggtggaagagggagtagctgatttctttgaagttttctgtcaacaagttggctccagtcagaaaaccaaacttcaggaaccagttgctgtttcttcccatgtcgtgaccatctccagccttcttcctgccactgcctacaattgtagtgtcaccagctttagccatgacagccccagtgtccctacgttcatagccgtctcaacaatggttacagagatgaatcccaatgtggtagtgatctccgtgctggccatccttagcacacttttaattggactgttgcttgttaccctcattattcttaggaaaaagcatctgcagatggctagggagtgtggagctggtacatttgtcaattttgcatccttagagagggatggaaagcttccatacaactggcgtaggagtatatttgctttcttaaccctgctaccctcatgtctttggactgattatcttttggcattttatattaatccttggagtaaaaatggtttaaagaagaggaaactgacaaacccggttcaactggatgactttgatgcctatattaaggatatggccaaagactctgactataaattttctcttcagtttgaggagttgaaattgattggactggatatcccacactttgctgcagatcttccactgaatcgatgtaaaaaccgttacacaaacatcctaccatatgacttcagccgtgtgagattagtctccatgaatgaagaggaaggtgcagactacatcaatgccaactatattcctggatacaactcaccccaggagtatattgccacccaggggccactgcctgaaaccagaaatgacttctggaagatggtcctgcaacaaaagtctcagattattgtcatgctcactcagtgtaatgagaaaaggagggtgaaatgtgaccattactggccattcacggaagaacctatagcctatggagacatcactgtggagatgatttcagaggaagagcaggacgactgggcctgtagacacttccggatcaactatgctgacgagatgcaggatgtgatgcattttaactacactgcatggcctgatcatggtgtgcccacagcaaatgctgcagaaagtatcctgcagtttgtacacatggtccgacagcaagctaccaagagcaaaggtcccatgatcattcactgcagtgctggcgtgggacggacaggaacattcattgccctggacaggctcttgcagcacattcgggatcatgagtttgttgacatcttagggctggtgtcagaaatgaggtcataccggatgtctatggtacagacagaggagcagtacatttttatccatcagtgtgtgcaactgatgtggatgaagaagaagcagcagttctgcatcagtgatgtcatatacgagaatgttagcaagtcctagttcagaatccggagcagagaggacatgatgtgcgcccatcctcccttgcttccagattgttttagtgggccctgatggtcatttttctaaacagaggccctgctttgtaatatgtggccaaggagataatttatctcacagaagcaccgggaagacttagccttaaagagcctacagtgtccttttggactctttcacttcgggacatttaataatggaccaaattcaacagaacaccaggaaggtcaagacgctctccaaagggcaggaagtacagcacttccgaagagtttagttggccctttgctggttgggctgagttttttatttttaagtgtttgtttttcagtgcaataatttttgtgtgtgtgtgattcttatcagaaagttgaattgttttctgcctacaccgttcatcagccccataacccaggaaggaacaggcattgttagcatcagattatacctcattattaaaaggaggcatggccacacatgaagaaatggtcattctacttcaaagaaattgagccagcactatctgtactccaacattaccggatctggattggggaggttggtcagggaagagaggggttctacccacagatcaactgtgtaatcttttactattcaagctataattcagcttcaaagtagagtagaaaaaaaattgtcttaactgttctagttcttgatggttttcttccttattaacagttggtgtttcttccttggcccttttggactaatgttactgtccaagttctttctcaagaaaccacatctggttcagaagagtgtcaagttggactctttgaactctgttgctgtctgagcaatcgtggtgcctagactttgcattccttgttctgttgacctgcatacatgtgagagctatttctttaagaactatataggctgtgaaaacgcactttctttcccccaaagagctgggaatttatgaagttatggcaatgaactgcagcatgctgggacaattatttgactacttttttttgtaatattgtcaaatgtctctatggattctgacagagatttctttttgttttgttattcttttggttgtcagtttcattttaacgagtgtaactagtaacattttattctttggattttgtataattacagtacatgattgtgtattgtgacatgaatgctgtcaaaatgacattgatggcattgtgaagcctgttactttgtgtcacttcctgataaataagaggtgatgacatggatatacaacagaaaacactttgagttgaaagtaaacacaagctggctgcttccctgtggcaa

SEQ ID NO: 17012 - DNA, 2070 bp, Homo sapiens
  source 1..2070: mol_type = unassigned DNA
ggaggaccccgggcgcagaggaggaaagggagcaggcgcagggggactggaaaggcagcatgcgctcgccaggagcaacctcggcgcccagggtctgaggctgcagccccagttcgccattgtgagccgccgccgggggagtccgctagcgcagccgtgcccccgagtccccgtccgcgcagcgatggggcacctgcccacggggatacacggcgcccgccgcctcctgcctctgctctggctctttgtgctgttcaagaatgctacagctttccatgtaactgtccaagatgataataacatcgttgtctcattagaagcttcagacgtcatcagtccagcatctgtgtatgttgtgaagataactggtgaatccaaaaattatttcttcgaatttgaggaattcaacagcactttgcctcctcctgttattttcaaggccagttatcatggcctttattatataatcactctggtagtggtaaatggaaatgtggtgaccaagccatccagatcaatcactgtgttaacaaaacctctacctgtaaccagtgtttccatatatgactataaaccttctcctgaaacaggagtcctgtttgaaatacattatccagaaaaatataacgttttcacaagagtgaacattagctactgggaaggtaaagacttccggacaatgctatataaagatttctttaagggaaaaacagtatttaatcactggctgccaggaatgtgttatagtaatatcacctttcagctggtatctgaggcaacttttaataaaagtacccttgttgagtacagtggtgtcagtcacgaacccaaacagcacagaactgccccttatccacctcaaaatatttccgttcgtatcgtaaacttgaacaaaaacaactgggaagaacagagtggcaatttcccagaagaatccttcatgagatcacaagatacaataggaaaagaaaaactcttccattttacagaagaaacccctgaaattccctcgggcaacatttcttccggttggcctgattttaatagcagtgactatgaaactacgtctcagccatattggtgggacagtgcatctgcagctcctgaaagtgaagatgaatttgtcagcgtacttcccatggaatacgaaaataacagtacactcagtgagacagagaagtcaacatcaggctctttctcctttttccctgtgcaaatgatattgacctggttaccacccaaaccacccactgcttttgatgggttccatatccatattgaacgagaagagaactttactgaatatttgatggtggatgaagaagcacatgaatttgttgcagaactgaaggaacctgggaaatataagttatctgtgacaacctttagttcctcaggatcttgtgaaactcgaaaaagtcagtcagcaaaatcactcagcttttatatcagtccttcaggagagtggattgaagaactgaccgagaagccgcagcacgtgagtgtccacgttttaagctcaaccactgccttgatgtcctggacatcttcccaagagaactacaacagcaccattgtgtctgtggtgtcgctgacctgccagaaacaaaaggagagccagaggcttgaaaagcagtactgcactcaggtgaactcaagcaaacctattattgaaaatctggttcctggtgcccagtaccaggttgtaatatacctaaggaaaggccctttgattggaccaccttcagatcctgtgacatttgctattgttcccacaggaataaaggatttaatgctctatcctttgggtcctacggccgtggttctgagctggaccagaccttatttaggcgtgttcagaaaatacgtggttgaaatgttttatttcaaccctgctacaatgacatcagagtggaccacctactatgaaatagcagcaactgtttccttaactgcatccgtggtaatcttcccttaaccaactgtcagtctttcctatgggaacaggcaaacctttatgtaccaaatgtgtctttaagaaattatctataaatttgattattttgtaaa

SEQ ID NO: 17013 - DNA, 5061 bp, Homo sapiens
  source 1..5061: mol_type = unassigned DNA
gggcgcagaggaggaaagggagcaggcgcagggggactggaaaggcagcatgcgctcgccaggagcaacctcggcgcccagggtctgaggctgcagccccagttcgccattgtgagccgccgccgggggagtccgctagcgcagccgtgcccccgagtccccgtccgcgcagcgatggggcacctgcccacggggatacacggcgcccgccgcctcctgcctctgctctggctctttgtgctgttcaagaatgctacagctttccatgtaactgtccaagatgataataacatcgttgtctcattagaagcttcagacgtcatcagtccagcatctgtgtatgttgtgaagataactggtgaatccaaaaattatttcttcgaatttgaggaattcaacagcactttgcctcctcctgttattttcaaggccagttatcatggcctttattatataatcactctggtagtggtaaatggaaatgtggtgaccaagccatccagatcaatcactgtgttaacaaaacctctacctgtaaccagtgtttccatatatgactataaaccttctcctgaaacaggagtcctgtttgaaatacattatccagaaaaatataacgttttcacaagagtgaacattagctactgggaaggtaaagacttccggacaatgctatataaagatttctttaagggaaaaacagtatttaatcactggctgccaggaatgtgttatagtaatatcacctttcagctggtatctgaggcaacttttaataaaagtacccttgttgagtacagtggtgtcagtcacgaacccaaacagcacagaactgccccttatccacctcaaaatatttccgttcgtatcgtaaacttgaacaaaaacaactgggaagaacagagtggcaatttcccagaagaatccttcatgagatcacaagatacaataggaaaagaaaaactcttccattttacagaagaaacccctgaaattccctcgggcaacatttcttccggttggcctgattttaatagcagtgactatgaaactacgtctcagccatattggtgggacagtgcatctgcagctcctgaaagtgaagatgaatttgtcagcgtacttcccatggaatacgaaaataacagtacactcagtgagacagagaagtcaacatcaggctctttctcctttttccctgtgcaaatgatattgacctggttaccacccaaaccacccactgcttttgatgggttccatatccatattgaacgagaagagaactttactgaatatttgatggtggatgaagaagcacatgaatttgttgcagaactgaaggaacctgggaaatataagttatctgtgacaacctttagttcctcaggatcttgtgaaactcgaaaaagtcagtcagcaaaatcactcagcttttatatcagtccttcaggagagtggattgaagaactgaccgagaagccgcagcacgtgagtgtccacgttttaagctcaaccactgccttgatgtcctggacatcttcccaagagaactacaacagcaccattgtgtctgtggtgtcgctgacctgccagaaacaaaaggagagccagaggcttgaaaagcagtactgcactcaggtgaactcaagcaaacctattattgaaaatctggttcctggtgcccagtaccaggttgtaatatacctaaggaaaggccctttgattggaccaccttcagatcctgtgacatttgctattgttcccacaggaataaaggatttaatgctctatcctttgggtcctacggccgtggttctgagctggaccagaccttatttaggcgtgttcagaaaatacgtggttgaaatgttttatttcaaccctgctacaatgacatcagagtggaccacctactatgaaatagcagcaactgtttccttaactgcatccgtgagaatagctaatctgctgccagcatggtactacaacttccgggttaccatggtgacgtggggagatccagaattgagctgctgtgacagctctaccatcagcttcataacagccccagtggctccggaaatcacttctgtggaatatttcaacagtctgttatatatcagttggacatatggggatgatacaacggacttgtcccattctagaatgcttcactggatggtggttgcagaaggaaaaaagaaaattaaaaagagtgtaacacgcaatgtcatgactgcaattctcagcttgcctccaggcgacatctataacctctcagtaactgcttgtactgaaagaggaagtaatacctccatgctccgccttgtcaagctagaaccagctccacccaaatcactcttcgcagtgaacaaaacccagacttcagtgactttgctgtgggtggaagagggagtagctgatttctttgaagttttctgtcaacaagttggctccagtcagaaaaccaaacttcaggaaccagttgctgtttcttcccatgtcgtgaccatctccagccttcttcctgccactgcctacaattgtagtgtcaccagctttagccatgacagccccagtgtccctacgttcatagccgtctcaacaatggttacagagatgaatcccaatgtggtagtgatctccgtgctggccatccttagcacacttttaattggactgttgcttgttaccctcattattcttaggaaaaagcatctgcagatggctagggagtgtggagctggtacatttgtcaattttgcatccttagagagggatggaaagcttccatacaactggagtaaaaatggtttaaagaagaggaaactgacaaacccggttcaactggatgactttgatgcctatattaaggatatggccaaagactctgactataaattttctcttcagtttgaggagttgaaattgattggactggatatcccacactttgctgcagatcttccactgaatcgatgtaaaaaccgttacacaaacatcctaccatatgacttcagccgtgtgagattagtctccatgaatgaagaggaaggtgcagactacatcaatgccaactatattcctggatacaactcaccccaggagtatattgccacccaggggccactgcctgaaaccagaaatgacttctggaagatggtcctgcaacaaaagtctcagattattgtcatgctcactcagtgtaatgagaaaaggagggtgaaatgtgaccattactggccattcacggaagaacctatagcctatggagacatcactgtggagatgatttcagaggaagagcaggacgactgggcctgtagacacttccggatcaactatgctgacgagatgcaggatgtgatgcattttaactacactgcatggcctgatcatggtgtgcccacagcaaatgctgcagaaagtatcctgcagtttgtacacatggtccgacagcaagctaccaagagcaaaggtcccatgatcattcactgcagtgctggcgtgggacggacaggaacattcattgccctggacaggctcttgcagcacattcgggatcatgagtttgttgacatcttagggctggtgtcagaaatgaggtcataccggatgtctatggtacagacagaggagcagtacatttttatccatcagtgtgtgcaactgatgtggatgaagaagaagcagcagttctgcatcagtgatgtcatatacgagaatgttagcaagtcctagttcagaatccggagcagagaggacatgatgtgcgcccatcctcccttgcttccagattgttttagtgggccctgatggtcatttttctaaacagaggccctgctttgtaatatgtggccaaggagataatttatctcacagaagcaccgggaagacttagccttaaagagcctacagtgtccttttggactctttcacttcgggacatttaataatggaccaaattcaacagaacaccaggaaggtcaagacgctctccaaagggcaggaagtacagcacttccgaagagtttagttggccctttgctggttgggctgagttttttatttttaagtgtttgtttttcagtgcaataatttttgtgtgtgtgtgattcttatcagaaagttgaattgttttctgcctacaccgttcatcagccccataacccaggaaggaacaggcattgttagcatcagattatacctcattattaaaaggaggcatggccacacatgaagaaatggtcattctacttcaaagaaattgagccagcactatctgtactccaacattaccggatctggattggggaggttggtcagggaagagaggggttctacccacagatcaactgtgtaatcttttactattcaagctataattcagcttcaaagtagagtagaaaaaaaattgtcttaactgttctagttcttgatggttttcttccttattaacagttggtgtttcttccttggcccttttggactaatgttactgtccaagttctttctcaagaaaccacatctggttcagaagagtgtcaagttggactctttgaactctgttgctgtctgagcaatcgtggtgcctagactttgcattccttgttctgttgacctgcatacatgtgagagctatttctttaagaactatataggctgtgaaaacgcactttctttcccccaaagagctgggaatttatgaagttatggcaatgaactgcagcatgctgggacaattatttgactacttttttttgtaatattgtcaaatgtctctatggattctgacagagatttctttttgttttgttattcttttggttgtcagtttcattttaacgagtgtaactagtaacattttattctttggattttgtataattacagtacatgattgtgtattgtgacatgaatgctgtcaaaatgacattgatggcattgtgaagcctgttactttgtgtcacttcctgataaataagaggtgatgacatggatatacaacagaaaacactttgagttgaaagtaaacacaagctggctgcttccctgtggcaa

SEQ ID NO: 17014 - DNA, 512 bp, Homo sapiens
  source 1..512: mol_type = unassigned DNA
gctctggctctttgtgctgttcaaggagtgcctgtgaggatgtttccaggagagataagtattggaattgatggaccaagtaaagcaggtggcatactccaatatggatgggcatgattcaatccattgagggctcgaatagagcaaaaagacagaagaatgctgggttcacctgctctctgctggactacttgggttgggacatctatcttcttctgcctttgatgcttctggttctcaggccttgagatttagcctggaatctacaccattgaccctctagctttcaggcctttaaacttcacttgaccttcctgcatgtccagattgcagacagcagattctgggatttcttagcctccataatcatgtgagccaatatgtgataataaatttctttaaaaatatggattagtaaaatttgcatcctaatgaaaatgtaagcattgtgacagagaatgctttagtcagtctcaaatcctaaatttgagattgaaatttaagatagctta

SEQ ID NO: 17015 - DNA, 3030 bp, Homo sapiens
  source 1..3030: mol_type = unassigned DNA
aagtaaaaaaatggaagggggaaaaggcaaagtattctgccttccaagttagatagctatctttatgaaaggacatatttcaaaggcaatataaagtctttatggtgctcttacctacctatatttgaattgggggatgcttcacctgcttattagtgaaagaagaaagaatacacttagtaaattaaattttttttaaaactttgtctttgctcagaaccagctccacccaaatcactcttcgcagtgaacaaaacccagacttcagtgactttgctgtgggtggaagagggagtagctgatttctttgaagttttctgtcaacaagttggctccagtcagaaaaccaaacttcaggaaccagttgctgtttcttcccatgtcgtgaccatctccagccttcttcctgccactgcctacaattgtagtgtcaccagctttagccatgacagccccagtgtccctacgttcatagccgtctcaacaatggttacagagatgaatcccaatgtggtagtgatctccgtgctggccatccttagcacacttttaattggactgttgcttgttaccctcattattcttaggaaaaagcatctgcagatggctagggagtgtggagctggtacatttgtcaattttgcatccttagagagggatggaaagcttccatacaactggcgtaggagtatatttgctttcttaaccctgctaccctcatgtctttggactgattatcttttggcattttatattaatccttggagtaaaaatggtttaaagaagaggaaactgacaaacccggttcaactggatgactttgatgcctatattaaggatatggccaaagactctgactataaattttctcttcagtttgaggagttgaaattgattggactggatatcccacactttgctgcagatcttccactgaatcgatgtaaaaaccgttacacaaacatcctaccatatgacttcagccgtgtgagattagtctccatgaatgaagaggaaggtgcagactacatcaatgccaactatattcctggatacaactcaccccaggagtatattgccacccaggggccactgcctgaaaccagaaatgacttctggaagatggtcctgcaacaaaagtctcagattattgtcatgctcactcagtgtaatgagaaaaggagggtgaaatgtgaccattactggccattcacggaagaacctatagcctatggagacatcactgtggagatgatttcagaggaagagcaggacgactgggcctgtagacacttccggatcaactatgctgacgagatgcaggatgtgatgcattttaactacactgcatggcctgatcatggtgtgcccacagcaaatgctgcagaaagtatcctgcagtttgtacacatggtccgacagcaagctaccaagagcaaaggtcccatgatcattcactgcagtgctggcgtgggacggacaggaacattcattgccctggacaggctcttgcagcacattcgggatcatgagtttgttgacatcttagggctggtgtcagaaatgaggtcataccggatgtctatggtacagacagaggagcagtacatttttatccatcagtgtgtgcaactgatgtggatgaagaagaagcagcagttctgcatcagtgatgtcatatacgagaatgttagcaagtcctagttcagaatccggagcagagaggacatgatgtgcgcccatcctcccttgcttccagattgttttagtgggccctgatggtcatttttctaaacagaggccctgctttgtaatatgtggccaaggagataatttatctcacagaagcaccgggaagacttagccttaaagagcctacagtgtccttttggactctttcacttcgggacatttaataatggaccaaattcaacagaacaccaggaaggtcaagacgctctccaaagggcaggaagtacagcacttccgaagagtttagttggccctttgctggttgggctgagttttttatttttaagtgtttgtttttcagtgcaataatttttgtgtgtgtgtgattcttatcagaaagttgaattgttttctgcctacaccgttcatcagccccataacccaggaaggaacaggcattgttagcatcagattatacctcattattaaaaggaggcatggccacacatgaagaaatggtcattctacttcaaagaaattgagccagcactatctgtactccaacattaccggatctggattggggaggttggtcagggaagagaggggttctacccacagatcaactgtgtaatcttttactattcaagctataattcagcttcaaagtagagtagaaaaaaaattgtcttaactgttctagttcttgatggttttcttccttattaacagttggtgtttcttccttggcccttttggactaatgttactgtccaagttctttctcaagaaaccacatctggttcagaagagtgtcaagttggactctttgaactctgttgctgtctgagcaatcgtggtgcctagactttgcattccttgttctgttgacctgcatacatgtgagagctatttctttaagaactatataggctgtgaaaacgcactttctttcccccaaagagctgggaatttatgaagttatggcaatgaactgcagcatgctgggacaattatttgactacttttttttgtaatattgtcaaatgtctctatggattctgacagagatttctttttgttttgttattcttttggttgtcagtttcattttaacgagtgtaactagtaacattttattctttggattttgtataattacagtacatgattgtgtattgtgacatgaatgctgtcaaaatgacattgatggcattgtgaagcctgttactttgtgtcacttcctgataaataagaggtgatgacatggatatacaacagaaaacactttgagttgaaagtaaacacaagctggctgcttccctgtggcaactgtgg

SEQ ID NO: 17016 - DNA, 2946 bp, Homo sapiens
  source 1..2946: mol_type = unassigned DNA
aagtaaaaaaatggaagggggaaaaggcaaagtattctgccttccaagttagatagctatctttatgaaaggacatatttcaaaggcaatataaagtctttatggtgctcttacctacctatatttgaattgggggatgcttcacctgcttattagtgaaagaagaaagaatacacttagtaaattaaattttttttaaaactttgtctttgctcagaaccagctccacccaaatcactcttcgcagtgaacaaaacccagacttcagtgactttgctgtgggtggaagagggagtagctgatttctttgaagttttctgtcaacaagttggctccagtcagaaaaccaaacttcaggaaccagttgctgtttcttcccatgtcgtgaccatctccagccttcttcctgccactgcctacaattgtagtgtcaccagctttagccatgacagccccagtgtccctacgttcatagccgtctcaacaatggttacagagatgaatcccaatgtggtagtgatctccgtgctggccatccttagcacacttttaattggactgttgcttgttaccctcattattcttaggaaaaagcatctgcagatggctagggagtgtggagctggtacatttgtcaattttgcatccttagagagggatggaaagcttccatacaactggagtaaaaatggtttaaagaagaggaaactgacaaacccggttcaactggatgactttgatgcctatattaaggatatggccaaagactctgactataaattttctcttcagtttgaggagttgaaattgattggactggatatcccacactttgctgcagatcttccactgaatcgatgtaaaaaccgttacacaaacatcctaccatatgacttcagccgtgtgagattagtctccatgaatgaagaggaaggtgcagactacatcaatgccaactatattcctggatacaactcaccccaggagtatattgccacccaggggccactgcctgaaaccagaaatgacttctggaagatggtcctgcaacaaaagtctcagattattgtcatgctcactcagtgtaatgagaaaaggagggtgaaatgtgaccattactggccattcacggaagaacctatagcctatggagacatcactgtggagatgatttcagaggaagagcaggacgactgggcctgtagacacttccggatcaactatgctgacgagatgcaggatgtgatgcattttaactacactgcatggcctgatcatggtgtgcccacagcaaatgctgcagaaagtatcctgcagtttgtacacatggtccgacagcaagctaccaagagcaaaggtcccatgatcattcactgcagtgctggcgtgggacggacaggaacattcattgccctggacaggctcttgcagcacattcgggatcatgagtttgttgacatcttagggctggtgtcagaaatgaggtcataccggatgtctatggtacagacagaggagcagtacatttttatccatcagtgtgtgcaactgatgtggatgaagaagaagcagcagttctgcatcagtgatgtcatatacgagaatgttagcaagtcctagttcagaatccggagcagagaggacatgatgtgcgcccatcctcccttgcttccagattgttttagtgggccctgatggtcatttttctaaacagaggccctgctttgtaatatgtggccaaggagataatttatctcacagaagcaccgggaagacttagccttaaagagcctacagtgtccttttggactctttcacttcgggacatttaataatggaccaaattcaacagaacaccaggaaggtcaagacgctctccaaagggcaggaagtacagcacttccgaagagtttagttggccctttgctggttgggctgagttttttatttttaagtgtttgtttttcagtgcaataatttttgtgtgtgtgtgattcttatcagaaagttgaattgttttctgcctacaccgttcatcagccccataacccaggaaggaacaggcattgttagcatcagattatacctcattattaaaaggaggcatggccacacatgaagaaatggtcattctacttcaaagaaattgagccagcactatctgtactccaacattaccggatctggattggggaggttggtcagggaagagaggggttctacccacagatcaactgtgtaatcttttactattcaagctataattcagcttcaaagtagagtagaaaaaaaattgtcttaactgttctagttcttgatggttttcttccttattaacagttggtgtttcttccttggcccttttggactaatgttactgtccaagttctttctcaagaaaccacatctggttcagaagagtgtcaagttggactctttgaactctgttgctgtctgagcaatcgtggtgcctagactttgcattccttgttctgttgacctgcatacatgtgagagctatttctttaagaactatataggctgtgaaaacgcactttctttcccccaaagagctgggaatttatgaagttatggcaatgaactgcagcatgctgggacaattatttgactacttttttttgtaatattgtcaaatgtctctatggattctgacagagatttctttttgttttgttattcttttggttgtcagtttcattttaacgagtgtaactagtaacattttattctttggattttgtataattacagtacatgattgtgtattgtgacatgaatgctgtcaaaatgacattgatggcattgtgaagcctgttactttgtgtcacttcctgataaataagaggtgatgacatggatatacaacagaaaacactttgagttgaaagtaaacacaagctggctgcttccctgtggcaactgtgg

SEQ ID NO: 17017 - DNA, 4062 bp, Homo sapiens
  source 1..4062: mol_type = unassigned DNA
aagtaaaaaaatggaagggggaaaaggcaaagtattctgccttccaagttagatagctatctttatgaaaggacatatttcaaaggcaatataaagtctttatggtgctcttacctacctatatttgaattgggggatgcttcacctgcttattagtgaaagaagaaagaatacacttagtaaattaaattttttttaaaactttgtctttgctcagaaccagctccacccaaatcactcttcgcagtgaacaaaacccagacttcagtgactttgctgtgggtggaagagggagtagctgatttctttgaagttttctgtcaacaagttggctccagtcagaaaaccaaacttcaggaaccagttgctgtttcttcccatgtcgtgaccatctccagccttcttcctgccactgcctacaattgtagtgtcaccagctttagccatgacagccccagtgtccctacgttcatagccgtctcaacaatggttacagagatgaatcccaatgtggtagtgatctccgtgctggccatccttagcacacttttaattggactgttgcttgttaccctcattattcttaggaaaaagcatctgcagatggctagggagtgtggagctggtacatttgtcaattttgcatccttagagagggatggaaagcttccatacaactggcgtaggagtatatttgctttcttaaccctgctaccctcatgtctttggactgattatcttttggcattttatattaatccttggagtaaaaatggtttaaagaagaggaaactgacaaacccggttcaactggatgactttgatgcctatattaaggatatggccaaagactctgactataaattttctcttcagtttgaggagttgaaattgattggactggatatcccacactttgctgcagatcttccactgaatcgatgtaaaaaccgttacacaaacatcctaccatatgacttcagccgtgtgagattagtctccatgaatgaagaggaaggtgcagactacatcaatgccaactatattcctggatacaactcaccccaggagtatattgccacccaggggccactgcctgaaaccagaaatgacttctggaagatggtcctgcaacaaaagtctcagattattgtcatgctcactcagtgtaatgagaaaaggagggtgaaatgtgaccattactggccattcacggaagaacctatagcctatggagacatcactgtggagatgatttcagaggaagagcaggacgactgggcctgtagacacttccggatcaactatgctgacgagatgcaggatgtgatgcattttaactacactgcatggcctgatcatggtgtgcccacagcaaatgctgcagaaagtatcctgcagtttgtacacatggtccgacagcaagctaccaagagcaaaggtcccatgatcattcactgcagtgctggcgtgggacggacaggaacattcattgccctggacaggctcttgcagcacattcgggatcatgagtttgttgacatcttagggctggtgtcagaaatgaggtcataccggatgtctatggtacagacagaggagcagtacatttttatccatcagtgtgtgcaactgatgtggatgaagaagaagcagcagttctgcatcagtgatgtcatatacgagaatgttagcaagtcctagttcagaatccggagcagtaagtggagaagagctctccacgagtgctcagtcttagaactattagagggggatgtgatggatgggacaaaagacagcagtagccatttgtattgactctgacttcacatgagtatttcttcccagctcctggcctcacatgggtggtcacagggagaaacaagtactgtagcagatctttgagtttcaatgcaccttggttggtgttggcaacaaacaggagcttctgcacatcatgatgactttacctccattccctctacccagaaccctaaattattctgttattggatctgtgcctgtaatatcaggatactaccatccaaatctatctagatatcttgtgcaaatattttattgattacaagggctgtatacggggttacaaaaagacatgagctggattggacactcctaaaaccaaaaacaacagtgacaatagagtctcaggatagcagagtctgaaaataccttggtctcccccattatgtgagcccttacttgagagcttcatgaagacacttgtaacatattcaacgtcctgtactccagttttgactacgagatcagattttggaggtgtaagtaaacttggctgaggtaacagtaatctgcccatttagttcagtaaacagactgtagagtgtctgactatactgggggaagaggagccaatgacagggtagggagatgacagtggtgcatgatgggagaatcatgaaagtctgggaagcatatggaccagtgggaaggataggattagcactgcacctctacatccatcaagagagacagagcgcacaatggagcaggaaggataaaaaataaagaaagacagagagaaacaaatttgctgggagagggaaagacattcagacccacagaaaggaggcagcacacagagaaagatgcacagatcaacccacatctgcatgggttgtgagactgagcatagtgagagcagtggtggagcaatagaagattgctgtgacaccaggctgcttactgtctttctttgtctcattcacaggagaggacatgatgtgcgcccatcctcccttgcttccagattgttttagtgggccctgatggtcatttttctaaacagaggccctgctttgtaatatgtggccaaggagataatttatctcacagaagcaccgggaagacttagccttaaagagcctacagtgtccttttggactctttcacttcgggacatttaataatggaccaaattcaacagaacaccaggaaggtcaagacgctctccaaagggcaggaagtacagcacttccgaagagtttagttggccctttgctggttgggctgagttttttatttttaagtgtttgtttttcagtgcaataatttttgtgtgtgtgtgattcttatcagaaagttgaattgttttctgcctacaccgttcatcagccccataacccaggaaggaacaggcattgttagcatcagattatacctcattattaaaaggaggcatggccacacatgaagaaatggtcattctacttcaaagaaattgagccagcactatctgtactccaacattaccggatctggattggggaggttggtcagggaagagaggggttctacccacagatcaactgtgtaatcttttactattcaagctataattcagcttcaaagtagagtagaaaaaaaattgtcttaactgttctagttcttgatggttttcttccttattaacagttggtgtttcttccttggcccttttggactaatgttactgtccaagttctttctcaagaaaccacatctggttcagaagagtgtcaagttggactctttgaactctgttgctgtctgagcaatcgtggtgcctagactttgcattccttgttctgttgacctgcatacatgtgagagctatttctttaagaactatataggctgtgaaaacgcactttctttcccccaaagagctgggaatttatgaagttatggcaatgaactgcagcatgctgggacaattatttgactacttttttttgtaatattgtcaaatgtctctatggattctgacagagatttctttttgttttgttattcttttggttgtcagtttcattttaacgagtgtaactagtaacattttattctttggattttgtataattacagtacatgattgtgtattgtgacatgaatgctgtcaaaatgacattgatggcattgtgaagcctgttactttgtgtcacttcctgataaataagaggtgatgacatggatatacaacagaaaacactttgagttgaaagtaaacacaagctggctgcttccctgtggcaactgtgg

SEQ ID NO: 17018 - DNA, 3978 bp, Homo sapiens
  source 1..3978: mol_type = unassigned DNA
aagtaaaaaaatggaagggggaaaaggcaaagtattctgccttccaagttagatagctatctttatgaaaggacatatttcaaaggcaatataaagtctttatggtgctcttacctacctatatttgaattgggggatgcttcacctgcttattagtgaaagaagaaagaatacacttagtaaattaaattttttttaaaactttgtctttgctcagaaccagctccacccaaatcactcttcgcagtgaacaaaacccagacttcagtgactttgctgtgggtggaagagggagtagctgatttctttgaagttttctgtcaacaagttggctccagtcagaaaaccaaacttcaggaaccagttgctgtttcttcccatgtcgtgaccatctccagccttcttcctgccactgcctacaattgtagtgtcaccagctttagccatgacagccccagtgtccctacgttcatagccgtctcaacaatggttacagagatgaatcccaatgtggtagtgatctccgtgctggccatccttagcacacttttaattggactgttgcttgttaccctcattattcttaggaaaaagcatctgcagatggctagggagtgtggagctggtacatttgtcaattttgcatccttagagagggatggaaagcttccatacaactggagtaaaaatggtttaaagaagaggaaactgacaaacccggttcaactggatgactttgatgcctatattaaggatatggccaaagactctgactataaattttctcttcagtttgaggagttgaaattgattggactggatatcccacactttgctgcagatcttccactgaatcgatgtaaaaaccgttacacaaacatcctaccatatgacttcagccgtgtgagattagtctccatgaatgaagaggaaggtgcagactacatcaatgccaactatattcctggatacaactcaccccaggagtatattgccacccaggggccactgcctgaaaccagaaatgacttctggaagatggtcctgcaacaaaagtctcagattattgtcatgctcactcagtgtaatgagaaaaggagggtgaaatgtgaccattactggccattcacggaagaacctatagcctatggagacatcactgtggagatgatttcagaggaagagcaggacgactgggcctgtagacacttccggatcaactatgctgacgagatgcaggatgtgatgcattttaactacactgcatggcctgatcatggtgtgcccacagcaaatgctgcagaaagtatcctgcagtttgtacacatggtccgacagcaagctaccaagagcaaaggtcccatgatcattcactgcagtgctggcgtgggacggacaggaacattcattgccctggacaggctcttgcagcacattcgggatcatgagtttgttgacatcttagggctggtgtcagaaatgaggtcataccggatgtctatggtacagacagaggagcagtacatttttatccatcagtgtgtgcaactgatgtggatgaagaagaagcagcagttctgcatcagtgatgtcatatacgagaatgttagcaagtcctagttcagaatccggagcagtaagtggagaagagctctccacgagtgctcagtcttagaactattagagggggatgtgatggatgggacaaaagacagcagtagccatttgtattgactctgacttcacatgagtatttcttcccagctcctggcctcacatgggtggtcacagggagaaacaagtactgtagcagatctttgagtttcaatgcaccttggttggtgttggcaacaaacaggagcttctgcacatcatgatgactttacctccattccctctacccagaaccctaaattattctgttattggatctgtgcctgtaatatcaggatactaccatccaaatctatctagatatcttgtgcaaatattttattgattacaagggctgtatacggggttacaaaaagacatgagctggattggacactcctaaaaccaaaaacaacagtgacaatagagtctcaggatagcagagtctgaaaataccttggtctcccccattatgtgagcccttacttgagagcttcatgaagacacttgtaacatattcaacgtcctgtactccagttttgactacgagatcagattttggaggtgtaagtaaacttggctgaggtaacagtaatctgcccatttagttcagtaaacagactgtagagtgtctgactatactgggggaagaggagccaatgacagggtagggagatgacagtggtgcatgatgggagaatcatgaaagtctgggaagcatatggaccagtgggaaggataggattagcactgcacctctacatccatcaagagagacagagcgcacaatggagcaggaaggataaaaaataaagaaagacagagagaaacaaatttgctgggagagggaaagacattcagacccacagaaaggaggcagcacacagagaaagatgcacagatcaacccacatctgcatgggttgtgagactgagcatagtgagagcagtggtggagcaatagaagattgctgtgacaccaggctgcttactgtctttctttgtctcattcacaggagaggacatgatgtgcgcccatcctcccttgcttccagattgttttagtgggccctgatggtcatttttctaaacagaggccctgctttgtaatatgtggccaaggagataatttatctcacagaagcaccgggaagacttagccttaaagagcctacagtgtccttttggactctttcacttcgggacatttaataatggaccaaattcaacagaacaccaggaaggtcaagacgctctccaaagggcaggaagtacagcacttccgaagagtttagttggccctttgctggttgggctgagttttttatttttaagtgtttgtttttcagtgcaataatttttgtgtgtgtgtgattcttatcagaaagttgaattgttttctgcctacaccgttcatcagccccataacccaggaaggaacaggcattgttagcatcagattatacctcattattaaaaggaggcatggccacacatgaagaaatggtcattctacttcaaagaaattgagccagcactatctgtactccaacattaccggatctggattggggaggttggtcagggaagagaggggttctacccacagatcaactgtgtaatcttttactattcaagctataattcagcttcaaagtagagtagaaaaaaaattgtcttaactgttctagttcttgatggttttcttccttattaacagttggtgtttcttccttggcccttttggactaatgttactgtccaagttctttctcaagaaaccacatctggttcagaagagtgtcaagttggactctttgaactctgttgctgtctgagcaatcgtggtgcctagactttgcattccttgttctgttgacctgcatacatgtgagagctatttctttaagaactatataggctgtgaaaacgcactttctttcccccaaagagctgggaatttatgaagttatggcaatgaactgcagcatgctgggacaattatttgactacttttttttgtaatattgtcaaatgtctctatggattctgacagagatttctttttgttttgttattcttttggttgtcagtttcattttaacgagtgtaactagtaacattttattctttggattttgtataattacagtacatgattgtgtattgtgacatgaatgctgtcaaaatgacattgatggcattgtgaagcctgttactttgtgtcacttcctgataaataagaggtgatgacatggatatacaacagaaaacactttgagttgaaagtaaacacaagctggctgcttccctgtggcaactgtgg

SEQ ID NO: 17019 - DNA, 533 bp, Homo sapiens
  source 1..533: mol_type = unassigned DNA
agtgactttgctgtgggtggaagagggagtagctgatttctttgaagttttctgtcaacaagttggctccagtcagaaaaccaaacttcaggaaccagttgctgtttcttcccatgtcgtgaccatctccagccttcttcctgccactgcctacaattgtagtgtcaccagctttagccatgacagccccagtgtccctacgttcatagccgtctcaacaatggggagtgtggagctggtacatttgtcaattttgcatccttagagagggatggaaagcttccatacaactggagtaaaaatggtttaaagaagaggaaactgacaaacccggttcaactggatgactttgatgcctatattaaggatatggccaaagactctgactataaattttctcttcagtttgaggagttgaaattgattggactggatatcccacactttgctgcagatcttccactgaatcgatgtaaaaaccgttacacaaacatcctaccatatgacttcagccgtgtgagattagtctccat

SEQ ID NO: 17020 - DNA, 580 bp, Homo sapiens
  source 1..580: mol_type = unassigned DNA
tttggcaaatgggaagtataaagtgcagatatgttcatgcaatctagtagagttttaaaaaatgaatctgaaattattattatcttctcatgtaaggaaaagtaaacaaacctgatatgtgtttaatgaaaattaaataaaactgaggtacctgatgtaattatttaaagctgttcaagtttaattattatgttaatcaattcttctgcccagataaatttgtcttttcttttttaattatcaggagtaaaaatggtttaaagaagaggaaactgacaaacccggttcaactggatgactttgatgcctatattaaggatatggccaaagactctgactataaattttctcttcagtttgaggagttgaaattgattggactggatatcccacactttgctgcagatcttccactgaatcgatgtaaaaaccgttacacaaacatcctaccatatgacttcagccgtgtgagattagtctccatgaatgaagaggaaggtgcagactacatcaatgccaactatattcctggatacaactcaccccaggagtatattgccacccaggggccactgcctga

SEQ ID NO: 17021 - DNA, 472 bp, Homo sapiens
  source 1..472: mol_type = unassigned DNA
tggaagatggtcctgcaacaaaagtctcagattattgtcatgctcactcagtgtaatgagaaaaggagggtgaaatgtgaccattactggccattcacggaagaacctatagcctatggagacatcactgtggagatgatttcagaggaagagcaggacgactgggcctgtagacacttccggatcaactatgctgacgagatgcaggatgtgatgcattttaactacactgcatggcctgatcatggtgtgcccacagcaaatgctgcagaaagtatcctgcagtttgtacacatggtccgacagcaagctaccaagagcaaaggtcccatgatcattcactgcaggtaacctcatcaactgcattttctattaaatattaggagttggttttgtaaggggaacagctcaccattccataagcccttatcaggtttagttgaaaattaaataaactctgatgttttttaaa

SEQ ID NO: 17022 - DNA, 905 bp, Homo sapiens
  source 1..905: mol_type = unassigned DNA
aagtactgtagcagatctttgagtttcaatgcaccttggttggtgttggcaacaaacaggagcttctgcacatcatgatgactttacctccattccctctacccagaaccctaaattattctgttattggatctgtgcctgtaatatcaggatactaccatccaaatctatctagatatcttgtgcaaatattttattgattacaagggctgtatacggggttacaaaaagacatgagctggattggacactcctaaaaccaaaaacaacagtgacaatagagtctcaggatagcagagtctgaaaataccttggtctcccccattatgtgagcccttacttgagagcttcatgaagacacttgtaacatattcaacgtcctgtactccagttttgactacgagatcagattttggaggtgagaggacatgatgtgcgcccatcctcccttgcttccagattgttttagtgggccctgatggtcatttttctaaacagaggccctgctttgtaatatgtggccaaggagataatttatctcacagaagcaccgggaagacttagccttaaagagcctacagtgtccttttggactctttcacttcgggacatttaataatggaccaaattcaacagaacaccaggaaggtcaagacgctctccaaagggcaggaagtacagcacttccgaagagtttagttggccctttgctggttgggctgagttttttatttttaagtgtttgtttttcagtgcaataatttttgtgtgtgtgtgattcttatcagaaagttgaattgttttctgcctacaccgttcatcagccccataacccaggaaggaacaggcattgttagcatcagattatacctcattattaaaaggaggcatggccacacatgaag

SEQ ID NO: 17023 - DNA, 2818 bp, Homo sapiens
  source 1..2818: mol_type = unassigned DNA
acttaaaacagagtaaggaaatcagaaacaatttcctccacacagaaaagaacagaactctcttacctatgaaccaggtagtttccaagagagacgctgagggatgtttagaaagcctgggacctgcagatgccatgtcaggcacgcttgctcctgcataggagactaaataatctcgatatataaggatggcagtctgttgtcttagatcagtttgagaagcagctctggcagcggggggtgtaggtgtgttgcactacactgaatggaataaggctaaaaatatgtttagtgtctgataagaacgccagttttctcaagctctcatttaacgtcggactttctgttttgcttttaaagaaaaatgttttacaagggcagcatgaagcggacaaaatctggagcaaagaaggattttatgctgttgtcatttttctcagcatctttgttattatagtaacgtgtttgatgattctttacagattaaaagaaagatttcagctttccttaagacaagacaaagagaaaaaccaggagatccacctatcgcccatcacattacagccagcactgtccgaggcaaagacagtccacagcatggtccaacctgagcaggccccaaaggtactgaatgttgtcgtggaccctcaaggccgaggtgctcctgagatcaaagctaccaccgctacctctgtttgcccttctcctttcaaaatgaagcccataggacttcaagagagaagagggtccaacgtatctcttacattggacatgagtagcttggggaacattgaaccctttgtgtctataccaacaccacgggagaaggtagcaatggagtatctgcagtcagccagccgaattctcacaaggtctcagctgagggacgtcgtggcaagttcacatttactccaaagtgaattcatggaaataccaatgaactttgtggatcccaaagaaattgatattccgcgtcatggaactaaaaatcgctataagaccattttaccaaatcccctcagcagagtgtgtttaagaccaaaaaatgtaaccgattcattgagcacctacattaatgctaattatattaggggctacagtggcaaggagaaagccttcattgccacgcagggccccatgatcaacaccgtggatgatttctggcagatggtttggcaggaagacagccctgtgattgttatgatcacaaaactcaaagaaaaaaatgagaaatgtgtgctatactggccggaaaagagagggatatatggaaaagttgaggttctggttatcagtgtaaatgaatgtgataactacaccattcgaaaccttgtcttaaagcaaggaagccacacccaacatgtgaagcattactggtacacctcatggcctgatcacaagactccagacagtgcccagcccctcctacagctcatgctggatgtagaagaagacagacttgcttcccagggccgagggcctgtggttgtccactgcagtgcaggaataggtagaacagggtgttttattgctacatccattggctgtcaacagctgaaagaagaaggagttgtggatgcactaagcattgtctgccagcttcgtatggatagaggtggaatggtgcaaaccagtgagcagtatgaatttgtgcaccatgctctgtgcctgtatgagagcagactttcagcagagactgtccagtgagtcattgaagacttgtcagaccatcaatctcttggggtgattaatcaaattacccacccaaggcttctagaaggagcttcctgcaatggaaggaaggagaagctctgaagcccatgtatggcatggattgtggaagactgggcaacatatttaagatttccagctccttgtgtatatgaatgcatttgtaagcatcccccaaattattctgaaggttttttgatgatggaggtatgataggtttatcacacagcctaaggcagattttgttttgtctgtactgactctatctgccacacagaatgtatgtatgtaatattcagtaataaatgtcatcaggtgatgactggatgagctgctgaagacattcgtattatgtgttagatgctttaatgtttgcaaaatctgtcttgtgaatggactgtcagctgttaaactgttcctgttttgaagtgctattacctttctcagttaccagaatcttgctgctaaagttgcaagtgattgataatggatttttaacagagaagtctttgtttttgaaaaacaaaaatcaaaaacagtaactattttatatggaaatgtgtcttgataatattacctattaaatgtgtatttatagtccctcctatcaaacaattacagagcacaatgattgtcattgggtatatatgtatttactctctattattgggcataaaggtggcttctgctccagaactctatccactgtatttccacatcgtgagtcattttactttaaaagggaaaaacaaatttgtagcaactctgaagtatcaagagttttaactacttgtctctcttttgctaagaagggatttttgaatatgctatctacctggaatctctctctcaacaaaaggtatatgccttcaggaatgatataatctgtcccattttcgaggctccttataaggacatttccatgtatgtccttacatttctgaaagctttcaatcttcaagagacaaaaaaaattaaaataactaccctcagcaaacactagctgttctgctcatatatgaatttttaatgcagcaatgttgactttgtttcatactgccaataaactcttaatactaaatactga

SEQ ID NO: 17024 - DNA, 1927 bp, Homo sapiens
  source 1..1927: mol_type = unassigned DNA
agaagcgagcagcatttccatttatcaagtaggtgcagaagcctgtgcaagtattaagagtcagggtgcaggcggcaagctcctgctttgcagcttttcttactggttttgagagccaccttcctaaagagggccctgctgctcaggtctgatcgtggacaatggggcacgtacgccagactgctggactactgaatgaatgcctctttctttgttcaataccttttccaagattctttgtcattcttcttggactcatcgggaggcatgggttttaagatacacagtagctcgggtcttacagcgaaataattgatgcttcattgaaagaaaccaggcaaattgaaatgtgtgctatactggccggaaaagagagggatatatggaaaagttgaggttctggttatcagtgtaaatgaatgtgataactacaccattcgaaaccttgtcttaaagcaaggaagccacacccaacatgtgaagcattactggtacacctcatggcctgatcacaagactccagacagtgcccagcccctcctacagctcatgctggatgtagaagaagacagacttgcttcccagggccgagggcctgtggttgtccactgcagtgcaggaataggtagaacagggtgttttattgctacatccattggctgtcaacagctgaaagaagaaggagttgtggatgcactaagcattgtctgccagcttcgtatggatagaggtggaatggtgcaaaccagtgagcagtatgaatttgtgcaccatgctctgtgcctgtatgagagcagactttcagcagagactgtccagtgagtcattgaagacttgtcagaccatcaatctcttggggtgattaatcaaattacccacccaaggcttctagaaggagcttcctgcaatggaaggaaggagaagctctgaagcccatgtatggcatggattgtggaagactgggcaacatatttaagatttccagctccttgtgtatatgaatgcatttgtaagcatcccccaaattattctgaaggttttttgatgatggaggtatgataggtttatcacacagcctaaggcagattttgttttgtctgtactgactctatctgccacacagaatgtatgtatgtaatattcagtaataaatgtcatcaggtgatgactggatgagctgctgaagacattcgtattatgtgttagatgctttaatgtttgcaaaatctgtcttgtgaatggactgtcagctgttaaactgttcctgttttgaagtgctattacctttctcagttaccagaatcttgctgctaaagttgcaagtgattgataatggatttttaacagagaagtctttgtttttgaaaaacaaaaatcaaaaacagtaactattttatatggaaatgtgtcttgataatattacctattaaatgtgtatttatagtccctcctatcaaacaattacagagcacaatgattgtcattgggtatatatgtatttactctctattattgggcataaaggtggcttctgctccagaactctatccactgtatttccacatcgtgagtcattttactttaaaagggaaaaacaaatttgtagcaactctgaagtatcaagagttttaactacttgtctctcttttgctaagaagggatttttgaatatgctatctacctggaatctctctctcaacaaaaggtatatgccttcaggaatgatataatctgtcccattttcgaggctccttataaggacatttccatgtatgtccttacatttctgaaagctttcaatcttcaagagacaaaaaaaattaaaataactaccctcagcaaacactagctgttctgctcatatatgaatttttaatgcagcaatgttgactttgtttcatactgccaataaactcttaatactaaa

SEQ ID NO: 17025 - DNA, 2966 bp, Homo sapiens
  source 1..2966: mol_type = unassigned DNA
gaaccaggtagtttccaagagagacgctgagggatgtttagaaagcctgggacctgcagatgccatgtcaggcacgcttgctcctgcataggagactaaataatctcgatatataaggatggcagtctgttgtcttagatcagtttgagaagcagctctggcagcggggggtgtaggtgtgttgcactacactgaatggaataaggctaaaaatatgtttagtgtctgataagaacgccagttttctcaagctctcatttaacgtcggactttctgttttgcttttaaagaaaaatgttttacaagggcagcatgaagcggacaaaatctggagcaaagaaggattttatgctgttgtcatttttctcagcatctttgttattatagtaacgtgtttgatgattctttacagattaaaagaaagatttcagctttccttaagacaagacaaagagaaaaaccaggagatccacctatcgcccatcacattacagccagcactgtccgaggcaaagacagtccacagcatggtccaacctgagcaggccccaaaggtactgaatgttgtcgtggaccctcaaggccgaggtgctcctgagatcaaagctaccaccgctacctctgtttgcccttctcctttcaaaatgaagcccataggacttcaagagaggaaataccaatgaactttgtggatcccaaagaaattgatattccgcgtcatggaactaaaaatcgctataagaccattttaccaaatcccctcagcagagtgtgtttaagaccaaaaaatgtaaccgattcattgagcacctacattaatgctaattatattaggggctacagtggcaaggagaaagccttcattgccacgcagggccccatgatcaacaccgtggatgatttctggcagatggtttggcaggaagacagccctgtgattgttatgatcacaaaactcaaagaaaaaaatgagaagaggaggcttacagggctggcacctgcccacacctggcattcgacatttccctgggctaagctgagtgggagcagatgcccccatcctatgaccagggcctgtgcaggagccatcacaccaccttgctgatgatgacacctagttcttcaatttcacactggacttcatctcccttcttgagaaagacagaaggtttcctgaatacaccaacacctggggaggtcccagtcaggatgacatcccctgggtaaaagaaatgtgtgctatactggccggaaaagagagggatatatggaaaagttgaggttctggttatcagtgtaaatgaatgtgataactacaccattcgaaaccttgtcttaaagcaaggaagccacacccaacatgtgaagcattactggtacacctcatggcctgatcacaagactccagacagtgcccagcccctcctacagctcatgctggatgtagaagaagacagacttgcttcccagggccgagggcctgtggttgtccactgcagtgcaggaataggtagaacagggtgttttattgctacatccattggctgtcaacagctgaaagaagaaggagttgtggatgcactaagcattgtctgccagcttcgtatggatagaggaagaaactaaagtgcaaggggtttcgaggaatttgtccaagatgcatacagctaagaattggcagaggagggatttgaactcaccttggctgatgccaaatccaagtacttgatcattaggctgtaccacctccccagtaatgttacacagaggtggaatggtgcaaaccagtgagcagtatgaatttgtgcaccatgctctgtgcctgtatgagagcagactttcagcagagactgtccagtgagtcattgaagacttgtcagaccatcaatctcttggggtgattaatcaaattacccacccaaggcttctagaaggagcttcctgcaatggaaggaaggagaagctctgaagcccatgtatggcatggattgtggaagactgggcaacatatttaagatttccagctccttgtgtatatgaatgcatttgtaagcatcccccaaattattctgaaggttttttgatgatggaggtatgataggtttatcacacagcctaaggcagattttgttttgtctgtactgactctatctgccacacagaatgtatgtatgtaatattcagtaataaatgtcatcaggtgatgactggatgagctgctgaagacattcgtattatgtgttagatgctttaatgtttgcaaaatctgtcttgtgaatggactgtcagctgttaaactgttcctgttttgaagtgctattacctttctcagttaccagaatcttgctgctaaagttgcaagtgattgataatggatttttaacagagaagtctttgtttttgaaaaacaaaaatcaaaaacagtaactattttatatggaaatgtgtcttgataatattacctattaaatgtgtatttatagtccctcctatcaaacaattacagagcacaatgattgtcattgggtatatatgtatttactctctattattgggcataaaggtggcttctgctccagaactctatccactgtatttccacatcgtgagtcattttactttaaaagggaaaaacaaatttgtagcaactctgaagtatcaagagttttaactacttgtctctcttttgctaagaagggatttttgaatatgctatctacctggaatctctctctcaacaaaaggtatatgccttcaggaatgatataatctgtcccattttcgaggctccttataaggacatttccatgtatgtccttacatttctgaaagctttcaatcttcaagagacaaaaaaaattaaaataactaccctcagcaaacactagctgttctgctcatatatgaatttttaatgcagcaatgttgactttgtttcatactgccaataaactcttaatactaaa

SEQ ID NO: 17026 - DNA, 1729 bp, Homo sapiens
  source 1..1729: mol_type = unassigned DNA
gaaataattgatgcttcattgaaagaaaccaggcaaattgaaatgtgtgctatactggccggaaaagagagggatatatggaaaagttgaggttctggttatcagtgtaaatgaatgtgataactacaccattcgaaaccttgtcttaaagaaataaattgccagcaagatgggggtgataaaaggcattcagtattgtggtttggatgacttttagttctacaagtgaatgaggcatttggtggctgttgctattttcagcaaggaagccacacccaacatgtgaagcattactggtacacctcatggcctgatcacaagactccagacagtgcccagcccctcctacagctcatgctggatgtagaagaagacagacttgcttcccagggccgagggcctgtggttgtccactgcagtgcaggaataggtagaacagggtgttttattgctacatccattggctgtcaacagctgaaagaagaaggagttgtggatgcactaagcattgtctgccagcttcgtatggatagaggtggaatggtgcaaaccagtgagcagtatgaatttgtgcaccatgctctgtgcctgtatgagagcagactttcagcagagactgtccagtgagtcattgaagacttgtcagaccatcaatctcttggggtgattaatcaaattacccacccaaggcttctagaaggagcttcctgcaatggaaggaaggagaagctctgaagcccatgtatggcatggattgtggaagactgggcaacatatttaagatttccagctccttgtgtatatgaatgcatttgtaagcatcccccaaattattctgaaggttttttgatgatggaggtatgataggtttatcacacagcctaaggcagattttgttttgtctgtactgactctatctgccacacagaatgtatgtatgtaatattcagtaataaatgtcatcaggtgatgactggatgagctgctgaagacattcgtattatgtgttagatgctttaatgtttgcaaaatctgtcttgtgaatggactgtcagctgttaaactgttcctgttttgaagtgctattacctttctcagttaccagaatcttgctgctaaagttgcaagtgattgataatggatttttaacagagaagtctttgtttttgaaaaacaaaaatcaaaaacagtaactattttatatggaaatgtgtcttgataatattacctattaaatgtgtatttatagtccctcctatcaaacaattacagagcacaatgattgtcattgggtatatatgtatttactctctattattgggcataaaggtggcttctgctccagaactctatccactgtatttccacatcgtgagtcattttactttaaaagggaaaaacaaatttgtagcaactctgaagtatcaagagttttaactacttgtctctcttttgctaagaagggatttttgaatatgctatctacctggaatctctctctcaacaaaaggtatatgccttcaggaatgatataatctgtcccattttcgaggctccttataaggacatttccatgtatgtccttacatttctgaaagctttcaatcttcaagagacaaaaaaaattaaaataactaccctcagcaaacactagctgttctgctcatatatgaatttttaatgcagcaatgttgactttgtttcatactgccaataaactcttaatact

SEQ ID NO: 17027 - DNA, 3529 bp, Homo sapiens
  source 1..3529: mol_type = unassigned DNA
accaccccagcgatggagcctactctgctccaagccgccgctaagacccggagaagcggaatttcactttgaaattcccttgcctcgtgagggccggcgctgggcatgctcagtagccgcggcgctgctgctgggctgctgggctggcgcggagtccaccctgccgtctccgccttggcttctgggcgtccagaaggccaggcatttgccgcctctgagcgcttctgttccccttacccgcaacctcctactgctcttcctctctccctctcttagggaggttgaagctggtgctggtttctgtcggcgccacagactgactgctctgcaaaccccagccgaggacctgaatcccggagactagaagacccttggcggtggctctttctaatagcactttacctgaagtggggtcgtggtggagtttctcctccacctctcaatgcaaacactatgcggagagcagtctgcttccctgcgctgtgcctgctccttaatcttcacgctgcagggtgcttttcaggaaacaatgatcattttttggcaattaatcagaagaagagtgggaagccggtattcatttataagcattcacaagacattgagaagagcctggatatagccccacaaaaaatctacagacatagctaccattcctcttccgaagctcaagtaagcaaacgccaccagattgtcaattcagcatttcctagacccgcatatgacccgtctctcaatctgctggccatggatggtcaagatcttgaagtggaaaatctcccaatcccagcagcaaatgtaattgtggtgacactgcaaatggatgtaaacaagctgaacataaccttgcttcggatcttccgccaaggagtggctgcagctttaggactcttaccccagcaagtgcacatcaatcgcctcattggaaagaagaacagtattgaactgtttgtgtctcccataaaccgaaaaacaggaatttctgatgctctgccctctgaggaagttcttcgttcacttaatatcaatgttttgcatcaaagtttatcccagtttggaattacagaagtctctcctgagaaaaatgttttacaagggcagcatgaagcggacaaaatctggagcaaagaaggattttatgctgttgtcatttttctcagcatctttgttattatagtaacgtgtttgatgattctttacagattaaaagaaagatttcagctttccttaagacaagacaaagagaaaaaccaggagatccacctatcgcccatcacattacagccagcactgtccgaggcaaagacagtccacagcatggtccaacctgagcaggccccaaaggtactgaatgttgtcgtggaccctcaaggccgaggtgctcctgagatcaaagctaccaccgctacctctgtttgcccttctcctttcaaaatgaagcccataggacttcaagagagaagagggtccaacgtatctcttacattggacatgagtagcttggggaacattgaaccctttgtgtctataccaacaccacgggagaaggtagcaatggagtatctgcagtcagccagccgaattctcacaaggtctcagctgagggacgtcgtggcaagttcacatttactccaaagtgaattcatggaaataccaatgaactttgtggatcccaaagaaattgatattccgcgtcatggaactaaaaatcgctataagaccattttaccaaatcccctcagcagagtgtgtttaagaccaaaaaatgtaaccgattcattgagcacctacattaatgctaattatattaggggctacagtggcaaggagaaagccttcattgccacgcagggccccatgatcaacaccgtggatgatttctggcagatggtttggcaggaagacagccctgtgattgttatgatcacaaaactcaaagaaaaaaatgagaaatgtgtgctatactggccggaaaagagagggatatatggaaaagttgaggttctggttatcagtgtaaatgaatgtgataactacaccattcgaaaccttgtcttaaagcaaggaagccacacccaacatgtgaagcattactggtacacctcatggcctgatcacaagactccagacagtgcccagcccctcctacagctcatgctggatgtagaagaagacagacttgcttcccagggccgagggcctgtggttgtccactgcagtgcaggaataggtagaacagggtgttttattgctacatccattggctgtcaacagctgaaagaagaaggagttgtggatgcactaagcattgtctgccagcttcgtatggatagaggtggaatggtgcaaaccagtgagcagtatgaatttgtgcaccatgctctgtgcctgtatgagagcagactttcagcagagactgtccagtgagtcattgaagacttgtcagaccatcaatctcttggggtgattaatcaaattacccacccaaggcttctagaaggagcttcctgcaatggaaggaaggagaagctctgaagcccatgtatggcatggattgtggaagactgggcaacatatttaagatttccagctccttgtgtatatgaatgcatttgtaagcatcccccaaattattctgaaggttttttgatgatggaggtatgataggtttatcacacagcctaaggcagattttgttttgtctgtactgactctatctgccacacagaatgtatgtatgtaatattcagtaataaatgtcatcaggtgatgactggatgagctgctgaagacattcgtattatgtgttagatgctttaatgtttgcaaaatctgtcttgtgaatggactgtcagctgttaaactgttcctgttttgaagtgctattacctttctcagttaccagaatcttgctgctaaagttgcaagtgattgataatggatttttaacagagaagtctttgtttttgaaaaacaaaaatcaaaaacagtaactattttatatggaaatgtgtcttgataatattacctattaaatgtgtatttatagtccctcctatcaaacaattacagagcacaatgattgtcattgggtatatatgtatttactctctattattgggcataaaggtggcttctgctccagaactctatccactgtatttccacatcgtgagtcattttactttaaaagggaaaaacaaatttgtagcaactctgaagtatcaagagttttaactacttgtctctcttttgctaagaagggatttttgaatatgctatctacctggaatctctctctcaacaaaaggtatatgccttcaggaatgatataatctgtcccattttcgaggctccttataaggacatttccatgtatgtccttacatttctgaaagctttcaatcttcaagagacaaaaaaaattaaaataactaccctcagcaaacactagctgttctgctcatatatgaatttttaatgcagcaatgttgactttgtttcatactgccaataaactcttaatact

SEQ ID NO: 17028 - DNA, 2037 bp, Homo sapiens
  source 1..2037: mol_type = unassigned DNA
aaacagtaccaggcggttacctccaggtgactaaatgaggcttcatctcagcacacaagcttagaaagctttacgattagtcctgcttgctatggtaaggaaataacacaaagaagagtgcaaatggaagtcgacttcatcacaacatgcagtcaatttccaaacagacactgcaaatggatgtaaacaagctgaacataaccttgcttcggatcttccgccaaggagtggctgcagctttaggactcttaccccagcaagtgcacatcaatcgcctcattggaaagaagaacagtattgaactgtttgtgtctcccataaaccgaaaaacaggaatttctgatgctctgccctctgaggaagttcttcgttcacttaatatcaatgttttgcatcaaagtttatcccagtttggaattacagaagtctctcctgagaaaaatgttttacaagggcagcatgaagcggacaaaatctggagcaaagaaggattttatgctgttgtcatttttctcagcatctttgttattatagtaacgtgtttgatgattctttacagattaaaagaaagatttcagctttccttaagacaagacaaagagaaaaaccaggagatccacctatcgcccatcacattacagccagcactgtccgaggcaaagacagtccacagcatggtccaacctgagcaggccccaaaggtactgaatgttgtcgtggaccctcaaggccgaggtgctcctgagatcaaagctaccaccgctacctctgtttgcccttctcctttcaaaatgaagcccataggacttcaagagagaagagggtccaacgtatctcttacattggacatgagtagcttggggaacattgaaccctttgtgtctataccaacaccacgggagaaggtagcaatggagtatctgcagtcagccagccgaattctcacaaggtctcagctgagggacgtcgtggcaagttcacatttactccaaagtgaattcatggaaataccaatgaactttgtggatcccaaagaaattgatattccgcgtcatggaactaaaaatcgctataagaccattttaccaaatcccctcagcagagtgtgtttaagaccaaaaaatgtaaccgattcattgagcacctacattaatgctaattatattaggggctacagtggcaaggagaaagccttcattgccacgcagggccccatgatcaacaccgtggatgatttctggcagatggtttggcaggaagacagccctgtgattgttatgatcacaaaactcaaagaaaaaaatgagaaatgtgtgctatactggccggaaaagagagggatatatggaaaagttgaggttctggttatcagtgtaaatgaatgtgataactacaccattcgaaaccttgtcttaaagcaaggaagccacacccaacatgtgaagcattactggtacacctcatggcctgatcacaagactccagacagtgcccagcccctcctacagctcatgctggatgtagaagaagacagacttgcttcccagggccgagggcctgtggttgtccactgcagtgcaggaataggtagaacagggtgttttattgctacatccattggctgtcaacagctgaaagaagaaggagttgtggatgcactaagcattgtctgccagcttcgtatggatagaggtggaatggtgcaaaccagtgagcagtatgaatttgtgcaccatgctctgtgcctgtatgagagcagactttcagcagagactgtccagtgagtcattgaagacttgtcagaccatcaatctcttggggtgattaatcaaattacccacccaaggcttctagaaggagcttcctgcaatggaaggaaggagaagctctgaagcccatgtatggcatggattgtggaagactgggcaacatatttaagatttccagctccttgtgtatatgaatgcatttgtaagcatcccccaaattattctgaaggttttttgatgatggaggtatgataggtttatcacacag

SEQ ID NO: 17029 - DNA, 1603 bp, Homo sapiens
  source 1..1603: mol_type = unassigned DNA
aaaagtaaagaggtagtacagcacgtaatccagggtgctgatgttgtgggaggggacttaaaacagagtaaggaaatcagaaacaatttcctccacacagaaaagaacagaactctcttacctatgaaccagaaaaatgttttacaagggcagcatgaagcggacaaaatctggagcaaagaaggattttatgctgttgtcatttttctcagcatctttgttattatagtaacgtgtttgatgattctttacagattaaaagaaagatttcagctttccttaagacaagacaaagagaaaaaccaggagatccacctatcgcccatcacattacagccagcactgtccgaggcaaagacagtccacagcatggtccaacctgagcaggccccaaaggtactgaatgttgtcgtggaccctcaaggccgaggtgctcctgagatcaaagctaccaccgctacctctgtttgcccttctcctttcaaaatgaagcccataggacttcaagagagaagagggtccaacgtatctcttacattggacatgagtagcttggggaacattgaaccctttgtgtctataccaacaccacgggagaaggtagcaatggagtatctgcagtcagccagccgaattctcacaaggtctcagctgagggacgtcgtggcaagttcacatttactccaaagtgaattcatggaaataccaatgaactttgtggatcccaaagaaattgatattccgcgtcatggaactaaaaatcgctataagaccattttaccaaatcccctcagcagagtgtgtttaagaccaaaaaatgtaaccgattcattgagcacctacattaatgctaattatattaggggctacagtggcaaggagaaagccttcattgccacgcagggccccatgatcaacaccgtggatgatttctggcagatggtttggcaggaagacagccctgtgattgttatgatcacaaaactcaaagaaaaaaatgagaaatgtgtgctatactggccggaaaagagagggatatatggaaaagttgaggttctggttatcagtgtaaatgaatgtgataactacaccattcgaaaccttgtcttaaagcaaggaagccacacccaacatgtgaagcattactggtacacctcatggcctgatcacaagactccagacagtgcccagcccctcctacagctcatgctggatgtagaagaagacagacttgcttcccagggccgagggcctgtggttgtccactgcagtgcaggaataggtagaacagggtgttttattgctacatccattggctgtcaacagctgaaagaagaaggagttgtggatgcactaagcattgtctgccagcttcgtatggatagaggtggaatggtgcaaaccagtgagcagtatgaatttgtgcaccatgctctgtgcctgtatgagagcagactttcagcagagactgtccagtgagtcattgaagacttgtcagaccatcaatctcttggggtgattaatcaaattacccacccaaggcttctagaaggagcttcctgcaatggaaggaaggagaagctctgaagcccatgtatggcat

SEQ ID NO: 17030 - DNA, 862 bp, Homo sapiens
  source 1..862: mol_type = unassigned DNA
atgcaccagataatcaatacataacaggtttctacttactggttattggcattctaaggaactttaaaaagggtaaatctgtttaatatattcttttttgttttcttcattagatcccctcagcagagtgtgtttaagaccaaaaaatgtaaccgattcattgagcacctacattaatgctaattatattaggggctacagtggcaaggagaaagccttcattgccacgcagggccccatgatcaacaccgtggatgatttctggcagatggtttggcaggaagacagccctgtgattgttatgatcacaaaactcaaagaaaaaaatgagaaatgtgtgctatactggccggaaaagagagggatatatggaaaagttgaggttctggttatcagtgtaaatgaatgtgataactacaccattcgaaaccttgtcttaaagcaaggaagccacacccaacatgtgaagcattactggtacacctcatggcctgatcacaagactccagacagtgcccagcccctcctacagctcatgctggatgtagaagaagacagacttgcttcccagggccgagggcctgtggttgtccactgcagtgcaggaataggtagaacagggtgttttattgctacatccattggctgtcaacagctgaaagaagaaggagttgtggatgcactaagcattgtctgccagcttcgtatggatagaggtggaatggtgcaaaccagtgagcagtatgaatttgtgcaccatgctctgtgcctgtatgagagcagactttcagcagagactgtccagtgagtcattgaagacttgtcagaccatcaatctcttggggtgattaatcaaattacc

SEQ ID NO: 17031 - DNA, 1374 bp, Homo sapiens
  source 1..1374: mol_type = unassigned DNA
aatgcaccacaagcttttgtttgcacttgtttcacttttgtttaaaagtaaagaggtagtacagcacgtaatccagggtgctgatgttgtgggaggggacttaaaacagagtaaggaaatcagaaacaatttcctccacacagaaaagaacagaactctcttacctatgaaccagaaaaatgttttacaagggcagcatgaagcggacaaaatctggagcaaagaaggattttatgctgttgtcatttttctcagcatctttgttattatagtaacgtgtttgatgattctttacagattaaaagaaagatttcagctttccttaagacaagacaaagagaaaaaccaggagatccacctatcgcccatcacattacagccagcactgtccgaggcaaagacagtccacagcatggtccaacctgagcaggccccaaaggtactgaatgttgtcgtggaccctcaaggccgaggtgctcctgagatcaaagctaccaccgctacctctgtttgcccttctcctttcaaaatgaagcccataggacttcaagagagaagagggtccaacgtatctcttacattggacatgagtagcttggggaacattgaaccctttgtgtctataccaacaccacgggagaaggtagcaatggagtatctgcagtcagccagccgaattctcacaaggtctcagctgagggacgtcgtggcaagttcacatttactccaaagtgaattcatggaaataccaatgaactttgtggatcccaaagaaattgatattccgcgtcatggaactaaaaatcgctataagaccattttaccaaatcccctcagcagagtgtgtttaagaccaaaaaatgtaaccgattcattgagcacctacattaatgctaattatattaggggctacagtggcaaggagaaagccttcattgccacgcagggccccatgatcaacaccgtggatgatttctggcagatggtttggcaggaagacagccctgtgattgttatgatcacaaaactcaaagaaaaaaatgagaaatgtgtgctatactggccggaaaagagagggatatatggaaaagttgaggttctggttatcagtgtaaatgaatgtgataactacaccattcgaaaccttgtcttaaagaaataaattgccagcaagatgggggtgataaaaggcattcagtattgtggtttggatgacttttagttctacaagtgaatgaggcatttggtggctgttgctattttcagcaaggaagccacacccaacatgtgaagcattactggtacacctcatggcctgatcacaagactccagacagtgcccagcccctcctacagctcatgctggatgtagaa

SEQ ID NO: 17032 - DNA, 1024 bp, Homo sapiens
  source 1..1024: mol_type = unassigned DNA
acttgtttcacttttgtttaaaagtaaagaggtagtacagcacgtaatccagggtgctgatgttgtgggaggggacttaaaacagagtaaggaaatcagaaacaatttcctccacacagaaaagaacagaactctcttacctatgaaccaggtagtttccaagagagacgctgagggatgtttagaaagcctgggacctgcagatgccatgtcaggcacgcttgctcctgcataggagactaaataatctcgatatataaggatggcagtctgttgtcttagatcagtttgagaagcagctctggcagcggggggtgtagaaaaatgttttacaagggcagcatgaagcggacaaaatctggagcaaagaaggattttatgctgttgtcatttttctcagcatctttgttattatagtaacgtgtttgatgattctttacagattaaaagaaagatttcagctttccttaagacaagacaaagagaaaaaccaggagatccacctatcgcccatcacattacagccagcactgtccgaggcaaagacagtccacagcatggtccaacctgagcaggccccaaaggtactgaatgttgtcgtggaccctcaaggccgaggtgctcctgagatcaaagctaccaccgctacctctgtttgcccttctcctttcaaaatgaagcccataggacttcaagagagaagagggtccaacgtatctcttacattggacatgagtagcttggggaacattgaaccctttgtgtctataccaacaccacgggagaaggtagcaatggagtatctgcagtcagccagccgaattctcacaaggtctcagctgagggacgtcgtggcaagttcacatttactccaaagtgaattcatggaaataccaatgaactttgtggatcccaaagaaattgatattccgcgtcatggaactaaaaatcgctataagaccattttaccaaatcccctcagcagagtgtgtttaagaccaaaaaatgtaaccgattcattgag

SEQ ID NO: 17033 - DNA, 2632 bp, Homo sapiens
  source 1..2632: mol_type = unassigned DNA
aatgcaccacaagcttttgtttgcacttgtttcacttttgtttaaaagtaaagaggtagtacagcacgtaatccagggtgctgatgttgtgggaggggacttaaaacagagtaaggaaatcagaaacaatttcctccacacagaaaagaacagaactctcttacctatgaaccagaaaaatgttttacaagggcagcatgaagcggacaaaatctggagcaaagaaggattttatgctgttgtcatttttctcagcatctttgttattatagtaacgtgtttgatgattctttacagattaaaagaaagatttcagctttccttaagacaagacaaagagaaaaaccaggagatccacctatcgcccatcacattacagccagcactgtccgaggcaaagacagtccacagcatggtccaacctgagcaggccccaaaggtactgaatgttgtcgtggaccctcaaggccgaggtgctcctgagatcaaagctaccaccgctacctctgtttgcccttctcctttcaaaatgaagcccataggacttcaagagagaagagggtccaacgtatctcttacattggacatgagtagcttggggaacattgaaccctttgtgtctataccaacaccacgggagaaggtagcaatggagtatctgcagtcagccagccgaattctcacaaggtctcagctgagggacgtcgtggcaagttcacatttactccaaagtgaattcatggaaataccaatgaactttgtggatcccaaagaaattgatattccgcgtcatggaactaaaaatcgctataagaccattttaccaaatcccctcagcagagtgtgtttaagaccaaaaaatgtaaccgattcattgagcacctacattaatgctaattatattaggggctacagtggcaaggagaaagccttcattgccacgcagggccccatgatcaacaccgtggatgatttctggcagatggtttggcaggaagacagccctgtgattgttatgatcacaaaactcaaagaaaaaaatgagaaatgtgtgctatactggccggaaaagagagggatatatggaaaagttgaggttctggttatcagtgtaaatgaatgtgataactacaccattcgaaaccttgtcttaaagcaaggaagccacacccaacatgtgaagcattactggtacacctcatggcctgatcacaagactccagacagtgcccagcccctcctacagctcatgctggatgtagaagaagacagacttgcttcccagggccgagggcctgtggttgtccactgcagtgcaggaataggtagaacagggtgttttattgctacatccattggctgtcaacagctgaaagaagaaggagttgtggatgcactaagcattgtctgccagcttcgtatggatagaggtggaatggtgcaaaccagtgagcagtatgaatttgtgcaccatgctctgtgcctgtatgagagcagactttcagcagagactgtccagtgagtcattgaagacttgtcagaccatcaatctcttggggtgattaatcaaattacccacccaaggcttctagaaggagcttcctgcaatggaaggaaggagaagctctgaagcccatgtatggcatggattgtggaagactgggcaacatatttaagatttccagctccttgtgtatatgaatgcatttgtaagcatcccccaaattattctgaaggttttttgatgatggaggtatgataggtttatcacacagcctaaggcagattttgttttgtctgtactgactctatctgccacacagaatgtatgtatgtaatattcagtaataaatgtcatcaggtgatgactggatgagctgctgaagacattcgtattatgtgttagatgctttaatgtttgcaaaatctgtcttgtgaatggactgtcagctgttaaactgttcctgttttgaagtgctattacctttctcagttaccagaatcttgctgctaaagttgcaagtgattgataatggatttttaacagagaagtctttgtttttgaaaaacaaaaatcaaaaacagtaactattttatatggaaatgtgtcttgataatattacctattaaatgtgtatttatagtccctcctatcaaacaattacagagcacaatgattgtcattgggtatatatgtatttactctctattattgggcataaaggtggcttctgctccagaactctatccactgtatttccacatcgtgagtcattttactttaaaagggaaaaacaaatttgtagcaactctgaagtatcaagagttttaactacttgtctctcttttgctaagaagggatttttgaatatgctatctacctggaatctctctctcaacaaaaggtatatgccttcaggaatgatataatctgtcccattttcgaggctccttataaggacatttccatgtatgtccttacatttctgaaagctttcaatcttcaagagacaaaaaaaattaaaataactaccctcagcaaacactagctgttctgctcatatatgaatttttaatgcagcaatgttgactttgtttcatactgccaataaactcttaatactaaatactg

SEQ ID NO: 17034 - DNA, 12453 bp, Homo sapiens
  source 1..12453: mol_type = unassigned DNA
atggcgagcctcgccgcgctcgccctcagcctgctcctgaggctgcagctgccgccactgcccggcgcccgggctcagagcgccgcaggtggctgttcctttgatgagcactacagcaactgtggttatagtgtggctctagggaccaatgggttcacctgggagcagattaacacatgggagaaaccaatgctggaccaggcagtgcccacaggatctttcatgatggtgaacagctctgggagagcctctggccagaaggcccaccttctcctgccaaccctgaaggagaatgacacccactgcatcgacttccattactacttctccagccgtgacaggtccagcccaggggccttgaacgtctacgtgaaggtgaatggtggcccccaagggaaccctgtgtggaatgtgtccggggtcgtcactgagggctgggtgaaggcagagctcgccatcagcactttctggccacatttctatcaggtgatatttgaatccgtctcattgaagggtcatcctggctacatcgccgtggacgaggtccgggtccttgctcatccatgcagaaaagcacctcattttctgcgactccaaaacgtggaggtgaatgtggggcagaatgccacatttcagtgcattgctggtgggaagtggtctcagcatgacaagctttggctccagcaatggaatggcagggacacggccctgatggtcacccgtgtggtcaaccacaggcgcttctcagccacagtcagtgtggcagacactgcccagcggagcgtcagcaagtaccgctgtgtgatccgctctgatggtgggtctggtgtgtccaactacgcggagctgatcgtgaaagagcctcccacgcccattgctcccccagagctgctggctgtgggggccacatacctgtggatcaagccaaatgccaactccatcatcggggatggccccatcatcctgaaggaagtggaatatcgcaccaccacaggcacgtgggcagagacccacatagtcgactctcccaactataagctgtggcatctggaccccgatgttgagtatgagatccgagtgctcctcacacgaccaggtgaggggggtacgggaccgccagggcctcccctcaccaccaggaccaagtgtgcagatccggtacatggcccacagaacgtggaaatcgtagacatcagagcccggcagctgaccctgcagtgggagcccttcggctacgcggtgacccgctgccatagctacaacctcaccgtgcagtaccagtatgtgttcaaccagcagcagtacgaggccgaggaggtcatccagacctcctcccactacaccctgcgaggcctgcgccccttcatgaccatccggctgcgactcttgctgtctaaccccgagggccgaatggagagcgaggagctggtggtgcagactgaggaagacgttccaggagctgttcctctagaatccatccaaggggggccctttgaggagaagatctacatccagtggaaacctcccaatgagaccaatggggtcatcacgctctacgagatcaactacaaggctgtcggctcgctggacccaagtgctgacctctcgagccagagggggaaagtgttcaagctccggaatgaaacccaccacctctttgtgggtctgtacccagggaccacctattccttcaccatcaaggccagcacagcaaagggctttgggccccctgtcaccactcggattgccaccaaaatttcagctccatccatgcctgagtacgacacagacaccccattgaatgagacagacacgaccatcacagtgatgctgaaacccgctcagtcccggggagctcctgtcagtgtttatcagctggttgtcaaggaggagcgacttcagaagtcacggagggcagctgacattattgagtgcttttcggtgcccgtgagctatcggaatgcctccagcctcgattctctacactactttgctgctgagttgaagcctgccaacctgcctgtcacccagccatttacagtgggtgacaataagacatacaatggctactggaaccctcctctctctcccctgaaaagctacagcatctacttccaggcactcagcaaagccaatggagagaccaaaatcaactgtgttcgtctggctacaaaaggtgcctccacccagaattctaacactgtggagccagagaagcaggtggacaacaccgtgaagatggctggcgtgatcgctggcctcctcatgttcatcatcattctcctgggcgtgatgctcaccatcaaaaggagaagaaatgcttattcctactcctattacttgaagctggccaagaagcagaaggagacccagagtggagcccagagggagatggggcctgtggcctctgccgacaaacccaccaccaagctcagcgccagccgcaatgatgaaggcttctcttctagttctcaggacgtcaacggattcacagatggcagccgcggggagctttcccagcccaccctcacgatccagactcatccctaccgcacctgtgaccctgtggagatgagctacccccgggaccagttccaacccgccatccgggtggctgacttgctgcagcacatcacgcagatgaagagaggccagggctacgggttcaaggaggaatacgaggccttaccagaggggcagacagcttcgtgggacacagccaaggaggatgaaaaccgcaataagaatcgatatgggaacatcatatcctacgaccattcccgggtgaggctgctggtgctggatggagacccgcactctgactacatcaatgccaactacattgacggataccatcgacctcggcactacattgcgactcaaggtccgatgcaggagactgtaaaggacttttggagaatgatctggcaggagaactccgccagcatcgtcatggtcacaaacctggtggaagtgggcagggtgaaatgtgtgcgatactggccagatgacacggaggtctacggagacattaaagtcaccctgattgaaacagagcccctggcagaatacgtcatacgcaccttcacagtccagaagaaaggctaccatgagatccgggagctccgcctcttccacttcaccagctggcctgaccacggcgttccctgctatgccactggccttctgggcttcgtccgccaggtcaagttcctcaaccccccggaagctgggcccatagtggtccactgcagtgctggggctgggcggactggctgcttcattgccattgacaccatgcttgacatggccgagaatgaaggggtggtggacatcttcaactgcgtgcgtgagctccgggcccaaagggtcaacctggtacagacagaggagcaatatgtgtttgtgcacgatgccatcctggaagcgtgcctctgtggcaacactgccatccctgtgtgtgagttccgttctctctactacaatatcagcaggctggacccccagacaaactccagccaaatcaaagatgaatttcagaccctcaacattgtgacaccccgtgtgcggcccgaggactgcagcattgggctcctgccccggaaccatgataagaatcgaagtatggacgtgctgcctctggaccgctgcctgcccttccttatctcagtggacggagaatccagcaattacatcaacgcagcactgatggatagccacaagcagcctgccgccttcgtggtcacccagcaccctctacccaacaccgtggcagacttctggaggctggtgttcgattacaactgctcctctgtggtgatgctgaatgagatggacactgcccagttctgtatgcagtactggcctgagaagacctccgggtgctatgggcccatccaggtggagttcgtctccgcagacatcgacgaggacatcatccacagaatattccgcatctgtaacatggcccggccacaggatggttatcgtatagtccagcacctccagtacattggctggcctgcctaccgggacacgcccccctccaagcgctctctgctcaaagtggtccgacgactggagaagtggcaggagcagtatgacgggagggagggacgtactgtggtccactgcctaaatgggggaggccgtagtggaaccttctgtgccatctgcagtgtgtgtgagatgatccagcagcaaaacatcattgacgtgttccacatcgtgaaaacactgcgtaacaacaaatccaacatggtggagaccctggaacagtataaatttgtatacgaggtggcactggaatatttaagctccttttagctcaatgggatggggaacctgccggagtccagaggctgctgtgaccaagcccccttttgtgtgaatggcagtaactgggctcaggagctctgaggtggcaccctgcctgactccaaggagaagactggtggccctgtgttccacggggggctctgcaccttctgaggggtctcctgttgccgtgggagatgctgctccaaaaggcccaggcttccttttcaacctaaccagccacagccaagggcccaagcagaagtacacccacaagcaaggccttggatttctggctcccagaccacctgcttttgttctgagtttgtggatctcttggcaagccaactgtgcaggtgctggggagtgggaggctcccctgccctccttctccttaggagtggaggagatgtgtgttctgctcctctacgtcatggaaaagattgaggctcttgggggtcactgctctgctgccccctgcaacctccttcaggggcctctggcaccagacatttgcagtctggaccagtgtgaccttacgatgttccctaggccacaagagaggccccccatcctcacacctaacctgcatggggcttcgcccacaaccattctgtaccccttccccagcctgggccttgaccgtccagcattcactggccggccagctgtgtccacagcagtttttgataaaggtgttctttgcttttttgtgtggtcagtgggagggggtggaactgcagggaacttctctgctcctccttgtctttgtaaaaagggaccacctccctggggcagggcttgggctgacctgtaggatgtaacccctgtgtttctttggtggtagctttctttggaagagacaaacaagataagatttgattattttccaaagtgtatgtgaaaagaaactttcttttggagggtgtaaaatcttagtctcttatgtcaaaaagaagggggcgggggagtttgagtatgtacctctaagacaaatctctcgggccttttattttttcctggcaatgtccttaaaagctcccaccctgggacagcatgccactgagcaaggagagatgggtgagcctgaagatggtccctttggtttctggggcaaatagagcaccagctttgtgcataatttggatgtccaaatttgaactccttcctaaagaaacccagcagccaccttgaaaaaggccattgtggagcccattatactttgatttaaaataggccaagagaatcaggcctggagatctagggtcttgtccaaagtgtgagtgagtcaatgagagggaaccaacatttgctaagtctctactgtatgccagggatcatgcttggcactttccataggacatttcacacagtccttagaacccccaggagagagctactgacttgttatcatctccatttgatcatctcctccaatgaggaaacccacgcaccttccttagtaatgaaatcctgggttccaaaggggcaggtaatggcaatgagacttctccgtgctgttttcttcatcttctctaagccaagcaattattttatggagggaaaataaggccagaaacttctgagcagataactccacaaatggaaatttagtactttcttcctgatgccagttcttctgggaagcgcagaatttcagatatattttagtaacacattcccagctccccaggaaagccagtctcatctaatttcttagtcagtaaaaacaattccctgttccttcaggctatgaatggaccagccagggaaactctcgaccttgatctctagccagtgcttaggcccaatatctgacagcctcaggtgggctgggacctaggaagctccatcttgaaggctggtctagccccagacagggcatgaggggcagagaattcaagaaggtacagctttggccctcaagagcccactgtatgctggggaaatggaaccatggtgcagtagtgtggagtggatgagtgttccatgagcctaggagcaagaaagtctcttcggcctcgggcttcctggagaaggggacgtccattcctgctgggtcttaacaagcataaaaaggaaaaaaaggaaactcaggcaaagggatccatatgtgcaatggcaaagaaatgtgaaaaggcattgggagaagcagtctgggggaggccagcccagtgcgggcacagcacaacacggggagcagcaagagatgagccagggtccaggagacagatgcccatcgcgagtacagactttgtcctattggcaacaaggagtccatggagctttagagagatgcactcagcttcgtgttggccaagactccttctgggccaatggggctgcctcttttcctttcatcagacactgtgaaaacattcccttaagcgtgcactttttaatatcacatctatttgtctgtctgctcattgttttgttgctggaactaaatatgcaatggatcatgagactcagattctatgagaaacccagggtctctgctttaccacggagcagggtcaccaacccagatctccaggcccatgaggatggaacatgaaaggagccgacaaaagttgcttccattggcatgggctctggagctgtccagaagtccagggacaccagacttgatcaaggaagggctgtcactttagaggttcaaaaggaagtgcctcaaagcaaaggcaagcaaaggaaccccacgatgaacttgctcttttcctttgatgagcctctccccaggtgtatttcagcagaccccggggacccacccccactgggcctgctggcctccctcggctccagcccaatgccccagctggccttccccagcctgcaaggagcctgtagcatggcaaatctgcctgctgtatgctattttcttagatcttggtacatccagacaggatgagggtggagggagagctatttaacacaaatcctaagatttttttctgctcaggaaggggtgaaatagctggcagatacaaaagacagtggcttttatcattttaaatggtaggaatttaaggtgtgacttcagggagaaacaaacttgcaaaaaaaaaaaatctcaggccatgttggggtaacccagcaagggccagtgatgatttcccccagctcatccccttattttcccacaacccaaccattctctaaagcaggacagtgaataggtcttaggccagtgcacacaggaagaaattgaggcttatggatggggatgacttccctaagatcccatgggacaaggatgtggcaaggcttggatgagatggggcaccagtgcccaggaatttgaacattttcctttacccaggaaatctccggagccaacaccaccacccccagggggtctccccaccccaccccatttacagggtgagctcagcctgtcatgagcagaggaaaatattattaatgctctctgagtctttacaacaggagctcttacctcatagatgtgggctctgtttggggaagatgcaaggaagtaatgagaagcccaggaaatttctccacctgtgtttatggcctaaatagcttcaggatgtatcttagctgcactccaacattgcatcctttctggggtgaagaatctgggccaaccaggggtccttgggcctctagaaggccacagtaggcctctctttgtgggaatggaaggggacagtttgcttttagtgctggccctctctgtgggtgtggcctgcaaaggaaccaacagaccctatgctggggactctaacatgtgagctcattaaattcttccagcattctaaaggagggtttgtgattgtcaccatttactgatgaggaaactaaggctcctaggggagaaatcacttgcccacagttccacagctagtgagtgaatgaaccaggatttaaaccggttttttctcactacagagacaatatttttccaccattgtatctcacatttttcccaggaggttacccataacagaagagactagagtggaacagatacgtcagtggataaagctcaaagcaaacaacagtaagcttaaaattccttcatagtctcatgttttacgttcacaattcatgcaaaatttgcattccactttctgatttagccttgttggttttaatatgactctatgaatatttcaaaaaaaaatgtgctctgttcctcatgttgttctgttctgttcaccccgctatgacggaccctaggtcagctggtcttcagcttgaccctagaattgactctaggagcagtgaccctgctgcctcccagagccagttataggctcaagatcaagaccaactgaccttctcctaggcagctcctttggtgtgtgggtgctctgacctcactgttcatgaggggacctcaactaaggcatcttccagttgggtgctggaaggaacccattaactcacactagaatgatgaggatttgctcatctggcgtggagaaggatgagcccacaaaaccctaaagggaaaagagaagctggacacagctgtactcagcagattcctgaatgctaggctggaaagtggtgcctgttgtccaagtggagtcacatggttgctaatgtgggcaagtctgaggacacacttcatgagcagctggggtctggaaggctcctcactttaccctagccacacataattactgggtgcctacagcacctagcaccttggagggggcactattaggaaatcgagattactatggcacaattaattcctgggtaaggcatggggttgtggtggacagagctcagtctttagtttgaacgaaaacatacatacatgaaaaacatacatgaaaaaaggaccctcatcaacattagaaggggtagatttggagcactttaggcaggaaaacaggaacgcaaggccaggaaactggaacccagtgaatactcagaaccgaggatgcagatgacttatttagcaaaatggtcacttctgtgacatagctggagaaaggatgggtaacagcttgccagagccacttggaacaagggcaaatctcagtgtctggggcaaaagatgatgcatttccctctgacccatcatgtttattcatcctccactccccattgccacactagctcttgctgtaagtcctcaccaggatctacatttcctcgtcgctggtgggaaccccttagagtacatagaggtatcagtccagtaagactgctctacacaacagaagtgaggcccagggagtagcagccaggcccttatcctgttacctctgcaggagtgactgcccaacccagatccagagacattgaaggaaatgataattccttggtacctcactgccttgggacaaaatgaagaaagccacccttccttaggctgcagcttgccactcctgggctgggtaaacaggtcatcagcaccaagctcaaccaggagtaacactctggaagacatgggtgagcccaagaggaagcatgaacaggacgctgttcctaagtcatgtcaacaggttgtgctgggccaggatccccagggaaaaaaatggtcaacccaactggagggtaggttagaagaaaaaaaacataaacgtggatagtcatgtcatctcaaatccctgacttggcttccccattacttaacagtctgagctccttcttagcctgtgaccagcttcaaatcacagccaagtaaaacaaggaaataggaaaagtaaatccaactagaagagacaagctgagattcagatttgtttactcctcccatgcaaagtttccctgttggaggttttccatgtatacatgtctagaagtgatagaatgcaaggccttggctttgtcttgcagggatctgcctttgaggtcatagactgaacagcagggagagaggttagtggtggagtgtggggggagctgttctagctccagtttcttctgacacatttttcaggatcatggatctgatcctccgaagcacagcagagatatctaagccatatttgtgcacatgagcagactcttctagttttttagtaaccagggatgggcttttgcatggcactgactatagagatgtcttgtagagatcaagccagtcttttgcatcccacctgcccacctccagaagagatgggaaaaggtcatcaaagggcattcaccaactgaaatccactcatgaatgttaggtctctaaaaggaggcatcaacactcacaatggtagcctccaaacctagcatcccacctatctaagagctcaggggtggtccactggggcagatacaagggaagtgcaagggctcaggatgaaagaaaatctattgggaagagttttaggggcttgatcattatggggcttccttctatatctgagaactgctctgggtggtgagatgtggactctgatccttaattggaatgttcggagaatgagtgtctggtggccttgaagtgttggacagaaaagtatcagtataaaagcctggagctcagggtaattaatgtagttcatggttccttagtgagcaggactcttggatgtggaggagaaagggtcataggaagtaaaccaccaaaattacaaaattgagtctctgtacaattacttcagtgcctttgggcttatgaatacaaatcagtgggccttctctatgatggtccaacaaactctcagtgtccaccctgtccctgtatctcccatggaagatgaataatgtcaggtgttctttgggtcaaaggccccagggcagtctggaggcttagagggcagagtggtgtcattccatgtaaagttaggcttctgaggggtcaggcagaatatggtgtccatatcttccatagctctgcagattcttggatgaagtcaagcacagtttgctagacccaggtcactcctctgagtataactaggacccatgagtgaaacttaatagctgtaaggaagaacctgctgtctgccagagaggataagctgcccatctcagcagctgtctaaaagaaggcaggtgtctctttaaagggaagagaagcattggtgaaatggatttcaggtcacttccattccagatgggtgagatcttgtggagctgggatcatgtttgaactcattcatacctgtagagcacgaatccaagtagattgtgtttggtctgtacaggctgaagccccctgctctcccacccaagtgcccccactgagcaggccaacatgctgttgtggccacatatactgggctgatccaggctggttatcaccaaacagcaaaccatagggaacagctgctttgccatagacccaatacccatgtagatctctcatgagagcagccataactcagacccactgaccaacagggccatgagtgacagccagaaccagtgaaggtccaagtaggacacagagcagggcttttcttaccatacacattatctccagaggttatttctaccccactccctattcaaggcctgttggagcacactgcaaaagcaaaagcacagtaactcaatttacacatgattataatcatttccagtgcacacatttcatcaccaggtggatcctgagctagcccatgtaaatccgggttaacccatattggtaatcatactcaaaagcacttttcaccctacattctactagccaatcaaagacaaagagttgtggcctctaccattgccttggcttctggacaccctcacaagctatcccaaggttcccgctcaactccagggaggctgacatcttcacatccactgggcatataatattgcatgagaccaaagtctccacactctttgcagcctcctccatgaatcccaatggcctgcacttgtacagtttgggtgtttgatagataaagcacgtatgagaagagaaaacaaaataaatcaactttttaaaaaagccagcactgtgctgtcaatgttttttttttcttttcaattctagctcagaaaagcagaaggtaaataatgtcaggtcaatgaatatcagatatattttttgactgtacattacagtgaagtgtaatctttttacacctgcaagtccatcttatttattcttgtaaatgttccctgacaatgtttgtaacatggctgtgttaaaaaatctatacaataaagctgtgaccctgagattcatgttttcctaagata

SEQ ID NO: 17035 - DNA, 12480 bp, Homo sapiens
  source 1..12480: mol_type = unassigned DNA
atggcgagcctcgccgcgctcgccctcagcctgctcctgaggctgcagctgccgccactgcccggcgcccgggctcagagcgccgcaggtggctgttcctttgatgagcactacagcaactgtggttatagtgtggctctagggaccaatgggttcacctgggagcagattaacacatgggagaaaccaatgctggaccaggcagtgcccacaggatctttcatgatggtgaacagctctgggagagcctctggccagaaggcccaccttctcctgccaaccctgaaggagaatgacacccactgcatcgacttccattactacttctccagccgtgacaggtccagcccaggggccttgaacgtctacgtgaaggtgaatggtggcccccaagggaaccctgtgtggaatgtgtccggggtcgtcactgagggctgggtgaaggcagagctcgccatcagcactttctggccacatttctatcaggtgatatttgaatccgtctcattgaagggtcatcctggctacatcgccgtggacgaggtccgggtccttgctcatccatgcagaaaagcacctcattttctgcgactccaaaacgtggaggtgaatgtggggcagaatgccacatttcagtgcattgctggtgggaagtggtctcagcatgacaagctttggctccagcaatggaatggcagggacacggccctgatggtcacccgtgtggtcaaccacaggcgcttctcagccacagtcagtgtggcagacactgcccagcggagcgtcagcaagtaccgctgtgtgatccgctctgatggtgggtctggtgtgtccaactacgcggagctgatcgtgaaagagcctcccacgcccattgctcccccagagctgctggctgtgggggccacatacctgtggatcaagccaaatgccaactccatcatcggggatggccccatcatcctgaaggaagtggaatatcgcaccaccacaggcacgtgggcagagacccacatagtcgactctcccaactataagctgtggcatctggaccccgatgttgagtatgagatccgagtgctcctcacacgaccaggtgaggggggtacgggaccgccagggcctcccctcaccaccaggaccaagtgtgcagatccggtacatggcccacagaacgtggaaatcgtagacatcagagcccggcagctgaccctgcagtgggagcccttcggctacgcggtgacccgctgccatagctacaacctcaccgtgcagtaccagtatgtgttcaaccagcagcagtacgaggccgaggaggtcatccagacctcctcccactacaccctgcgaggcctgcgccccttcatgaccatccggctgcgactcttgctgtctaaccccgagggccgaatggagagcgaggagctggtggtgcagactgaggaagacgttccaggagctgttcctctagaatccatccaaggggggccctttgaggagaagatctacatccagtggaaacctcccaatgagaccaatggggtcatcacgctctacgagatcaactacaaggctgtcggctcgctggacccaagtgctgacctctcgagccagagggggaaagtgttcaagctccggaatgaaacccaccacctctttgtgggtctgtacccagggaccacctattccttcaccatcaaggccagcacagcaaagggctttgggccccctgtcaccactcggattgccaccaaaatttcagctccatccatgcctgagtacgacacagacaccccattgaatgagacagacacgaccatcacagtgatgctgaaacccgctcagtcccggggagctcctgtcagtgtttatcagctggttgtcaaggaggagcgacttcagaagtcacggagggcagctgacattattgagtgcttttcggtgcccgtgagctatcggaatgcctccagcctcgattctctacactactttgctgctgagttgaagcctgccaacctgcctgtcacccagccatttacagtgggtgacaataagacatacaatggctactggaaccctcctctctctcccctgaaaagctacagcatctacttccaggcactcagcaaagccaatggagagaccaaaatcaactgtgttcgtctggctacaaaagcaccaatgggcagcgcccaggtgaccccggggactccactctgcctcctcaccacaggtgcctccacccagaattctaacactgtggagccagagaagcaggtggacaacaccgtgaagatggctggcgtgatcgctggcctcctcatgttcatcatcattctcctgggcgtgatgctcaccatcaaaaggaggaagctggccaagaagcagaaggagacccagagtggagcccagagggagatggggcctgtggcctctgccgacaaacccaccaccaagctcagcgccagccgcaatgatgaaggcttctcttctagttctcaggacgtcaacggattcacagatggcagccgcggggagctttcccagcccaccctcacgatccagactcatccctaccgcacctgtgaccctgtggagatgagctacccccgggaccagttccaacccgccatccgggtggctgacttgctgcagcacatcacgcagatgaagagaggccagggctacgggttcaaggaggaatacgaggccttaccagaggggcagacagcttcgtgggacacagccaaggaggatgaaaaccgcaataagaatcgatatgggaacatcatatcctacgaccattcccgggtgaggctgctggtgctggatggagacccgcactctgactacatcaatgccaactacattgacggataccatcgacctcggcactacattgcgactcaaggtccgatgcaggagactgtaaaggacttttggagaatgatctggcaggagaactccgccagcatcgtcatggtcacaaacctggtggaagtgggcagggtgaaatgtgtgcgatactggccagatgacacggaggtctacggagacattaaagtcaccctgattgaaacagagcccctggcagaatacgtcatacgcaccttcacagtccagaagaaaggctaccatgagatccgggagctccgcctcttccacttcaccagctggcctgaccacggcgttccctgctatgccactggccttctgggcttcgtccgccaggtcaagttcctcaaccccccggaagctgggcccatagtggtccactgcagtgctggggctgggcggactggctgcttcattgccattgacaccatgcttgacatggccgagaatgaaggggtggtggacatcttcaactgcgtgcgtgagctccgggcccaaagggtcaacctggtacagacagaggagcaatatgtgtttgtgcacgatgccatcctggaagcgtgcctctgtggcaacactgccatccctgtgtgtgagttccgttctctctactacaatatcagcaggctggacccccagacaaactccagccaaatcaaagatgaatttcagaccctcaacattgtgacaccccgtgtgcggcccgaggactgcagcattgggctcctgccccggaaccatgataagaatcgaagtatggacgtgctgcctctggaccgctgcctgcccttccttatctcagtggacggagaatccagcaattacatcaacgcagcactgatggatagccacaagcagcctgccgccttcgtggtcacccagcaccctctacccaacaccgtggcagacttctggaggctggtgttcgattacaactgctcctctgtggtgatgctgaatgagatggacactgcccagttctgtatgcagtactggcctgagaagacctccgggtgctatgggcccatccaggtggagttcgtctccgcagacatcgacgaggacatcatccacagaatattccgcatctgtaacatggcccggccacaggatggttatcgtatagtccagcacctccagtacattggctggcctgcctaccgggacacgcccccctccaagcgctctctgctcaaagtggtccgacgactggagaagtggcaggagcagtatgacgggagggagggacgtactgtggtccactgcctaaatgggggaggccgtagtggaaccttctgtgccatctgcagtgtgtgtgagatgatccagcagcaaaacatcattgacgtgttccacatcgtgaaaacactgcgtaacaacaaatccaacatggtggagaccctggaacagtataaatttgtatacgaggtggcactggaatatttaagctccttttagctcaatgggatggggaacctgccggagtccagaggctgctgtgaccaagcccccttttgtgtgaatggcagtaactgggctcaggagctctgaggtggcaccctgcctgactccaaggagaagactggtggccctgtgttccacggggggctctgcaccttctgaggggtctcctgttgccgtgggagatgctgctccaaaaggcccaggcttccttttcaacctaaccagccacagccaagggcccaagcagaagtacacccacaagcaaggccttggatttctggctcccagaccacctgcttttgttctgagtttgtggatctcttggcaagccaactgtgcaggtgctggggagtgggaggctcccctgccctccttctccttaggagtggaggagatgtgtgttctgctcctctacgtcatggaaaagattgaggctcttgggggtcactgctctgctgccccctgcaacctccttcaggggcctctggcaccagacatttgcagtctggaccagtgtgaccttacgatgttccctaggccacaagagaggccccccatcctcacacctaacctgcatggggcttcgcccacaaccattctgtaccccttccccagcctgggccttgaccgtccagcattcactggccggccagctgtgtccacagcagtttttgataaaggtgttctttgcttttttgtgtggtcagtgggagggggtggaactgcagggaacttctctgctcctccttgtctttgtaaaaagggaccacctccctggggcagggcttgggctgacctgtaggatgtaacccctgtgtttctttggtggtagctttctttggaagagacaaacaagataagatttgattattttccaaagtgtatgtgaaaagaaactttcttttggagggtgtaaaatcttagtctcttatgtcaaaaagaagggggcgggggagtttgagtatgtacctctaagacaaatctctcgggccttttattttttcctggcaatgtccttaaaagctcccaccctgggacagcatgccactgagcaaggagagatgggtgagcctgaagatggtccctttggtttctggggcaaatagagcaccagctttgtgcataatttggatgtccaaatttgaactccttcctaaagaaacccagcagccaccttgaaaaaggccattgtggagcccattatactttgatttaaaataggccaagagaatcaggcctggagatctagggtcttgtccaaagtgtgagtgagtcaatgagagggaaccaacatttgctaagtctctactgtatgccagggatcatgcttggcactttccataggacatttcacacagtccttagaacccccaggagagagctactgacttgttatcatctccatttgatcatctcctccaatgaggaaacccacgcaccttccttagtaatgaaatcctgggttccaaaggggcaggtaatggcaatgagacttctccgtgctgttttcttcatcttctctaagccaagcaattattttatggagggaaaataaggccagaaacttctgagcagataactccacaaatggaaatttagtactttcttcctgatgccagttcttctgggaagcgcagaatttcagatatattttagtaacacattcccagctccccaggaaagccagtctcatctaatttcttagtcagtaaaaacaattccctgttccttcaggctatgaatggaccagccagggaaactctcgaccttgatctctagccagtgcttaggcccaatatctgacagcctcaggtgggctgggacctaggaagctccatcttgaaggctggtctagccccagacagggcatgaggggcagagaattcaagaaggtacagctttggccctcaagagcccactgtatgctggggaaatggaaccatggtgcagtagtgtggagtggatgagtgttccatgagcctaggagcaagaaagtctcttcggcctcgggcttcctggagaaggggacgtccattcctgctgggtcttaacaagcataaaaaggaaaaaaaggaaactcaggcaaagggatccatatgtgcaatggcaaagaaatgtgaaaaggcattgggagaagcagtctgggggaggccagcccagtgcgggcacagcacaacacggggagcagcaagagatgagccagggtccaggagacagatgcccatcgcgagtacagactttgtcctattggcaacaaggagtccatggagctttagagagatgcactcagcttcgtgttggccaagactccttctgggccaatggggctgcctcttttcctttcatcagacactgtgaaaacattcccttaagcgtgcactttttaatatcacatctatttgtctgtctgctcattgttttgttgctggaactaaatatgcaatggatcatgagactcagattctatgagaaacccagggtctctgctttaccacggagcagggtcaccaacccagatctccaggcccatgaggatggaacatgaaaggagccgacaaaagttgcttccattggcatgggctctggagctgtccagaagtccagggacaccagacttgatcaaggaagggctgtcactttagaggttcaaaaggaagtgcctcaaagcaaaggcaagcaaaggaaccccacgatgaacttgctcttttcctttgatgagcctctccccaggtgtatttcagcagaccccggggacccacccccactgggcctgctggcctccctcggctccagcccaatgccccagctggccttccccagcctgcaaggagcctgtagcatggcaaatctgcctgctgtatgctattttcttagatcttggtacatccagacaggatgagggtggagggagagctatttaacacaaatcctaagatttttttctgctcaggaaggggtgaaatagctggcagatacaaaagacagtggcttttatcattttaaatggtaggaatttaaggtgtgacttcagggagaaacaaacttgcaaaaaaaaaaaatctcaggccatgttggggtaacccagcaagggccagtgatgatttcccccagctcatccccttattttcccacaacccaaccattctctaaagcaggacagtgaataggtcttaggccagtgcacacaggaagaaattgaggcttatggatggggatgacttccctaagatcccatgggacaaggatgtggcaaggcttggatgagatggggcaccagtgcccaggaatttgaacattttcctttacccaggaaatctccggagccaacaccaccacccccagggggtctccccaccccaccccatttacagggtgagctcagcctgtcatgagcagaggaaaatattattaatgctctctgagtctttacaacaggagctcttacctcatagatgtgggctctgtttggggaagatgcaaggaagtaatgagaagcccaggaaatttctccacctgtgtttatggcctaaatagcttcaggatgtatcttagctgcactccaacattgcatcctttctggggtgaagaatctgggccaaccaggggtccttgggcctctagaaggccacagtaggcctctctttgtgggaatggaaggggacagtttgcttttagtgctggccctctctgtgggtgtggcctgcaaaggaaccaacagaccctatgctggggactctaacatgtgagctcattaaattcttccagcattctaaaggagggtttgtgattgtcaccatttactgatgaggaaactaaggctcctaggggagaaatcacttgcccacagttccacagctagtgagtgaatgaaccaggatttaaaccggttttttctcactacagagacaatatttttccaccattgtatctcacatttttcccaggaggttacccataacagaagagactagagtggaacagatacgtcagtggataaagctcaaagcaaacaacagtaagcttaaaattccttcatagtctcatgttttacgttcacaattcatgcaaaatttgcattccactttctgatttagccttgttggttttaatatgactctatgaatatttcaaaaaaaaatgtgctctgttcctcatgttgttctgttctgttcaccccgctatgacggaccctaggtcagctggtcttcagcttgaccctagaattgactctaggagcagtgaccctgctgcctcccagagccagttataggctcaagatcaagaccaactgaccttctcctaggcagctcctttggtgtgtgggtgctctgacctcactgttcatgaggggacctcaactaaggcatcttccagttgggtgctggaaggaacccattaactcacactagaatgatgaggatttgctcatctggcgtggagaaggatgagcccacaaaaccctaaagggaaaagagaagctggacacagctgtactcagcagattcctgaatgctaggctggaaagtggtgcctgttgtccaagtggagtcacatggttgctaatgtgggcaagtctgaggacacacttcatgagcagctggggtctggaaggctcctcactttaccctagccacacataattactgggtgcctacagcacctagcaccttggagggggcactattaggaaatcgagattactatggcacaattaattcctgggtaaggcatggggttgtggtggacagagctcagtctttagtttgaacgaaaacatacatacatgaaaaacatacatgaaaaaaggaccctcatcaacattagaaggggtagatttggagcactttaggcaggaaaacaggaacgcaaggccaggaaactggaacccagtgaatactcagaaccgaggatgcagatgacttatttagcaaaatggtcacttctgtgacatagctggagaaaggatgggtaacagcttgccagagccacttggaacaagggcaaatctcagtgtctggggcaaaagatgatgcatttccctctgacccatcatgtttattcatcctccactccccattgccacactagctcttgctgtaagtcctcaccaggatctacatttcctcgtcgctggtgggaaccccttagagtacatagaggtatcagtccagtaagactgctctacacaacagaagtgaggcccagggagtagcagccaggcccttatcctgttacctctgcaggagtgactgcccaacccagatccagagacattgaaggaaatgataattccttggtacctcactgccttgggacaaaatgaagaaagccacccttccttaggctgcagcttgccactcctgggctgggtaaacaggtcatcagcaccaagctcaaccaggagtaacactctggaagacatgggtgagcccaagaggaagcatgaacaggacgctgttcctaagtcatgtcaacaggttgtgctgggccaggatccccagggaaaaaaatggtcaacccaactggagggtaggttagaagaaaaaaaacataaacgtggatagtcatgtcatctcaaatccctgacttggcttccccattacttaacagtctgagctccttcttagcctgtgaccagcttcaaatcacagccaagtaaaacaaggaaataggaaaagtaaatccaactagaagagacaagctgagattcagatttgtttactcctcccatgcaaagtttccctgttggaggttttccatgtatacatgtctagaagtgatagaatgcaaggccttggctttgtcttgcagggatctgcctttgaggtcatagactgaacagcagggagagaggttagtggtggagtgtggggggagctgttctagctccagtttcttctgacacatttttcaggatcatggatctgatcctccgaagcacagcagagatatctaagccatatttgtgcacatgagcagactcttctagttttttagtaaccagggatgggcttttgcatggcactgactatagagatgtcttgtagagatcaagccagtcttttgcatcccacctgcccacctccagaagagatgggaaaaggtcatcaaagggcattcaccaactgaaatccactcatgaatgttaggtctctaaaaggaggcatcaacactcacaatggtagcctccaaacctagcatcccacctatctaagagctcaggggtggtccactggggcagatacaagggaagtgcaagggctcaggatgaaagaaaatctattgggaagagttttaggggcttgatcattatggggcttccttctatatctgagaactgctctgggtggtgagatgtggactctgatccttaattggaatgttcggagaatgagtgtctggtggccttgaagtgttggacagaaaagtatcagtataaaagcctggagctcagggtaattaatgtagttcatggttccttagtgagcaggactcttggatgtggaggagaaagggtcataggaagtaaaccaccaaaattacaaaattgagtctctgtacaattacttcagtgcctttgggcttatgaatacaaatcagtgggccttctctatgatggtccaacaaactctcagtgtccaccctgtccctgtatctcccatggaagatgaataatgtcaggtgttctttgggtcaaaggccccagggcagtctggaggcttagagggcagagtggtgtcattccatgtaaagttaggcttctgaggggtcaggcagaatatggtgtccatatcttccatagctctgcagattcttggatgaagtcaagcacagtttgctagacccaggtcactcctctgagtataactaggacccatgagtgaaacttaatagctgtaaggaagaacctgctgtctgccagagaggataagctgcccatctcagcagctgtctaaaagaaggcaggtgtctctttaaagggaagagaagcattggtgaaatggatttcaggtcacttccattccagatgggtgagatcttgtggagctgggatcatgtttgaactcattcatacctgtagagcacgaatccaagtagattgtgtttggtctgtacaggctgaagccccctgctctcccacccaagtgcccccactgagcaggccaacatgctgttgtggccacatatactgggctgatccaggctggttatcaccaaacagcaaaccatagggaacagctgctttgccatagacccaatacccatgtagatctctcatgagagcagccataactcagacccactgaccaacagggccatgagtgacagccagaaccagtgaaggtccaagtaggacacagagcagggcttttcttaccatacacattatctccagaggttatttctaccccactccctattcaaggcctgttggagcacactgcaaaagcaaaagcacagtaactcaatttacacatgattataatcatttccagtgcacacatttcatcaccaggtggatcctgagctagcccatgtaaatccgggttaacccatattggtaatcatactcaaaagcacttttcaccctacattctactagccaatcaaagacaaagagttgtggcctctaccattgccttggcttctggacaccctcacaagctatcccaaggttcccgctcaactccagggaggctgacatcttcacatccactgggcatataatattgcatgagaccaaagtctccacactctttgcagcctcctccatgaatcccaatggcctgcacttgtacagtttgggtgtttgatagataaagcacgtatgagaagagaaaacaaaataaatcaactttttaaaaaagccagcactgtgctgtcaatgttttttttttcttttcaattctagctcagaaaagcagaaggtaaataatgtcaggtcaatgaatatcagatatattttttgactgtacattacagtgaagtgtaatctttttacacctgcaagtccatcttatttattcttgtaaatgttccctgacaatgtttgtaacatggctgtgttaaaaaatctatacaataaagctgtgaccctgagattcatgttttcctaagata

SEQ ID NO: 17036 - DNA, 12483 bp, Homo sapiens
  source 1..12483: mol_type = unassigned DNA
atggcgagcctcgccgcgctcgccctcagcctgctcctgaggctgcagctgccgccactgcccggcgcccgggctcagagcgccgcaggtggctgttcctttgatgagcactacagcaactgtggttatagtgtggctctagggaccaatgggttcacctgggagcagattaacacatgggagaaaccaatgctggaccaggcagtgcccacaggatctttcatgatggtgaacagctctgggagagcctctggccagaaggcccaccttctcctgccaaccctgaaggagaatgacacccactgcatcgacttccattactacttctccagccgtgacaggtccagcccaggggccttgaacgtctacgtgaaggtgaatggtggcccccaagggaaccctgtgtggaatgtgtccggggtcgtcactgagggctgggtgaaggcagagctcgccatcagcactttctggccacatttctatcaggtgatatttgaatccgtctcattgaagggtcatcctggctacatcgccgtggacgaggtccgggtccttgctcatccatgcagaaaagcacctcattttctgcgactccaaaacgtggaggtgaatgtggggcagaatgccacatttcagtgcattgctggtgggaagtggtctcagcatgacaagctttggctccagcaatggaatggcagggacacggccctgatggtcacccgtgtggtcaaccacaggcgcttctcagccacagtcagtgtggcagacactgcccagcggagcgtcagcaagtaccgctgtgtgatccgctctgatggtgggtctggtgtgtccaactacgcggagctgatcgtgaaagagcctcccacgcccattgctcccccagagctgctggctgtgggggccacatacctgtggatcaagccaaatgccaactccatcatcggggatggccccatcatcctgaaggaagtggaatatcgcaccaccacaggcacgtgggcagagacccacatagtcgactctcccaactataagctgtggcatctggaccccgatgttgagtatgagatccgagtgctcctcacacgaccaggtgaggggggtacgggaccgccagggcctcccctcaccaccaggaccaagtgtgcagatccggtacatggcccacagaacgtggaaatcgtagacatcagagcccggcagctgaccctgcagtgggagcccttcggctacgcggtgacccgctgccatagctacaacctcaccgtgcagtaccagtatgtgttcaaccagcagcagtacgaggccgaggaggtcatccagacctcctcccactacaccctgcgaggcctgcgccccttcatgaccatccggctgcgactcttgctgtctaaccccgagggccgaatggagagcgaggagctggtggtgcagactgaggaagacgttccaggagctgttcctctagaatccatccaaggggggccctttgaggagaagatctacatccagtggaaacctcccaatgagaccaatggggtcatcacgctctacgagatcaactacaaggctgtcggctcgctggacccaagtgctgacctctcgagccagagggggaaagtgttcaagctccggaatgaaacccaccacctctttgtgggtctgtacccagggaccacctattccttcaccatcaaggccagcacagcaaagggctttgggccccctgtcaccactcggattgccaccaaaatttcagctccatccatgcctgagtacgacacagacaccccattgaatgagacagacacgaccatcacagtgatgctgaaacccgctcagtcccggggagctcctgtcagtgtttatcagctggttgtcaaggaggagcgacttcagaagtcacggagggcagctgacattattgagtgcttttcggtgcccgtgagctatcggaatgcctccagcctcgattctctacactactttgctgctgagttgaagcctgccaacctgcctgtcacccagccatttacagtgggtgacaataagacatacaatggctactggaaccctcctctctctcccctgaaaagctacagcatctacttccaggcactcagcaaagccaatggagagaccaaaatcaactgtgttcgtctggctacaaaaggtgcctccacccagaattctaacactgtggagccagagaagcaggtggacaacaccgtgaagatggctggcgtgatcgctggcctcctcatgttcatcatcattctcctgggcgtgatgctcaccatcaaaaggaggaagctggccaagaagcagaaggagacccagagtggagcccagagggagatggggcctgtggcctctgccgacaaacccaccaccaagctcagcgccagccgcaatgatgaaggcttctcttctagttctcaggacgtcaacggattcacagatggcagccgcggggagctttcccagcccaccctcacgatccagactcatccctaccgcacctgtgaccctgtggagatgagctacccccgggaccagttccaacccgccatccgggtggctgacttgctgcagcacatcacgcagatgaagagaggccagggctacgggttcaaggaggaatacgaggccttaccagaggggcagacagcttcgtgggacacagccaaggaggatgaaaaccgcaataagaatcgatatgggaacatcatatcctacgaccattcccgggtgaggctgctggtgctggatggagacccgcactctgactacatcaatgccaactacattgacggataccatcgacctcggcactacattgcgactcaaggtccgatgcaggagactgtaaaggacttttggagaatgatctggcaggagaactccgccagcatcgtcatggtcacaaacctggtggaagtgggcaggcacccagcggaacacactgtgggaaatgccactctaggccgtgcggcgtcccccggaatggtgaaatgtgtgcgatactggccagatgacacggaggtctacggagacattaaagtcaccctgattgaaacagagcccctggcagaatacgtcatacgcaccttcacagtccagaagaaaggctaccatgagatccgggagctccgcctcttccacttcaccagctggcctgaccacggcgttccctgctatgccactggccttctgggcttcgtccgccaggtcaagttcctcaaccccccggaagctgggcccatagtggtccactgcagtgctggggctgggcggactggctgcttcattgccattgacaccatgcttgacatggccgagaatgaaggggtggtggacatcttcaactgcgtgcgtgagctccgggcccaaagggtcaacctggtacagacagaggagcaatatgtgtttgtgcacgatgccatcctggaagcgtgcctctgtggcaacactgccatccctgtgtgtgagttccgttctctctactacaatatcagcaggctggacccccagacaaactccagccaaatcaaagatgaatttcagaccctcaacattgtgacaccccgtgtgcggcccgaggactgcagcattgggctcctgccccggaaccatgataagaatcgaagtatggacgtgctgcctctggaccgctgcctgcccttccttatctcagtggacggagaatccagcaattacatcaacgcagcactgatggatagccacaagcagcctgccgccttcgtggtcacccagcaccctctacccaacaccgtggcagacttctggaggctggtgttcgattacaactgctcctctgtggtgatgctgaatgagatggacactgcccagttctgtatgcagtactggcctgagaagacctccgggtgctatgggcccatccaggtggagttcgtctccgcagacatcgacgaggacatcatccacagaatattccgcatctgtaacatggcccggccacaggatggttatcgtatagtccagcacctccagtacattggctggcctgcctaccgggacacgcccccctccaagcgctctctgctcaaagtggtccgacgactggagaagtggcaggagcagtatgacgggagggagggacgtactgtggtccactgcctaaatgggggaggccgtagtggaaccttctgtgccatctgcagtgtgtgtgagatgatccagcagcaaaacatcattgacgtgttccacatcgtgaaaacactgcgtaacaacaaatccaacatggtggagaccctggaacagtataaatttgtatacgaggtggcactggaatatttaagctccttttagctcaatgggatggggaacctgccggagtccagaggctgctgtgaccaagcccccttttgtgtgaatggcagtaactgggctcaggagctctgaggtggcaccctgcctgactccaaggagaagactggtggccctgtgttccacggggggctctgcaccttctgaggggtctcctgttgccgtgggagatgctgctccaaaaggcccaggcttccttttcaacctaaccagccacagccaagggcccaagcagaagtacacccacaagcaaggccttggatttctggctcccagaccacctgcttttgttctgagtttgtggatctcttggcaagccaactgtgcaggtgctggggagtgggaggctcccctgccctccttctccttaggagtggaggagatgtgtgttctgctcctctacgtcatggaaaagattgaggctcttgggggtcactgctctgctgccccctgcaacctccttcaggggcctctggcaccagacatttgcagtctggaccagtgtgaccttacgatgttccctaggccacaagagaggccccccatcctcacacctaacctgcatggggcttcgcccacaaccattctgtaccccttccccagcctgggccttgaccgtccagcattcactggccggccagctgtgtccacagcagtttttgataaaggtgttctttgcttttttgtgtggtcagtgggagggggtggaactgcagggaacttctctgctcctccttgtctttgtaaaaagggaccacctccctggggcagggcttgggctgacctgtaggatgtaacccctgtgtttctttggtggtagctttctttggaagagacaaacaagataagatttgattattttccaaagtgtatgtgaaaagaaactttcttttggagggtgtaaaatcttagtctcttatgtcaaaaagaagggggcgggggagtttgagtatgtacctctaagacaaatctctcgggccttttattttttcctggcaatgtccttaaaagctcccaccctgggacagcatgccactgagcaaggagagatgggtgagcctgaagatggtccctttggtttctggggcaaatagagcaccagctttgtgcataatttggatgtccaaatttgaactccttcctaaagaaacccagcagccaccttgaaaaaggccattgtggagcccattatactttgatttaaaataggccaagagaatcaggcctggagatctagggtcttgtccaaagtgtgagtgagtcaatgagagggaaccaacatttgctaagtctctactgtatgccagggatcatgcttggcactttccataggacatttcacacagtccttagaacccccaggagagagctactgacttgttatcatctccatttgatcatctcctccaatgaggaaacccacgcaccttccttagtaatgaaatcctgggttccaaaggggcaggtaatggcaatgagacttctccgtgctgttttcttcatcttctctaagccaagcaattattttatggagggaaaataaggccagaaacttctgagcagataactccacaaatggaaatttagtactttcttcctgatgccagttcttctgggaagcgcagaatttcagatatattttagtaacacattcccagctccccaggaaagccagtctcatctaatttcttagtcagtaaaaacaattccctgttccttcaggctatgaatggaccagccagggaaactctcgaccttgatctctagccagtgcttaggcccaatatctgacagcctcaggtgggctgggacctaggaagctccatcttgaaggctggtctagccccagacagggcatgaggggcagagaattcaagaaggtacagctttggccctcaagagcccactgtatgctggggaaatggaaccatggtgcagtagtgtggagtggatgagtgttccatgagcctaggagcaagaaagtctcttcggcctcgggcttcctggagaaggggacgtccattcctgctgggtcttaacaagcataaaaaggaaaaaaaggaaactcaggcaaagggatccatatgtgcaatggcaaagaaatgtgaaaaggcattgggagaagcagtctgggggaggccagcccagtgcgggcacagcacaacacggggagcagcaagagatgagccagggtccaggagacagatgcccatcgcgagtacagactttgtcctattggcaacaaggagtccatggagctttagagagatgcactcagcttcgtgttggccaagactccttctgggccaatggggctgcctcttttcctttcatcagacactgtgaaaacattcccttaagcgtgcactttttaatatcacatctatttgtctgtctgctcattgttttgttgctggaactaaatatgcaatggatcatgagactcagattctatgagaaacccagggtctctgctttaccacggagcagggtcaccaacccagatctccaggcccatgaggatggaacatgaaaggagccgacaaaagttgcttccattggcatgggctctggagctgtccagaagtccagggacaccagacttgatcaaggaagggctgtcactttagaggttcaaaaggaagtgcctcaaagcaaaggcaagcaaaggaaccccacgatgaacttgctcttttcctttgatgagcctctccccaggtgtatttcagcagaccccggggacccacccccactgggcctgctggcctccctcggctccagcccaatgccccagctggccttccccagcctgcaaggagcctgtagcatggcaaatctgcctgctgtatgctattttcttagatcttggtacatccagacaggatgagggtggagggagagctatttaacacaaatcctaagatttttttctgctcaggaaggggtgaaatagctggcagatacaaaagacagtggcttttatcattttaaatggtaggaatttaaggtgtgacttcagggagaaacaaacttgcaaaaaaaaaaaatctcaggccatgttggggtaacccagcaagggccagtgatgatttcccccagctcatccccttattttcccacaacccaaccattctctaaagcaggacagtgaataggtcttaggccagtgcacacaggaagaaattgaggcttatggatggggatgacttccctaagatcccatgggacaaggatgtggcaaggcttggatgagatggggcaccagtgcccaggaatttgaacattttcctttacccaggaaatctccggagccaacaccaccacccccagggggtctccccaccccaccccatttacagggtgagctcagcctgtcatgagcagaggaaaatattattaatgctctctgagtctttacaacaggagctcttacctcatagatgtgggctctgtttggggaagatgcaaggaagtaatgagaagcccaggaaatttctccacctgtgtttatggcctaaatagcttcaggatgtatcttagctgcactccaacattgcatcctttctggggtgaagaatctgggccaaccaggggtccttgggcctctagaaggccacagtaggcctctctttgtgggaatggaaggggacagtttgcttttagtgctggccctctctgtgggtgtggcctgcaaaggaaccaacagaccctatgctggggactctaacatgtgagctcattaaattcttccagcattctaaaggagggtttgtgattgtcaccatttactgatgaggaaactaaggctcctaggggagaaatcacttgcccacagttccacagctagtgagtgaatgaaccaggatttaaaccggttttttctcactacagagacaatatttttccaccattgtatctcacatttttcccaggaggttacccataacagaagagactagagtggaacagatacgtcagtggataaagctcaaagcaaacaacagtaagcttaaaattccttcatagtctcatgttttacgttcacaattcatgcaaaatttgcattccactttctgatttagccttgttggttttaatatgactctatgaatatttcaaaaaaaaatgtgctctgttcctcatgttgttctgttctgttcaccccgctatgacggaccctaggtcagctggtcttcagcttgaccctagaattgactctaggagcagtgaccctgctgcctcccagagccagttataggctcaagatcaagaccaactgaccttctcctaggcagctcctttggtgtgtgggtgctctgacctcactgttcatgaggggacctcaactaaggcatcttccagttgggtgctggaaggaacccattaactcacactagaatgatgaggatttgctcatctggcgtggagaaggatgagcccacaaaaccctaaagggaaaagagaagctggacacagctgtactcagcagattcctgaatgctaggctggaaagtggtgcctgttgtccaagtggagtcacatggttgctaatgtgggcaagtctgaggacacacttcatgagcagctggggtctggaaggctcctcactttaccctagccacacataattactgggtgcctacagcacctagcaccttggagggggcactattaggaaatcgagattactatggcacaattaattcctgggtaaggcatggggttgtggtggacagagctcagtctttagtttgaacgaaaacatacatacatgaaaaacatacatgaaaaaaggaccctcatcaacattagaaggggtagatttggagcactttaggcaggaaaacaggaacgcaaggccaggaaactggaacccagtgaatactcagaaccgaggatgcagatgacttatttagcaaaatggtcacttctgtgacatagctggagaaaggatgggtaacagcttgccagagccacttggaacaagggcaaatctcagtgtctggggcaaaagatgatgcatttccctctgacccatcatgtttattcatcctccactccccattgccacactagctcttgctgtaagtcctcaccaggatctacatttcctcgtcgctggtgggaaccccttagagtacatagaggtatcagtccagtaagactgctctacacaacagaagtgaggcccagggagtagcagccaggcccttatcctgttacctctgcaggagtgactgcccaacccagatccagagacattgaaggaaatgataattccttggtacctcactgccttgggacaaaatgaagaaagccacccttccttaggctgcagcttgccactcctgggctgggtaaacaggtcatcagcaccaagctcaaccaggagtaacactctggaagacatgggtgagcccaagaggaagcatgaacaggacgctgttcctaagtcatgtcaacaggttgtgctgggccaggatccccagggaaaaaaatggtcaacccaactggagggtaggttagaagaaaaaaaacataaacgtggatagtcatgtcatctcaaatccctgacttggcttccccattacttaacagtctgagctccttcttagcctgtgaccagcttcaaatcacagccaagtaaaacaaggaaataggaaaagtaaatccaactagaagagacaagctgagattcagatttgtttactcctcccatgcaaagtttccctgttggaggttttccatgtatacatgtctagaagtgatagaatgcaaggccttggctttgtcttgcagggatctgcctttgaggtcatagactgaacagcagggagagaggttagtggtggagtgtggggggagctgttctagctccagtttcttctgacacatttttcaggatcatggatctgatcctccgaagcacagcagagatatctaagccatatttgtgcacatgagcagactcttctagttttttagtaaccagggatgggcttttgcatggcactgactatagagatgtcttgtagagatcaagccagtcttttgcatcccacctgcccacctccagaagagatgggaaaaggtcatcaaagggcattcaccaactgaaatccactcatgaatgttaggtctctaaaaggaggcatcaacactcacaatggtagcctccaaacctagcatcccacctatctaagagctcaggggtggtccactggggcagatacaagggaagtgcaagggctcaggatgaaagaaaatctattgggaagagttttaggggcttgatcattatggggcttccttctatatctgagaactgctctgggtggtgagatgtggactctgatccttaattggaatgttcggagaatgagtgtctggtggccttgaagtgttggacagaaaagtatcagtataaaagcctggagctcagggtaattaatgtagttcatggttccttagtgagcaggactcttggatgtggaggagaaagggtcataggaagtaaaccaccaaaattacaaaattgagtctctgtacaattacttcagtgcctttgggcttatgaatacaaatcagtgggccttctctatgatggtccaacaaactctcagtgtccaccctgtccctgtatctcccatggaagatgaataatgtcaggtgttctttgggtcaaaggccccagggcagtctggaggcttagagggcagagtggtgtcattccatgtaaagttaggcttctgaggggtcaggcagaatatggtgtccatatcttccatagctctgcagattcttggatgaagtcaagcacagtttgctagacccaggtcactcctctgagtataactaggacccatgagtgaaacttaatagctgtaaggaagaacctgctgtctgccagagaggataagctgcccatctcagcagctgtctaaaagaaggcaggtgtctctttaaagggaagagaagcattggtgaaatggatttcaggtcacttccattccagatgggtgagatcttgtggagctgggatcatgtttgaactcattcatacctgtagagcacgaatccaagtagattgtgtttggtctgtacaggctgaagccccctgctctcccacccaagtgcccccactgagcaggccaacatgctgttgtggccacatatactgggctgatccaggctggttatcaccaaacagcaaaccatagggaacagctgctttgccatagacccaatacccatgtagatctctcatgagagcagccataactcagacccactgaccaacagggccatgagtgacagccagaaccagtgaaggtccaagtaggacacagagcagggcttttcttaccatacacattatctccagaggttatttctaccccactccctattcaaggcctgttggagcacactgcaaaagcaaaagcacagtaactcaatttacacatgattataatcatttccagtgcacacatttcatcaccaggtggatcctgagctagcccatgtaaatccgggttaacccatattggtaatcatactcaaaagcacttttcaccctacattctactagccaatcaaagacaaagagttgtggcctctaccattgccttggcttctggacaccctcacaagctatcccaaggttcccgctcaactccagggaggctgacatcttcacatccactgggcatataatattgcatgagaccaaagtctccacactctttgcagcctcctccatgaatcccaatggcctgcacttgtacagtttgggtgtttgatagataaagcacgtatgagaagagaaaacaaaataaatcaactttttaaaaaagccagcactgtgctgtcaatgttttttttttcttttcaattctagctcagaaaagcagaaggtaaataatgtcaggtcaatgaatatcagatatattttttgactgtacattacagtgaagtgtaatctttttacacctgcaagtccatcttatttattcttgtaaatgttccctgacaatgtttgtaacatggctgtgttaaaaaatctatacaataaagctgtgaccctgagattcatgttttcctaagata

SEQ ID NO: 17037 - DNA, 12559 bp, Homo sapiens
  source 1..12559: mol_type = unassigned DNA
ccgcgcgcacagccagcggccgcgccggcgatgcggggccaccccgcgcccgccccagtcccggccccggcccccgcgggaaggggctgagctgcccgccgccgcccggatggcgagcctcgccgcgctcgccctcagcctgctcctgaggctgcagctgccgccactgcccggcgcccgggctcagagcgccgcaggtggctgttcctttgatgagcactacagcaactgtggttatagtgtggctctagggaccaatgggttcacctgggagcagattaacacatgggagaaaccaatgctggaccaggcagtgcccacaggatctttcatgatggtgaacagctctgggagagcctctggccagaaggcccaccttctcctgccaaccctgaaggagaatgacacccactgcatcgacttccattactacttctccagccgtgacaggtccagcccaggggccttgaacgtctacgtgaaggtgaatggtggcccccaagggaaccctgtgtggaatgtgtccggggtcgtcactgagggctgggtgaaggcagagctcgccatcagcactttctggccacatttctatcaggtgatatttgaatccgtctcattgaagggtcatcctggctacatcgccgtggacgaggtccgggtccttgctcatccatgcagaaaagcacctcattttctgcgactccaaaacgtggaggtgaatgtggggcagaatgccacatttcagtgcattgctggtgggaagtggtctcagcatgacaagctttggctccagcaatggaatggcagggacacggccctgatggtcacccgtgtggtcaaccacaggcgcttctcagccacagtcagtgtggcagacactgcccagcggagcgtcagcaagtaccgctgtgtgatccgctctgatggtgggtctggtgtgtccaactacgcggagctgatcgtgaaagagcctcccacgcccattgctcccccagagctgctggctgtgggggccacatacctgtggatcaagccaaatgccaactccatcatcggggatggccccatcatcctgaaggaagtggaatatcgcaccaccacaggcacgtgggcagagacccacatagtcgactctcccaactataagctgtggcatctggaccccgatgttgagtatgagatccgagtgctcctcacacgaccaggtgaggggggtacgggaccgccagggcctcccctcaccaccaggaccaagtgtgcagatccggtacatggcccacagaacgtggaaatcgtagacatcagagcccggcagctgaccctgcagtgggagcccttcggctacgcggtgacccgctgccatagctacaacctcaccgtgcagtaccagtatgtgttcaaccagcagcagtacgaggccgaggaggtcatccagacctcctcccactacaccctgcgaggcctgcgccccttcatgaccatccggctgcgactcttgctgtctaaccccgagggccgaatggagagcgaggagctggtggtgcagactgaggaagacgttccaggagctgttcctctagaatccatccaaggggggccctttgaggagaagatctacatccagtggaaacctcccaatgagaccaatggggtcatcacgctctacgagatcaactacaaggctgtcggctcgctggacccaagtgctgacctctcgagccagagggggaaagtgttcaagctccggaatgaaacccaccacctctttgtgggtctgtacccagggaccacctattccttcaccatcaaggccagcacagcaaagggctttgggccccctgtcaccactcggattgccaccaaaatttcagctccatccatgcctgagtacgacacagacaccccattgaatgagacagacacgaccatcacagtgatgctgaaacccgctcagtcccggggagctcctgtcagtgtttatcagctggttgtcaaggaggagcgacttcagaagtcacggagggcagctgacattattgagtgcttttcggtgcccgtgagctatcggaatgcctccagcctcgattctctacactactttgctgctgagttgaagcctgccaacctgcctgtcacccagccatttacagtgggtgacaataagacatacaatggctactggaaccctcctctctctcccctgaaaagctacagcatctacttccaggcactcagcaaagccaatggagagaccaaaatcaactgtgttcgtctggctacaaaaggtgcctccacccagaattctaacactgtggagccagagaagcaggtggacaacaccgtgaagatggctggcgtgatcgctggcctcctcatgttcatcatcattctcctgggcgtgatgctcaccatcaaaaggagaagaaatgcttattcctactcctattacttgaagctggccaagaagcagaaggagacccagagtggagcccagagggagatggggcctgtggcctctgccgacaaacccaccaccaagctcagcgccagccgcaatgatgaaggcttctcttctagttctcaggacgtcaacggattcaatggcagccgcggggagctttcccagcccaccctcacgatccagactcatccctaccgcacctgtgaccctgtggagatgagctacccccgggaccagttccaacccgccatccgggtggctgacttgctgcagcacatcacgcagatgaagagaggccagggctacgggttcaaggaggaatacgaggccttaccagaggggcagacagcttcgtgggacacagccaaggaggatgaaaaccgcaataagaatcgatatgggaacatcatatcctacgaccattcccgggtgaggctgctggtgctggatggagacccgcactctgactacatcaatgccaactacattgacggataccatcgacctcggcactacattgcgactcaaggtccgatgcaggagactgtaaaggacttttggagaatgatctggcaggagaactccgccagcatcgtcatggtcacaaacctggtggaagtgggcagggtgaaatgtgtgcgatactggccagatgacacggaggtctacggagacattaaagtcaccctgattgaaacagagcccctggcagaatacgtcatacgcaccttcacagtccagaagaaaggctaccatgagatccgggagctccgcctcttccacttcaccagctggcctgaccacggcgttccctgctatgccactggccttctgggcttcgtccgccaggtcaagttcctcaaccccccggaagctgggcccatagtggtccactgcagtgctggggctgggcggactggctgcttcattgccattgacaccatgcttgacatggccgagaatgaaggggtggtggacatcttcaactgcgtgcgtgagctccgggcccaaagggtcaacctggtacagacagaggagcaatatgtgtttgtgcacgatgccatcctggaagcgtgcctctgtggcaacactgccatccctgtgtgtgagttccgttctctctactacaatatcagcaggctggacccccagacaaactccagccaaatcaaagatgaatttcagaccctcaacattgtgacaccccgtgtgcggcccgaggactgcagcattgggctcctgccccggaaccatgataagaatcgaagtatggacgtgctgcctctggaccgctgcctgcccttccttatctcagtggacggagaatccagcaattacatcaacgcagcactgatggatagccacaagcagcctgccgccttcgtggtcacccagcaccctctacccaacaccgtggcagacttctggaggctggtgttcgattacaactgctcctctgtggtgatgctgaatgagatggacactgcccagttctgtatgcagtactggcctgagaagacctccgggtgctatgggcccatccaggtggagttcgtctccgcagacatcgacgaggacatcatccacagaatattccgcatctgtaacatggcccggccacaggatggttatcgtatagtccagcacctccagtacattggctggcctgcctaccgggacacgcccccctccaagcgctctctgctcaaagtggtccgacgactggagaagtggcaggagcagtatgacgggagggagggacgtactgtggtccactgcctaaatgggggaggccgtagtggaaccttctgtgccatctgcagtgtgtgtgagatgatccagcagcaaaacatcattgacgtgttccacatcgtgaaaacactgcgtaacaacaaatccaacatggtggagaccctggaacagtataaatttgtatacgaggtggcactggaatatttaagctccttttagctcaatgggatggggaacctgccggagtccagaggctgctgtgaccaagcccccttttgtgtgaatggcagtaactgggctcaggagctctgaggtggcaccctgcctgactccaaggagaagactggtggccctgtgttccacggggggctctgcaccttctgaggggtctcctgttgccgtgggagatgctgctccaaaaggcccaggcttccttttcaacctaaccagccacagccaagggcccaagcagaagtacacccacaagcaaggccttggatttctggctcccagaccacctgcttttgttctgagtttgtggatctcttggcaagccaactgtgcaggtgctggggagtgggaggctcccctgccctccttctccttaggagtggaggagatgtgtgttctgctcctctacgtcatggaaaagattgaggctcttgggggtcactgctctgctgccccctgcaacctccttcaggggcctctggcaccagacatttgcagtctggaccagtgtgaccttacgatgttccctaggccacaagagaggccccccatcctcacacctaacctgcatggggcttcgcccacaaccattctgtaccccttccccagcctgggccttgaccgtccagcattcactggccggccagctgtgtccacagcagtttttgataaaggtgttctttgcttttttgtgtggtcagtgggagggggtggaactgcagggaacttctctgctcctccttgtctttgtaaaaagggaccacctccctggggcagggcttgggctgacctgtaggatgtaacccctgtgtttctttggtggtagctttctttggaagagacaaacaagataagatttgattattttccaaagtgtatgtgaaaagaaactttcttttggagggtgtaaaatcttagtctcttatgtcaaaaagaagggggcgggggagtttgagtatgtacctctaagacaaatctctcgggccttttattttttcctggcaatgtccttaaaagctcccaccctgggacagcatgccactgagcaaggagagatgggtgagcctgaagatggtccctttggtttctggggcaaatagagcaccagctttgtgcataatttggatgtccaaatttgaactccttcctaaagaaacccagcagccaccttgaaaaaggccattgtggagcccattatactttgatttaaaataggccaagagaatcaggcctggagatctagggtcttgtccaaagtgtgagtgagtcaatgagagggaaccaacatttgctaagtctctactgtatgccagggatcatgcttggcactttccataggacatttcacacagtccttagaacccccaggagagagctactgacttgttatcatctccatttgatcatctcctccaatgaggaaacccacgcaccttccttagtaatgaaatcctgggttccaaaggggcaggtaatggcaatgagacttctccgtgctgttttcttcatcttctctaagccaagcaattattttatggagggaaaataaggccagaaacttctgagcagataactccacaaatggaaatttagtactttcttcctgatgccagttcttctgggaagcgcagaatttcagatatattttagtaacacattcccagctccccaggaaagccagtctcatctaatttcttagtcagtaaaaacaattccctgttccttcaggctatgaatggaccagccagggaaactctcgaccttgatctctagccagtgcttaggcccaatatctgacagcctcaggtgggctgggacctaggaagctccatcttgaaggctggtctagccccagacagggcatgaggggcagagaattcaagaaggtacagctttggccctcaagagcccactgtatgctggggaaatggaaccatggtgcagtagtgtggagtggatgagtgttccatgagcctaggagcaagaaagtctcttcggcctcgggcttcctggagaaggggacgtccattcctgctgggtcttaacaagcataaaaaggaaaaaaaggaaactcaggcaaagggatccatatgtgcaatggcaaagaaatgtgaaaaggcattgggagaagcagtctgggggaggccagcccagtgcgggcacagcacaacacggggagcagcaagagatgagccagggtccaggagacagatgcccatcgcgagtacagactttgtcctattggcaacaaggagtccatggagctttagagagatgcactcagcttcgtgttggccaagactccttctgggccaatggggctgcctcttttcctttcatcagacactgtgaaaacattcccttaagcgtgcactttttaatatcacatctatttgtctgtctgctcattgttttgttgctggaactaaatatgcaatggatcatgagactcagattctatgagaaacccagggtctctgctttaccacggagcagggtcaccaacccagatctccaggcccatgaggatggaacatgaaaggagccgacaaaagttgcttccattggcatgggctctggagctgtccagaagtccagggacaccagacttgatcaaggaagggctgtcactttagaggttcaaaaggaagtgcctcaaagcaaaggcaagcaaaggaaccccacgatgaacttgctcttttcctttgatgagcctctccccaggtgtatttcagcagaccccggggacccacccccactgggcctgctggcctccctcggctccagcccaatgccccagctggccttccccagcctgcaaggagcctgtagcatggcaaatctgcctgctgtatgctattttcttagatcttggtacatccagacaggatgagggtggagggagagctatttaacacaaatcctaagatttttttctgctcaggaaggggtgaaatagctggcagatacaaaagacagtggcttttatcattttaaatggtaggaatttaaggtgtgacttcagggagaaacaaacttgcaaaaaaaaaaaatctcaggccatgttggggtaacccagcaagggccagtgatgatttcccccagctcatccccttattttcccacaacccaaccattctctaaagcaggacagtgaataggtcttaggccagtgcacacaggaagaaattgaggcttatggatggggatgacttccctaagatcccatgggacaaggatgtggcaaggcttggatgagatggggcaccagtgcccaggaatttgaacattttcctttacccaggaaatctccggagccaacaccaccacccccagggggtctccccaccccaccccatttacagggtgagctcagcctgtcatgagcagaggaaaatattattaatgctctctgagtctttacaacaggagctcttacctcatagatgtgggctctgtttggggaagatgcaaggaagtaatgagaagcccaggaaatttctccacctgtgtttatggcctaaatagcttcaggatgtatcttagctgcactccaacattgcatcctttctggggtgaagaatctgggccaaccaggggtccttgggcctctagaaggccacagtaggcctctctttgtgggaatggaaggggacagtttgcttttagtgctggccctctctgtgggtgtggcctgcaaaggaaccaacagaccctatgctggggactctaacatgtgagctcattaaattcttccagcattctaaaggagggtttgtgattgtcaccatttactgatgaggaaactaaggctcctaggggagaaatcacttgcccacagttccacagctagtgagtgaatgaaccaggatttaaaccggttttttctcactacagagacaatatttttccaccattgtatctcacatttttcccaggaggttacccataacagaagagactagagtggaacagatacgtcagtggataaagctcaaagcaaacaacagtaagcttaaaattccttcatagtctcatgttttacgttcacaattcatgcaaaatttgcattccactttctgatttagccttgttggttttaatatgactctatgaatatttcaaaaaaaaatgtgctctgttcctcatgttgttctgttctgttcaccccgctatgacggaccctaggtcagctggtcttcagcttgaccctagaattgactctaggagcagtgaccctgctgcctcccagagccagttataggctcaagatcaagaccaactgaccttctcctaggcagctcctttggtgtgtgggtgctctgacctcactgttcatgaggggacctcaactaaggcatcttccagttgggtgctggaaggaacccattaactcacactagaatgatgaggatttgctcatctggcgtggagaaggatgagcccacaaaaccctaaagggaaaagagaagctggacacagctgtactcagcagattcctgaatgctaggctggaaagtggtgcctgttgtccaagtggagtcacatggttgctaatgtgggcaagtctgaggacacacttcatgagcagctggggtctggaaggctcctcactttaccctagccacacataattactgggtgcctacagcacctagcaccttggagggggcactattaggaaatcgagattactatggcacaattaattcctgggtaaggcatggggttgtggtggacagagctcagtctttagtttgaacgaaaacatacatacatgaaaaacatacatgaaaaaaggaccctcatcaacattagaaggggtagatttggagcactttaggcaggaaaacaggaacgcaaggccaggaaactggaacccagtgaatactcagaaccgaggatgcagatgacttatttagcaaaatggtcacttctgtgacatagctggagaaaggatgggtaacagcttgccagagccacttggaacaagggcaaatctcagtgtctggggcaaaagatgatgcatttccctctgacccatcatgtttattcatcctccactccccattgccacactagctcttgctgtaagtcctcaccaggatctacatttcctcgtcgctggtgggaaccccttagagtacatagaggtatcagtccagtaagactgctctacacaacagaagtgaggcccagggagtagcagccaggcccttatcctgttacctctgcaggagtgactgcccaacccagatccagagacattgaaggaaatgataattccttggtacctcactgccttgggacaaaatgaagaaagccacccttccttaggctgcagcttgccactcctgggctgggtaaacaggtcatcagcaccaagctcaaccaggagtaacactctggaagacatgggtgagcccaagaggaagcatgaacaggacgctgttcctaagtcatgtcaacaggttgtgctgggccaggatccccagggaaaaaaatggtcaacccaactggagggtaggttagaagaaaaaaaacataaacgtggatagtcatgtcatctcaaatccctgacttggcttccccattacttaacagtctgagctccttcttagcctgtgaccagcttcaaatcacagccaagtaaaacaaggaaataggaaaagtaaatccaactagaagagacaagctgagattcagatttgtttactcctcccatgcaaagtttccctgttggaggttttccatgtatacatgtctagaagtgatagaatgcaaggccttggctttgtcttgcagggatctgcctttgaggtcatagactgaacagcagggagagaggttagtggtggagtgtggggggagctgttctagctccagtttcttctgacacatttttcaggatcatggatctgatcctccgaagcacagcagagatatctaagccatatttgtgcacatgagcagactcttctagttttttagtaaccagggatgggcttttgcatggcactgactatagagatgtcttgtagagatcaagccagtcttttgcatcccacctgcccacctccagaagagatgggaaaaggtcatcaaagggcattcaccaactgaaatccactcatgaatgttaggtctctaaaaggaggcatcaacactcacaatggtagcctccaaacctagcatcccacctatctaagagctcaggggtggtccactggggcagatacaagggaagtgcaagggctcaggatgaaagaaaatctattgggaagagttttaggggcttgatcattatggggcttccttctatatctgagaactgctctgggtggtgagatgtggactctgatccttaattggaatgttcggagaatgagtgtctggtggccttgaagtgttggacagaaaagtatcagtataaaagcctggagctcagggtaattaatgtagttcatggttccttagtgagcaggactcttggatgtggaggagaaagggtcataggaagtaaaccaccaaaattacaaaattgagtctctgtacaattacttcagtgcctttgggcttatgaatacaaatcagtgggccttctctatgatggtccaacaaactctcagtgtccaccctgtccctgtatctcccatggaagatgaataatgtcaggtgttctttgggtcaaaggccccagggcagtctggaggcttagagggcagagtggtgtcattccatgtaaagttaggcttctgaggggtcaggcagaatatggtgtccatatcttccatagctctgcagattcttggatgaagtcaagcacagtttgctagacccaggtcactcctctgagtataactaggacccatgagtgaaacttaatagctgtaaggaagaacctgctgtctgccagagaggataagctgcccatctcagcagctgtctaaaagaaggcaggtgtctctttaaagggaagagaagcattggtgaaatggatttcaggtcacttccattccagatgggtgagatcttgtggagctgggatcatgtttgaactcattcatacctgtagagcacgaatccaagtagattgtgtttggtctgtacaggctgaagccccctgctctcccacccaagtgcccccactgagcaggccaacatgctgttgtggccacatatactgggctgatccaggctggttatcaccaaacagcaaaccatagggaacagctgctttgccatagacccaatacccatgtagatctctcatgagagcagccataactcagacccactgaccaacagggccatgagtgacagccagaaccagtgaaggtccaagtaggacacagagcagggcttttcttaccatacacattatctccagaggttatttctaccccactccctattcaaggcctgttggagcacactgcaaaagcaaaagcacagtaactcaatttacacatgattataatcatttccagtgcacacatttcatcaccaggtggatcctgagctagcccatgtaaatccgggttaacccatattggtaatcatactcaaaagcacttttcaccctacattctactagccaatcaaagacaaagagttgtggcctctaccattgccttggcttctggacaccctcacaagctatcccaaggttcccgctcaactccagggaggctgacatcttcacatccactgggcatataatattgcatgagaccaaagtctccacactctttgcagcctcctccatgaatcccaatggcctgcacttgtacagtttgggtgtttgatagataaagcacgtatgagaagagaaaacaaaataaatcaactttttaaaaaagccagcactgtgctgtcaatgttttttttttcttttcaattctagctcagaaaagcagaaggtaaataatgtcaggtcaatgaatatcagatatattttttgactgtacattacagtgaagtgtaatctttttacacctgcaagtccatcttatttattcttgtaaatgttccctgacaatgtttgtaacatggctgtgttaaaaaatctatacaataaagctgtgaccctgagattcatgttttcctaagata

SEQ ID NO: 17038 - DNA, 12746 bp, Homo sapiens
  source 1..12746: mol_type = unassigned DNA
ttaggactcgggggacaccgccccccgccccccgcgtcccgcccccgcccagcctcccgcctcagttcgcgccgcgcctcggcttggaacgcaggagcgccggctccgggagcccgagcggagccagccgcgcgcacagccagcggccgcgccggcgatgcggggccaccccgcgcccgccccagtcccggccccggcccccgcgggaaggggctgagctgcccgccgccgcccggatggcgagcctcgccgcgctcgccctcagcctgctcctgaggctgcagctgccgccactgcccggcgcccgggctcagagcgccgcaggtggctgttcctttgatgagcactacagcaactgtggttatagtgtggctctagggaccaatgggttcacctgggagcagattaacacatgggagaaaccaatgctggaccaggcagtgcccacaggatctttcatgatggtgaacagctctgggagagcctctggccagaaggcccaccttctcctgccaaccctgaaggagaatgacacccactgcatcgacttccattactacttctccagccgtgacaggtccagcccaggggccttgaacgtctacgtgaaggtgaatggtggcccccaagggaaccctgtgtggaatgtgtccggggtcgtcactgagggctgggtgaaggcagagctcgccatcagcactttctggccacatttctatcaggtgatatttgaatccgtctcattgaagggtcatcctggctacatcgccgtggacgaggtccgggtccttgctcatccatgcagaaaagcacctcattttctgcgactccaaaacgtggaggtgaatgtggggcagaatgccacatttcagtgcattgctggtgggaagtggtctcagcatgacaagctttggctccagcaatggaatggcagggacacggccctgatggtcacccgtgtggtcaaccacaggcgcttctcagccacagtcagtgtggcagacactgcccagcggagcgtcagcaagtaccgctgtgtgatccgctctgatggtgggtctggtgtgtccaactacgcggagctgatcgtgaaagagcctcccacgcccattgctcccccagagctgctggctgtgggggccacatacctgtggatcaagccaaatgccaactccatcatcggggatggccccatcatcctgaaggaagtggaatatcgcaccaccacaggcacgtgggcagagacccacatagtcgactctcccaactataagctgtggcatctggaccccgatgttgagtatgagatccgagtgctcctcacacgaccaggtgaggggggtacgggaccgccagggcctcccctcaccaccaggaccaagtgtgcagatccggtacatggcccacagaacgtggaaatcgtagacatcagagcccggcagctgaccctgcagtgggagcccttcggctacgcggtgacccgctgccatagctacaacctcaccgtgcagtaccagtatgtgttcaaccagcagcagtacgaggccgaggaggtcatccagacctcctcccactacaccctgcgaggcctgcgccccttcatgaccatccggctgcgactcttgctgtctaaccccgagggccgaatggagagcgaggagctggtggtgcagactgaggaagacgttccaggagctgttcctctagaatccatccaaggggggccctttgaggagaagatctacatccagtggaaacctcccaatgagaccaatggggtcatcacgctctacgagatcaactacaaggctgtcggctcgctggacccaagtgctgacctctcgagccagagggggaaagtgttcaagctccggaatgaaacccaccacctctttgtgggtctgtacccagggaccacctattccttcaccatcaaggccagcacagcaaagggctttgggccccctgtcaccactcggattgccaccaaaatttcagctccatccatgcctgagtacgacacagacaccccattgaatgagacagacacgaccatcacagtgatgctgaaacccgctcagtcccggggagctcctgtcagtgtttatcagctggttgtcaaggaggagcgacttcagaagtcacggagggcagctgacattattgagtgcttttcggtgcccgtgagctatcggaatgcctccagcctcgattctctacactactttgctgctgagttgaagcctgccaacctgcctgtcacccagccatttacagtgggtgacaataagacatacaatggctactggaaccctcctctctctcccctgaaaagctacagcatctacttccaggcactcagcaaagccaatggagagaccaaaatcaactgtgttcgtctggctacaaaagcaccaatgggcagcgcccaggtgaccccggggactccactctgcctcctcaccacaggtgcctccacccagaattctaacactgtggagccagagaagcaggtggacaacaccgtgaagatggctggcgtgatcgctggcctcctcatgttcatcatcattctcctgggcgtgatgctcaccatcaaaaggagaagaaatgcttattcctactcctattacttgaagctggccaagaagcagaaggagacccagagtggagcccagagggagatggggcctgtggcctctgccgacaaacccaccaccaagctcagcgccagccgcaatgatgaaggcttctcttctagttctcaggacgtcaacggattcacagatggcagccgcggggagctttcccagcccaccctcacgatccagactcatccctaccgcacctgtgaccctgtggagatgagctacccccgggaccagttccaacccgccatccgggtggctgacttgctgcagcacatcacgcagatgaagagaggccagggctacgggttcaaggaggaatacgaggccttaccagaggggcagacagcttcgtgggacacagccaaggaggatgaaaaccgcaataagaatcgatatgggaacatcatatcctacgaccattcccgggtgaggctgctggtgctggatggagacccgcactctgactacatcaatgccaactacattgacggataccatcgacctcggcactacattgcgactcaaggtccgatgcaggagactgtaaaggacttttggagaatgatctggcaggagaactccgccagcatcgtcatggtcacaaacctggtggaagtgggcagggtgaaatgtgtgcgatactggccagatgacacggaggtctacggagacattaaagtcaccctgattgaaacagagcccctggcagaatacgtcatacgcaccttcacagtccagaagaaaggctaccatgagatccgggagctccgcctcttccacttcaccagctggcctgaccacggcgttccctgctatgccactggccttctgggcttcgtccgccaggtcaagttcctcaaccccccggaagctgggcccatagtggtccactgcagtgctggggctgggcggactggctgcttcattgccattgacaccatgcttgacatggccgagaatgaaggggtggtggacatcttcaactgcgtgcgtgagctccgggcccaaagggtcaacctggtacagacagaggagcaatatgtgtttgtgcacgatgccatcctggaagcgtgcctctgtggcaacactgccatccctgtgtgtgagttccgttctctctactacaatatcagcaggctggacccccagacaaactccagccaaatcaaagatgaatttcagaccctcaacattgtgacaccccgtgtgcggcccgaggactgcagcattgggctcctgccccggaaccatgataagaatcgaagtatggacgtgctgcctctggaccgctgcctgcccttccttatctcagtggacggagaatccagcaattacatcaacgcagcactgatggatagccacaagcagcctgccgccttcgtggtcacccagcaccctctacccaacaccgtggcagacttctggaggctggtgttcgattacaactgctcctctgtggtgatgctgaatgagatggacactgcccagttctgtatgcagtactggcctgagaagacctccgggtgctatgggcccatccaggtggagttcgtctccgcagacatcgacgaggacatcatccacagaatattccgcatctgtaacatggcccggccacaggatggttatcgtatagtccagcacctccagtacattggctggcctgcctaccgggacacgcccccctccaagcgctctctgctcaaagtggtccgacgactggagaagtggcaggagcagtatgacgggagggagggacgtactgtggtccactgcctaaatgggggaggccgtagtggaaccttctgtgccatctgcagtgtgtgtgagatgatccagcagcaaaacatcattgacgtgttccacatcgtgaaaacactgcgtaacaacaaatccaacatggtggagaccctggaacagtataaatttgtatacgaggtggcactggaatatttaagctccttttagctcaatgggatggggaacctgccggagtccagaggctgctgtgaccaagcccccttttgtgtgaatggcagtaactgggctcaggagctctgaggtggcaccctgcctgactccaaggagaagactggtggccctgtgttccacggggggctctgcaccttctgaggggtctcctgttgccgtgggagatgctgctccaaaaggcccaggcttccttttcaacctaaccagccacagccaagggcccaagcagaagtacacccacaagcaaggccttggatttctggctcccagaccacctgcttttgttctgagtttgtggatctcttggcaagccaactgtgcaggtgctggggagtgggaggctcccctgccctccttctccttaggagtggaggagatgtgtgttctgctcctctacgtcatggaaaagattgaggctcttgggggtcactgctctgctgccccctgcaacctccttcaggggcctctggcaccagacatttgcagtctggaccagtgtgaccttacgatgttccctaggccacaagagaggccccccatcctcacacctaacctgcatggggcttcgcccacaaccattctgtaccccttccccagcctgggccttgaccgtccagcattcactggccggccagctgtgtccacagcagtttttgataaaggtgttctttgcttttttgtgtggtcagtgggagggggtggaactgcagggaacttctctgctcctccttgtctttgtaaaaagggaccacctccctggggcagggcttgggctgacctgtaggatgtaacccctgtgtttctttggtggtagctttctttggaagagacaaacaagataagatttgattattttccaaagtgtatgtgaaaagaaactttcttttggagggtgtaaaatcttagtctcttatgtcaaaaagaagggggcgggggagtttgagtatgtacctctaagacaaatctctcgggccttttattttttcctggcaatgtccttaaaagctcccaccctgggacagcatgccactgagcaaggagagatgggtgagcctgaagatggtccctttggtttctggggcaaatagagcaccagctttgtgcataatttggatgtccaaatttgaactccttcctaaagaaacccagcagccaccttgaaaaaggccattgtggagcccattatactttgatttaaaataggccaagagaatcaggcctggagatctagggtcttgtccaaagtgtgagtgagtcaatgagagggaaccaacatttgctaagtctctactgtatgccagggatcatgcttggcactttccataggacatttcacacagtccttagaacccccaggagagagctactgacttgttatcatctccatttgatcatctcctccaatgaggaaacccacgcaccttccttagtaatgaaatcctgggttccaaaggggcaggtaatggcaatgagacttctccgtgctgttttcttcatcttctctaagccaagcaattattttatggagggaaaataaggccagaaacttctgagcagataactccacaaatggaaatttagtactttcttcctgatgccagttcttctgggaagcgcagaatttcagatatattttagtaacacattcccagctccccaggaaagccagtctcatctaatttcttagtcagtaaaaacaattccctgttccttcaggctatgaatggaccagccagggaaactctcgaccttgatctctagccagtgcttaggcccaatatctgacagcctcaggtgggctgggacctaggaagctccatcttgaaggctggtctagccccagacagggcatgaggggcagagaattcaagaaggtacagctttggccctcaagagcccactgtatgctggggaaatggaaccatggtgcagtagtgtggagtggatgagtgttccatgagcctaggagcaagaaagtctcttcggcctcgggcttcctggagaaggggacgtccattcctgctgggtcttaacaagcataaaaaggaaaaaaaggaaactcaggcaaagggatccatatgtgcaatggcaaagaaatgtgaaaaggcattgggagaagcagtctgggggaggccagcccagtgcgggcacagcacaacacggggagcagcaagagatgagccagggtccaggagacagatgcccatcgcgagtacagactttgtcctattggcaacaaggagtccatggagctttagagagatgcactcagcttcgtgttggccaagactccttctgggccaatggggctgcctcttttcctttcatcagacactgtgaaaacattcccttaagcgtgcactttttaatatcacatctatttgtctgtctgctcattgttttgttgctggaactaaatatgcaatggatcatgagactcagattctatgagaaacccagggtctctgctttaccacggagcagggtcaccaacccagatctccaggcccatgaggatggaacatgaaaggagccgacaaaagttgcttccattggcatgggctctggagctgtccagaagtccagggacaccagacttgatcaaggaagggctgtcactttagaggttcaaaaggaagtgcctcaaagcaaaggcaagcaaaggaaccccacgatgaacttgctcttttcctttgatgagcctctccccaggtgtatttcagcagaccccggggacccacccccactgggcctgctggcctccctcggctccagcccaatgccccagctggccttccccagcctgcaaggagcctgtagcatggcaaatctgcctgctgtatgctattttcttagatcttggtacatccagacaggatgagggtggagggagagctatttaacacaaatcctaagatttttttctgctcaggaaggggtgaaatagctggcagatacaaaagacagtggcttttatcattttaaatggtaggaatttaaggtgtgacttcagggagaaacaaacttgcaaaaaaaaaaaatctcaggccatgttggggtaacccagcaagggccagtgatgatttcccccagctcatccccttattttcccacaacccaaccattctctaaagcaggacagtgaataggtcttaggccagtgcacacaggaagaaattgaggcttatggatggggatgacttccctaagatcccatgggacaaggatgtggcaaggcttggatgagatggggcaccagtgcccaggaatttgaacattttcctttacccaggaaatctccggagccaacaccaccacccccagggggtctccccaccccaccccatttacagggtgagctcagcctgtcatgagcagaggaaaatattattaatgctctctgagtctttacaacaggagctcttacctcatagatgtgggctctgtttggggaagatgcaaggaagtaatgagaagcccaggaaatttctccacctgtgtttatggcctaaatagcttcaggatgtatcttagctgcactccaacattgcatcctttctggggtgaagaatctgggccaaccaggggtccttgggcctctagaaggccacagtaggcctctctttgtgggaatggaaggggacagtttgcttttagtgctggccctctctgtgggtgtggcctgcaaaggaaccaacagaccctatgctggggactctaacatgtgagctcattaaattcttccagcattctaaaggagggtttgtgattgtcaccatttactgatgaggaaactaaggctcctaggggagaaatcacttgcccacagttccacagctagtgagtgaatgaaccaggatttaaaccggttttttctcactacagagacaatatttttccaccattgtatctcacatttttcccaggaggttacccataacagaagagactagagtggaacagatacgtcagtggataaagctcaaagcaaacaacagtaagcttaaaattccttcatagtctcatgttttacgttcacaattcatgcaaaatttgcattccactttctgatttagccttgttggttttaatatgactctatgaatatttcaaaaaaaaatgtgctctgttcctcatgttgttctgttctgttcaccccgctatgacggaccctaggtcagctggtcttcagcttgaccctagaattgactctaggagcagtgaccctgctgcctcccagagccagttataggctcaagatcaagaccaactgaccttctcctaggcagctcctttggtgtgtgggtgctctgacctcactgttcatgaggggacctcaactaaggcatcttccagttgggtgctggaaggaacccattaactcacactagaatgatgaggatttgctcatctggcgtggagaaggatgagcccacaaaaccctaaagggaaaagagaagctggacacagctgtactcagcagattcctgaatgctaggctggaaagtggtgcctgttgtccaagtggagtcacatggttgctaatgtgggcaagtctgaggacacacttcatgagcagctggggtctggaaggctcctcactttaccctagccacacataattactgggtgcctacagcacctagcaccttggagggggcactattaggaaatcgagattactatggcacaattaattcctgggtaaggcatggggttgtggtggacagagctcagtctttagtttgaacgaaaacatacatacatgaaaaacatacatgaaaaaaggaccctcatcaacattagaaggggtagatttggagcactttaggcaggaaaacaggaacgcaaggccaggaaactggaacccagtgaatactcagaaccgaggatgcagatgacttatttagcaaaatggtcacttctgtgacatagctggagaaaggatgggtaacagcttgccagagccacttggaacaagggcaaatctcagtgtctggggcaaaagatgatgcatttccctctgacccatcatgtttattcatcctccactccccattgccacactagctcttgctgtaagtcctcaccaggatctacatttcctcgtcgctggtgggaaccccttagagtacatagaggtatcagtccagtaagactgctctacacaacagaagtgaggcccagggagtagcagccaggcccttatcctgttacctctgcaggagtgactgcccaacccagatccagagacattgaaggaaatgataattccttggtacctcactgccttgggacaaaatgaagaaagccacccttccttaggctgcagcttgccactcctgggctgggtaaacaggtcatcagcaccaagctcaaccaggagtaacactctggaagacatgggtgagcccaagaggaagcatgaacaggacgctgttcctaagtcatgtcaacaggttgtgctgggccaggatccccagggaaaaaaatggtcaacccaactggagggtaggttagaagaaaaaaaacataaacgtggatagtcatgtcatctcaaatccctgacttggcttccccattacttaacagtctgagctccttcttagcctgtgaccagcttcaaatcacagccaagtaaaacaaggaaataggaaaagtaaatccaactagaagagacaagctgagattcagatttgtttactcctcccatgcaaagtttccctgttggaggttttccatgtatacatgtctagaagtgatagaatgcaaggccttggctttgtcttgcagggatctgcctttgaggtcatagactgaacagcagggagagaggttagtggtggagtgtggggggagctgttctagctccagtttcttctgacacatttttcaggatcatggatctgatcctccgaagcacagcagagatatctaagccatatttgtgcacatgagcagactcttctagttttttagtaaccagggatgggcttttgcatggcactgactatagagatgtcttgtagagatcaagccagtcttttgcatcccacctgcccacctccagaagagatgggaaaaggtcatcaaagggcattcaccaactgaaatccactcatgaatgttaggtctctaaaaggaggcatcaacactcacaatggtagcctccaaacctagcatcccacctatctaagagctcaggggtggtccactggggcagatacaagggaagtgcaagggctcaggatgaaagaaaatctattgggaagagttttaggggcttgatcattatggggcttccttctatatctgagaactgctctgggtggtgagatgtggactctgatccttaattggaatgttcggagaatgagtgtctggtggccttgaagtgttggacagaaaagtatcagtataaaagcctggagctcagggtaattaatgtagttcatggttccttagtgagcaggactcttggatgtggaggagaaagggtcataggaagtaaaccaccaaaattacaaaattgagtctctgtacaattacttcagtgcctttgggcttatgaatacaaatcagtgggccttctctatgatggtccaacaaactctcagtgtccaccctgtccctgtatctcccatggaagatgaataatgtcaggtgttctttgggtcaaaggccccagggcagtctggaggcttagagggcagagtggtgtcattccatgtaaagttaggcttctgaggggtcaggcagaatatggtgtccatatcttccatagctctgcagattcttggatgaagtcaagcacagtttgctagacccaggtcactcctctgagtataactaggacccatgagtgaaacttaatagctgtaaggaagaacctgctgtctgccagagaggataagctgcccatctcagcagctgtctaaaagaaggcaggtgtctctttaaagggaagagaagcattggtgaaatggatttcaggtcacttccattccagatgggtgagatcttgtggagctgggatcatgtttgaactcattcatacctgtagagcacgaatccaagtagattgtgtttggtctgtacaggctgaagccccctgctctcccacccaagtgcccccactgagcaggccaacatgctgttgtggccacatatactgggctgatccaggctggttatcaccaaacagcaaaccatagggaacagctgctttgccatagacccaatacccatgtagatctctcatgagagcagccataactcagacccactgaccaacagggccatgagtgacagccagaaccagtgaaggtccaagtaggacacagagcagggcttttcttaccatacacattatctccagaggttatttctaccccactccctattcaaggcctgttggagcacactgcaaaagcaaaagcacagtaactcaatttacacatgattataatcatttccagtgcacacatttcatcaccaggtggatcctgagctagcccatgtaaatccgggttaacccatattggtaatcatactcaaaagcacttttcaccctacattctactagccaatcaaagacaaagagttgtggcctctaccattgccttggcttctggacaccctcacaagctatcccaaggttcccgctcaactccagggaggctgacatcttcacatccactgggcatataatattgcatgagaccaaagtctccacactctttgcagcctcctccatgaatcccaatggcctgcacttgtacagtttgggtgtttgatagataaagcacgtatgagaagagaaaacaaaataaatcaactttttaaaaaagccagcactgtgctgtcaatgttttttttttcttttcaattctagctcagaaaagcagaaggtaaataatgtcaggtcaatgaatatcagatatattttttgactgtacattacagtgaagtgtaatctttttacacctgcaagtccatcttatttattcttgtaaatgttccctgacaatgtttgtaacatggctgtgttaaaaaatctatacaataaagctgtgaccctgagattcatgttttcctaagata

SEQ ID NO: 17039 - DNA, 12660 bp, Homo sapiens
  source 1..12660: mol_type = unassigned DNA
gttaggactcgggggacaccgccccccgccccccgcgtcccgcccccgcccagcctcccgcctcagttcgcgccgcgcctcggcttggaacgcaggagcgccggctccgggagcccgagcggagccagccgcgcgcacagccagcggccgcgccggcgatgcggggccaccccgcgcccgccccagtcccggccccggcccccgcgggaaggggctgagctgcccgccgccgcccggatggcgagcctcgccgcgctcgccctcagcctgctcctgaggctgcagctgccgccactgcccggcgcccgggctcagagcgccgcaggtggctgttcctttgatgagcactacagcaactgtggttatagtgtggctctagggaccaatgggttcacctgggagcagattaacacatgggagaaaccaatgctggaccaggcagtgcccacaggatctttcatgatggtgaacagctctgggagagcctctggccagaaggcccaccttctcctgccaaccctgaaggagaatgacacccactgcatcgacttccattactacttctccagccgtgacaggtccagcccaggggccttgaacgtctacgtgaaggtgaatggtggcccccaagggaaccctgtgtggaatgtgtccggggtcgtcactgagggctgggtgaaggcagagctcgccatcagcactttctggccacatttctatcaggtgatatttgaatccgtctcattgaagggtcatcctggctacatcgccgtggacgaggtccgggtccttgctcatccatgcagaaaagcacctcattttctgcgactccaaaacgtggaggtgaatgtggggcagaatgccacatttcagtgcattgctggtgggaagtggtctcagcatgacaagctttggctccagcaatggaatggcagggacacggccctgatggtcacccgtgtggtcaaccacaggcgcttctcagccacagtcagtgtggcagacactgcccagcggagcgtcagcaagtaccgctgtgtgatccgctctgatggtgggtctggtgtgtccaactacgcggagctgatcgtgaaagagcctcccacgcccattgctcccccagagctgctggctgtgggggccacatacctgtggatcaagccaaatgccaactccatcatcggggatggccccatcatcctgaaggaagtggaatatcgcaccaccacaggcacgtgggcagagacccacatagtcgactctcccaactataagctgtggcatctggaccccgatgttgagtatgagatccgagtgctcctcacacgaccaggtgaggggggtacgggaccgccagggcctcccctcaccaccaggaccaagtgtgcagatccggtacatggcccacagaacgtggaaatcgtagacatcagagcccggcagctgaccctgcagtgggagcccttcggctacgcggtgacccgctgccatagctacaacctcaccgtgcagtaccagtatgtgttcaaccagcagcagtacgaggccgaggaggtcatccagacctcctcccactacaccctgcgaggcctgcgccccttcatgaccatccggctgcgactcttgctgtctaaccccgagggccgaatggagagcgaggagctggtggtgcagactgaggaagacgttccaggagctgttcctctagaatccatccaaggggggccctttgaggagaagatctacatccagtggaaacctcccaatgagaccaatggggtcatcacgctctacgagatcaactacaaggctgtcggctcgctggacccaagtgctgacctctcgagccagagggggaaagtgttcaagctccggaatgaaacccaccacctctttgtgggtctgtacccagggaccacctattccttcaccatcaaggccagcacagcaaagggctttgggccccctgtcaccactcggattgccaccaaaatttcagctccatccatgcctgagtacgacacagacaccccattgaatgagacagacacgaccatcacagtgatgctgaaacccgctcagtcccggggagctcctgtcagtgtttatcagctggttgtcaaggaggagcgacttcagaagtcacggagggcagctgacattattgagtgcttttcggtgcccgtgagctatcggaatgcctccagcctcgattctctacactactttgctgctgagttgaagcctgccaacctgcctgtcacccagccatttacagtgggtgacaataagacatacaatggctactggaaccctcctctctctcccctgaaaagctacagcatctacttccaggcactcagcaaagccaatggagagaccaaaatcaactgtgttcgtctggctacaaaaggtgcctccacccagaattctaacactgtggagccagagaagcaggtggacaacaccgtgaagatggctggcgtgatcgctggcctcctcatgttcatcatcattctcctgggcgtgatgctcaccatcaaaaggaggaagctggccaagaagcagaaggagacccagagtggagcccagagggagatggggcctgtggcctctgccgacaaacccaccaccaagctcagcgccagccgcaatgatgaaggcttctcttctagttctcaggacgtcaacggattcacagatggcagccgcggggagctttcccagcccaccctcacgatccagactcatccctaccgcacctgtgaccctgtggagatgagctacccccgggaccagttccaacccgccatccgggtggctgacttgctgcagcacatcacgcagatgaagagaggccagggctacgggttcaaggaggaatacgaggccttaccagaggggcagacagcttcgtgggacacagccaaggaggatgaaaaccgcaataagaatcgatatgggaacatcatatcctacgaccattcccgggtgaggctgctggtgctggatggagacccgcactctgactacatcaatgccaactacattgacggataccatcgacctcggcactacattgcgactcaaggtccgatgcaggagactgtaaaggacttttggagaatgatctggcaggagaactccgccagcatcgtcatggtcacaaacctggtggaagtgggcagggtgaaatgtgtgcgatactggccagatgacacggaggtctacggagacattaaagtcaccctgattgaaacagagcccctggcagaatacgtcatacgcaccttcacagtccagaagaaaggctaccatgagatccgggagctccgcctcttccacttcaccagctggcctgaccacggcgttccctgctatgccactggccttctgggcttcgtccgccaggtcaagttcctcaaccccccggaagctgggcccatagtggtccactgcagtgctggggctgggcggactggctgcttcattgccattgacaccatgcttgacatggccgagaatgaaggggtggtggacatcttcaactgcgtgcgtgagctccgggcccaaagggtcaacctggtacagacagaggagcaatatgtgtttgtgcacgatgccatcctggaagcgtgcctctgtggcaacactgccatccctgtgtgtgagttccgttctctctactacaatatcagcaggctggacccccagacaaactccagccaaatcaaagatgaatttcagaccctcaacattgtgacaccccgtgtgcggcccgaggactgcagcattgggctcctgccccggaaccatgataagaatcgaagtatggacgtgctgcctctggaccgctgcctgcccttccttatctcagtggacggagaatccagcaattacatcaacgcagcactgatggatagccacaagcagcctgccgccttcgtggtcacccagcaccctctacccaacaccgtggcagacttctggaggctggtgttcgattacaactgctcctctgtggtgatgctgaatgagatggacactgcccagttctgtatgcagtactggcctgagaagacctccgggtgctatgggcccatccaggtggagttcgtctccgcagacatcgacgaggacatcatccacagaatattccgcatctgtaacatggcccggccacaggatggttatcgtatagtccagcacctccagtacattggctggcctgcctaccgggacacgcccccctccaagcgctctctgctcaaagtggtccgacgactggagaagtggcaggagcagtatgacgggagggagggacgtactgtggtccactgcctaaatgggggaggccgtagtggaaccttctgtgccatctgcagtgtgtgtgagatgatccagcagcaaaacatcattgacgtgttccacatcgtgaaaacactgcgtaacaacaaatccaacatggtggagaccctggaacagtataaatttgtatacgaggtggcactggaatatttaagctccttttagctcaatgggatggggaacctgccggagtccagaggctgctgtgaccaagcccccttttgtgtgaatggcagtaactgggctcaggagctctgaggtggcaccctgcctgactccaaggagaagactggtggccctgtgttccacggggggctctgcaccttctgaggggtctcctgttgccgtgggagatgctgctccaaaaggcccaggcttccttttcaacctaaccagccacagccaagggcccaagcagaagtacacccacaagcaaggccttggatttctggctcccagaccacctgcttttgttctgagtttgtggatctcttggcaagccaactgtgcaggtgctggggagtgggaggctcccctgccctccttctccttaggagtggaggagatgtgtgttctgctcctctacgtcatggaaaagattgaggctcttgggggtcactgctctgctgccccctgcaacctccttcaggggcctctggcaccagacatttgcagtctggaccagtgtgaccttacgatgttccctaggccacaagagaggccccccatcctcacacctaacctgcatggggcttcgcccacaaccattctgtaccccttccccagcctgggccttgaccgtccagcattcactggccggccagctgtgtccacagcagtttttgataaaggtgttctttgcttttttgtgtggtcagtgggagggggtggaactgcagggaacttctctgctcctccttgtctttgtaaaaagggaccacctccctggggcagggcttgggctgacctgtaggatgtaacccctgtgtttctttggtggtagctttctttggaagagacaaacaagataagatttgattattttccaaagtgtatgtgaaaagaaactttcttttggagggtgtaaaatcttagtctcttatgtcaaaaagaagggggcgggggagtttgagtatgtacctctaagacaaatctctcgggccttttattttttcctggcaatgtccttaaaagctcccaccctgggacagcatgccactgagcaaggagagatgggtgagcctgaagatggtccctttggtttctggggcaaatagagcaccagctttgtgcataatttggatgtccaaatttgaactccttcctaaagaaacccagcagccaccttgaaaaaggccattgtggagcccattatactttgatttaaaataggccaagagaatcaggcctggagatctagggtcttgtccaaagtgtgagtgagtcaatgagagggaaccaacatttgctaagtctctactgtatgccagggatcatgcttggcactttccataggacatttcacacagtccttagaacccccaggagagagctactgacttgttatcatctccatttgatcatctcctccaatgaggaaacccacgcaccttccttagtaatgaaatcctgggttccaaaggggcaggtaatggcaatgagacttctccgtgctgttttcttcatcttctctaagccaagcaattattttatggagggaaaataaggccagaaacttctgagcagataactccacaaatggaaatttagtactttcttcctgatgccagttcttctgggaagcgcagaatttcagatatattttagtaacacattcccagctccccaggaaagccagtctcatctaatttcttagtcagtaaaaacaattccctgttccttcaggctatgaatggaccagccagggaaactctcgaccttgatctctagccagtgcttaggcccaatatctgacagcctcaggtgggctgggacctaggaagctccatcttgaaggctggtctagccccagacagggcatgaggggcagagaattcaagaaggtacagctttggccctcaagagcccactgtatgctggggaaatggaaccatggtgcagtagtgtggagtggatgagtgttccatgagcctaggagcaagaaagtctcttcggcctcgggcttcctggagaaggggacgtccattcctgctgggtcttaacaagcataaaaaggaaaaaaaggaaactcaggcaaagggatccatatgtgcaatggcaaagaaatgtgaaaaggcattgggagaagcagtctgggggaggccagcccagtgcgggcacagcacaacacggggagcagcaagagatgagccagggtccaggagacagatgcccatcgcgagtacagactttgtcctattggcaacaaggagtccatggagctttagagagatgcactcagcttcgtgttggccaagactccttctgggccaatggggctgcctcttttcctttcatcagacactgtgaaaacattcccttaagcgtgcactttttaatatcacatctatttgtctgtctgctcattgttttgttgctggaactaaatatgcaatggatcatgagactcagattctatgagaaacccagggtctctgctttaccacggagcagggtcaccaacccagatctccaggcccatgaggatggaacatgaaaggagccgacaaaagttgcttccattggcatgggctctggagctgtccagaagtccagggacaccagacttgatcaaggaagggctgtcactttagaggttcaaaaggaagtgcctcaaagcaaaggcaagcaaaggaaccccacgatgaacttgctcttttcctttgatgagcctctccccaggtgtatttcagcagaccccggggacccacccccactgggcctgctggcctccctcggctccagcccaatgccccagctggccttccccagcctgcaaggagcctgtagcatggcaaatctgcctgctgtatgctattttcttagatcttggtacatccagacaggatgagggtggagggagagctatttaacacaaatcctaagatttttttctgctcaggaaggggtgaaatagctggcagatacaaaagacagtggcttttatcattttaaatggtaggaatttaaggtgtgacttcagggagaaacaaacttgcaaaaaaaaaaaatctcaggccatgttggggtaacccagcaagggccagtgatgatttcccccagctcatccccttattttcccacaacccaaccattctctaaagcaggacagtgaataggtcttaggccagtgcacacaggaagaaattgaggcttatggatggggatgacttccctaagatcccatgggacaaggatgtggcaaggcttggatgagatggggcaccagtgcccaggaatttgaacattttcctttacccaggaaatctccggagccaacaccaccacccccagggggtctccccaccccaccccatttacagggtgagctcagcctgtcatgagcagaggaaaatattattaatgctctctgagtctttacaacaggagctcttacctcatagatgtgggctctgtttggggaagatgcaaggaagtaatgagaagcccaggaaatttctccacctgtgtttatggcctaaatagcttcaggatgtatcttagctgcactccaacattgcatcctttctggggtgaagaatctgggccaaccaggggtccttgggcctctagaaggccacagtaggcctctctttgtgggaatggaaggggacagtttgcttttagtgctggccctctctgtgggtgtggcctgcaaaggaaccaacagaccctatgctggggactctaacatgtgagctcattaaattcttccagcattctaaaggagggtttgtgattgtcaccatttactgatgaggaaactaaggctcctaggggagaaatcacttgcccacagttccacagctagtgagtgaatgaaccaggatttaaaccggttttttctcactacagagacaatatttttccaccattgtatctcacatttttcccaggaggttacccataacagaagagactagagtggaacagatacgtcagtggataaagctcaaagcaaacaacagtaagcttaaaattccttcatagtctcatgttttacgttcacaattcatgcaaaatttgcattccactttctgatttagccttgttggttttaatatgactctatgaatatttcaaaaaaaaatgtgctctgttcctcatgttgttctgttctgttcaccccgctatgacggaccctaggtcagctggtcttcagcttgaccctagaattgactctaggagcagtgaccctgctgcctcccagagccagttataggctcaagatcaagaccaactgaccttctcctaggcagctcctttggtgtgtgggtgctctgacctcactgttcatgaggggacctcaactaaggcatcttccagttgggtgctggaaggaacccattaactcacactagaatgatgaggatttgctcatctggcgtggagaaggatgagcccacaaaaccctaaagggaaaagagaagctggacacagctgtactcagcagattcctgaatgctaggctggaaagtggtgcctgttgtccaagtggagtcacatggttgctaatgtgggcaagtctgaggacacacttcatgagcagctggggtctggaaggctcctcactttaccctagccacacataattactgggtgcctacagcacctagcaccttggagggggcactattaggaaatcgagattactatggcacaattaattcctgggtaaggcatggggttgtggtggacagagctcagtctttagtttgaacgaaaacatacatacatgaaaaacatacatgaaaaaaggaccctcatcaacattagaaggggtagatttggagcactttaggcaggaaaacaggaacgcaaggccaggaaactggaacccagtgaatactcagaaccgaggatgcagatgacttatttagcaaaatggtcacttctgtgacatagctggagaaaggatgggtaacagcttgccagagccacttggaacaagggcaaatctcagtgtctggggcaaaagatgatgcatttccctctgacccatcatgtttattcatcctccactccccattgccacactagctcttgctgtaagtcctcaccaggatctacatttcctcgtcgctggtgggaaccccttagagtacatagaggtatcagtccagtaagactgctctacacaacagaagtgaggcccagggagtagcagccaggcccttatcctgttacctctgcaggagtgactgcccaacccagatccagagacattgaaggaaatgataattccttggtacctcactgccttgggacaaaatgaagaaagccacccttccttaggctgcagcttgccactcctgggctgggtaaacaggtcatcagcaccaagctcaaccaggagtaacactctggaagacatgggtgagcccaagaggaagcatgaacaggacgctgttcctaagtcatgtcaacaggttgtgctgggccaggatccccagggaaaaaaatggtcaacccaactggagggtaggttagaagaaaaaaaacataaacgtggatagtcatgtcatctcaaatccctgacttggcttccccattacttaacagtctgagctccttcttagcctgtgaccagcttcaaatcacagccaagtaaaacaaggaaataggaaaagtaaatccaactagaagagacaagctgagattcagatttgtttactcctcccatgcaaagtttccctgttggaggttttccatgtatacatgtctagaagtgatagaatgcaaggccttggctttgtcttgcagggatctgcctttgaggtcatagactgaacagcagggagagaggttagtggtggagtgtggggggagctgttctagctccagtttcttctgacacatttttcaggatcatggatctgatcctccgaagcacagcagagatatctaagccatatttgtgcacatgagcagactcttctagttttttagtaaccagggatgggcttttgcatggcactgactatagagatgtcttgtagagatcaagccagtcttttgcatcccacctgcccacctccagaagagatgggaaaaggtcatcaaagggcattcaccaactgaaatccactcatgaatgttaggtctctaaaaggaggcatcaacactcacaatggtagcctccaaacctagcatcccacctatctaagagctcaggggtggtccactggggcagatacaagggaagtgcaagggctcaggatgaaagaaaatctattgggaagagttttaggggcttgatcattatggggcttccttctatatctgagaactgctctgggtggtgagatgtggactctgatccttaattggaatgttcggagaatgagtgtctggtggccttgaagtgttggacagaaaagtatcagtataaaagcctggagctcagggtaattaatgtagttcatggttccttagtgagcaggactcttggatgtggaggagaaagggtcataggaagtaaaccaccaaaattacaaaattgagtctctgtacaattacttcagtgcctttgggcttatgaatacaaatcagtgggccttctctatgatggtccaacaaactctcagtgtccaccctgtccctgtatctcccatggaagatgaataatgtcaggtgttctttgggtcaaaggccccagggcagtctggaggcttagagggcagagtggtgtcattccatgtaaagttaggcttctgaggggtcaggcagaatatggtgtccatatcttccatagctctgcagattcttggatgaagtcaagcacagtttgctagacccaggtcactcctctgagtataactaggacccatgagtgaaacttaatagctgtaaggaagaacctgctgtctgccagagaggataagctgcccatctcagcagctgtctaaaagaaggcaggtgtctctttaaagggaagagaagcattggtgaaatggatttcaggtcacttccattccagatgggtgagatcttgtggagctgggatcatgtttgaactcattcatacctgtagagcacgaatccaagtagattgtgtttggtctgtacaggctgaagccccctgctctcccacccaagtgcccccactgagcaggccaacatgctgttgtggccacatatactgggctgatccaggctggttatcaccaaacagcaaaccatagggaacagctgctttgccatagacccaatacccatgtagatctctcatgagagcagccataactcagacccactgaccaacagggccatgagtgacagccagaaccagtgaaggtccaagtaggacacagagcagggcttttcttaccatacacattatctccagaggttatttctaccccactccctattcaaggcctgttggagcacactgcaaaagcaaaagcacagtaactcaatttacacatgattataatcatttccagtgcacacatttcatcaccaggtggatcctgagctagcccatgtaaatccgggttaacccatattggtaatcatactcaaaagcacttttcaccctacattctactagccaatcaaagacaaagagttgtggcctctaccattgccttggcttctggacaccctcacaagctatcccaaggttcccgctcaactccagggaggctgacatcttcacatccactgggcatataatattgcatgagaccaaagtctccacactctttgcagcctcctccatgaatcccaatggcctgcacttgtacagtttgggtgtttgatagataaagcacgtatgagaagagaaaacaaaataaatcaactttttaaaaaagccagcactgtgctgtcaatgttttttttttcttttcaattctagctcagaaaagcagaaggtaaataatgtcaggtcaatgaatatcagatatattttttgactgtacattacagtgaagtgtaatctttttacacctgcaagtccatcttatttattcttgtaaatgttccctgacaatgtttgtaacatggctgtgttaaaaaatctatacaataaagctgtgaccctgagattcatgttttcctaagata

SEQ ID NO: 17040 - DNA, 12681 bp, Homo sapiens
  source 1..12681: mol_type = unassigned DNA
cctcccgcctcagttcgcgccgcgcctcggcttggaacgcaggagcgccggctccgggagcccgagcggagccagccgcgcgcacagccagcggccgcgccggcgatgcggggccaccccgcgcccgccccagtcccggccccggcccccgcgggaaggggctgagctgcccgccgccgcccggatggcgagcctcgccgcgctcgccctcagcctgctcctgaggctgcagctgccgccactgcccggcgcccgggctcagagcgccgcaggtggctgttcctttgatgagcactacagcaactgtggttatagtgtggctctagggaccaatgggttcacctgggagcagattaacacatgggagaaaccaatgctggaccaggcagtgcccacaggatctttcatgatggtgaacagctctgggagagcctctggccagaaggcccaccttctcctgccaaccctgaaggagaatgacacccactgcatcgacttccattactacttctccagccgtgacaggtccagcccaggggccttgaacgtctacgtgaaggtgaatggtggcccccaagggaaccctgtgtggaatgtgtccggggtcgtcactgagggctgggtgaaggcagagctcgccatcagcactttctggccacatttctatcaggtgatatttgaatccgtctcattgaagggtcatcctggctacatcgccgtggacgaggtccgggtccttgctcatccatgcagaaaagcacctcattttctgcgactccaaaacgtggaggtgaatgtggggcagaatgccacatttcagtgcattgctggtgggaagtggtctcagcatgacaagctttggctccagcaatggaatggcagggacacggccctgatggtcacccgtgtggtcaaccacaggcgcttctcagccacagtcagtgtggcagacactgcccagcggagcgtcagcaagtaccgctgtgtgatccgctctgatggtgggtctggtgtgtccaactacgcggagctgatcgtgaaagagcctcccacgcccattgctcccccagagctgctggctgtgggggccacatacctgtggatcaagccaaatgccaactccatcatcggggatggccccatcatcctgaaggaagtggaatatcgcaccaccacaggcacgtgggcagagacccacatagtcgactctcccaactataagctgtggcatctggaccccgatgttgagtatgagatccgagtgctcctcacacgaccaggtgaggggggtacgggaccgccagggcctcccctcaccaccaggaccaagtgtgcagatccggtacatggcccacagaacgtggaaatcgtagacatcagagcccggcagctgaccctgcagtgggagcccttcggctacgcggtgacccgctgccatagctacaacctcaccgtgcagtaccagtatgtgttcaaccagcagcagtacgaggccgaggaggtcatccagacctcctcccactacaccctgcgaggcctgcgccccttcatgaccatccggctgcgactcttgctgtctaaccccgagggccgaatggagagcgaggagctggtggtgcagactgaggaagacgttccaggagctgttcctctagaatccatccaaggggggccctttgaggagaagatctacatccagtggaaacctcccaatgagaccaatggggtcatcacgctctacgagatcaactacaaggctgtcggctcgctggacccaagtgctgacctctcgagccagagggggaaagtgttcaagctccggaatgaaacccaccacctctttgtgggtctgtacccagggaccacctattccttcaccatcaaggccagcacagcaaagggctttgggccccctgtcaccactcggattgccaccaaaatttcagctccatccatgcctgagtacgacacagacaccccattgaatgagacagacacgaccatcacagtgatgctgaaacccgctcagtcccggggagctcctgtcagtgtttatcagctggttgtcaaggaggagcgacttcagaagtcacggagggcagctgacattattgagtgcttttcggtgcccgtgagctatcggaatgcctccagcctcgattctctacactactttgctgctgagttgaagcctgccaacctgcctgtcacccagccatttacagtgggtgacaataagacatacaatggctactggaaccctcctctctctcccctgaaaagctacagcatctacttccaggcactcagcaaagccaatggagagaccaaaatcaactgtgttcgtctggctacaaaagcaccaatgggcagcgcccaggtgaccccggggactccactctgcctcctcaccacaggtgcctccacccagaattctaacactgtggagccagagaagcaggtggacaacaccgtgaagatggctggcgtgatcgctggcctcctcatgttcatcatcattctcctgggcgtgatgctcaccatcaaaaggagaagaaatgcttattcctactcctattacttgtcccaaaggaagctggccaagaagcagaaggagacccagagtggagcccagagggagatggggcctgtggcctctgccgacaaacccaccaccaagctcagcgccagccgcaatgatgaaggcttctcttctagttctcaggacgtcaacggattcacagatggcagccgcggggagctttcccagcccaccctcacgatccagactcatccctaccgcacctgtgaccctgtggagatgagctacccccgggaccagttccaacccgccatccgggtggctgacttgctgcagcacatcacgcagatgaagagaggccagggctacgggttcaaggaggaatacgaggccttaccagaggggcagacagcttcgtgggacacagccaaggaggatgaaaaccgcaataagaatcgatatgggaacatcatatcctacgaccattcccgggtgaggctgctggtgctggatggagacccgcactctgactacatcaatgccaactacattgacggataccatcgacctcggcactacattgcgactcaaggtccgatgcaggagactgtaaaggacttttggagaatgatctggcaggagaactccgccagcatcgtcatggtcacaaacctggtggaagtgggcagggtgaaatgtgtgcgatactggccagatgacacggaggtctacggagacattaaagtcaccctgattgaaacagagcccctggcagaatacgtcatacgcaccttcacagtccagaagaaaggctaccatgagatccgggagctccgcctcttccacttcaccagctggcctgaccacggcgttccctgctatgccactggccttctgggcttcgtccgccaggtcaagttcctcaaccccccggaagctgggcccatagtggtccactgcagtgctggggctgggcggactggctgcttcattgccattgacaccatgcttgacatggccgagaatgaaggggtggtggacatcttcaactgcgtgcgtgagctccgggcccaaagggtcaacctggtacagacagaggagcaatatgtgtttgtgcacgatgccatcctggaagcgtgcctctgtggcaacactgccatccctgtgtgtgagttccgttctctctactacaatatcagcaggctggacccccagacaaactccagccaaatcaaagatgaatttcagaccctcaacattgtgacaccccgtgtgcggcccgaggactgcagcattgggctcctgccccggaaccatgataagaatcgaagtatggacgtgctgcctctggaccgctgcctgcccttccttatctcagtggacggagaatccagcaattacatcaacgcagcactgatggatagccacaagcagcctgccgccttcgtggtcacccagcaccctctacccaacaccgtggcagacttctggaggctggtgttcgattacaactgctcctctgtggtgatgctgaatgagatggacactgcccagttctgtatgcagtactggcctgagaagacctccgggtgctatgggcccatccaggtggagttcgtctccgcagacatcgacgaggacatcatccacagaatattccgcatctgtaacatggcccggccacaggatggttatcgtatagtccagcacctccagtacattggctggcctgcctaccgggacacgcccccctccaagcgctctctgctcaaagtggtccgacgactggagaagtggcaggagcagtatgacgggagggagggacgtactgtggtccactgcctaaatgggggaggccgtagtggaaccttctgtgccatctgcagtgtgtgtgagatgatccagcagcaaaacatcattgacgtgttccacatcgtgaaaacactgcgtaacaacaaatccaacatggtggagaccctggaacagtataaatttgtatacgaggtggcactggaatatttaagctccttttagctcaatgggatggggaacctgccggagtccagaggctgctgtgaccaagcccccttttgtgtgaatggcagtaactgggctcaggagctctgaggtggcaccctgcctgactccaaggagaagactggtggccctgtgttccacggggggctctgcaccttctgaggggtctcctgttgccgtgggagatgctgctccaaaaggcccaggcttccttttcaacctaaccagccacagccaagggcccaagcagaagtacacccacaagcaaggccttggatttctggctcccagaccacctgcttttgttctgagtttgtggatctcttggcaagccaactgtgcaggtgctggggagtgggaggctcccctgccctccttctccttaggagtggaggagatgtgtgttctgctcctctacgtcatggaaaagattgaggctcttgggggtcactgctctgctgccccctgcaacctccttcaggggcctctggcaccagacatttgcagtctggaccagtgtgaccttacgatgttccctaggccacaagagaggccccccatcctcacacctaacctgcatggggcttcgcccacaaccattctgtaccccttccccagcctgggccttgaccgtccagcattcactggccggccagctgtgtccacagcagtttttgataaaggtgttctttgcttttttgtgtggtcagtgggagggggtggaactgcagggaacttctctgctcctccttgtctttgtaaaaagggaccacctccctggggcagggcttgggctgacctgtaggatgtaacccctgtgtttctttggtggtagctttctttggaagagacaaacaagataagatttgattattttccaaagtgtatgtgaaaagaaactttcttttggagggtgtaaaatcttagtctcttatgtcaaaaagaagggggcgggggagtttgagtatgtacctctaagacaaatctctcgggccttttattttttcctggcaatgtccttaaaagctcccaccctgggacagcatgccactgagcaaggagagatgggtgagcctgaagatggtccctttggtttctggggcaaatagagcaccagctttgtgcataatttggatgtccaaatttgaactccttcctaaagaaacccagcagccaccttgaaaaaggccattgtggagcccattatactttgatttaaaataggccaagagaatcaggcctggagatctagggtcttgtccaaagtgtgagtgagtcaatgagagggaaccaacatttgctaagtctctactgtatgccagggatcatgcttggcactttccataggacatttcacacagtccttagaacccccaggagagagctactgacttgttatcatctccatttgatcatctcctccaatgaggaaacccacgcaccttccttagtaatgaaatcctgggttccaaaggggcaggtaatggcaatgagacttctccgtgctgttttcttcatcttctctaagccaagcaattattttatggagggaaaataaggccagaaacttctgagcagataactccacaaatggaaatttagtactttcttcctgatgccagttcttctgggaagcgcagaatttcagatatattttagtaacacattcccagctccccaggaaagccagtctcatctaatttcttagtcagtaaaaacaattccctgttccttcaggctatgaatggaccagccagggaaactctcgaccttgatctctagccagtgcttaggcccaatatctgacagcctcaggtgggctgggacctaggaagctccatcttgaaggctggtctagccccagacagggcatgaggggcagagaattcaagaaggtacagctttggccctcaagagcccactgtatgctggggaaatggaaccatggtgcagtagtgtggagtggatgagtgttccatgagcctaggagcaagaaagtctcttcggcctcgggcttcctggagaaggggacgtccattcctgctgggtcttaacaagcataaaaaggaaaaaaaggaaactcaggcaaagggatccatatgtgcaatggcaaagaaatgtgaaaaggcattgggagaagcagtctgggggaggccagcccagtgcgggcacagcacaacacggggagcagcaagagatgagccagggtccaggagacagatgcccatcgcgagtacagactttgtcctattggcaacaaggagtccatggagctttagagagatgcactcagcttcgtgttggccaagactccttctgggccaatggggctgcctcttttcctttcatcagacactgtgaaaacattcccttaagcgtgcactttttaatatcacatctatttgtctgtctgctcattgttttgttgctggaactaaatatgcaatggatcatgagactcagattctatgagaaacccagggtctctgctttaccacggagcagggtcaccaacccagatctccaggcccatgaggatggaacatgaaaggagccgacaaaagttgcttccattggcatgggctctggagctgtccagaagtccagggacaccagacttgatcaaggaagggctgtcactttagaggttcaaaaggaagtgcctcaaagcaaaggcaagcaaaggaaccccacgatgaacttgctcttttcctttgatgagcctctccccaggtgtatttcagcagaccccggggacccacccccactgggcctgctggcctccctcggctccagcccaatgccccagctggccttccccagcctgcaaggagcctgtagcatggcaaatctgcctgctgtatgctattttcttagatcttggtacatccagacaggatgagggtggagggagagctatttaacacaaatcctaagatttttttctgctcaggaaggggtgaaatagctggcagatacaaaagacagtggcttttatcattttaaatggtaggaatttaaggtgtgacttcagggagaaacaaacttgcaaaaaaaaaaaatctcaggccatgttggggtaacccagcaagggccagtgatgatttcccccagctcatccccttattttcccacaacccaaccattctctaaagcaggacagtgaataggtcttaggccagtgcacacaggaagaaattgaggcttatggatggggatgacttccctaagatcccatgggacaaggatgtggcaaggcttggatgagatggggcaccagtgcccaggaatttgaacattttcctttacccaggaaatctccggagccaacaccaccacccccagggggtctccccaccccaccccatttacagggtgagctcagcctgtcatgagcagaggaaaatattattaatgctctctgagtctttacaacaggagctcttacctcatagatgtgggctctgtttggggaagatgcaaggaagtaatgagaagcccaggaaatttctccacctgtgtttatggcctaaatagcttcaggatgtatcttagctgcactccaacattgcatcctttctggggtgaagaatctgggccaaccaggggtccttgggcctctagaaggccacagtaggcctctctttgtgggaatggaaggggacagtttgcttttagtgctggccctctctgtgggtgtggcctgcaaaggaaccaacagaccctatgctggggactctaacatgtgagctcattaaattcttccagcattctaaaggagggtttgtgattgtcaccatttactgatgaggaaactaaggctcctaggggagaaatcacttgcccacagttccacagctagtgagtgaatgaaccaggatttaaaccggttttttctcactacagagacaatatttttccaccattgtatctcacatttttcccaggaggttacccataacagaagagactagagtggaacagatacgtcagtggataaagctcaaagcaaacaacagtaagcttaaaattccttcatagtctcatgttttacgttcacaattcatgcaaaatttgcattccactttctgatttagccttgttggttttaatatgactctatgaatatttcaaaaaaaaatgtgctctgttcctcatgttgttctgttctgttcaccccgctatgacggaccctaggtcagctggtcttcagcttgaccctagaattgactctaggagcagtgaccctgctgcctcccagagccagttataggctcaagatcaagaccaactgaccttctcctaggcagctcctttggtgtgtgggtgctctgacctcactgttcatgaggggacctcaactaaggcatcttccagttgggtgctggaaggaacccattaactcacactagaatgatgaggatttgctcatctggcgtggagaaggatgagcccacaaaaccctaaagggaaaagagaagctggacacagctgtactcagcagattcctgaatgctaggctggaaagtggtgcctgttgtccaagtggagtcacatggttgctaatgtgggcaagtctgaggacacacttcatgagcagctggggtctggaaggctcctcactttaccctagccacacataattactgggtgcctacagcacctagcaccttggagggggcactattaggaaatcgagattactatggcacaattaattcctgggtaaggcatggggttgtggtggacagagctcagtctttagtttgaacgaaaacatacatacatgaaaaacatacatgaaaaaaggaccctcatcaacattagaaggggtagatttggagcactttaggcaggaaaacaggaacgcaaggccaggaaactggaacccagtgaatactcagaaccgaggatgcagatgacttatttagcaaaatggtcacttctgtgacatagctggagaaaggatgggtaacagcttgccagagccacttggaacaagggcaaatctcagtgtctggggcaaaagatgatgcatttccctctgacccatcatgtttattcatcctccactccccattgccacactagctcttgctgtaagtcctcaccaggatctacatttcctcgtcgctggtgggaaccccttagagtacatagaggtatcagtccagtaagactgctctacacaacagaagtgaggcccagggagtagcagccaggcccttatcctgttacctctgcaggagtgactgcccaacccagatccagagacattgaaggaaatgataattccttggtacctcactgccttgggacaaaatgaagaaagccacccttccttaggctgcagcttgccactcctgggctgggtaaacaggtcatcagcaccaagctcaaccaggagtaacactctggaagacatgggtgagcccaagaggaagcatgaacaggacgctgttcctaagtcatgtcaacaggttgtgctgggccaggatccccagggaaaaaaatggtcaacccaactggagggtaggttagaagaaaaaaaacataaacgtggatagtcatgtcatctcaaatccctgacttggcttccccattacttaacagtctgagctccttcttagcctgtgaccagcttcaaatcacagccaagtaaaacaaggaaataggaaaagtaaatccaactagaagagacaagctgagattcagatttgtttactcctcccatgcaaagtttccctgttggaggttttccatgtatacatgtctagaagtgatagaatgcaaggccttggctttgtcttgcagggatctgcctttgaggtcatagactgaacagcagggagagaggttagtggtggagtgtggggggagctgttctagctccagtttcttctgacacatttttcaggatcatggatctgatcctccgaagcacagcagagatatctaagccatatttgtgcacatgagcagactcttctagttttttagtaaccagggatgggcttttgcatggcactgactatagagatgtcttgtagagatcaagccagtcttttgcatcccacctgcccacctccagaagagatgggaaaaggtcatcaaagggcattcaccaactgaaatccactcatgaatgttaggtctctaaaaggaggcatcaacactcacaatggtagcctccaaacctagcatcccacctatctaagagctcaggggtggtccactggggcagatacaagggaagtgcaagggctcaggatgaaagaaaatctattgggaagagttttaggggcttgatcattatggggcttccttctatatctgagaactgctctgggtggtgagatgtggactctgatccttaattggaatgttcggagaatgagtgtctggtggccttgaagtgttggacagaaaagtatcagtataaaagcctggagctcagggtaattaatgtagttcatggttccttagtgagcaggactcttggatgtggaggagaaagggtcataggaagtaaaccaccaaaattacaaaattgagtctctgtacaattacttcagtgcctttgggcttatgaatacaaatcagtgggccttctctatgatggtccaacaaactctcagtgtccaccctgtccctgtatctcccatggaagatgaataatgtcaggtgttctttgggtcaaaggccccagggcagtctggaggcttagagggcagagtggtgtcattccatgtaaagttaggcttctgaggggtcaggcagaatatggtgtccatatcttccatagctctgcagattcttggatgaagtcaagcacagtttgctagacccaggtcactcctctgagtataactaggacccatgagtgaaacttaatagctgtaaggaagaacctgctgtctgccagagaggataagctgcccatctcagcagctgtctaaaagaaggcaggtgtctctttaaagggaagagaagcattggtgaaatggatttcaggtcacttccattccagatgggtgagatcttgtggagctgggatcatgtttgaactcattcatacctgtagagcacgaatccaagtagattgtgtttggtctgtacaggctgaagccccctgctctcccacccaagtgcccccactgagcaggccaacatgctgttgtggccacatatactgggctgatccaggctggttatcaccaaacagcaaaccatagggaacagctgctttgccatagacccaatacccatgtagatctctcatgagagcagccataactcagacccactgaccaacagggccatgagtgacagccagaaccagtgaaggtccaagtaggacacagagcagggcttttcttaccatacacattatctccagaggttatttctaccccactccctattcaaggcctgttggagcacactgcaaaagcaaaagcacagtaactcaatttacacatgattataatcatttccagtgcacacatttcatcaccaggtggatcctgagctagcccatgtaaatccgggttaacccatattggtaatcatactcaaaagcacttttcaccctacattctactagccaatcaaagacaaagagttgtggcctctaccattgccttggcttctggacaccctcacaagctatcccaaggttcccgctcaactccagggaggctgacatcttcacatccactgggcatataatattgcatgagaccaaagtctccacactctttgcagcctcctccatgaatcccaatggcctgcacttgtacagtttgggtgtttgatagataaagcacgtatgagaagagaaaacaaaataaatcaactttttaaaaaagccagcactgtgctgtcaatgttttttttttcttttcaattctagctcagaaaagcagaaggtaaataatgtcaggtcaatgaatatcagatatattttttgactgtacattacagtgaagtgtaatctttttacacctgcaagtccatcttatttattcttgtaaatgttccctgacaatgtttgtaacatggctgtgttaaaaaatctatacaataaagctgtgaccctg

SEQ ID NO: 17041 - DNA, 4521 bp, Homo sapiens
  source 1..4521: mol_type = unassigned DNA
cctcccgcctcagttcgcgccgcgcctcggcttggaacgcaggagcgccggctccgggagcccgagcggagccagccgcgcgcacagccagcggccgcgccggcgatgcggggccaccccgcgcccgccccagtcccggccccggcccccgcgggaaggggctgagctgcccgccgccgcccggatggcgagcctcgccgcgctcgccctcagcctgctcctgaggctgcagctgccgccactgcccggcgcccgggctcagagcgccgcaggtgtggctgttcctttgatgagcactacagcaactgtggttatagtgtggctctagggaccaatgggttcacctgggagcagattaacacatgggagaaaccaatgctggaccaggcagtgcccacaggatctttcatgatggtgaacagctctgggagagcctctggccagaaggcccaccttctcctgccaaccctgaaggagaatgacacccactgcatcgacttccattactacttctccagccgtgacaggtccagcccaggggccttgaacgtctacgtgaaggtgaatggtggcccccaagggaaccctgtgtggaatgtgtccggggtcgtcactgagggctgggtgaaggcagagctcgccatcagcactttctggccacatttctatcaggtgatatttgaatccgtctcattgaagggtcatcctggctacatcgccgtggacgaggtccgggtccttgctcatccatgcagaaaagcacctcattttctgcgactccaaaacgtggaggtgaatgtggggcagaatgccacatttcagtgcattgctggtgggaagtggtctcagcatgacaagctttggctccagcaatggaatggcagggacacggccctgatggtcacccgtgtggtcaaccacaggcgcttctcagccacagtcagtgtggcagacactgcccagcggagcgtcagcaagtaccgctgtgtgatccgctctgatggtgggtctggtgtgtccaactacgcggagctgatcgtgaaagagcctcccacgcccattgctcccccagagctgctggctgtgggggccacatacctgtggatcaagccaaatgccaactccatcatcggggatggccccatcatcctgaaggaagtggaatatcgcaccaccacaggcacgtgggcagagacccacatagtcgactctcccaactataagctgtggcatctggaccccgatgttgagtatgagatccgagtgctcctcacacgaccaggtgaggggggtacgggaccgccagggcctcccctcaccaccaggaccaagtgtgcagatccggtacatggcccacagaacgtggaaatcgtagacatcagagcccggcagctgaccctgcagtgggagcccttcggctacgcggtgacccgctgccatagctacaacctcaccgtgcagtaccagtatgtgttcaaccagcagcagtacgaggccgaggaggtcatccagacctcctcccactacaccctgcgaggcctgcgccccttcatgaccatccggctgcgactcttgctgtctaaccccgagggccgaatggagagcgaggagctggtggtgcagactgaggaagacgttccaggagctgttcctctagaatccatccaaggggggccctttgaggagaagatctacatccagtggaaacctcccaatgagaccaatggggtcatcacgctctacgagatcaactacaaggctgtcggctcgctggacccaagtgctgacctctcgagccagagggggaaagtgttcaagctccggaatgaaacccaccacctctttgtgggtctgtacccagggaccacctattccttcaccatcaaggccagcacagcaaagggctttgggccccctgtcaccactcggattgccaccaaaatttcagctccatccatgcctgagtacgacacagacaccccattgaatgagacagacacgaccatcacagtgatgctgaaacccgctcagtcccggggagctcctgtcagtgtttatcagctggttgtcaaggaggagcgacttcagaagtcacggagggcagctgacattattgagtgcttttcggtgcccgtgagctatcggaatgcctccagcctcgattctctacactactttgctgctgagttgaagcctgccaacctgcctgtcacccagccatttacagtgggtgacaataagacatacaatggctactggaaccctcctctctctcccctgaaaagctacagcatctacttccaggcactcagcaaagccaatggagagaccaaaatcaactgtgttcgtctggctacaaaaggtgcctccacccagaattctaacactgtggagccagagaagcaggtggacaacaccgtgaagatggctggcgtgatcgctggcctcctcatgttcatcatcattctcctgggcgtgatgctcaccatcaaaaggagaagaaatgcttattcctactcctattacttgtcccaaaggaagctggccaagaagcagaaggagacccagagtggagcccagagggagatggggcctgtggcctctgccgacaaacccaccaccaagctcagcgccagccgcaatgatgaaggcttctcttctagttctcaggacgtcaacggattcacagatggcagccgcggggagctttcccagcccaccctcacgatccagactcatccctaccgcacctgtgaccctgtggagatgagctacccccgggaccagttccaacccgccatccgggtggctgacttgctgcagcacatcacgcagatgaagagaggccagggctacgggttcaaggaggaatacgaggccttaccagaggggcagacagcttcgtgggacacagccaaggaggatgaaaaccgcaataagaatcgatatgggaacatcatatcctacgaccattcccgggtgaggctgctggtgctggatggagacccgcactctgactacatcaatgccaactacattgacggataccatcgacctcggcactacattgcgactcaaggtccgatgcaggagactgtaaaggacttttggagaatgatctggcaggagaactccgccagcatcgtcatggtcacaaacctggtggaagtgggcagggtgaaatgtgtgcgatactggccagatgacacggaggtctacggagacattaaagtcaccctgattgaaacagagcccctggcagaatacgtcatacgcaccttcacagtccagaagaaaggctaccatgagatccgggagctccgcctcttccacttcaccagctggcctgaccacggcgttccctgctatgccactggccttctgggcttcgtccgccaggtcaagttcctcaaccccccggaagctgggcccatagtggtccactgcagtgctggggctgggcggactggctgcttcattgccattgacaccatgcttgacatggccgagaatgaaggggtggtggacatcttcaactgcgtgcgtgagctccgggcccaaagggtcaacctggtacagacagaggagcaatatgtgtttgtgcacgatgccatcctggaagcgtgcctctgtggcaacactgccatccctgtgtgtgagttccgttctctctactacaatatcagcaggctggacccccagacaaactccagccaaatcaaagatgaatttcagaccctcaacattgtgacaccccgtgtgcggcccgaggactgcagcattgggctcctgccccggaaccatgataagaatcgaagtatggacgtgctgcctctggaccgctgcctgcccttccttatctcagtggacggagaatccagcaattacatcaacgcagcactgatggatagccacaagcagcctgccgccttcgtggtcacccagcaccctctacccaacaccgtggcagacttctggaggctggtgttcgattacaactgctcctctgtggtgatgctgaatgagatggacactgcccagttctgtatgcagtactggcctgagaagacctccgggtgctatgggcccatccaggtggagttcgtctccgcagacatcgacgaggacatcatccacagaatattccgcatctgtaacatggcccggccacaggatggttatcgtatagtccagcacctccagtacattggctggcctgcctaccgggacacgcccccctccaagcgctctctgctcaaagtggtccgacgactggagaagtggcaggagcagtatgacgggagggagggacgtactgtggtccactgcctaaatgggggaggccgtagtggaaccttctgtgccatctgcagtgtgtgtgagatgatccagcagcaaaacatcattgacgtgttccacatcgtgaaaacactgcgtaacaacaaatccaacatggtggagaccctggaacagtataaatttgtatacgaggtggcactggaatatttaagctccttttag

SEQ ID NO: 17042 - DNA, 208 bp, Homo sapiens
  source 1..208: mol_type = unassigned DNA
aggagggactgagggaacacagaggaaagagggatttctacaaaaatagacatagaaataaccgataagtttatgaaatattaccagcctcgttaaacatcaggcatgctaattaaggtggctgttcctttgatgagcactacagcaactgtggttatagtgtggctctagggaccaatgggttcacctgggagcagattaacacatg

SEQ ID NO: 17043 - DNA, 940 bp, Homo sapiens
  source 1..940: mol_type = unassigned DNA
ggatctttcatgatggtgaacagctctgggagagcctctggccagaaggcccaccttctcctgccaaccctgaaggagaatgacacccactgcatcgacttccattactacttctccagccgtgacaggtccagcccaggggccttgaacgtctacgtgaaggtgaatggtggcccccaagggaaccctgtgtggaatgtgtccggggtcgtcactgagggctgggtgaaggcagagctcgccatcagcactttctggccacatttctatcaggtgatatttgaatccgtctcattgaagggtcatcctggctacatcgccgtggacgaggtccgggtccttgctcatccatgcagaaaagcacctcattttctgcgactccaaaacgtggaggtgaatgtggggcagaatgccacatttcagtgcattgctggtgggaagtggtctcagcatgacaagctttggctccagcaatggaatggcagggacacggccctgatggtcacccgtgtggtcaaccacaggcgcttctcagccacagtcagtgtggcagacactgcccagcggagcgtcagcaagtaccgctgtgtgatccgctctgatggtgggtctggtgtgtccaactacgcggagctgatcgtgaaagagcctcccacgcccattgctcccccagagctgctggctgtgggggccacatacctgtggatcaagccaaatgccaactccatcatcggggatggccccatcatcctgaaggaagtggaatatcgcaccaccacaggcacgtgggcagagacccacatagtcgactctcccaactataagctgtggcatctggaccccgatgttgagtatgagatccgagtgctcctcacacgaccaggtgaggggggtacgggaccgccagggcctcccctcaccaccaggaccaagtgtgcag

SEQ ID NO: 17044 - DNA, 3230 bp, Homo sapiens
  source 1..3230: mol_type = unassigned DNA
atccggtacatggcccacagaacgtggaaatcgtagacatcagagcccggcagctgaccctgcagtgggagcccttcggctacgcggtgacccgctgccatagctacaacctcaccgtgcagtaccagtatgtgttcaaccagcagcagtacgaggccgaggaggtcatccagacctcctcccactacaccctgcgaggcctgcgccccttcatgaccatccggctgcgactcttgctgtctaaccccgagggccgaatggagagcgaggagctggtggtgcagactgaggaagacgttccaggagctgttcctctagaatccatccaaggggggccctttgaggagaagatctacatccagtggaaacctcccaatgagaccaatggggtcatcacgctctacgagatcaactacaaggctgtcggctcgctggacccaagtgctgacctctcgagccagagggggaaagtgttcaagctccggaatgaaacccaccacctctttgtgggtctgtacccagggaccacctattccttcaccatcaaggccagcacagcaaagggctttgggccccctgtcaccactcggattgccaccaaaatttcagctccatccatgcctgagtacgacacagacaccccattgaatgagacagacacgaccatcacagtgatgctgaaacccgctcagtcccggggagctcctgtcagtgtttatcagctggttgtcaaggaggagcgacttcagaagtcacggagggcagctgacattattgagtgcttttcggtgcccgtgagctatcggaatgcctccagcctcgattctctacactactttgctgctgagttgaagcctgccaacctgcctgtcacccagccatttacagtgggtgacaataagacatacaatggctactggaaccctcctctctctcccctgaaaagctacagcatctacttccaggcactcagcaaagccaatggagagaccaaaatcaactgtgttcgtctggctacaaaagcaccaatgggcagcgcccaggtgaccccggggactccactctgcctcctcaccacaggtgcctccacccagaattctaacactgtggagccagagaagcaggtggacaacaccgtgaagatggctggcgtgatcgctggcctcctcatgttcatcatcattctcctgggcgtgatgctcaccatcaaaaggagaagaaatgcttattcctactcctattacttgaagctggccaagaagcagaaggagacccagagtggagcccagagggagatggggcctgtggcctctgccgacaaacccaccaccaagctcagcgccagccgcaatgatgaaggcttctcttctagttctcaggacgtcaacggattcacagatggcagccgcggggagctttcccagcccaccctcacgatccagactcatccctaccgcacctgtgaccctgtggagatgagctacccccgggaccagttccaacccgccatccgggtggctgacttgctgcagcacatcacgcagatgaagagaggccagggctacgggttcaaggaggaatacgaggccttaccagaggggcagacagcttcgtgggacacagccaaggaggatgaaaaccgcaataagaatcgatatgggaacatcatatcctacgaccattcccgggtgaggctgctggtgctggatggagacccgcactctgactacatcaatgccaactacattgacggataccatcgacctcggcactacattgcgactcaaggtccgatgcaggagactgtaaaggacttttggagaatgatctggcaggagaactccgccagcatcgtcatggtcacaaacctggtggaagtgggcagggtgaaatgtgtgcgatactggccagatgacacggaggtctacggagacattaaagtcaccctgattgaaacagagcccctggcagaatacgtcatacgcaccttcacagtccagaagaaaggctaccatgagatccgggagctccgcctcttccacttcaccagctggcctgaccacggcgttccctgctatgccactggccttctgggcttcgtccgccaggtcaagttcctcaaccccccggaagctgggcccatagtggtccactgcagtgctggggctgggcggactggctgcttcattgccattgacaccatgcttgacatggccgagaatgaaggggtggtggacatcttcaactgcgtgcgtgagctccgggcccaaagggtcaacctggtacagacagaggagcaatatgtgtttgtgcacgatgccatcctggaagcgtgcctctgtggcaacactgccatccctgtgtgtgagttccgttctctctactacaatatcagcaggctggacccccagacaaactccagccaaatcaaagatgaatttcagaccctcaacattgtgacaccccgtgtgcggcccgaggactgcagcattgggctcctgccccggaaccatgataagaatcgaagtatggacgtgctgcctctggaccgctgcctgcccttccttatctcagtggacggagaatccagcaattacatcaacgcagcactgatggatagccacaagcagcctgccgccttcgtggtcacccagcaccctctacccaacaccgtggcagacttctggaggctggtgttcgattacaactgctcctctgtggtgatgctgaatgagatggacactgcccagttctgtatgcagtactggcctgagaagacctccgggtgctatgggcccatccaggtggagttcgtctccgcagacatcgacgaggacatcatccacagaatattccgcatctgtaacatggcccggccacaggatggttatcgtatagtccagcacctccagtacattggctggcctgcctaccgggacacgcccccctccaagcgctctctgctcaaagtggtccgacgactggagaagtggcaggagcagtatgacgggagggagggacgtactgtggtccactgcctaaatgggggaggccgtagtggaaccttctgtgccatctgcagtgtgtgtgagatgatccagcagcaaaacatcattgacgtgttccacatcgtgaaaacactgcgtaacaacaaatccaacatggtggagaccctggaacagtataaatttgtatacgaggtggcactggaatatttaagctccttttag

SEQ ID NO: 17045 - DNA, 11285 bp, Homo sapiens
  source 1..11285: mol_type = unassigned DNA
tttgcagatccggtacatggcccacagaacgtggaaatcgtagacatcagagcccggcagctgaccctgcagtgggagcccttcggctacgcggtgacccgctgccatagctacaacctcaccgtgcagtaccagtatgtgttcaaccagcagcagtacgaggccgaggaggtcatccagacctcctcccactacaccctgcgaggcctgcgccccttcatgaccatccggctgcgactcttgctgtctaaccccgagggccgaatggagagcgaggagctggtggtgcagactgaggaagacgttccaggagctgttcctctagaatccatccaaggggggccctttgaggagaagatctacatccagtggaaacctcccaatgagaccaatggggtcatcacgctctacgagatcaactacaaggctgtcggctcgctggacccaagtgctgacctctcgagccagagggggaaagtgttcaagctccggaatgaaacccaccacctctttgtgggtctgtacccagggaccacctattccttcaccatcaaggccagcacagcaaagggctttgggccccctgtcaccactcggattgccaccaaaatttcagctccatccatgcctgagtacgacacagacaccccattgaatgagacagacacgaccatcacagtgatgctgaaacccgctcagtcccggggagctcctgtcagtgtttatcagctggttgtcaaggaggagcgacttcagaagtcacggagggcagctgacattattgagtgcttttcggtgcccgtgagctatcggaatgcctccagcctcgattctctacactactttgctgctgagttgaagcctgccaacctgcctgtcacccagccatttacagtgggtgacaataagacatacaatggctactggaaccctcctctctctcccctgaaaagctacagcatctacttccaggcactcagcaaagccaatggagagaccaaaatcaactgtgttcgtctggctacaaaaggtgcctccacccagaattctaacactgtggagccagagaagcaggtggacaacaccgtgaagatggctggcgtgatcgctggcctcctcatgttcatcatcattctcctgggcgtgatgctcaccatcaaaaggagaagaaatgcttattcctactcctattacttgaagctggccaagaagcagaaggagacccagagtggagcccagagggagatggggcctgtggcctctgccgacaaacccaccaccaagctcagcgccagccgcaatgatgaaggcttctcttctagttctcaggacgtcaacggattcacagatggcagccgcggggagctttcccagcccaccctcacgatccagactcatccctaccgcacctgtgaccctgtggagatgagctacccccgggaccagttccaacccgccatccgggtggctgacttgctgcagcacatcacgcagatgaagagaggccagggctacgggttcaaggaggaatacgaggccttaccagaggggcagacagcttcgtgggacacagccaaggaggatgaaaaccgcaataagaatcgatatgggaacatcatatcctacgaccattcccgggtgaggctgctggtgctggatggagacccgcactctgactacatcaatgccaactacattgacggataccatcgacctcggcactacattgcgactcaaggtccgatgcaggagactgtaaaggacttttggagaatgatctggcaggagaactccgccagcatcgtcatggtcacaaacctggtggaagtgggcagggtgaaatgtgtgcgatactggccagatgacacggaggtctacggagacattaaagtcaccctgattgaaacagagcccctggcagaatacgtcatacgcaccttcacagtccagaagaaaggctaccatgagatccgggagctccgcctcttccacttcaccagctggcctgaccacggcgttccctgctatgccactggccttctgggcttcgtccgccaggtcaagttcctcaaccccccggaagctgggcccatagtggtccactgcagtgctggggctgggcggactggctgcttcattgccattgacaccatgcttgacatggccgagaatgaaggggtggtggacatcttcaactgcgtgcgtgagctccgggcccaaagggtcaacctggtacagacagaggagcaatatgtgtttgtgcacgatgccatcctggaagcgtgcctctgtggcaacactgccatccctgtgtgtgagttccgttctctctactacaatatcagcaggctggacccccagacaaactccagccaaatcaaagatgaatttcagaccctcaacattgtgacaccccgtgtgcggcccgaggactgcagcattgggctcctgccccggaaccatgataagaatcgaagtatggacgtgctgcctctggaccgctgcctgcccttccttatctcagtggacggagaatccagcaattacatcaacgcagcactgatggatagccacaagcagcctgccgccttcgtggtcacccagcaccctctacccaacaccgtggcagacttctggaggctggtgttcgattacaactgctcctctgtggtgatgctgaatgagatggacactgcccagttctgtatgcagtactggcctgagaagacctccgggtgctatgggcccatccaggtggagttcgtctccgcagacatcgacgaggacatcatccacagaatattccgcatctgtaacatggcccggccacaggatggttatcgtatagtccagcacctccagtacattggctggcctgcctaccgggacacgcccccctccaagcgctctctgctcaaagtggtccgacgactggagaagtggcaggagcagtatgacgggagggagggacgtactgtggtccactgcctaaatgggggaggccgtagtggaaccttctgtgccatctgcagtgtgtgtgagatgatccagcagcaaaacatcattgacgtgttccacatcgtgaaaacactgcgtaacaacaaatccaacatggtggagaccctggaacagtataaatttgtatacgaggtggcactggaatatttaagctccttttagctcaatgggatggggaacctgccggagtccagaggctgctgtgaccaagcccccttttgtgtgaatggcagtaactgggctcaggagctctgaggtggcaccctgcctgactccaaggagaagactggtggccctgtgttccacggggggctctgcaccttctgaggggtctcctgttgccgtgggagatgctgctccaaaaggcccaggcttccttttcaacctaaccagccacagccaagggcccaagcagaagtacacccacaagcaaggccttggatttctggctcccagaccacctgcttttgttctgagtttgtggatctcttggcaagccaactgtgcaggtgctggggagtgggaggctcccctgccctccttctccttaggagtggaggagatgtgtgttctgctcctctacgtcatggaaaagattgaggctcttgggggtcactgctctgctgccccctgcaacctccttcaggggcctctggcaccagacatttgcagtctggaccagtgtgaccttacgatgttccctaggccacaagagaggccccccatcctcacacctaacctgcatggggcttcgcccacaaccattctgtaccccttccccagcctgggccttgaccgtccagcattcactggccggccagctgtgtccacagcagtttttgataaaggtgttctttgcttttttgtgtggtcagtgggagggggtggaactgcagggaacttctctgctcctccttgtctttgtaaaaagggaccacctccctggggcagggcttgggctgacctgtaggatgtaacccctgtgtttctttggtggtagctttctttggaagagacaaacaagataagatttgattattttccaaagtgtatgtgaaaagaaactttcttttggagggtgtaaaatcttagtctcttatgtcaaaaagaagggggcgggggagtttgagtatgtacctctaagacaaatctctcgggccttttattttttcctggcaatgtccttaaaagctcccaccctgggacagcatgccactgagcaaggagagatgggtgagcctgaagatggtccctttggtttctggggcaaatagagcaccagctttgtgcataatttggatgtccaaatttgaactccttcctaaagaaacccagcagccaccttgaaaaaggccattgtggagcccattatactttgatttaaaataggccaagagaatcaggcctggagatctagggtcttgtccaaagtgtgagtgagtcaatgagagggaaccaacatttgctaagtctctactgtatgccagggatcatgcttggcactttccataggacatttcacacagtccttagaacccccaggagagagctactgacttgttatcatctccatttgatcatctcctccaatgaggaaacccacgcaccttccttagtaatgaaatcctgggttccaaaggggcaggtaatggcaatgagacttctccgtgctgttttcttcatcttctctaagccaagcaattattttatggagggaaaataaggccagaaacttctgagcagataactccacaaatggaaatttagtactttcttcctgatgccagttcttctgggaagcgcagaatttcagatatattttagtaacacattcccagctccccaggaaagccagtctcatctaatttcttagtcagtaaaaacaattccctgttccttcaggctatgaatggaccagccagggaaactctcgaccttgatctctagccagtgcttaggcccaatatctgacagcctcaggtgggctgggacctaggaagctccatcttgaaggctggtctagccccagacagggcatgaggggcagagaattcaagaaggtacagctttggccctcaagagcccactgtatgctggggaaatggaaccatggtgcagtagtgtggagtggatgagtgttccatgagcctaggagcaagaaagtctcttcggcctcgggcttcctggagaaggggacgtccattcctgctgggtcttaacaagcataaaaaggaaaaaaaggaaactcaggcaaagggatccatatgtgcaatggcaaagaaatgtgaaaaggcattgggagaagcagtctgggggaggccagcccagtgcgggcacagcacaacacggggagcagcaagagatgagccagggtccaggagacagatgcccatcgcgagtacagactttgtcctattggcaacaaggagtccatggagctttagagagatgcactcagcttcgtgttggccaagactccttctgggccaatggggctgcctcttttcctttcatcagacactgtgaaaacattcccttaagcgtgcactttttaatatcacatctatttgtctgtctgctcattgttttgttgctggaactaaatatgcaatggatcatgagactcagattctatgagaaacccagggtctctgctttaccacggagcagggtcaccaacccagatctccaggcccatgaggatggaacatgaaaggagccgacaaaagttgcttccattggcatgggctctggagctgtccagaagtccagggacaccagacttgatcaaggaagggctgtcactttagaggttcaaaaggaagtgcctcaaagcaaaggcaagcaaaggaaccccacgatgaacttgctcttttcctttgatgagcctctccccaggtgtatttcagcagaccccggggacccacccccactgggcctgctggcctccctcggctccagcccaatgccccagctggccttccccagcctgcaaggagcctgtagcatggcaaatctgcctgctgtatgctattttcttagatcttggtacatccagacaggatgagggtggagggagagctatttaacacaaatcctaagatttttttctgctcaggaaggggtgaaatagctggcagatacaaaagacagtggcttttatcattttaaatggtaggaatttaaggtgtgacttcagggagaaacaaacttgcaaaaaaaaaaaatctcaggccatgttggggtaacccagcaagggccagtgatgatttcccccagctcatccccttattttcccacaacccaaccattctctaaagcaggacagtgaataggtcttaggccagtgcacacaggaagaaattgaggcttatggatggggatgacttccctaagatcccatgggacaaggatgtggcaaggcttggatgagatggggcaccagtgcccaggaatttgaacattttcctttacccaggaaatctccggagccaacaccaccacccccagggggtctccccaccccaccccatttacagggtgagctcagcctgtcatgagcagaggaaaatattattaatgctctctgagtctttacaacaggagctcttacctcatagatgtgggctctgtttggggaagatgcaaggaagtaatgagaagcccaggaaatttctccacctgtgtttatggcctaaatagcttcaggatgtatcttagctgcactccaacattgcatcctttctggggtgaagaatctgggccaaccaggggtccttgggcctctagaaggccacagtaggcctctctttgtgggaatggaaggggacagtttgcttttagtgctggccctctctgtgggtgtggcctgcaaaggaaccaacagaccctatgctggggactctaacatgtgagctcattaaattcttccagcattctaaaggagggtttgtgattgtcaccatttactgatgaggaaactaaggctcctaggggagaaatcacttgcccacagttccacagctagtgagtgaatgaaccaggatttaaaccggttttttctcactacagagacaatatttttccaccattgtatctcacatttttcccaggaggttacccataacagaagagactagagtggaacagatacgtcagtggataaagctcaaagcaaacaacagtaagcttaaaattccttcatagtctcatgttttacgttcacaattcatgcaaaatttgcattccactttctgatttagccttgttggttttaatatgactctatgaatatttcaaaaaaaaatgtgctctgttcctcatgttgttctgttctgttcaccccgctatgacggaccctaggtcagctggtcttcagcttgaccctagaattgactctaggagcagtgaccctgctgcctcccagagccagttataggctcaagatcaagaccaactgaccttctcctaggcagctcctttggtgtgtgggtgctctgacctcactgttcatgaggggacctcaactaaggcatcttccagttgggtgctggaaggaacccattaactcacactagaatgatgaggatttgctcatctggcgtggagaaggatgagcccacaaaaccctaaagggaaaagagaagctggacacagctgtactcagcagattcctgaatgctaggctggaaagtggtgcctgttgtccaagtggagtcacatggttgctaatgtgggcaagtctgaggacacacttcatgagcagctggggtctggaaggctcctcactttaccctagccacacataattactgggtgcctacagcacctagcaccttggagggggcactattaggaaatcgagattactatggcacaattaattcctgggtaaggcatggggttgtggtggacagagctcagtctttagtttgaacgaaaacatacatacatgaaaaacatacatgaaaaaaggaccctcatcaacattagaaggggtagatttggagcactttaggcaggaaaacaggaacgcaaggccaggaaactggaacccagtgaatactcagaaccgaggatgcagatgacttatttagcaaaatggtcacttctgtgacatagctggagaaaggatgggtaacagcttgccagagccacttggaacaagggcaaatctcagtgtctggggcaaaagatgatgcatttccctctgacccatcatgtttattcatcctccactccccattgccacactagctcttgctgtaagtcctcaccaggatctacatttcctcgtcgctggtgggaaccccttagagtacatagaggtatcagtccagtaagactgctctacacaacagaagtgaggcccagggagtagcagccaggcccttatcctgttacctctgcaggagtgactgcccaacccagatccagagacattgaaggaaatgataattccttggtacctcactgccttgggacaaaatgaagaaagccacccttccttaggctgcagcttgccactcctgggctgggtaaacaggtcatcagcaccaagctcaaccaggagtaacactctggaagacatgggtgagcccaagaggaagcatgaacaggacgctgttcctaagtcatgtcaacaggttgtgctgggccaggatccccagggaaaaaaatggtcaacccaactggagggtaggttagaagaaaaaaaacataaacgtggatagtcatgtcatctcaaatccctgacttggcttccccattacttaacagtctgagctccttcttagcctgtgaccagcttcaaatcacagccaagtaaaacaaggaaataggaaaagtaaatccaactagaagagacaagctgagattcagatttgtttactcctcccatgcaaagtttccctgttggaggttttccatgtatacatgtctagaagtgatagaatgcaaggccttggctttgtcttgcagggatctgcctttgaggtcatagactgaacagcagggagagaggttagtggtggagtgtggggggagctgttctagctccagtttcttctgacacatttttcaggatcatggatctgatcctccgaagcacagcagagatatctaagccatatttgtgcacatgagcagactcttctagttttttagtaaccagggatgggcttttgcatggcactgactatagagatgtcttgtagagatcaagccagtcttttgcatcccacctgcccacctccagaagagatgggaaaaggtcatcaaagggcattcaccaactgaaatccactcatgaatgttaggtctctaaaaggaggcatcaacactcacaatggtagcctccaaacctagcatcccacctatctaagagctcaggggtggtccactggggcagatacaagggaagtgcaagggctcaggatgaaagaaaatctattgggaagagttttaggggcttgatcattatggggcttccttctatatctgagaactgctctgggtggtgagatgtggactctgatccttaattggaatgttcggagaatgagtgtctggtggccttgaagtgttggacagaaaagtatcagtataaaagcctggagctcagggtaattaatgtagttcatggttccttagtgagcaggactcttggatgtggaggagaaagggtcataggaagtaaaccaccaaaattacaaaattgagtctctgtacaattacttcagtgcctttgggcttatgaatacaaatcagtgggccttctctatgatggtccaacaaactctcagtgtccaccctgtccctgtatctcccatggaagatgaataatgtcaggtgttctttgggtcaaaggccccagggcagtctggaggcttagagggcagagtggtgtcattccatgtaaagttaggcttctgaggggtcaggcagaatatggtgtccatatcttccatagctctgcagattcttggatgaagtcaagcacagtttgctagacccaggtcactcctctgagtataactaggacccatgagtgaaacttaatagctgtaaggaagaacctgctgtctgccagagaggataagctgcccatctcagcagctgtctaaaagaaggcaggtgtctctttaaagggaagagaagcattggtgaaatggatttcaggtcacttccattccagatgggtgagatcttgtggagctgggatcatgtttgaactcattcatacctgtagagcacgaatccaagtagattgtgtttggtctgtacaggctgaagccccctgctctcccacccaagtgcccccactgagcaggccaacatgctgttgtggccacatatactgggctgatccaggctggttatcaccaaacagcaaaccatagggaacagctgctttgccatagacccaatacccatgtagatctctcatgagagcagccataactcagacccactgaccaacagggccatgagtgacagccagaaccagtgaaggtccaagtaggacacagagcagggcttttcttaccatacacattatctccagaggttatttctaccccactccctattcaaggcctgttggagcacactgcaaaagcaaaagcacagtaactcaatttacacatgattataatcatttccagtgcacacatttcatcaccaggtggatcctgagctagcccatgtaaatccgggttaacccatattggtaatcatactcaaaagcacttttcaccctacattctactagccaatcaaagacaaagagttgtggcctctaccattgccttggcttctggacaccctcacaagctatcccaaggttcccgctcaactccagggaggctgacatcttcacatccactgggcatataatattgcatgagaccaaagtctccacactctttgcagcctcctccatgaatcccaatggcctgcacttgtacagtttgggtgtttgatagataaagcacgtatgagaagagaaaacaaaataaatcaactttttaaaaaagccagcactgtgctgtcaatgttttttttttcttttcaattctagctcagaaaagcagaaggtaaataatgtcaggtcaatgaatatcagatatattttttgactgtacattacagtgaagtgtaatctttttacacctgcaagtccatcttatttattcttgtaaatgttccctgacaatgtttgtaacatggctgtgttaaaaaatctatacaataaagctgtgaccctg

SEQ ID NO: 17046 - DNA, 8175 bp, Homo sapiens
  source 1..8175: mol_type = unassigned DNA
aggagccgcggcgcgcacagccgggctggagcgcgcacccggcactgaggcttcgctgctctcggagcgctcagaccgcggccgccgcagccggcgaaagaggcaaagtcccgcacgccggaggacatgcgcctcggctagcggccccgggccccaccaccgtgcggctttctccagattattcctctctcgctgtctctgactgtctctctctgtctctgtctctgtctctctctctctcacacacacacacacacacacaaacacacatacgcacgcacgatctcacttcgatctatacactggaggattaaaacaaacaaacaaaaaaaacatttccttcgctccccctccctctccactctgagaagcagaggagccgcacggcgaggggccgcagaccgtctggaaatgcgaatcctaaagcgtttcctcgcttgcattcagctcctctgtgtttgccgcctggattgggctaatggatactacagacaacagagaaaacttgttgaagagattggctggtcctatacaggagcactgaatcaaaaaaattggggaaagaaatatccaacatgtaatagcccaaaacaatctcctatcaatattgatgaagatcttacacaagtaaatgtgaatcttaagaaacttaaatttcagggttgggataaaacatcattggaaaacacattcattcataacactgggaaaacagtggaaattaatctcactaatgactaccgtgtcagcggaggagtttcagaaatggtgtttaaagcaagcaagataacttttcactggggaaaatgcaatatgtcatctgatggatcagagcatagtttagaaggacaaaaatttccacttgagatgcaaatctactgctttgatgcggaccgattttcaagttttgaggaagcagtcaaaggaaaagggaagttaagagctttatccattttgtttgaggttgggacagaagaaaatttggatttcaaagcgattattgatggagtcgaaagtgttagtcgttttgggaagcaggctgctttagatccattcatactgttgaaccttctgccaaactcaactgacaagtattacatttacaatggctcattgacatctcctccctgcacagacacagttgactggattgtttttaaagatacagttagcatctctgaaagccagttggctgttttttgtgaagttcttacaatgcaacaatctggttatgtcatgctgatggactacttacaaaacaattttcgagagcaacagtacaagttctctagacaggtgttttcctcatacactggaaaggaagagattcatgaagcagtttgtagttcagaaccagaaaatgttcaggctgacccagagaattataccagccttcttgttacatgggaaagacctcgagtcgtttatgataccatgattgagaagtttgcagttttgtaccagcagttggatggagaggaccaaaccaagcatgaatttttgacagatggctatcaagacttgggtgctattctcaataatttgctacccaatatgagttatgttcttcagatagtagccatatgcactaatggcttatatggaaaatacagcgaccaactgattgtcgacatgcctactgataatcctgaacttgatcttttccctgaattaattggaactgaagaaataatcaaggaggaggaagagggaaaagacattgaagaaggcgctattgtgaatcctggtagagacagtgctacaaaccaaatcaggaaaaaggaaccccagatttctaccacaacacactacaatcgcatagggacgaaatacaatgaagccaagactaaccgatccccaacaagaggaagtgaattctctggaaagggtgatgttcccaatacatctttaaattccacttcccaaccagtcactaaattagccacagaaaaagatatttccttgacttctcagactgtgactgaactgccacctcacactgtggaaggtacttcagcctctttaaatgatggctctaaaactgttcttagatctccacatatgaacttgtcggggactgcagaatccttaaatacagtttctataacagaatatgaggaggagagtttattgaccagtttcaagcttgatactggagctgaagattcttcaggctccagtcccgcaacttctgctatcccattcatctctgagaacatatcccaagggtatatattttcctccgaaaacccagagacaataacatatgatgtccttataccagaatctgctagaaatgcttccgaagattcaacttcatcaggttcagaagaatcactaaaggatccttctatggagggaaatgtgtggtttcctagctctacagacataacagcacagcccgatgttggatcaggcagagagagctttctccagactaattacactgagatacgtgttgatgaatctgagaagacaaccaagtccttttctgcaggcccagtgatgtcacagggtccctcagttacagatctggaaatgccacattattctacctttgcctacttcccaactgaggtaacacctcatgcttttaccccatcctccagacaacaggatttggtctccacggtcaacgtggtatactcgcagacaacccaaccggtatacaatggtgagacacctcttcaaccttcctacagtagtgaagtctttcctctagtcacccctttgttgcttgacaatcagatcctcaacactacccctgctgcttcaagtagtgattcggccttgcatgctacgcctgtatttcccagtgtcgatgtgtcatttgaatccatcctgtcttcctatgatggtgcacctttgcttccattttcctctgcttccttcagtagtgaattgtttcgccatctgcatacagtttctcaaatccttccacaagttacttcagctaccgagagtgataaggtgcccttgcatgcttctctgccagtggctgggggtgatttgctattagagcccagccttgctcagtattctgatgtgctgtccactactcatgctgcttcagagacgctggaatttggtagtgaatctggtgttctttataaaacgcttatgttttctcaagttgaaccacccagcagtgatgccatgatgcatgcacgttcttcagggcctgaaccttcttatgccttgtctgataatgagggctcccaacacatcttcactgtttcttacagttctgcaatacctgtgcatgattctgtgggtgtaacttatcagggttccttatttagcggccctagccatataccaatacctaagtcttcgttaataaccccaactgcatcattactgcagcctactcatgccctctctggtgatggggaatggtctggagcctcttctgatagtgaatttcttttacctgacacagatgggctgacagcccttaacatttcttcacctgtttctgtagctgaatttacatatacaacatctgtgtttggtgatgataataaggcgctttctaaaagtgaaataatatatggaaatgagactgaactgcaaattccttctttcaatgagatggtttacccttctgaaagcacagtcatgcccaacatgtatgataatgtaaataagttgaatgcgtctttacaagaaacctctgtttccatttctagcaccaagggcatgtttccagggtcccttgctcataccaccactaaggtttttgatcatgagattagtcaagttccagaaaataacttttcagttcaacctacacatactgtctctcaagcatctggtgacacttcgcttaaacctgtgcttagtgcaaactcagagccagcatcctctgaccctgcttctagtgaaatgttatctccttcaactcagctcttattttatgagacctcagcttcttttagtactgaagtattgctacaaccttcctttcaggcttctgatgttgacaccttgcttaaaactgttcttccagctgtgcccagtgatccaatattggttgaaacccccaaagttgataaaattagttctacaatgttgcatctcattgtatcaaattctgcttcaagtgaaaacatgctgcactctacatctgtaccagtttttgatgtgtcgcctacttctcatatgcactctgcttcacttcaaggtttgaccatttcctatgcaagtgagaaatatgaaccagttttgttaaaaagtgaaagttcccaccaagtggtaccttctttgtacagtaatgatgagttgttccaaacggccaatttggagattaaccaggcccatcccccaaaaggaaggcatgtatttgctacacctgttttatcaattgatgaaccattaaatacactaataaataagcttatacattccgatgaaattttaacctccaccaaaagttctgttactggtaaggtatttgctggtattccaacagttgcttctgatacatttgtatctactgatcattctgttcctataggaaatgggcatgttgccattacagctgtttctccccacagagatggttctgtaacctcaacaaagttgctgtttccttctaaggcaacttctgagctgagtcatagtgccaaatctgatgccggtttagtgggtggtggtgaagatggtgacactgatgatgatggtgatgatgatgatgatgacagaggtagtgatggcttatccattcataagtgtatgtcatgctcatcctatagagaatcacaggaaaaggtaatgaatgattcagacacccacgaaaacagtcttatggatcagaataatccaatctcatactcactatctgagaattctgaagaagataatagagtcacaagtgtatcctcagacagtcaaactggtatggacagaagtcctggtaaatcaccatcagcaaatgggctatcccaaaagcacaatgatggaaaagaggaaaatgacattcagactggtagtgctctgcttcctctcagccctgaatctaaagcatgggcagttctgacaagtgatgaagaaagtggatcagggcaaggtacctcagatagccttaatgagaatgagacttccacagatttcagttttgcagacactaatgaaaaagatgctgatgggatcctggcagcaggtgactcagaaataactcctggattcccacagtccccaacatcatctgttactagcgagaactcagaagtgttccacgtttcagaggcagaggccagtaatagtagccatgagtctcgtattggtctagctgaggggttggaatccgagaagaaggcagttataccccttgtgatcgtgtcagccctgacttttatctgtctagtggttcttgtgggtattctcatctactggaggaaatgcttccagactgcacacttttacttagaggacagtacatcccctagagttatatccacacctccaacacctatctttccaatttcagatgatgtcggagcaattccaataaagcactttccaaagcatgttgcagatttacatgcaagtagtgggtttactgaagaatttgagacactgaaagagttttaccaggaagtgcagagctgtactgttgacttaggtattacagcagacagctccaaccacccagacaacaagcacaagaatcgatacataaatatcgttgcctatgatcatagcagggttaagctagcacagcttgctgaaaaggatggcaaactgactgattatatcaatgccaattatgttgatggctacaacagaccaaaagcttatattgctgcccaaggcccactgaaatccacagctgaagatttctggagaatgatatgggaacataatgtggaagttattgtcatgataacaaacctcgtggagaaaggaaggagaaaatgtgatcagtactggcctgccgatgggagtgaggagtacgggaactttctggtcactcagaagagtgtgcaagtgcttgcctattatactgtgaggaattttactctaagaaacacaaaaataaaaaagggctcccagaaaggaagacccagtggacgtgtggtcacacagtatcactacacgcagtggcctgacatgggagtaccagagtactccctgccagtgctgacctttgtgagaaaggcagcctatgccaagcgccatgcagtggggcctgttgtcgtccactgcagtgctggagttggaagaacaggcacatatattgtgctagacagtatgttgcagcagattcaacacgaaggaactgtcaacatatttggcttcttaaaacacatccgttcacaaagaaattatttggtacaaactgaggagcaatatgtcttcattcatgatacactggttgaggccatacttagtaaagaaactgaggtgctggacagtcatattcatgcctatgttaatgcactcctcattcctggaccagcaggcaaaacaaagctagagaaacaattccagctcctgagccagtcaaatatacagcagagtgactattctgcagccctaaagcaatgcaacagggaaaagaatcgaacttcttctatcatccctgtggaaagatcaagggttggcatttcatccctgagtggagaaggcacagactacatcaatgcctcctatatcatgggctattaccagagcaatgaattcatcattacccagcaccctctccttcataccatcaaggatttctggaggatgatatgggaccataatgcccaactggtggttatgattcctgatggccaaaacatggcagaagatgaatttgtttactggccaaataaagatgagcctataaattgtgagagctttaaggtcactcttatggctgaagaacacaaatgtctatctaatgaggaaaaacttataattcaggactttatcttagaagctacacaggatgattatgtacttgaagtgaggcactttcagtgtcctaaatggccaaatccagatagccccattagtaaaacttttgaacttataagtgttataaaagaagaagctgccaatagggatgggcctatgattgttcatgatgagcatggaggagtgacggcaggaactttctgtgctctgacaacccttatgcaccaactagaaaaagaaaattccgtggatgtttaccaggtagccaagatgatcaatctgatgaggccaggagtctttgctgacattgagcagtatcagtttctctacaaagtgatcctcagccttgtgagcacaaggcaggaagagaatccatccacctctctggacagtaatggtgcagcattgcctgatggaaatatagctgagagcttagagtctttagtttaacacagaaaggggtgggggaactcacatctgagcattgttttcctcttcctaaaattaggcaggaaaatcagtctagttctgttatctgttgatttcccatcacctgacagtaactttcatgacataggattctgccgccaaatttatatcattaacaatgtgtgcctttttgcaagacttgtaatttacttattatgtttgaactaaaatgattgaattttacagtatttctaagaatggaattgtggtatttttttctgtattgattttaacagaaaatttcaatttatagaggttaggaattccaaactacagaaaatgtttgtttttagtgtcaaatttttagctgtatttgtagcaattatcaggtttgctagaaatataacttttaatacagtagcctgtaaataaaacactcttccatatgatattcaacattttacaactgcagtattcacctaaagtagaaataatctgttacttattgtaaatactgccctagtgtctccatggaccaaatttatatttataattgtagatttttatattttactactgagtcaagttttctagttctgtgtaattgtttagtttaatgacgtagttcattagctggtcttactctaccagttttctgacattgtattgtgttacctaagtcattaactttgtttcagcatgtaattttaacttttgtggaaaatagaaataccttcattttgaaagaagtttttatgagaataacaccttaccaaacattgttcaaatggtttttatccaaggaattgcaaaaataaatataaatattgccattaa

SEQ ID NO: 17047 - DNA, 568 bp, Homo sapiens
  source 1..568: mol_type = unassigned DNA
agaccgcggccgccgcagccggcgaaagaggcaaagtcccgcacgccggaggacatgcgcctcggctagcggccccgggccccaccaccgtgcggctttctccagattattcctctctcgctgtctctgactgtctctctctgtctctgtctctgtctctctctctctcacacacacacacacacacacaaacacacatacgcacgcacgatctcacttcgatctatacactggaggattaaaacaaacaaacaaaaaaaacatttccttcgctccccctccctctccactctgagaagcagaggagccgcacggcgaggggccgcagaccgtctggaaatgcgaatcctaaagcgtttcctcgcttgcattcagctcctctgtgtttgccgcctggattgggctaatggatactacagacaacagagaaaacttgttgaagagattggctggtcctatacagaaagaaaagcattcagaagaatataaaatgaaaactacactgccactcctttcttccttgtgatggccatggaaatgctagcgtttaaccagagacttggactct

SEQ ID NO: 17048 - DNA, 4627 bp, Homo sapiens
  source 1..4627: mol_type = unassigned DNA
cgcacgcacgatctcacttcgatctatacactggaggattaaaacaaacaaacaaaaaaaacatttccttcgctccccctccctctccactctgagaagcagaggagccgcacggcgaggggccgcagaccgtctggaaatgcgaatcctaaagcgtttcctcgcttgcattcagctcctctgtgtttgccgcctggattgggctaatggatactacagacaacagagaaaacttgttgaagagattggctggtcctatacaggagcactgaatcaaaaaaattggggaaagaaatatccaacatgtaatagcccaaaacaatctcctatcaatattgatgaagatcttacacaagtaaatgtgaatcttaagaaacttaaatttcagggttgggataaaacatcattggaaaacacattcattcataacactgggaaaacagtggaaattaatctcactaatgactaccgtgtcagcggaggagtttcagaaatggtgtttaaagcaagcaagataacttttcactggggaaaatgcaatatgtcatctgatggatcagagcatagtttagaaggacaaaaatttccacttgagatgcaaatctactgctttgatgcggaccgattttcaagttttgaggaagcagtcaaaggaaaagggaagttaagagctttatccattttgtttgaggttgggacagaagaaaatttggatttcaaagcgattattgatggagtcgaaagtgttagtcgttttgggaagcaggctgctttagatccattcatactgttgaaccttctgccaaactcaactgacaagtattacatttacaatggctcattgacatctcctccctgcacagacacagttgactggattgtttttaaagatacagttagcatctctgaaagccagttggctgttttttgtgaagttcttacaatgcaacaatctggttatgtcatgctgatggactacttacaaaacaattttcgagagcaacagtacaagttctctagacaggtgttttcctcatacactggaaaggaagagattcatgaagcagtttgtagttcagaaccagaaaatgttcaggctgacccagagaattataccagccttcttgttacatgggaaagacctcgagtcgtttatgataccatgattgagaagtttgcagttttgtaccagcagttggatggagaggaccaaaccaagcatgaatttttgacagatggctatcaagacttgggtgctattctcaataatttgctacccaatatgagttatgttcttcagatagtagccatatgcactaatggcttatatggaaaatacagcgaccaactgattgtcgacatgcctactgataatcctgaacttgatcttttccctgaattaattggaactgaagaaataatcaaggaggaggaagagggaaaagacattgaagaaggcgctattgtgaatcctggtagagacagtgctacaaaccaaatcaggaaaaaggaaccccagatttctaccacaacacactacaatcgcatagggacgaaatacaatgaagccaagactaaccgatccccaacaagaggaagtgaattctctggaaagggtgatgttcccaatacatctttaaattccacttcccaaccagtcactaaattagccacagaaaaagatatttccttgacttctcagactgtgactgaactgccacctcacactgtggaaggtacttcagcctctttaaatgatggctctaaaactgttcttagatctccacatatgaacttgtcggggactgcagaatccttaaatacagtttctataacagaatatgaggaggagagtttattgaccagtttcaagcttgatactggagctgaagattcttcaggctccagtcccgcaacttctgctatcccattcatctctgagaacatatcccaagggtatatattttcctccgaaaacccagagacaataacatatgatgtccttataccagaatctgctagaaatgcttccgaagattcaacttcatcaggttcagaagaatcactaaaggatccttctatggagggaaatgtgtggtttcctagctctacagacataacagcacagcccgatgttggatcaggcagagagagctttctccagactaattacactgagatacgtgttgatgaatctgagaagacaaccaagtccttttctgcaggcccagtgatgtcacagggtccctcagttacagatctggaaatgccacattattctacctttgcctacttcccaactgaggtaacacctcatgcttttaccccatcctccagacaacaggatttggtctccacggtcaacgtggtatactcgcagacaacccaaccggtatacaatgaggccagtaatagtagccatgagtctcgtattggtctagctgaggggttggaatccgagaagaaggcagttataccccttgtgatcgtgtcagccctgacttttatctgtctagtggttcttgtgggtattctcatctactggaggaaatgcttccagactgcacacttttacttagaggacagtacatcccctagagttatatccacacctccaacacctatctttccaatttcagatgatgtcggagcaattccaataaagcactttccaaagcatgttgcagatttacatgcaagtagtgggtttactgaagaatttgaggaagtgcagagctgtactgttgacttaggtattacagcagacagctccaaccacccagacaacaagcacaagaatcgatacataaatatcgttgcctatgatcatagcagggttaagctagcacagcttgctgaaaaggatggcaaactgactgattatatcaatgccaattatgttgatggctacaacagaccaaaagcttatattgctgcccaaggcccactgaaatccacagctgaagatttctggagaatgatatgggaacataatgtggaagttattgtcatgataacaaacctcgtggagaaaggaaggagaaaatgtgatcagtactggcctgccgatgggagtgaggagtacgggaactttctggtcactcagaagagtgtgcaagtgcttgcctattatactgtgaggaattttactctaagaaacacaaaaataaaaaagggctcccagaaaggaagacccagtggacgtgtggtcacacagtatcactacacgcagtggcctgacatgggagtaccagagtactccctgccagtgctgacctttgtgagaaaggcagcctatgccaagcgccatgcagtggggcctgttgtcgtccactgcagtgctggagttggaagaacaggcacatatattgtgctagacagtatgttgcagcagattcaacacgaaggaactgtcaacatatttggcttcttaaaacacatccgttcacaaagaaattatttggtacaaactgaggagcaatatgtcttcattcatgatacactggttgaggccatacttagtaaagaaactgaggtgctggacagtcatattcatgcctatgttaatgcactcctcattcctggaccagcaggcaaaacaaagctagagaaacaattccagctcctgagccagtcaaatatacagcagagtgactattctgcagccctaaagcaatgcaacagggaaaagaatcgaacttcttctatcatccctgtggaaagatcaagggttggcatttcatccctgagtggagaaggcacagactacatcaatgcctcctatatcatgggctattaccagagcaatgaattcatcattacccagcaccctctccttcataccatcaaggatttctggaggatgatatgggaccataatgcccaactggtggttatgattcctgatggccaaaacatggcagaagatgaatttgtttactggccaaataaagatgagcctataaattgtgagagctttaaggtcactcttatggctgaagaacacaaatgtctatctaatgaggaaaaacttataattcaggactttatcttagaagctacacaggatgattatgtacttgaagtgaggcactttcagtgtcctaaatggccaaatccagatagccccattagtaaaacttttgaacttataagtgttataaaagaagaagctgccaatagggatgggcctatgattgttcatgatgagcatggaggagtgacggcaggaactttctgtgctctgacaacccttatgcaccaactagaaaaagaaaattccgtggatgtttaccaggtagccaagatgatcaatctgatgaggccaggagtctttgctgacattgagcagtatcagtttctctacaaagtgatcctcagccttgtgagcacaaggcaggaagagaatccatccacctctctggacagtaatggtgcagcattgcctgatggaaatatagctgagagcttagagtctttagtttaacacagaaaggggtgggggaactcacatctgagcattgttttcctcttcctaaaattaggcaggaaaatcagtctagttctgttatctgttgatttcccatcacctgacagtaactttcatgacataggattctgccgccaa

SEQ ID NO: 17049 - DNA, 593 bp, Homo sapiens
  source 1..593: mol_type = unassigned DNA
ctgaggtaacacctcatgcttttaccccatcctccagacaacaggatttggtctccacggtcaacgtggtatactcgcagacaacccaaccggtatacaatggtttgaccatttcctatgcaagtgagaaatatgaaccagttttgttaaaaagtgaaagttcccaccaagtggtaccttctttgtacagtaatgatgagttgttccaaacggccaatttggagattaaccaggcccatcccccaaaaggaaggcatgtatttgctacacctgttttatcaattgatgaaccattaaatacactaataaataagcttatacattccgatgaaattttaacctccaccaaaagttctgttactggtaaggtatttgctggtattccaacagttgcttctgatacatttgtatctactgatcattctgttcctataggaaatgggcatgttgccattacagctgtttctccccacagagatggttctgtaacctcaacaaagttgctgtttccttctaaggcaacttctgagctgagtcatagtgccaaatctgatgccggtttagtgggtggtggtgaagatggtgacactgat

SEQ ID NO: 17050 - DNA, 571 bp, Homo sapiens
  source 1..571: mol_type = unassigned DNA
agccacagtggaagaatatgtagggcattgaggtttcctatattaacaaagtatcactttgaacccagctacaacttcaaattctgtctgtgcttttagcatgcctgatatctacttgctcttctgcatctgctacaggtaaaactgagataaattttataatttaacatcttgtgacttgttaaaatggatgtagatccagcaatccctcttctgggtatatacctgcttttgttttaattctggagatttctatcaaaattttcaagcagctcagaaattgtcttattttccatagcaactagtagtataaattgtgttcttttatttccaggaaatgcttccagactgcacacttttacttagaggacagtacatcccctagagttatatccacacctccaacacctatctttccaatttcagatgatgtcggagcaattccaataaagcactttccaaagcatgttgcagatttacatgcaagtagtgggtttactgaagaatttgaggaagtgcagagctgtactgttgacttaggtattacagcagacagctccaaccacccaga

SEQ ID NO: 17051 - DNA, 817 bp, Homo sapiens
  source 1..817: mol_type = unassigned DNA
ggtatatacctgcttttgttttaattctggagatttctatcaaaattttcaagcagctcagaaattgtcttattttccatagcaactagtagtataaattgtgttcttttatttccaggaaatgcttccagactgcacacttttacttagaggacagtacatcccctagagttatatccacacctccaacacctatctttccaatttcagatgatgtcggagcaattccaataaagcactttccaaagcatgttgcagatttacatgcaagtagtgggtttactgaagaatttgaggtatgattttaatatgtctattttaaataatatagaaaatagtaaaatttaaaagattcagcaataggctatttcttgacctaaagacagtgcaaccatttgcacttctagtaaaaatatgagttccataattacatatgtgtttaggagatgtgttatagttactatataatttagacaattggttttctattttaaaagccaagttgtactggtggaaacataaaaaacattgttcattttcttccataaagtacaaatctttaatattcttttttaaaatctgaattaataacaatgattctttttaattttctaaattctataaattatactaaactactaaatttcatgatttccagccaaattacataaaaattcttaactgtgatttgtacaccagtgttaatgcaaaagcatttagataacacttacattataccaggtaaaaatgtatcttcttttcaagaaaatatgcatttctaaaaaaaatttgaacttcaaaatcagtaagttttttc

SEQ ID NO: 17052 - DNA, 554 bp, Homo sapiens
  source 1..554: mol_type = unassigned DNA
atctccttttaaaagtgttatgttttcttttacataattttaaagttccaaattattagacattttgatttgcatgcaactgtttgaaacattctgttgtgttagtatttgacaaatgtatttattgcatgatcatagttttccattgtaaacctaatatgaacgcttttttttctcatttgtcgtgtgctgtggaatttgatttctttacttttttggcattcattccctcattagacactgaaagagttttaccaggtaaggcattatttcactgcattttcttttagccaagaagtagttgtaacttttaaaaaatttcatttgatagattattttgtttgttttgtcttcgttattatattttaaggcacgttgtttgaaagaatgtgtgttaaaatgatttacatataattttttacaggaagtgcagagctgtactgttgacttaggtattacagcagacagctccaaccacccagacaacaagcacaagaatcgatacataaatatcgttgcctatgatcatagcagggttaagctagcacagcttg

SEQ ID NO: 17053 - DNA, 549 bp, Homo sapiens
  source 1..549: mol_type = unassigned DNA
aatatgaacgcttttttttctcatttgtcgtgtgctgtggaatttgatttctttacttttttggcattcattccctcattagacactgaaagagttttaccaggaagtgcagagctgtactgttgacttaggtattacagcagacagctccaaccacccagacaacaagcacaagaatcgatacataaatatcgttgcctatgatcatagcagggttaagctagcacagcttgctgaaaaggatggcaaactgactgattatatcaatgccaattatgttgatggctacaacagaccaaaagcttatattgctgcccaaggcccactgaaatccacagctgaagatttctggagaatgatatgggaacataatgtggaagttattgtcatgataacaaacctcgtggagaaaggaaggagaaaatgtgatcagtactggcctgccgatgggagtgaggagtacgggaactttctggtcactcagaagagtgtgcaagtgcttgcctattatactgtgaggaattttactctaagaaacacaaaaataaa

SEQ ID NO: 17054 - DNA, 1128 bp, Homo sapiens
  source 1..1128: mol_type = unassigned DNA
ctgaacttatgttataaatatataaaatacagtttgttatatatgtatttatacattatattatatgtgtattatacatgtctttatatgatactctcaggttttttttattattgccaactcctttcatagtatacaaataataaaccataagcaaatactaaacttctgtaaagtattccactattgatatcatgaacacttggcaatatttcagattaaatcatagttctttgtgcaaaaagcgaagagagacaattcattaaaagtttcagtgttttcactgcaaagttgtcaaggctatatgctttgtgagttctaaatgtgagtggtgcatctcaatggagtctttgttccttttcttttttttttttacaaggcatggaggagtgacggcaggaactttctgtgctctgacaacccttatgcaccaactagaaaaagaaaattccgtggatgtttaccaggtagccaagatgatcaatctgatgaggccaggagtctttgctgacattgagcagtatcagtttctctacaaagtgatcctcagccttgtgagcacaaggcaggaagagaatccatccacctctctggacagtaatggtgcagcattgcctgatggaaatatagctgagagcttagagtctttagtttaacacagaaaggggtgggggaactcacatctgagcattgttttcctcttcctaaaattaggcaggaaaatcagtctagttctgttatctgttgatttcccatcacctgacagtaactttcatgacataggattctgccgccaaatttatatcattaacaatgtgtgcctttttgcaagacttgtaatttacttattatgtttgaactaaaatgattgaattttacagtatttctaagaatggaattgtggtatttttttctgtattgattttaacagaaaatttcaatttatagaggttaggaattccaaactacagaaaatgtttgtttttagtgtcaaatttttagctgtatttgtagcaattatcaggtttgctagaaatataacttttaatacagtagcctgtaaataaaacactcttccatatgatattcaacattttacaactgcagtattcacctaaagtagaaata

SEQ ID NO: 17055 - DNA, 1070 bp, Homo sapiens
  source 1..1070: mol_type = unassigned DNA
cgcgggtggttagttgagccggctccggcggggaaggaggcgggctgcggctgcggctggggctgaagctggggctggggttgggggactgcccggggcttagatggctccgagcccgtttgagcgtggtctcggactgctaactggaccaacggcaactgtctgatgagtgccagccccaaaccgcgcgctgctcgggaccttagagcctctgactcaggctggaagatttgagagctggattaagtacttgttggctcacgcccgtgactgttccgctgtttagctcttgttttttgtgtggacactcctaggatagaaagtttggtatgttgctatacctttgcttctcccaccttccccaatatctaatatgtatttctcattcttagaataatccagaatggctactctgatctatgttgataaggaaaatggagaaccaggcacccgtgtggttgctaaggatgggctgaagctggggtctggaccttcaatcaaagccttagatgggagatctcaagtttcaacaccacgttttggcaaaacgttcgatgccccaccagccttacctaaagctactagaaaggctttgggaactgtcaacagagctacagaaaagtctgtaaagaccaagggacccctcaaacaaaaacagccaagcttttctgccaaaaagatgactgagaagactgttaaagcaaaaagctctgttcctgcctcagatgatgcctatccagaaatagaaaaattctttcccttcaatcctctagactttgagagttttgacctgcctgaagagcaccagattgcgcacctccccttgagtggagtgcctctcatgatccttgacgaggagagagagcttgaaaagctgtttcagctgggccccccttcacctgtgaagatgccctctccaccatgggaatccaatctgttgcagtctccttcaagcattctgtcgaccctggatgttgaattgccacctgtttgctgtgacatagatatttaaatttcttagtgcttcagagtttgtgtgtatttgtattaataaagcattctttaacaga

SEQ ID NO: 17056 - DNA, 670 bp, Homo sapiens
  source 1..670: mol_type = unassigned DNA
tgtgtggacactcctaggatagaaagtttggaaaatggagaaccaggcacccgtgtggttgctaaggatgggctgaagctggggtctggaccttcaatcaaagccttagatgggagatctcaagtttcaacaccacgttttggcaaaacgttcgatgccccaccagccttacctaaagctactagaaaggctttgggaactgtcaacagagctacagaaaagtctgtaaagaccaagggacccctcaaacaaaaacagccaagcttttctgccaaaaagatgactgagaagactgttaaagcaaaaagctctgttcctgcctcagatgatgcctatccagaaatagaaaaattctttcccttcaatcctctagactttgagagttttgacctgcctgaagagcaccagattgcgcacctccccttgagtggagtgcctctcatgatccttgacgaggagagagagcttgaaaagctgtttcagctgggccccccttcacctgtgaagatgccctctccaccatgggaatccaatctgttgcagtctccttcaagcattctgtcgaccctggatgttgaattgccacctgtttgctgtgacatagatatttaaatttcttagtgcttcagagtttgtgtgtatttgtattaataaagcattctttaacaga

SEQ ID NO: 17057 - DNA, 895 bp, Homo sapiens
  source 1..895: mol_type = unassigned DNA
gagggtcgcgggtggttagttgagccggctccggcggggaaggaggcgggctgcggctgcggctggggctgaagctggggctggggttgggggactgcccggggcttagatggctccgagcccgtttgagcgtggtctcggactgctaactggaccaacggcaactgtctgatgagtgccagccccaaaccgcgcgctgctcgggaccttagagcctctgactcaggctggaagatttgagagctggattaaaataatccagaatggctactctgatctatgttgataaggaaaatggagaaccaggcacccgtgtggttgctaaggatgggctgaagctggggtctggaccttcaatcaaagccttagatgggagatctcaagtttcaacaccacgttttggcaaaacgttcgatgccccaccagccttacctaaagctactagaaaggctttgggaactgtcaacagagctacagaaaagtctgtaaagaccaagggacccctcaaacaaaaacagccaagcttttctgccaaaaagatgactgagaagactgttaaagcaaaaagctctgttcctgcctcagatgatgcctatccagaaatagaaaaattctttcccttcaatcctctagactttgagagttttgacctgcctgaagagcaccagattgcgcacctccccttgagtggagtgcctctcatgatccttgacgaggagagagagcttgaaaagctgtttcagctgggccccccttcacctgtgaagatgccctctccaccatgggaatccaatctgttgcagtctccttcaagcattctgtcgaccctggatgttgaattgccacctgtttgctgtgacatagatatttaaatttcttagtgcttcagagtttg

SEQ ID NO: 17058 - DNA, 851 bp, Homo sapiens
  source 1..851: mol_type = unassigned DNA
tgaatgcggctgttaagacctgcaataatccagaatggctactctgatctatgttgataaggaaaatggagaaccaggcacccgtgtggttgctaaggatgggctgaagctggggtctggaccttcaatcaaagccttagatgggagatctcaagtttcaacaccacgttttggcaaaacgttcgatgccccaccagccttacctaaagctactagaaaggctttgggaactgtcaacagagctacagaaaagtctgtaaagaccaagggacccctcaaacaaaaacagccaagcttttctgccaaaaagatgactgagaagactgttaaagcaaaaagctctgttcctgcctcagatgatgcctatccagaaatagaaaaattctttcccttcaatcctctaggtagtatcttttgcaattgcgaaaagtgcttttggcctttagtttcttagtattcagctcagctgtaacttgttatgaatataatatatgaccaaaaactatgatgagactgtctgaatctgggttgctttggacaagtgtacttgttgatggaattatttgcaaggtatcatcttaggtcaggaggggaataggaacaaagatgtagaagacattgttcctgtctgtaaaagcttatcacctagaggaggtaagatgtattcatgaacattgaataagtcccattgtggacagtctttctcacaaggcttttagaagtgagctttatgtcaagttgagcaatgcctgagagtaatttggtaggattatttctttggtttgaaaaatctacataagacagtgaagacatgtttttcaaatttcttcaacctgctacatgtatctgaa

SEQ ID NO: 17059 - DNA, 684 bp, Homo sapiens
  source 1..684: mol_type = unassigned DNA
gcggcctcagatgaatgcggctgttaagacctgcaataatccagaatggctactctgatctatgttgataaggaaaatggagaaccaggcacccgtgtggttgctaaggatgggctgaagctggggtctggaccttgtaagtatacaaggctgcagtcggatacactggtattgtggacgtggcctggagctggacgagacatttagtgtactttttgggcaattggagtcgtttgttattggtcctttttcatttttaatatcttaatgagatgatttaaggaagttactgaatctctgctattaggcctatcatagccatgccactaccaaaagtggggggtgggtttgggggtgagaggtcaagtttatatacacagtatttaagttgtacaggtattttgctgctggaatattcttatggtaagactttttcttcagcaatcaaagccttagatgggagatctcaagtttcaacaccacgttttggcaaaacgttcgatgccccaccagccttacctaaagctactagaaaggctttgggaactgtcaacagagctacagaaaagtctgtaaagaccaagggacccctcaaacaaaaacagccaagcttttctgccaaaaagatgactgagaagactgttaaagcaaaaagctctgttcctgcctcagatgatgcctatc

SEQ ID NO: 17060 - DNA, 753 bp, Homo sapiens
  source 1..753: mol_type = unassigned DNA
gtggtttaaaccaggagtgcgccgcgtccgttcaccgcggcctcagatgaatgcggctgttaagacctgcaataatccagaatggctactctgatctatgttgataaggaaaatggagaaccaggcacccgtgtggttgctaaggatgggctgaagctggggtctggaccttcaatcaaagccttagatgggagatctcaagtttcaacaccacgttttggcaaaacgttcgatgccccaccagccttacctaaagctactagaaaggctttgggaactgtcaacagagctacagaaaagtctgtaaagaccaagggacccctcaaacaaaaacagccaagcttttctgccaaaaagatgactgagaagactgttaaagcaaaaagctctgttcctgcctcagatgatgcctatccagaaatagaaaaattctttcccttcaatcctctagactttgagagttttgacctgcctgaagagcaccagattgcgcacctccccttgagtggagtgcctctcatgatccttgacgaggagagagagcttgaaaagctgtttcagctgggccccccttcacctgtgaagatgccctctccaccatgggaatccaatctgttgcagtctccttcaagcattctgtcgaccctggatgttgaattgccacctgtttgctgtgacatagatatttaaatttcttagtgcttcagagtttgtgtgtatttgtattaataaagcattctttaacagattctt

SEQ ID NO: 17061 - DNA, 434 bp, Homo sapiens
  source 1..434: mol_type = unassigned DNA
accgcggcctcagatgaatgcggctgttaagacctgcaataatccagaatggctactctgatctatgttgataaggaaaatggagaaccaggcacccgtgtggttgctaaggatgggctgaagctggggtctggaccttcaatcaaagccttagatgggagatctcaagtttcaacaccacgttttggcaaaacgttcgatgccccaccagccttacctaaagctactagaaaggctttgggaactgtcaacagagctacagaaaagtctgtaaagaccaagggacccctcaaacaaaaacagccaagcttttctgccaaaaaggtaagtgttggctataaagacactgtttaaacacttaagcacttttgactcttaaaatgactattggcatcatcctacgtagctttcttccctctgagtagaagggaaat

SEQ ID NO: 17062 - DNA, 2140 bp, Homo sapiens
  source 1..2140: mol_type = unassigned DNA
ctcagtgcgcgtgcgcggggcgggcgggtgcgcgcgcacttcctcctcgcccccacccagacccagaaggcgccaccatggcggcgcccccgcagcccgtcacccacctcatctttgacatggacggacttcttctggatactgaacggctgtattcagtggtgtttcaagaaatatgtaatcgctatgacaagaaatacagctgggatgtaaagtccctggttatgggtaagaaggcattagaggcggcacagattataatagacgtcttgcagctcccgatgtccaaagaggagctggtggaagaaagccaaacgaagttaaaggaagtgttccccacggctgcgctcatgccaggggcggagaaactcatcatccacctgcggaaacatggcatcccctttgcactggccaccagctcggggtccgcgtcgttcgatatgaagacaagccgccacaaggagttcttcagcttgttttcccacattgtgctgggagatgaccccgaagtgcagcatggcaagccagacccggacatcttcctagcttgtgccaagaggttctctccccctcctgctatggagaagtgccttgtctttgaagatgctcccaatggggtggaggcggccctggcagctgggatgcaggtggtcatggttcctgacggaaacttgagccgagatctgacaacaaaggccaccctggtgctgaattccctgcaggacttccagcccgagctgtttggtttgccctcctatgagtgagagggagggcctcagtcttccgcccccagcccactctcatggtccacactgctgggggaaagggaaaggaaatcagcaactcttcaatcccaacctgcgctgtgattttagcctcctgagattggagtttccatcccatgttggtttgtcccagtctaacgtgttgataaaatgtgacttgacggttgagacaaaaaatacagtagagacagaaacgaagcccagaacaaagatgaaacttgaattaccatctcagaagtcaagctgatggagtatgtgataaagtgaatgtacatgtatatacacacacacctccatatatacatgtgtgtatcagtttggtaatatgcaggtaggcattacatgcatatgtatgtagacatatgcatgcatgtatatgtaaaatatatacttttccaagacaaaatggaacatcacttctctcttctagtttttctgaacactggctgggaaatgtaaactgtgtatgcatataagtatatgctttatgtatgcatatgtatgtagatatgtttatatctatcgtctgcatcactctcctcagtgttgatgtcaacatgcaatgacaactgataaagcgagatggtagttctgcctggtttgcagtctgagtgggaaagtcctgtttttgatgagcactccttgttagctaacatttaaattctttttgtgacctcagaatgtctctggatctttcctcattgactgactctgtgccacgtcatccatagtttattgttagtatgaacacaactgtaacatttacctggtatctacatccttacctgcattggaaaatgtttgctacctcacaacaaccatttgcctcctttaagaacactgatgggctgcactttttggatagaaatagaatttgatttcagaatgtatgcttggtgagtctcagtgcccaggaacacttttggaataatttatcagacattgaacttctgtgattaatcgcttttatagatttactcagtctttaaaattcgtctctgatttgccagagaaaaacggtggtagccatggaaatcgggagtgaaggagcactgcttcattgtggctcagcccttcctaggggcctctgccctttgatgtccttgagctactcttcagctctggaagttgtggacaaaccgtaggaatgtatgtgtgcgtgtggtggagtgattgtctgtgaatgacaggccctggctattgattgatgttgcatcaatttagcaaattcatttcctcattcttgatggcctgaatatatgtctgcacttttaatgctcctcttaaccagttgtaacatcttaccatttccctaacaaattgaattagtttaataaaatcttttgacacatgtt

SEQ ID NO: 17063 - DNA, 1376 bp, Homo sapiens
  source 1..1376: mol_type = unassigned DNA
acttcctcctcgcccccacccagacccagaaggcgccaccatggcggcgcccccgcagcccgtcacccacctcatctttgacatggacggacttcttctggatactgaacggctgtattcagtggtgtttcaagaaatatgtaatcgctatgacaagaaatacagctgggatgtaaagtccctggttatgggggcggagaaactcatcatccacctgcggaaacatggcatcccctttgcactggccaccagctcggggtccgcgtcgttcgatatgaagacaagccgccacaaggagttcttcagcttgttttcccacattgtgctgggagatgaccccgaagtgcagcatggcaagccagacccggacatcttcctagcttgtgccaagaggttctctccccctcctgctatggagaagtgccttgtctttgaagatgctcccaatggggtggaggcggccctggcagctgggatgcaggtggtcatggttcctgacggaaacttgagccgagatctgacaacaaaggccaccctggtgctgaattccctgcaggacttccagcccgagctgtttggtttgccctcctatgagtgagagggagggcctcagtcttccgcccccagcccactctcatggtccacactgctgggggaaagggaaaggaaatcagcaactcttcaatcccaacctgcgctgtgattttagcctcctgagattggagtttccatcccatgttggtttgtcccagtctaacgtgttgataaaatgtgacttgacggttgagacaaaaaatacagtagagacagaaacgaagcccagaacaaagatgaaacttgaattaccatctcagaagtcaagctgatggagtatgtgataaagtgaatgtacatgtatatacacacacacctccatatatacatgtgtgtatcagtttggtaatatgcaggtaggcattacatgcatatgtatgtagacatatgcatgcatgtatatgtaaaatatatacttttccaagacaaaatggaacatcacttctctcttctagtttttctgaacactggctgggaaatgtaaactgtgtatgcatataagtatatgctttatgtatgcatatgtatgtagatatgtttatatctatcgtctgcatcactctcctcagtgttgatgtcaacatgcaatgacaactgataaagcgagatggtagttctgcctggtttgcagtctgagtgggaaagtcctgtttttgatgagcactccttgttagctaacatttaaattctttttgtgacctcagaatgtctctggatctttcctcattgactgactctgtgccacgtcatccatagtttattgttagtatgaacacaactgt

SEQ ID NO: 17064 - DNA, 1334 bp, Homo sapiens
  source 1..1334: mol_type = unassigned DNA
cgcgcacttcctcctcgcccccacccagacccagaaggcgccaccatggcggcgcccccgcagcccgtcacccacctcatctttgacatggacggacttcttctgggttatacaggaagcatagtggcagctgcttcgggggagtcctcaagaggcttacaatcacggtggacggatactgaacggctgtattcagtggtgtttcaagaaatatgtaatcgctatgacaagaaatacagctgggatgtaaagtccctggttatgggtaagaaggcattagaggcggcacagattataatagacgtcttgcagctcccgatgtccaaagaggagctggtggaagaaagccaaacgaagttaaaggaagtgttccccacggctgcgctcatgccaggggcggagaaactcatcatccacctgcggaaacatggcatcccctttgcactggccaccagctcggggtccgcgtcgttcgatatgaagacaagccgccacaaggagttcttcagcttgttttcccacattgtgctgggagatgaccccgaagtgcagcatggcaagccagacccggacatcttcctagcttgtgccaagaggttctctccccctcctgctatggagaagtgccttgtctttgaagatgctcccaatggggtggaggcggccctggcagctgggatgcaggtggtcatggttcctgacggaaacttgagccgagatctgacaacaaaggccaccctggtgctgaattccctgcaggacttccagcccgagctgtttggtttgccctcctatgagtgagagggagggcctcagtcttccgcccccagcccactctcatggtccacactgctgggggaaagggaaaggaaatcagcaactcttcaatcccaacctgcgctgtgattttagcctcctgagattggagtttccatcccatgttggtttgtcccagtctaacgtgttgataaaatgtgacttgacggttgagacaaaaaatacagtagagacagaaacgaagcccagaacaaagatgaaacttgaattaccatctcagaagtcaagctgatggagtatgtgataaagtgaatgtacatgtatatacacacacacctccatatatacatgtgtgtatcagtttggtaatatgcaggtaggcattacatgcatatgtatgtagacatatgcatgcatgtatatgtaaaatatatacttttccaagacaaaatggaacatcacttctctcttctagtttttctgaacactggctgggaaatgtaaactgtgtatgcatataagtatatgctttatgtatgcatatgtatgtagatatg

SEQ ID NO: 17065 - DNA, 586 bp, Homo sapiens
  source 1..586: mol_type = unassigned DNA
gaaggcgccaccatggcggcgcccccgcagcccgtcacccacctcatctttgacatggacggacttcttctggatactgaacggctgtattcagtggtgtttcaagaaatatgtaatcgctatgacaagaaatacagctgggatgtaaagtccctggttatgggtaagaaggcattagaggcggcacagattataatagacgtcttgcagctcccgatgtccaaagaggagctggtggaagaaagccaaacgaagttaaaggaagtgttccccacggctgcgctcatgccaggggcggagaaactcatcatccacctgcggaaacatggcatcccctttgcactggccaccagctcggggtccgcgtcgttcgatatgaagacaagccgccacaaggagttcttcagcttgttttcccacattgtgctgggagatgaccccgaagtgcagcatggcaagccagacccggacatcttcctagcttgtgccaagaggttctctccccctcctgctatggagaagagctccatccatagacctcgtctgctcaccgcacagaaatgccagggctgccgggatcccttct

SEQ ID NO: 17066 - DNA, 1040 bp, Homo sapiens
  source 1..1040: mol_type = unassigned DNA
cttcctcctcgcccccacccagacccagaaggcgccaccatggcggcgcccccgcagcccgtcacccacctcatctttgacatggacggacttcttctggatactgaacggctgtattcagtggtgtttcaagaaatatgtaatcgctatgacaagaaatacagctgggatgtaaagtccctggttatgggtaagaaggcattagaggcggcacagattataatagacgtcttgcagctcccgatgtccaaagaggagctggtggaagaaagccaaacgaagttaaaggaagtgttccccacggctgcgctcatgccagggcatcagctcttcacacagcaacagcttcctgcatgtggcccctgactgtccattgatgaccgaaggctcgtggacttgccaagttgcccacgtaaaacccagggttcagagagcgagacaagtccttgcattgtgaagtgccaacaattctagtattccaaagctcagtgttgttcagaacatggtacccttgtgagatcacgtgtgacatttgtgaagaacctggaactgatgtttccttaggaagcctcgcaacagtaagtgctttcagctcgctcaaggaacttcaagtaggcaagaaataagaatggaaaccctgcattactccatcagatcttgaaagttttctcttggataaatgtgcctgtcaatcacatcgaatcttatcccctgcctccatgtgctataccacaacagcgacgtctgctggaccgtgtgtgctctctgggtacacattttccaggaggcagcatcttattagagagtaacaggtctgtcttgtgtaaaggagaatgctaaccgcttcatgagaaggctccccaccatgaactcggataaccggatgctatttttttaacttatttattttttaattgacaaatagaaatcgtatatagttatcacacacaacgtgttttgaagtatgtatacattgtggagtggctgcgtcaaggtaatgaacacatgcatcatctcactttctcatcatgttttgtggg

SEQ ID NO: 17067 - DNA, 825 bp, Homo sapiens
  source 1..825: mol_type = unassigned DNA
ctcagtgcgcgtgcgcggggcgggcgggtgcgcgcgcacttcctcctcgcccccacccagacccagaaggcgccaccatggcggcgcccccgcagcccgtcacccacctcatctttgacatggacggacttcttctggatactgaacggctgtattcagtggtgtttcaagaaatatgtaatcgctatgacaagaaatacagctgggatgtaaagtccctggttatgggtaagaaggcattagaggcggcacagattataatagacgtcttgcagctcccgatgtccaaagaggagctggtggaagaaagccaaacgaagttaaaggaagtgttccccacggctgcgctcatgccaggggcggagaaactcatcatccacctgcggaaacatggcatcccctttgcactggccaccagctcggggtccgcgtcgttcgatatgaagacaagccgccacaaggagttcttcagcttgttttcccacattgtgctgggagatgaccccgaagtgcagcatggcaagccagacccggacatcttcctagcttgtgccaagaggttctctccccctcctgctatggagaagagctccatccatagacctcgtctgctcaccgcacagaaatgccagggctgccgggatcccttctcagcgctcctccttctgtgtaatcaactgcttctctgctctgatgacacctgaccgcacctccagctcacagccacagtgcatggagaccccgagccttctacttgggtgtcccacgatggcctcaaacccaacttgtcacaaaagctacctctccttcctgccaccaaaatgg

SEQ ID NO: 17068 - DNA, 9069 bp, Homo sapiens
  source 1..9069: mol_type = unassigned DNA
ggcggcctagaagatggcggacggcgacagcggcagcgagcgcggcggcggcggtgggccgtgcgggttccagcccgcgtcccgcggcggcggcgagcaagagacgcaggagctggcctcgaagcggctggacatccagaacaagcgcttctacttagatgtgaagcagaacgccaagggccgcttcctcaagatcgccgaggtgggcgcgggcggttccaagagccgcctcacgctgtccatggcggtggccgccgagttccgcgactcgctgggcgacttcatagaacactacgcgcagctgggccctagcagccccgagcagctggcggctggcgccgaggagggcggcgggccgcggcgcgcgctcaagagcgaattcttggtgcgtgagaaccgcaagtactacctggacctcaaggagaaccagcgcggccgcttcctgcgcatccgccaaacggtcaaccgcggcggtggcggcttcggcgcgggccccgggccgggcggcttgcagagcggccagaccatcgcgctgcctgcgcagggcctcatcgagttccgcgacgcgctggcgaagctcatagacgactacggaggcgaggacgacgagctggcaggcggcccgggaggcggcgccgggggcccagggggcggcctgtatggagagctcccggagggcacctccatcaccgtggactccaagcgcttcttcttcgatgtgggctgcaacaaatacggggtgtttctgcgagtgagcgaggtgaagccgtcctaccgcaatgccatcaccgtacccttcaaagcctggggcaagttcggaggcgccttttgccggtatgcggatgagatgaaagaaatccaggaacgacagagggataagctttatgagcgacgtggtgggggcagcggcggcggcgaagagtcagagggtgaggaggtggatgaggattgaaacgggcagcttcccctacaggcctccacccaaccaccatccccttggctagagaattccctttcctgctcatccccagtgagctagtggagagggagcaagggaggccgcagagggaaaaaacaaaacgtaacacagttaagagaaataatcgtaagagaacagtgacggacaacttgagaaaagcagtcaagttccaaggaactgacagcaacctgcaaagaggaaaacagcatctcctcacctgcgtaaaattgtctcagcttctgttgtttctcaactgaggttcgtaaacccatcaggataatccctggagggaatagatccttgcacatccagggcaagaaacatgtccaagttacccagaccattgataacagttgcatttaggttgcacctgggtaatctggcataaaagatctctctaggcctcactgttgcggtgtctatcccttcacctccattgaaatcagcattttggatctaggtcttcatggaatccttgagaagagaggcctttacaattacccagttctgagggttcaggttcacgaaaagaaatgcaacttgggataatcatgaacaggttaaagataagatttcaagaagccatctaagaatacagaaccaaattggatccatttttttaaaaaaatggttttgcatggaacctggaccaaggcaaatgtcttttcttcgcagaattgttttccaggatgccagtggattcagatagcaatgcttggagtagaatccgttactaaaatagtttcaaagttgacaaaaaattttcaaagataaaagcagttttacattgggggttgctgaggtaggcacaagaaaaagtcaggcataaagcacaaggcagactgtttgagtggattggttgctgctcactaaagttgttcccctgatctctaaatatggaggtcattaccaagaaatgctttggtatgaatgagagccagatctccactgtgtgagccagtgaattatggctaattcggctgttacagccactggttggctggattttaaaccataaaacttgaagattacctacaaaagtaacagtgtggctataagcctgagctttaatggatatacatcctcacagaaaagttggaaataaccaaaactgaagtcttaatttaccttcagtttaatctgtggatttgttcaaatactaaagatcctcaggtccagaattccagcatcatttattcttttaaaatttttaagaacttgatccattgtatcagtacctcacaatcagagttggcaaatgatggatgagtgattcaagcagtgcacccggtggaagctgaaatccatctgtgaatggaactgaagtgaacgtgaatatgctgactatatcctggaagcatttttataccatcttgaaatttcaacaaactggcttttgccagttaatccagctgtctttcaagaataaaagttggggttttcaaggatcgcctcttctatattttaaatggattttcagtagaaatgatttttactaatcaagttaatcccaccccatcaaaaggtattcctagaaatgtcatagacctaggtaactttgaattgaatgggagctaacgttctttccaaagttttcaggtattctttgtgtgacaccttctcaaccaggaggcaagtaaccccgcctccacaatcttagtattttttttaaactgcatgcctgccccttatttgagctgcctttttaatttattgcatatcctttttattatcttattttggtattattcaatctatacaatctttttgtatttattgggaaatgagtaatatacaaaaaggttttcatgtatttgtggctgagagggcgggaaataattgtgtacataaaattaggcttttttaaaaaaatagattatgatgcagaatattgttgatcttagattaaaaagtggaagagccacaaacattggtgcccttttcagactatttctctactctcatcatccacagtagaatttttaaacagatttttttaaagcttttcttttaaatttttctccgttgcaaagaatgtttcctaaattgtatgggagcaatagtatttttgatgttttaatgacatccgtatacttgtactgtattttgtactacaaggcagctgtttttcaataatgtcctgctgtatttacctacgtgttttgagtgtctatttctttgctgcggagaacaaattcctaaatagttttagtaaaggagctgagaagctagcattaggtttgcagaaactatttaagtttcaactctgaggcagcaatgaaaatttaagttgcagctattagttgattgctgtaactttttcattttcaaaccatgtacaattcttgtatagaccaacttgttttcttgcttcagtggtggttctgttgctcagctgcagtgagccagttcaattttgcaaaggtgcagtacctctcctttttaaggggttggtttattcttttttctttttgtttggctgaattgcagtaactagccttgcctttctattctgtagaaatgacagggtcttcacaatccttcaccagtggctactaagctataattagctgaatagaaagaatgtggaagtggtctgaggcatatagagtatatgccaagaacactaccatatatggcatcagctttggttaccagagaaattttcttagtcattagaccatgtaacagtaatatatcatatgtaaatctttagatatcaatttgaaaatcctccaaaaaaaggagcaaagaatgcataagctatgtgttggcaaaagtaatttatattaaaattttgacctgcctatgtaagattaagtggtaatgtcatagtggtgggtttttaagtcttaaccaatctctaaggtttgtttctcctgcaagggatggttcatggcctctcttcccactgcaggaagattgcagaaggctgtggattaattgtagcatttcactgatcttcactccagtcactagggacaatagaaacctgcaaaacacagattcattcgtaaatattattaatagcttattaaaggaaatggtctttgttaattccagtcagataatggcattgtacagacatgggaaacaaccaatttttttgtttttcagttgttgctatgaatgattttgagcctttttttttaagcttggcaaacatcccagctaatcaaaatagtcatattcctgagaagtaggaaactaaaacttcttttcatataattgttagaaggtttgtttcccaaactaccatagttacaaaggtgaaaagccaaattttaggaacagaatcaaaagaataaaaatctgtgaagagatcctactactcttccttctatgttttggttttggtttctattgtccctatcatttcagcaagtggaacagcagcaagtttttcagtgcatatgctgcacaagaacaaaatataaatctgtatggcaccaaaaatcaaagtgaaaaccaaaccaaaaacccaaacaccctatgtaactatcggaggcatatacgtggtataaatgactgtagctgtgatacacacatggctacttgtcacatcactttccataattatttactgcaaaatgattgagaggcttttggtgcaggcagccgttaacctcctgcttcctttgttacctctggattactttgcagtaaattgcaggtcttttaagagatttaagcttcagttttctcaaaacaaaacaattatcctgtcttatctgaagatgcagggttgtgggcaaaagaggctggttataataatgccctcatattgagtggtctgtaaacggctgcacacttcaggcactgtagttgctgaagatgctttgttaaatgtgaccttgactggctttacaggggtgtagaatgtaatctacacaaggtgactttgcatctatcttgctcttgaggtggatgaaattgagaagctggagtgtgtaagccatgcacataagtattcttcactgtaaattttgttttcatttttaacccaattatggtactttatccaatgcacaactgatctctcagtagatattcatttgaaaatagtgtggccttgatcagtgagaaagggaaggagaaaagtgacttttttgcttatgtagaaatgactcatttgctgagagtttgtctttctgcagcactcttggtatatagtgatcggtctcctttttgattggggaaagttaatgtttttgaccctggagttaattcagttgagttatcttatatttttaggaagtatcagaattgctctgatgaataacaaagttgactgttttgatgtccaatctcaggttttagaatatagtggtgtaaagtcccactatttttaattcttaaaacaactttaatttcgtacaccctaaaagtcacatgcataaggcctgttcagagagcagagcctccatctttttgctccttttctactttgtacttcacttgaaaaaatatcaagtgactttacattgtatatttccattgtaaccctgacatttctcaaagataaagcactttttgatcatgaaatacatgaaatctttgtgtgatgtggatcatagtttctcaggctcccttagataattgcttatgaatattgttctaactctgtgtaagaagagtagaaatctttgctaatgttagaaggtttgtattattgatccagaatgcattttgctagtttccaatggatgggagagtaaataatgctgcattcacaatttaataagttactttcccttgagccttaaggtaactttttctttcctgtcaactacagcactgaagttatagtaagtgaatgagattatcagttttcagggttggttttagagtactgtaaatcaattagctgtcttcctaaagagttacaactcccattcagtatactggataatgggtgtgtgggtggggctggggagggcgggagatagtttgtagaaaagaaaaaagaaaaaaaaaaaaacacatttaccttaagaaaatacagacaaaaaagaataaagtatgtgtcatatgctccatttgagattccaaatgcggccgggcgtggtggctcacgcctgtaatcccagcactctgggaggctgaggtgggcgggtcagttcaggtcagcctggacaacatggtgaaaccccgtctctactaaaaatactaaaattagccgggcatggtggtgcatgcctgtagtcccagctacttgggaggctgaggcaggagaatggcatgaacccaggaagcggaggttgcagtgagccaagatcgcgccattgcactccagcctgggtaacagaacaagactccgtctcaaaaaataaataaataaattccaaatgtaaggtggaaatggcagattataacttcatttcccccatttttaacttagaaaaaacaaagtccttaattttcaagtattagccccccagaagtttcagcagatagctggactcttgaataatgatttcttttgatatgtctgactttgctatttaaagtctcctttcccagccctcagtcttaaaactcagttttattactgacggatttaacagactcttacttgaaaattgtccaattatcagtactgaaaattagatttggaaaatgaaaaaataataaaatcgcatcaagaaaacttattaccttagagattcccaattgatatctgtacccctgatccaagtaaggcctttatgaatgtattttatatttcctaaagaaatagggaatatgccatcagtgtaatcacctctattcacagtcatttaatttgaaaatctaactcatgtctcttgaattagacattccaattgggataggtagagtcatgttaaaacaatagaatagcaactgccatattggtagtttcactgctcaatatgatttctaataagagcagagctttattggaagctaaaactcatttttctccatagatgattctaacagtttaataaaaaagtataattatactttaagtgtcaacagattttgagtctagaagcaaatttcattttccttgtgttatatctaatatccattgacatgggtaagaaaactaattatgtctttttagtatgatgaaatgtgggcccagagtattggaaagaaagcaatagccctattcagtgtccactaggatggatattgcagaaggcatgagtttgtccttttttcccccttaccttaaataacacttcaatagctaactttttccaaaatatccatttaggccatctcttatttcttaaagccaaatatttcgtccccagtcttaactctgagttgcaagatcaggctggttggaagaatctttatatttagaaataggatggtgagtggtttgtttattctcttgtaaaattcctttttcagagacataactgcagggagagtcccaagagaactgaagaactggattatatcattaaacacatttgtgttgtaggaatttgggagtttcattttgaactgataagatattagacataaacccttgttccagcccacatgtgtcatccctgtgtacaaaagctctctggattctttttttttttttgagacggagtttcgctcttatcgtccaggctggagtgagtgtagtggcttgatctcagctcactgcaacctttgcctcccgggctcaagcgattctcctgcctcagcctcccaagtagctgggattacaagcatgtgccaccatgcccagctaattttctgtatttttagtagagacggggtttcaccatgttggccaggctggtctcgaactcctgacctcaagtgatctgcccgcctcagcttcccaaaatgctggaattacaggcatgagccatcacgcctagcctactctctgaatttctaaaagtcagtaggttgaccaaaaagtctagaaactggctttaagtcagtatgggacgtacttataaagagtccatggttttgcacgtttcggtagacaagtaaatctgagttatttttcaatgacttaccaatatttgaatagtaactaagatcgtcagtgtatctggacttctttttttgaagttctaaaacaattatagtagggatttattattttgggcctccatccagatgtttttccaagatcatttttaaaattcatttgtcttctgtttccagataacatactttccgttctataggaatcttcactgccaatcatagtatctaccagtggctttcttagactattcactccaaagctgggactgatgtcctgccagtagagaatctacagaaataatttgaatgaattaaaaccaaatcttgatagcaggagacagcttcctgatctagatgtacaattagagtttaggttggaaattactttaaaatgtgttttttggggatgtcttcaatctctgtgtaaatacccacatgcttatgcattgtaaaccaagtgtgtattcctgtgtatgaatttgtagaactgatttctgcttcaagagaagctgcacctttaattttataaggtcccctccacctgtaaccctataaatgtctgtaaataaaacactaaaatttgtagtgataggatcaatttgggaatatctgctgagagaccaaaaagttcatttttttaagtaccttggttaaagagtaaagattattcctcttattttttaaagaagaatgcactttaacaaacatagagctgcatgggcaattcaaacaaatctgtgaagtgcagtacccattcagaaatcacacttcctgaaaaccgttcaaaagcagagtccagacgggctgttgatctcactgcctgtaggttgaagctcagattctgatcaattttgagaggagcagggctgcttcaaaagagcaatgtgaatacagtcagaagcttcagactggtctgtaaaaatggcgggtcccgtatttaccactaactagcaaaactgacagaaaaactcacagagaaaaaatgtaagaatccttcctgctggtgtgcactccttacaatagacttttgcaaatggagttttacagtctatatttaaaaaaaattgtatgtttgtaacaaataaagtatgcagaaaagtgaatgacaa

SEQ ID NO: 17069 - DNA, 422 bp, Homo sapiens
  source 1..422: mol_type = unassigned DNA
ccgggctccctcagccctccaatggagctaccgactccttcgaccacaaaaagttcttccaaatggtcggcctgaagaaaaagagtgcggatgatgtgaagaaggtgtttcacatgctggacaaggacaaaagtggcttcatcgaggaggatgagctgggattcatcctaaaaggcttctccccagatgccagagacctgtctgctaaagaaaccaagatgctgatggctgctggagacaaagatggggacggcaaaattggggttgacgaattctccactctggtggctgaaagctaagaagcactgactgcccctggtcttccacctctctgccctgaacacccaatctcggcccctctcgccaccctcctgcatttctgttcagttcgtttatgttattttttactcccccatcccctg

SEQ ID NO: 17070 - DNA, 530 bp, Homo sapiens
  source 1..530: mol_type = unassigned DNA
acttgctctgcccgctcaaacagttgcaggatgtcgatgacagacttgctgaacgctgaggacatcaagaaggcggtgggagcctttagcgctaccgactccttcgaccacaaaaagttcttccaaatggtcggcctgaagaaaaagagtgcggatgatgtgaagaaggtgtttcacatgctggacaaggacaaaagtggcttcatcgaggaggatgagctgggattcatcctaaaaggcttctccccagatgccagagacctgtctgctaaagaaaccaagatgctgatggctgctggagacaaagatggggacggcaaaattggggttgacggtgggtagccgtgacctggggtctgggcatattgtggatcttggggtgttggatgcgaaaagtttgaagctatgtctgtcacaaggaagggatgatatgggggtccctcactcccccagattagaagacaaaaagcagtccattaggtctgagagctctgccacatactccagacaaaggaaaactggtgtatttt

SEQ ID NO: 17071 - DNA, 470 bp, Homo sapiens
  source 1..470: mol_type = unassigned DNA
aggctgaggtaggagtggagagagaaagggagcagggcctaggaggtcctgaggtgcaggctggccgctgaaggttcaggatcttcccccacgcggcaggacatccgccaaggttcccagatctgagacggcgcacctcctgcgtgtccttgacggcagttgcaggatgtcgatgacagacttgctgaacgctgaggacatcaagaaggcggtgggagcctttagcgctaccgactccttcgaccacaaaaagttcttccaaatggtcggcctgaagaaaaagagtgcggatgatgtgaagaaggtgtttcacatgctggacaaggacaaaagtggcttcatcgaggaggatgagctgggattcatcctaaaaggcttctccccagatgccagagacctgtctgctaaagaaaccaagatgctgatggctgctggagacaaagatggggacggcaaaattggggttgacg

SEQ ID NO: 17072 - DNA, 569 bp, Homo sapiens
  source 1..569: mol_type = unassigned DNA
acttgctctgcccgctcaaacagttgcaggatgtcgatgacagacttgctgaacgctgaggacatcaagaaggcggtgggagcctttagcgctaccgactccttcgaccacaaaaagttcttccaaatggtcggcctgaagaaaaagagtgcggatgatgtgaagaaggtgtttcacatgctggacaaggacaaaagtggcttcatcgaggaggatgagctgggattcatcctaaaaggcttctccccagatgccagagacctgtctgctaaagaaaccaagatgctgatggctgctggagacaaagatggggacggcaaaattggggttgacgaattctccactctggtggctgaaagctaagaagcactgactgcccctggtcttccacctctctgccctgaacacccaatctcggcccctctcgccaccctcctgcatttctgttcagttcgtttatgttattttttactcccccatcccctgtggccctctaatgacaccattcttctggaaaatgctggagaagcaataaaggttgtaccagtcagactctgcttgctcaggaa

SEQ ID NO: 17073 - DNA, 595 bp, Homo sapiens
  source 1..595: mol_type = unassigned DNA
accagcccagcctttcagtgcaggctccagccctccacccccacccgagttgcaggatgtcgatgacagacttgctgaacgctgaggacatcaagaaggcggtgggagcctttagcgctaccgactccttcgaccacaaaaagttcttccaaatggtcggcctgaagaaaaagagtgcggatgatgtgaagaaggtgtttcacatgctggacaaggacaaaagtggcttcatcgaggaggatgagctgggattcatcctaaaaggcttctccccagatgccagagacctgtctgctaaagaaaccaagatgctgatggctgctggagacaaagatggggacggcaaaattggggttgacgaattctccactctggtggctgaaagctaagaagcactgactgcccctggtcttccacctctctgccctgaacacccaatctcggcccctctcgccaccctcctgcatttctgttcagttcgtttatgttattttttactcccccatcccctgtggccctctaatgacaccattcttctggaaaatgctggagaagcaataaaggttgtaccagtcagactctgcttgctcaggaa

SEQ ID NO: 17074 - DNA, 568 bp, Homo sapiens
  source 1..568: mol_type = unassigned DNA
cgatgacagacttgctgaacgctgaggacatcaagaaggcggtgggagcctttagcgctaccgactccttcgaccacaaaaagttcttccaaatggtcggcctgaagaaaaagagtgcggatgatgtgaagaaggtgtttcacatgctggacaaggacaaaagtggcttcatcgaggaggatgagctgggattcatcctaaaaggcttctccccagatgccagagacctgtctgctaaagaaaccaagatgctgatggctgctggagacaaagatggggacggcaaaattggggttgacgatccagcagatgttgactgagtagcaactctgtgcccggcaatggaagagaattctccactctggtggctgaaagctaagaagcactgactgcccctggtcttccacctctctgccctgaacacccaatctcggcccctctcgccaccctcctgcatttctgttcagttcgtttatgttattttttactcccccatcccctgtggccctctaatgacaccattcttctggaaaatgctggagaagcaataaaggttgtaccagtcaga

SEQ ID NO: 17075 - DNA, 569 bp, Homo sapiens; identical to SEQ ID NO: 17072
  source 1..569: mol_type = unassigned DNA

SEQ ID NO: 17076 - DNA, 595 bp, Homo sapiens; identical to SEQ ID NO: 17073
  source 1..595: mol_type = unassigned DNA

SEQ ID NO: 17077 - DNA, 568 bp, Homo sapiens; identical to SEQ ID NO: 17074
  source 1..568: mol_type = unassigned DNA

SEQ ID NO: 17078 - DNA, 422 bp, Homo sapiens; identical to SEQ ID NO: 17069
  source 1..422: mol_type = unassigned DNA

SEQ ID NO: 17079 - DNA, 530 bp, Homo sapiens; identical to SEQ ID NO: 17070
  source 1..530: mol_type = unassigned DNA

SEQ ID NO: 17080 - DNA, 470 bp, Homo sapiens; identical to SEQ ID NO: 17071
  source 1..470: mol_type = unassigned DNA

SEQ ID NO: 17081 - DNA, 1697 bp, Homo sapiens
  source 1..1697: mol_type = unassigned DNA
catggcctcggcggtgtttgagggcacgtcgctcgtgaacatgttcgtgcgcggctgctgggtgaacggcatccgcaggctcatcgtcagccggcgcggcgacgaagaggagttcttcgagatccgcacggagtggtcggaccgcagcgtgctctacctgcaccgcagcctggcggacctgggccgcctgtggcagcgcctgcgcgacgcctttcccgaggaccggtccgaactggcgcaggggccgctgcggcaaggactggttgccataaaggaagcccacgacatagagaccaggcttaatgaggtggagaagctgctgaagacgatcataagcatgcccttattctagatcggaagttgtgctcaccttcttcgaaagatctcctctggatcaggtgttaaaaaatgataatgtgcataaaattcaacccagctttcaaagtccagtcaaaatatcagaaatcatgaggtccaatggattttgtttagcaaataccgaaacaatagttattgaccacagtataccaaatggaagagaccagcagctgggcgtggacccaacagagcatttatttgagaatggcagtgagtttccctcagagctggaggacggggacgacccagcagcctacgtcaccaacctgtcatattaccacctggtccccttcgagacagacatttgggactgaacctctctatcaggcctcccccgcctcagctgttcactgccagctctgatgctgtccactgtgctggcccccatggtcacagctgctgccccagctctggaactcccagacgtcccaggccccactgacgccaggaggcctgggtgtcctgcaagtggagcagcaggggctcctagtgggccaggctgaccgcagagtctccagcaagctgaggtcacagccggaggccacagggcctgtgttctgagggtcttcactccctgcttggtgcccacagggctgcgcactgccagggcagggacagttcctgtggggctcgctctcactgctactgcttcctgggaggtgcatccctcttggtgaagtggcctagtgccccccagccaccctgactccccaccattccctcccacggcaaacgcacaaaacgtcttgagggagattttgacaagtcacccattccaggtgccacaggcaggggatgtttagtaatccaggatttctctgagaactgggatatgtggcctttttttttttctttttatcttttatctggaaactgggtttgggtcaaccccaggagtatttgcagaaggcccagcacagtggggggtattggctgcagggcagggaaggcattgccgactagataaccgtgtgagcttggactgagcgttggtggttcttcccaaaggaaaggaatttcttcccggcctgccaggtctctgggccttcagcgcgggtcctggtgctgcggccacaccaccctggggtgctcattgacagagctgccataatgaacttgaaaggacgggaatcacgagggaagctggggctcccctgcccacaggagaggatccccgttcttcaagcttctctgctcagtgtctactaacgaccgacatttgctaatgtaaataatagtaaattattgagaattctaattcttttacacagtctgtttttaatctattttaattaaataaaatctatgactctactttg

SEQ ID NO: 17082 - DNA, 1538 bp, Homo sapiens
  source 1..1538: mol_type = unassigned DNA
tgcaaagccgacggatagaacctgtgatgggaagacttctgctctgcgcttctcatggggagatagaaaagcacccgagccttcatgcctcgagctatggactggttgccataaaggaagcccacgacatagagaccaggcttaatgaggtggagaagctgctgaagacgatcataagcatgccctgtaaatattctagatcggaagttgtgctcaccttcttcgaaagatctcctctggatcaggtgttaaaaaatgataatgtgcataaaattcaacccagctttcaaagtccagtcaaaatatcagaaatcatgaggtccaatggattttgtttagcaaataccgaaacaatagttattgaccacagtataccaaatggaagagaccagcagctgggcgtggacccaacagagcatttatttgagaatggcagtgagtttccctcagagctggaggacggggacgacccagcagcctacgtcaccaacctgtcatattaccacctggtccccttcgagacagacatttgggactgaacctctctatcaggcctcccccgcctcagctgttcactgccagctctgatgctgtccactgtgctggcccccatggtcacagctgctgccccagctctggaactcccagacgtcccaggccccactgacgccaggaggcctgggtgtcctgcaagtggagcagcaggggctcctagtgggccaggctgaccgcagagtctccagcaagctgaggtcacagccggaggccacagggcctgtgttctgagggtcttcactccctgcttggtgcccacagggctgcgcactgccagggcagggacagttcctgtggggctcgctctcactgctactgcttcctgggaggtgcatccctcttggtgaagtggcctagtgccccccagccaccctgactccccaccattccctcccacggcaaacgcacaaaacgtcttgagggagattttgacaagtcacccattccaggtgccacaggcaggggatgtttagtaatccaggatttctctgagaactgggatatgtggcctttttttttttctttttatcttttatctggaaactgggtttgggtcaaccccaggagtatttgcagaaggcccagcacagtggggggtattggctgcagggcagggaaggcattgccgactagataaccgtgtgagcttggactgagcgttggtggttcttcccaaaggaaaggaatttcttcccggcctgccaggtctctgggccttcagcgcgggtcctggtgctgcggccacaccaccctggggtgctcattgacagagctgccataatgaacttgaaaggacgggaatcacgagggaagctggggctcccctgcccacaggagaggatccccgttcttcaagcttctctgctcagtgtctactaacgaccgacatttgctaatgtaaataatagtaaattattgagaattctaattcttttacacagtctgtttttaatctattttaattaaataaaatctatgactct

SEQ ID NO: 17083 - DNA, 2190 bp, Homo sapiens
  source 1..2190: mol_type = unassigned DNA
ttcccggctggtccagtcaccgacctgcggctccggggccgcgagggaggaggcgcggggggcgcgaggcgggggcgagcgcttgggactcggcccggctcccggctccgggggttctcgtggccgcggcagcgcggtctctgcggaggcggcgggggcgcggccagccggacctcttcctttccagagcggcccgcggcgcccgttccgcgggaggcgggcgggaggcggacgcggcctaacctcgacgtcgactaccgcgccgcccgcgatgggaagcgccttataaagccgcgcccggccggcccgagccactcgccgccgcgccgccccgctgccccgaacgcgggccatacgcagcctccttggagtgacgggccgaccccggacgaccccggccacggacagacccgggacgaccccggccggggcgcgcctcctgcgggcgggcgggcggcggggctggggagcccttggcgggggcatgcgtgcgacatggcctcggcggtgtttgagggcacgtcgctcgtgaacatgttcgtgcgcggctgctgggtgaacggcatccgcaggctcatcgtcagccggcgcggcgacgaagaggagttcttcgagatccgcacggagtggtcggaccgcagcgtgctctacctgcaccgcagcctggcggacctgggccgcctgtggcagcgcctgcgcgacgcctttcccgaggaccggtccgaactggcgcaggggccgctgcggcaaggactggttgccataaaggaagcccacgacatagagaccaggcttaatgaggtggagaagctgctgaagacgatcataagcatgccctgtaaatattctagatcggaagttgtgctcaccttcttcgaaagatctcctctggatcaggtgttaaaaaatgataatgtgcataaaattcaacccagctttcaaagtccagtcaaaatatcagaaatcatgaggtccaatggattttgtttagcaaataccgaaacaatagttattgaccacagtataccaaatggaagagaccagcagctgggcgtggacccaacagagcatttatttgagaatggcagtgagtttccctcagagctggaggacggggacgacccagcagcctacgtcaccaacctgtcatattaccacctggtccccttcgagacagacatttgggactgaacctctctatcaggcctcccccgcctcagctgttcactgccagctctgatgctgtccactgtgctggcccccatggtcacagctgctgccccagctctggaactcccagacgtcccaggccccactgacgccaggaggcctgggtgtcctgcaagtggagcagcaggggctcctagtgggccaggctgaccgcagagtctccagcaagctgaggtcacagccggaggccacagggcctgtgttctgagggtcttcactccctgcttggtgcccacagggctgcgcactgccagggcagggacagttcctgtggggctcgctctcactgctactgcttcctgggaggtgcatccctcttggtgaagtggcctagtgccccccagccaccctgactccccaccattccctcccacggcaaacgcacaaaacgtcttgagggagattttgacaagtcacccattccaggtgccacaggcaggggatgtttagtaatccaggatttctctgagaactgggatatgtggcctttttttttttctttttatcttttatctggaaactgggtttgggtcaaccccaggagtatttgcagaaggcccagcacagtggggggtattggctgcagggcagggaaggcattgccgactagataaccgtgtgagcttggactgagcgttggtggttcttcccaaaggaaaggaatttcttcccggcctgccaggtctctgggccttcagcgcgggtcctggtgctgcggccacaccaccctggggtgctcattgacagagctgccataatgaacttgaaaggacgggaatcacgagggaagctggggctcccctgcccacaggagaggatccccgttcttcaagcttctctgctcagtgtctactaacgaccgacatttgctaatgtaaataatagtaaattattgagaattctaattcttttacacagtctgtttttaatctattttaattaaataaaatctatgactct

SEQ ID NO: 17084 - DNA, 532 bp, Homo sapiens
  source 1..532: mol_type = unassigned DNA
ggcctcggcggtgtttgagggcacgtcgctcgtgaacatgttcgtgcgcggctgctgggtgaacggcatccgcaggctcatcgtcagccggcgcggcgacgaagaggagttcttcgagatccgcacggagtggtcggaccgcagcgtgctctacctgcaccgcagcctggcggacctgggccgcctgtggcagcgcctgcgcgacgcctttcccgaggaccggtccgaactggcgcaggggccgctgcggcaagacctattcaacgaattgcttgaaaactgaacaggcttttcccctgcaaaacaaaatcagaccagaacttctgaaaaagttagtctccgtgaccaataatactaggcacgtttgcatcagcctcggtcacacaagtgtgggggagacgccagtgtccttgggcacctacttccccatccctgcaaagccgacggatagaacctgtgatgggaagacttctgctctgcgcttctcatggggagatagaaaagcacccgagccttcatgcctcgagctatg

SEQ ID NO: 17085 - DNA, 6808 bp, Homo sapiens
  source 1..6808: mol_type = unassigned DNA
agccggccgtggtggctccgtgcgtccgagcgtccgtccgcgccgtcggccatggccaagcgctccaggggccccgggcgccgctgcctgttggcgctcgtgctgttctgcgcctgggggacgctggccgtggtggcccagaagccgggcgcagggtgtccgagccgctgcctgtgcttccgcaccaccgtgcgctgcatgcatctgctgctggaggccgtgcccgccgtggcgccgcagacctccatcctagatcttcgctttaacagaatcagagagatccaacctggggcattcaggcggctgaggaacttgaacacattgcttctcaataataatcagatcaagaggatacctagtggagcatttgaagacttggaaaatttaaaatatctctatctgtacaagaatgagatccagtcaattgacaggcaagcatttaagggacttgcctctctagagcaactatacctgcactttaatcagatagaaactttggacccagattcgttccagcatctcccgaagctcgagaggctatttttgcataacaaccggattacacatttagttccagggacatttaatcacttggaatctatgaagagattgcgactggactcaaacacacttcactgcgactgtgaaatcctgtggttggcggatttgctgaaaacctacgcggagtcggggaacgcgcaggcagcggccatctgtgaatatcccagacgcatccagggacgctcagtggcaaccatcaccccggaagagctgaactgtgaaaggccccggatcacctccgagccccaggacgcagatgtgacctcggggaacaccgtgtacttcacctgcagagccgaaggcaaccccaagcctgagatcatctggctgcgaaacaataatgagctgagcatgaagacagattcccgcctaaacttgctggacgatgggaccctgatgatccagaacacacaggagacagaccagggtatctaccagtgcatggcaaagaacgtggccggagaggtgaagacgcaagaggtgaccctcaggtacttcgggtctccagctcgacccacttttgtaatccagccacagaatacagaggtgctggttggggagagcgtcacgctggagtgcagcgccacaggccaccccccgccgcggatctcctggacgagaggtgaccgcacacccttgccagttgacccgcgggtgaacatcacgccttctggcgggctttacatacagaacgtcgtacagggggacagcggagagtatgcgtgctctgcgaccaacaacattgacagcgtccatgccaccgctttcatcatcgtccaggctcttcctcagttcactgtgacgcctcaggacagagtcgttattgagggccagaccgtggatttccagtgtgaagccaagggcaacccgccgcccgtcatcgcctggaccaagggagggagccagctctccgtggaccggcggcacctggtcctgtcatcgggaacacttagaatctctggtgttgccctccacgaccagggccagtacgaatgccaggctgtcaacatcatcggctcccagaaggtcgtggcccacctgactgtgcagcccagagtcaccccagtgtttgccagcattcccagcgacacaacagtggaggtgggcgccaatgtgcagctcccgtgcagctcccagggcgagcccgagccagccatcacctggaacaaggatggggttcaggtgacagaaagtggaaaatttcacatcagccctgaaggattcttgaccatcaatgacgttggccctgcagacgcaggtcgctatgagtgtgtggcccggaacaccattgggtcggcctcggtgagcatggtgctcagtgtgaatgttcctgacgtcagtcgaaatggagatccgtttgtagctacctccatcgtggaagcgattgcgactgttgacagagctataaactcaacccgaacacatttgtttgacagccgtcctcgttctccaaatgatttgctggccttgttccggtatccgagggatccttacacagttgaacaggcacgggcgggagaaatctttgaacggacattgcagctcattcaggagcatgtacagcatggcttgatggtcgacctcaacggaacaagttaccactacaacgacctggtgtctccacagtacctgaacctcatcgcaaacctgtcgggctgtaccgcccaccggcgcgtgaacaactgctcggacatgtgcttccaccagaagtaccggacgcacgacggcacctgtaacaacctgcagcaccccatgtggggcgcctcgctgaccgccttcgagcgcctgctgaaatccgtgtacgagaatggcttcaacacccctcggggcatcaacccccaccgactgtacaacgggcacgcccttcccatgccgcgcctggtgtccaccaccctgatcgggacggagaccgtcacacccgacgagcagttcacccacatgctgatgcagtggggccagttcctggaccacgacctcgactccacggtggtggccctgagccaggcacgcttctccgacggacagcactgcagcaacgtgtgcagcaacgaccccccctgcttctctgtcatgatcccccccaatgactcccgggccaggagcggggcccgctgcatgttcttcgtgcgctccagccctgtgtgcggcagcggcatgacttcgctgctcatgaactccgtgtacccgcgggagcagatcaaccagctcacctcctacatagacgcatccaacgtgtacgggagcacggagcatgaggcccgcagcatccgcgacctggccagccaccgcggcctgctgcggcagggcatcgtgcagcggtccgggaagccgctgctccccttcgccaccgggccgcccacggagtgcatgcgggacgagaacgagagccccatcccctgcttcctggccggggaccaccgcgccaacgagcagctgggcctgaccagcatgcacacgctgtggttccgcgagcacaaccgcattgccacggagctgctcaagctgaacccgcactgggacggcgacaccatctactatgagaccaggaagatcgtgggtgcggagatccagcacatcacctaccagcactggctcccgaagatcctgggggaggtgggcatgaggacgctgggagagtaccacggctacgaccccggcatcaatgctggcatcttcaacgccttcgccaccgcggccttcaggtttggccacacgcttgtcaacccactgctttaccggctggacgagaacttccagcccattgcacaagatcacctcccccttcacaaagctttcttctctcccttccggattgtgaatgagggcggcatcgatccgcttctcagggggctgttcggggtggcggggaaaatgcgtgtgccctcgcagctgctgaacacggagctcacggagcggctgttctccatggcacacacggtggctctggacctggcggccatcaacatccagcggggccgggaccacgggatcccaccctaccacgactacagggtctactgcaatctatcggcggcacacacgttcgaggacctgaaaaatgagattaaaaaccctgagatccgggagaaactgaaaaggttgtatggctcgacactcaacatcgacctgtttccggcgctcgtggtggaggacctggtgcctggcagccggctgggccccaccctgatgtgtcttctcagcacacagttcaagcgcctgcgagatggggacaggttgtggtatgagaaccctggggtgttctccccggcccagctgactcagatcaagcagacgtcgctggccaggatcctatgcgacaacgcggacaacatcacccgggtgcagagcgacgtgttcagggtggcggagttccctcacggctacggcagctgtgacgagatccccagggtagacctccgggtgtggcaggactgctgtgaagactgtaggaccagggggcagttcaatgccttttcctatcatttccgaggcagacggtctcttgagttcagctaccaggaggacaagccgaccaagaaaacaagaccacggaaaatacccagtgttgggagacagggggaacatctcagcaacagcacctcagccttcagcacacgctcagatgcatctgggacaaatgacttcagagagtttgttctggaaatgcagaagaccatcacagacctcagaacacagataaagaaacttgaatcacggctcagtaccacagagtgcgtggatgccgggggcgaatctcacgccaacaacaccaagtggaaaaaagatgcatgcaccatttgtgaatgcaaagacgggcaggtcacctgcttcgtggaagcttgcccccctgccacctgtgctgtccccgtgaacatcccaggggcctgctgtccagtctgcttacagaagagggcggaggaaaagccctaggctcctgggaggctcctcagagtttgtctgctgtgccatcgtgagatcgggtggccgatggcagggagctgcggactgcagaccaggaaacacccagaactcgtgacatttcatgacaacgtccagctggtgctgttacagaaggcagtgcaggaggcttccaaccagagcatctgcggagaaggaggcacagcaggtgcctgaagggaagcaggcaggagtcctagcttcacgttagacttctcaggtttttatttaattcttttaaaatgaaaaattggtgctactattaaattgcacagttgaatcatttaggcgcctaaattgattttgcctcccaacaccatttctttttaaataaagcaggatacctctatatgtcagccttgccttgttcagatgccaggagccggcagacctgtcacccgcaggtggggtgagtcttggagctgccagaggggctcaccgaaatcggggttccatcacaagctatgtttaaaaagaaaattggtgtttggcaaacggaacagaacctttgatgagagcgttcacagggacactgtctgggggtgcagtgcaagcccccggcctcttccctgggaacctctgaactcctccttcctctgggctctctgtaacatttcaccacacgtcagcatctaatcccaagacaaacattcccgctgctcgaagcagctgtatagcctgtgactctccgtgtgtcagctccttccacacctgattagaacattcataagccacatttagaaacaggtttgctttcagctgtcacttgcacacatactgcctagttgtgaaccaaatgtgaaaaaacctccttcatcccattgtgtatctgatacctgccgagggccaagggtgtgtgttgacaacgccgctcccagccggccctggttgcgtccacgtcctgaacaagagccgcttccggatggctcttcccaagggaggaggagctcaagtgtcgggaactgtctaacttcaggttgtgtgagtgcgttaaaaaaaaaaaaaaaaaagaatccctatacctcatttgtatttttaaaatgcgtgatgttttatgaaattgtgtccattttttaggtattagatatggcagaaaaaccatttccactatgcaaagttcttttagacgtcagtgaaaatcaactctcatacctcatggtctctctttaattgaccaaaaccttccatttttctctaaatacaaagcgatctgtgttctgagcaacctttccccgaacacacagcttcagtgcagcacgctgacctgagtatccaccatgtgccaggcacagtgctgggcacacgaggcaccaaggtccgggccacctgcccgcagcaaggcccagctgaggtggtggagggagcccctgaggtcaggggccgtttcggttcagggtggcaggtgtccagcactggggtatggcgtcgaggcttccatggggtgggggaggccagcttccttctgacaggatgggcgcatacagtgcctggtgtgatttgtgcacaacccgtgttccaggtgcacatcctcccaaggagacacccagacccttccagcacgggccggccaagttgctgcggcggaggcagcatttcagctgtgaggaaggtcattggattcatgtgttttatctgtaaaaatggttgtcttaacttcttaacctcatattggtaagtgattgataaaaattggttggtgtttcatgacatgtggacttcttttgaaatagcaagtcaaatgtagtgaccaaattgtggaagagatttctgtcaaataggaaatgtgtaagttcgtctaaaagctgatggttatgtaagttgctcaggcactcagatgacagcagattctgggttctgggagtgttctgtgcctcttacatgccctggaggcctcatggtctcagtgctgaggcggcacacctgtagcacacctgcgtaatgtgcggtctgggccagtcacaaggaattgtgttgtctaagccaaagggggaagctgactgtgatttaccaaaaaaaattctgtaattcaaaccaaaatgtctgcggaatcaccagtttgatactctctgtaatcagaacagtgggcagtgcctgggtgaacgtgtctagcagccactgtgcgggatcgctgtaacaggagtggaatgtacatatttatttacttttctaactgctccaacagccaaatgccttttttatgaccattgtattcagttcattaccaaagaaatgtttgcactttgtaatgatgcctttcagttcaaataaatgggtcacattttcaaatgga

SEQ ID NO: 17086 - DNA, 2796 bp, Homo sapiens
  source 1..2796: mol_type = unassigned DNA
ccacaatgctggacttccttccaccctcaggatgaacgggcagctccctgggtggcagcgctgggtctgagaaatgtggatgttccttgtgattttgcagctgctgacagcacagggtgtgtgccgtctgtggtcatttccctgcaccccatgtgtgcagaggtgttcgtgtatcttggtgactgcagaggcacacacaggccggcgtggtcactgcttctctctggctgtgaattaaagcaggtcagccgcagacacagaggtgacatgcaggtcacctggaacctctgcagaccgtcctggctgccacccctaagtgctctctggcccctgtgccactgttcctgaggcttcctttttttttttttttcccccatggtttcagctagaaagttctaagctttgataacttaagtgccagttgctaatgaatgaggcatgcaggaaagatggctttcatttagaagccgtatctgaggcatttcccaaagtgagtaactgtttggctagttaggtcctagatgtccagctgtcattatgaaatgcagatggtacggtgaggggacgtccacctttttcagcatgatgtgtgcataggtgagacactgctgctgcacaggttggggaccacacacttatggctgacaggagatcaaagaagatgttttaattgacatgagtaagtgggtggcttgctgaagttattcacagccatcatcagacagccttacctgtggctgagcatgctttatgaaggcttattagaagaattgggatatttatgataaataatttgtgttcatttcagacatcacagacagtttaggttcaaatgcaagggacggaaaactccaaatccaggatggttttaatgaggtgcgagtttacttttccctcagtcgtggagattgctggaccctccgcagtgcagggtccctgctgcagcttggtgctgtactgtgggtggcctcttcccaaggtcacctcatggcccaggcatttccggccactgtcaccctgtctgccccccggccctgcaagatgcaagagagggtttgaggaaggagacccttccaggaggcttctgctacccctgtgcatggcacagcggttggaaaggtcaccttgttatggggccccgtgcttccagagaaaagccagtggtgttgttactcggaaaataaggcagacttgactctggggattctgagtgatcatcgttcgttctggtggaagtgtaggtgcaggacgttctcgtcatctggttgaatcttgctcccacagtcctctgagaacgtcgcctttgtgactacggtttttatttgacagcacggtggtgggaatgtcttccattggggcgtgtggtcagctgccgccagtctaataaggacattggagattctgtaaaagttcttcagaaatattcccctcaaatgttgtttattttaaggcattattttcagtgaaataacatcttttaatacaagagccaagctgttactctgaagtgcccaatgaatgaatgttctttgcattgctgcagataaagaaacttgaatcacggctcagtaccacagagtgcgtggatgccgggggcgaatctcacgccaacaacaccaagtggaaaaaagatgcatgcaccatttgtgaatgcaaagacgggcaggtcacctgcttcgtggaagcttgcccccctgccacctgtgctgtccccgtgaacatcccaggggcctgctgtccagtctgcttacagaagagggcggaggaaaagccctaggctcctgggaggctcctcagagtttgtctgctgtgccatcgtgagatcgggtggccgatggcagggagctgcggactgcagaccaggaaacacccagaactcgtgacatttcatgacaacgtccagctggtgctgttacagaaggcagtgcaggaggcttccaaccagagcatctgcggagaaggaggcacagcaggtgcctgaagggaagcaggcaggagtcctagcttcacgttagacttctcaggtttttatttaattcttttaaaatgaaaaattggtgctactattaaattgcacagttgaatcatttaggcgcctaaattgattttgcctcccaacaccatttctttttaaataaagcaggatacctctatatgtcagccttgccttgttcagatgccaggagccggcagacctgtcacccgcaggtggggtgagtcttggagctgccagaggggctcaccgaaatcggggttccatcacaagctatgtttaaaaagaaaattggtgtttggcaaacggaacagaacctttgatgagagcgttcacagggacactgtctgggggtgcagtgcaagcccccggcctcttccctgggaacctctgaactcctccttcctctgggctctctgtaacatttcaccacacgtcagcatctaatcccaagacaaacattcccgctgctcgaagcagctgtatagcctgtgactctccgtgtgtcagctccttccacacctgattagaacattcataagccacatttagaaacaggtttgctttcagctgtcacttgcacacatactgcctagttgtgaaccaaatgtgaaaaaacctccttcatcccattgtgtatctgatacctgccgagggccaagggtgtgtgttgacaacgccgctcccagccggccctggttgcgtccacgtcctgaacaagagccgcttccggatggctcttcccaagggaggaggagctcaagtgtcgggaactgtctaacttcaggttgtgtgagtgcgtt

SEQ ID NO: 17087 - DNA, 3840 bp, Homo sapiens
  source 1..3840: mol_type = unassigned DNA
gctgggacggcgtcctcaggagcctggagcgccatgcagctgctgacacagtaatgagctgagcatgaagacagattcccgcctaaacttgctggacgatgggaccctgatgatccagaacacacaggagacagaccagggtatctaccagtgcatggcaaagaacgtggccggagaggtgaagacgcaagaggtgaccctcaggtacttcgggtctccaggaacagcagccctatttagtatactagtctgagcatgtgggtgtagctccctcagatacacatgaagagtctcccgccatccggtgcacagggagtcactgcagcatgggggaaccagccctgagaagcccagaagcctaggctgacacactgcagcctgcagtccacacctgcctactgcctgtttttcctaagctcgacccacttttgtaatccagccacagaatacagaggtgctggttggggagagcgtcacgctggagtgcagcgccacaggccaccccccgccgcggatctcctggacgagaggtgaccgcacacccttgccagttgacccgcgggtgaacatcacgccttctggcgggctttacatacagaacgtcgtacagggggacagcggagagtatgcgtgctctgcgaccaacaacattgacagcgtccatgccaccgctttcatcatcgtccaggctcttcctcagttcactgtgacgcctcaggacagagtcgttattgagggccagaccgtggatttccagtgtgaagccaagggcaacccgccgcccgtcatcgcctggaccaagggaggtaagacccaggccggccctttgcctgctccctccgcggccacagacgcaggaagcacacatttccactgtgcccaggcaaccccagcgtgttctggacagggctgagctgggactggattccacaggaccaaggcactgggaagcgcagaggtgtctgcacatcccccgcggcttcctgtccatgcatggccgtccctcatggacatcatggcaggaaactctgagaagctctgtcattgcggaagagacttggggttcctgcctttgactccctcacacctgccttgtttcagatagtctctaggatgtgcttttaagtagcctcttgaaggaatctatttgcatggaggatagaattttctggaaacagtcgaggaatatattgaaacagacgaatagcttttgctctgactttgcttcccagagccctcactgtcacctccccattcggcatcatgacctttcatcacattctttgcctacagtcctagccctctttcttcaatgggaaagtcgctgggcatgttactgcataaaggcacagcctggatgggggttggggtgagggcaggagctgaaactgctggagaaggagctacgcagacctcctggttcctgtcctgggatgcaagcagtgaccctgagacatcctggccactccagcttgcaccaaatggccagcccatcccttcagccctctgaggggccccacccagggctcctgaaagtctttggggaggaggcttgtgcctgcatcacacgccctggatttcccttttctcaggcagttatgggcaagaacaggagaggtttatcccggaaaggaacttgctggggcctcgcttggctcttcgtcatctccagcactcaatcctctccctggttctcccagctggccatccaccccgctctgactccccgagtccccatgtcctcctggccccctgtgtagtgcttttccctctgttctctgccactgtcaacccctctgtctgagttacgggtgcagggacgttcaggtgtcaccatggtgtctgctggggaggcaaagatttgcttatgcagggccaggccaaattatccggcgccccgacccaggtggagacaagcttctgtggtcatgctgtcagtctgagagcaggagttctccatgcgtccgagtgtccagtgtaacgggcccatgcccttgcagggagccagctctccgtggaccggcggcacctggtcctgtcatcgggaacacttagaatctctggtgttgccctccacgaccagggccagtacgaatgccaggctgtcaacatcatcggctcccagaaggtcgtggcccacctgactgtgcagcccagagtcaccccagtgtttgccagcattcccagcgacacaacagtggaggtgggcgccaatgtgcagctcccgtgcagctcccagggcgagcccgagccagccatcacctggaacaaggatggggttcaggtgacagaaagtggaaaatttcacatcagccctgaaggattcttgaccatcaatgacgttggccctgcagacgcaggtcgctatgagtgtgtggcccggaacaccattgggtcggcctcggtgagcatggtgctcagtgtgaatgttcctgacgtcagtcgaaatggagatccgtttgtagctacctccatcgtggaagcgattgcgactgttgacagagctataaactcaacccgaacacatttgtttgacagccgtcctcgttctccaaatgatttgctggccttgttccggtatccgagggatccttacacagttgaacaggcacgggcgggagaaatctttgaacggacattgcagctcattcaggagcatgtacagcatggcttgatggtcgacctcaacggaacaagttgtatggctcgacactcaacatcgacctgtttccggcgctcgtggtggaggacctggtgcctggcagccggctgggccccaccctgatgtgtcttctcagcacacagttcaagcgcctgcgagatggggacaggttgtggtatgagaaccctggggtgttctccccggcccagctgactcagatcaagcagacgtcgctggccaggatcctatgcgacaacgcggacaacatcacccgggtgcagagcgacgtgttcagggtggcggagttccctcacggctacggcagctgtgacgagatccccagggtagacctccgggtgtggcaggactgctgtgaagactgtaggaccagggggcagttcaatgccttttcctatcatttccgaggcagacggtctcttgagttcagctaccaggaggacaagccgaccaagaaaacaagaccacggaaaatacccagtgttgggagacagggggaacatctcagcaacagcacctcagccttcagcacacgctcagatgcatctgggacaaatgacttcagagagtttgttctggaaatgcagaagaccatcacagacctcagaacacagataaagaaacttgaatcacggctcagtaccacagagtgcgtggatgccgggggcgaatctcacgccaacaacaccaagtggaaaaaagatgcatgcaccatttgtgaatgcaaagacgggcaggtcacctgcttcgtggaagcttgcccccctgccacctgtgctgtccccgtgaacatcccaggggcctgctgtccagtctgcttacagaagagggcggaggaaaagccctaggctcctgggaggctcctcagagtttgtctgctgtgccatcgtgagatcgggtggccgatggcagggagctgcggactgcagaccaggaaacacccagaactcgtgacatttcatgacaacgtccagctggtgctgttacagaaggcagtgcaggaggcttccaaccagagcatctgcggagaaggaggcacagcaggtgcctgaagggaagcaggcaggagtcctagcttcacgttagacttctcaggtttttatttaattcttttaaaatgaaaaattggtgctactattaaattgcacagttgaatcatt

SEQ ID NO: 17088 - DNA, 740 bp, Homo sapiens
  source 1..740: mol_type = unassigned DNA
ggtgcagagcgacgtgttcagggtggcggagttccctcacggctacggcagctgtgacgagatccccagggtagacctccgggtgtggcaggactgctgtgaagactgtaggaccagggggcagttcaatgccttttcctatcatttccgaggcagacggtctcttgagttcagctaccaggaggacaagccgaccaagaaaacaagaccacggaaaatacccagataaagaaacttgaatcacggctcagtaccacagagtgcgtggatgccgggggcgaatctcacgccaacaacaccaagtggaaaaaagatgcatgcaccatttgtgaatgcaaagacgggcaggtcacctgcttcgtggaagcttgcccccctgccacctgtgctgtccccgtgaacatcccaggggcctgctgtccagtctgcttacagaagagggcggaggaaaagccctaggctcctgggaggctcctcagagtttgtctgctgtgccatcgtgagatcgggtggccgatggcagggagctgcggactgcagaccaggaaacacccagaactcgtgacatttcatgacaacgtccagctggtgctgttacagaaggcagtgcaggaggcttccaaccagagcatctgcggagaaggaggcacagcaggtgcctgaagggaagcaggcaggagtcctagcttcacgttagacttctcaggtttttatttaattcttttaaaatgaaaaattgg

SEQ ID NO: 17089 - DNA, 570 bp, Homo sapiens
  source 1..570: mol_type = unassigned DNA
aaagatgcatgaccatcagagaccatggggccaggaggacttcacagggcagaggggttgccttcggcagactgtagagattgtgtagttctcatctactttgtgtttcacggccgcacggcgagtggatggcgtggcgttggcctgggctcgcctctgctgcccatccccagccgtgggacattccggaactgcgaggtctcttccctggaggaagctccttggattcaggtggaggctttagactctggttgtatggctcgacactcaacatcgacctgtttccggcgctcgtggtggaggacctggtgcctggcagccggctgggccccaccctgatgtgtcttctcagcacacagttcaagcgcctgcgagatggggacaggttgtggtatgagaaccctggggtgttctccccggcccagctgactcagatcaagcagacgtcgctggccaggatcctatgcgacaacgcggacaacatcacccgggtgcagagcgacgtgttcagggtggcggagttccctcacggctacggcagctgtgacgagatccccagggtagacctcc

SEQ ID NO: 17090 - DNA, 772 bp, Homo sapiens
  source 1..772: mol_type = unassigned DNA
tgtctgtttgttttgtttttgttttgttgcctcccacttcggatgaggaaggtatagtacattatgttgtagaaagtagccgtagaaatattaatagcaatgattatattttggggtactatgaattttatcttcagtaatttgtttcattcttcctttcttccccctaaactctggttagccgtcctcgttctccaaatgatttgctggccttgttccggtatccgagggatccttacacagttgaacaggcacgggcgggagaaatctttgaacggacattgcagctcattcaggagcatgtacagcatggcttgatggtcgacctcaacggaacaagttaccactacaacgacctggtgtctccacagtacctgaacctcatcgcaaacctgtcgggctgtaccgcccaccggcgcgtgaacaactgctcggacatgtgcttccaccagaagtaccggacgcacgacggcacctgtaacaacctgcagcaccccatgtggggcgcctcgctgaccgccttcgagcgcctgctgaaatccgtgtacgagaatggcttcaacacccctcggggcatcaacccccaccgactgtacaacgggcacgcccttcccatgccgcgcctggtgtccaccaccctgatcgggacggagaccgtcacacccgacgagcagttcacccacatgctgatgcagtggggccagttcctggaccacgacctcgactccacggtggtggccctgagccaggcacgcttctccgacggacagca

SEQ ID NO: 17091 - DNA, 534 bp, Homo sapiens
  source 1..534: mol_type = unassigned DNA
tgtcttccggtttttgtctgtttgttttgtttttgttttgttgcctcccacttcggatgaggaagccgtcctcgttctccaaatgatttgctggccttgttccggtatccgagggatccttacacagttgaacaggcacgggcgggagaaatctttgaacggacattgcagctcattcaggagcatgtacagcatggcttgatggtcgacctcaacggaacaagttaccactacaacgacctggtgtctccacagtacctgaacctcatcgcaaacctgtcgggctgtaccgcccaccggcgcgtgaacaactgctcggacatgtgcttccaccagaagtaccggacgcacgacggcacctgtaacaacctgcagcaccccatgtggggcgcctcgctgaccgccttcgagcgcctgctgaaatccgtgtacgagaatggcttcaacacccctcggggcatcaacccccaccgactgtacaacgggcacgcccttcccatgccgcgcctggtgtccaccaccctgatcgggacg

SEQ ID NO: 17092 - DNA, 2643 bp, Homo sapiens
  source 1..2643: mol_type = unassigned DNA
ccaggggccccgggcgccgctgcctgttggcgctcgtgctgttctgcgcctgggggacgctggccgtggtggcccagaagccgggcgcagggtgtccgagccgctgcctgtgcttccgcaccaccgtgcgctgcatgcatctgctgctggaggccgtgcccgccgtggcgccgcagacctccatcctagatcttcgctttaacagaatcagagagatccaacctggggcattcaggcggctgaggaacttgaacacattgcttctcaataataatcagatcaagaggatacctagtggagcatttgaagacttggaaaatttaaaatatctctatctgtacaagaatgagatccagtcaattgacaggcaagcatttaagggacttgcctctctagagcaactatacctgcactttaatcagatagaaactttggacccagattcgttccagcatctcccgaagctcgagaggctatttttgcataacaaccggattacacatttagttccagggacatttaatcacttggaatctatgaagagattgcgactggactcaaacacacttcactgcgactgtgaaatcctgtggttggcggatttgctgaaaacctacgcggagtcggggaacgcgcaggcagcggccatctgtgaatatcccagacgcatccagggacgctcagtggcaaccatcaccccggaagagctgaactgtgaaaggccccggatcacctccgagccccaggacgcagatgtgacctcggggaacaccgtgtacttcacctgcagagccgaaggcaaccccaagcctgagatcatctggctgcgaaacaataatgagctgagcatgaagacagattcccgcctaaacttgctggacgatgggaccctgatgatccagaacacacaggagacagaccagggtatctaccagtgcatggcaaagaacgtggccggagaggtgaagacgcaagaggtgaccctcaggtacttcgggtctccagctcgacccacttttgtaatccagccacagaatacagaggtgctggttggggagagcgtcacgctggagtgcagcgccacaggccaccccccgccgcggatctcctggacgagaggtgaccgcacacccttgccagttgacccgcgggtgaacatcacgccttctggcgggctttacatacagaacgtcgtacagggggacagcggagagtatgcgtgctctgcgaccaacaacattgacagcgtccatgccaccgctttcatcatcgtccaggctcttcctcagttcactgtgacgcctcaggacagagtcgttattgagggccagaccgtggatttccagtgtgaagccaagggcaacccgccgcccgtcatcgcctggaccaagggagggagccagctctccgtggaccggcggcacctggtcctgtcatcgggaacacttagaatctctggtgttgccctccacgaccagggccagtacgaatgccaggctgtcaacatcatcggctcccagaaggtcgtggcccacctgactgtgcagcccagagtcaccccagtgtttgccagcattcccagcgacacaacagtggaggtgggcgccaatgtgcagctcccgtgcagctcccagggcgagcccgagccagccatcacctggaacaaggatggggttcaggtgacagaaagtggaaaatttcacatcagccctgaaggattcttgaccatcaatgacgttggccctgcagacgcaggtcgctatgagtgtgtggcccggaacaccattgggtcggcctcggtgagcatggtgctcagtgtgaatgttcctgacgtcagtcgaaatggagatccgtttgtagctacctccatcgtggaagcgattgcgactgttgacagagctataaactcaacccgaacacatttgtttgacagccgtcctcgttctccaaatgatttgctggccttgttccggtatccgagggatccttacacagttgaacaggcacgggcgggagaaatctttgaacggacattgcagctcattcaggagcatgtacagcatggcttgatggtcgacctcaacggaacaagtcagtgccaaagccttttcttcctcctccatggcctgagtaacggggttgaacacgcctcagttaagtcacattcctagggaagagttccagcattttctttcccactgtgcttatgaactgtgaaattatttccttaaactgtgattcctcttgagccctacagccctgtcgctctcactttggtttaataggaatctctgggggacgtgaagtcccttggagtgctgatcaggctacagcaggtccacctgccctgagtgggttatgccatcctggccagggtgggttatgcaagcccagtccctctgcaacaaatgagccataagggaggacttggcagcgtgcttgctccctgagtgacgttgtgtcctgggaatgcggtgccacgcgtattaggagggttgttttggaagagtcccgggtctgtgaaaccagctgatgagatcacctcgggctggtgtggagatgctgttgggggaggtatgtcccccactcactctgctctggcactttgccgttgcccagtaaataacagatgcctttacatgt

SEQ ID NO: 17093 - DNA, 567 bp, Homo sapiens
  source 1..567: mol_type = unassigned DNA
gtcctcaggagcctggagcgccatgcagctgctgacacagtaatgagctgagcatgaagacagattcccgcctaaacttgctggacgatgggaccctgatgatccagaacacacaggagacagaccagggtatctaccagtgcatggcaaagaacgtggccggagaggtgaagacgcaagaggtgaccctcaggtacttcgggtctccagctcgacccacttttgtaatccagccacagaatacagaggtgctggttggggagagcgtcacgctggagtgcagcgccacaggccaccccccgccgcggatctcctggacgagaggtgaccgcacacccttgccagttgacccgcgggtgaacatcacgccttctggcgggctttacatacagaacgtcgtacagggggacagcggagagtatgcgtgctctgcgaccaacaacattgacagcgtccatgccaccgctttcatcatcgtccaggctcttcctcagttcactgtgacgcctcaggacagagtcgttattgagggccagaccgtggatttccagtgtgaagccaagggca

SEQ ID NO: 17094 - DNA, 593 bp, Homo sapiens
  source 1..593: mol_type = unassigned DNA
gacacaggttcgctcagctcccgtgtggatctaacttgtctcccaaacaaaggaagtcttctcttgtgtccacaaacatgctgtggacctgttaaggctaagacggccctggctgcggctgtcagggtgacggagggaagtcctaccgctgaccattacatgcgtcctggcagcgagccccacctgtgagccagtaatgagctgagcatgaagacagattcccgcctaaacttgctggacgatgggaccctgatgatccagaacacacaggagacagaccagggtatctaccagtgcatggcaaagaacgtggccggagaggtgaagacgcaagaggtgaccctcaggtacttcgggtctccagctcgacccacttttgtaatccagccacagaatacagaggtgctggttggggagagcgtcacgctggagtgcagcgccacaggccaccccccgccgcggatctcctggacgagaggtgaccgcacacccttgccagttgacccgcgggtgaacatcacgccttctggcgggctttacatacagaacgtcgtacagggggacagcggagagtatgcgtgctctgcgaccaa

SEQ ID NO: 17095 - DNA, 543 bp, Homo sapiens
  source 1..543: mol_type = unassigned DNA
actgttgttggcagccttgacctggggcattgtgaccaacctgagtgggtgcgggaggggccctgacctctgctgggacggcgtcctcaggagcctggagcgccatgcagctgctgacacagtaatgagctgagcatgaagacagattcccgcctaaacttgctggacgatgggaccctgatgatccagaacacacaggagacagaccagggtatctaccagtgcatggcaaagaacgtggccggagaggtgaagacgcaagaggtgaccctcaggtacttcgggtctccagacagagtctcgctgttgcccaggctggagtgcagtggtaagatctcagctcactgcaacctctgactccctggttcaagtgattctcctgcctcaacctgccgagtagctgggactacagctcgacccacttttgtaatccagccacagaatacagaggtgctggttggggagagcgtcacgctggagtgcagcgccacaggccaccccccgccgcggatctcctggacgagaggtgaccgcacacccttg

SEQ ID NO: 17096 - DNA, 588 bp, Homo sapiens
  source 1..588: mol_type = unassigned DNA
tggaagctggttcccttctgcaccaggactgagcacaacggtgcttctcaataataatcagatcaagaggatacctagtggagcatttgaagacttggaaaatttaaaatatctctatctgtacaagaatgagatccagtcaattgacaggcaagcatttaagggacttgcctctctagagcaactatacctgcactttaatcagatagaaactttggacccagattcgttccagcatctcccgaagctcgagaggctatttttgcataacaaccggattacacatttagttccagggacatttaatcacttggaatctatgaagagattgcgactggactcaaacacacttcactgcgactgtgaaatcctgtggttggcggatttgctgaaaacctacgcggagtcggggaacgcgcaggcagcggccatctgtgaatatcccagacgcatccagggacgctcagtggcaaccatcaccccggaagagctgaactgtgaaaggccccggatcacctccgagccccaggacgcagatgtgacctcggggaacaccgtgtacttcacctgcagagccgaaggcaaccc

SEQ ID NO: 17097 - DNA, 720 bp, Homo sapiens
  source 1..720: mol_type = unassigned DNA
ggccgtggtggctccgtgcgtccgagcgtccgtccgcgccgtcggccatggccaagcgctccaggggccccgggcgccgctgcctgttggcgctcgtgctgttctgcgcctgggggacgctggccgtggtggcccagaagccgggcgcagggtgtccgagccgctgcctgtgcttccgcaccaccgtgcgctgcatgcatctgctgctggaggccgtgcccgccgtggcgccgcagacctccatcctagatcttcgctttaacagaatcagagagatccaacctggggcattcaggcggctgaggaacttgaacacattgcttctcaataataatcagatcaagaggatacctagtggagcatttgaagacttggaaaatttaaaatatctatacctgcactttaatcagatagaaactttggacccagattcgttccagcatctcccgaagctcgagaggctatttttgcataacaaccggattacacatttagttccagggacatttaatcacttggaatctatgaagagattgcgactggactcaaacacacttcactgcgactgtgaaatcctgtggttggcggatttgctgaaaacctacgcggagtcggggaacgcgcaggcagcggccatctgtgaatatcccagacgcatccagggacgctcagtggcaaccatcaccccggaagagctgaactgtgaaaggccccggatca

SEQ ID NO: 17098 - DNA, 519 bp, Homo sapiens
  source 1..519: mol_type = unassigned DNA
ttaaggcgccaactaaaaaacccgtagtgagcgcaggcagaaaccacggagatcttcgctttaacagaatcagagagatccaacctggggcattcaggcggctgaggaacttgaacacattgcttctcaataataatcagatcaagaggatacctagtggagcatttgaagacttggaaaatttaaaatatctctatctgtacaagaatgagatccagtcaattgacaggcaagcatttaagggacttgcctctctagagcaactatacctgcactttaatcagatagaaactttggacccagattcgttccagcatctcccgaagctcgagaggctatttttgcataacaaccggattacacatttagttccagggacatttaatcacttggaatctatgaagagattgcgactggactcaaacacacttcactgcgactgtgaaatcctgtggttggcggatttgctgaaaacctacgcggagtcggggaacgcgcaggcagcggccatctgtgaat

SEQ ID NO: 17099 - DNA, 2258 bp, Homo sapiens
  source 1..2258: mol_type = unassigned DNA
aacaacctgcagcagcccacgtggggcgcggcgctgaccgccttcgcgcgcctgctgcagccagcctaccgggacggcatccgcgcgccccgcgggctcggccttcctgtgggctcccgccagcccctcccgccgccccggctggtcgccacagtgtgggcgcgcgcggcggccgtcacccccgaccacagctacacgcgcatgctcatgcactggggctggtttctagagcacgacttggaccacacagtgcctgcgctgagcacagcccgcttctcggatgggcggccgtgcagctccgtctgcaccaacgaccctccttgtttccccatgaacacccggcacgccgacccccggggcacccacgcgccctgcatgctcttcgcgcgctccagccccgcgtgtgccagcggccgtccctctgcgacggtggattcagtctatgcacgagagcagatcaaccagcaaacagcctacatcgatggctccaacgtttacgggagctcggagcgggaatcccaggctctcagagacccttcggtgcctcggggtctcctgaagacaggctttccttggcctccctccggaaagcccttattgcccttttctacaggcccacccaccgagtgcgcgcgacaggagcaggagagcccctgtttcctggccggggaccaccgggccaacgagcatctggctctggccgccatgcacaccctgtggttccgggaacacaacaggatggccacggagctgtccgccctgaacccccactgggagggaaacacggtttaccaggaagccaggaagatcgtgggcgcggagctgcagcacatcacctacagccactggctgcctaaggtcctgggggaccctggcactaggatgctgaggggttaccgaggctacaaccccaacgtgaatgcaggcatcattaactcttttgctactgcagcctttagatttggccacacattaatcaatcctattctttaccgactgaatgccaccttaggtgaaatttccgaaggccaccttccgttccataaagcgctcttttcaccgtccagaataatcaaggaaggtgggatagacccggttctccgggggctgtttggcgtggctgctaaatggcgggcaccctcctaccttctcagtcctgagctgacccagaggctcttctccgcggcttattctgcggccgtggattcggctgccaccatcattcaaaggggtagagaccacgggatcccaccatatgttgacttcagagttttctgtaatttgacttcagttaagaactttgaggatcttcaaaatgaaattaaagattcagagattagacaaaaactgagaaagttgtacggctctccaggtgacattgacctctggcccgcccttatggttgaagacctgattcctggtacaagagtgggaccaacacttatgtgcctgtttgttacccagtttcagcggctaagagatggagataggttctggtatgaaaaccctggagtatttaccccggcacaactcactcagctgaagcaggcgtccctgagccgggtgctttgtgacaatggtgacagcattcagcaagtgcaggctgatgtctttgtaaaggcagaatacccacaggattacctgaactgcagcgagatcccgaaggtggacctgcgagtgtggcaagactgctgtgcagataaacaagctggaggcacgcctgaggcaggcagggtgtacagatgttagaggggttccaaggaaggccgaggagcgctggatgaaagaagactgcactcactgcatttgtgagagtggccaggtcacctgtgtggtggagatttgtcccccggctccctgtcccagtcctgaattggtgaaaggaacctgctgtccagtttgcagagaccgaggaatgccaagtgattccccagagaagcgctaataaaagttttgtgctgttgagccccaaatgggaaatttctcaggaagagacatttaggacttcagaacttttaacttgtagtcacattgttgatatggaaaccactgacttaagcaacttagttcatctaatcttacatatacttacgatcttttattttttcattttctaacataccttgaaataattcaaaactaaaagcaataaagtgcatatgaagtgtttgatcataagaaatatttcttactgtaagctgtcagttttatatgccacacctggaaataaaaagaatatcatggaatatttaaaaaat

SEQ ID NO: 17100 - DNA, 1925 bp, Homo sapiens
  source 1..1925: mol_type = unassigned DNA
atgcacgagagcagatcaaccagcaaacagcctacatcgatggctccaacgtttacgggagctcggagcgggaatcccaggctctcagagacccttcggtgcctcggggtctcctgaagacaggctttccttggcctccctccggaaagcccttattgcccttttctacaggcccacccaccgagtgcgcgcgacaggagcaggagagcccctgtttcctggccggggaccaccgggccaacgagcatctggctctggccgccatgcacaccctgtggttccgggaacacaacaggatggccacggagctgtccgccctgaacccccactgggagggaaacacggtttaccaggaagccaggaagatcgtgggcgcggagctgcagcacatcacctacagccactggctgcctaaggtcctgggggaccctggcactaggatgctgaggggttaccgaggctacaaccccaacgtgaatgcaggcatcattaactcttttgctactgcagcctttagatttggccacacattaatcaatcctattctttaccgactgaatgccaccttaggtgaaatttccgaaggccaccttccgttccataaagcgctcttttcaccgtccagaataatcaaggaaggtgggatagacccggttctccgggggctgtttggcgtggctgctaaatggcgggcaccctcctaccttctcagtcctgagctgacccagaggctcttctccgcggcttattctgcggccgtggattcggctgccaccatcattcaaaggggtagagaccacgggatcccaccatatgttgacttcagagttttctgtaatttgacttcagttaagaactttgaggatcttcaaaatgaaattaaagattcagagattagacaaaaactgagaaagttctggtatgaaaaccctggagtatttaccccggcacaactcactcagctgaagcaggcgtccctgagccgggtgctttgtgacaatggtgacagcattcagcaagtgcaggctgatgtctttgtaaaggcagaatacccacaggattacctgaactgcagcgagatcccgaaggtggacctgcgagtgtggcaagactgctgtgcagactgtaggagtagaggacagttcagagcagtgacgcaagagtctcaaaagaaacgctcagctcaatacagctatcctgttgataaggatatggagttaagtcatctaagaagtaggcaacaagataaaatatatgtgggtgaagatgctagaaatgtgacagttctggcaaaaacaaagttctcccaagatttcagcacgtttgcagcggaaattcaggaaaccatcacagcactcagagagcagataaacaagctggaggcacgcctgaggcaggcagggtgtacagatgttagaggggttccaaggaaggccgaggagcgctggatgaaagaagactgcactcactgcatttgtgagagtggccaggtcacctgtgtggtggagatttgtcccccggctccctgtcccagtcctgaattggtgaaaggaacctgctgtccagtttgcagagaccgaggaatgccaagtgattccccagagaagcgctaataaaagttttgtgctgttgagccccaaatgggaaatttctcaggaagagacatttaggacttcagaacttttaacttgtagtcacattgttgatatggaaaccactgacttaagcaacttagttcatctaatcttacatatacttacgatcttttattttttcattttctaacataccttgaaataattcaaaactaaaagcaataaagtgcatatgaagtgtttgatcataagaaatatttcttactgtaagctgtcagttttatatgccacacctggaaataaaaagaatatcatggaatatttaaaaaa

SEQ ID NO: 17101 - DNA, 4805 bp, Homo sapiens
  source 1..4805: mol_type = unassigned DNA
agtccagcagccaccatcaccaccactgcggttgctgctgcagctgcagctgctgctctccctccggctgcttcttcgcgtggccagcagcgaatggagcgatggagcccagactgttctgctggaccactctctttctcctggccgggtggtgcctgccagggttgccctgccccagccggtgcctttgctttaagagcaccgtccgctgcatgcacttgatgctggaccacattcctcaggtaccacagcagaccacagttctagacttgaggtttaacagaataagagaaattccagggagcgccttcaagaaactcaagaatttgaacacacttctgctgaacaacaaccacatcagaaagatttccagaaatgcttttgaaggacttgaaaatttgctatatctgtacctgtataagaatgaaatccatgcactagataagcaaacatttaaaggactcatatctttggaacatctgtatattcatttcaaccaactagaaatgctacagccagagacctttggagaccttctgagattagagcgactatttttgcataacaacaaattatctaaaattccagctgggagcttttctaatctggattcattaaaaagattgcgtctggattccaacgccctggtttgtgactgtgatctgatgtggctgggggagcttttacaaggctttgcccaacacggccacacccaggctgcggctacctgcgaatatcccaggagactccatgggcgtgcagttgcttcagtaacagtagaggaattcaattgccagagcccccgaattacttttgagccgcaggatgtggaggtaccatcaggaaataccgtctacttcacctgccgggcggaaggaaaccccaaacctgagattatttggatacacaacaaccactcattggatttggaagatgatactcgacttaatgtgtttgatgatggcacactcatgatccgaaacaccagagagtcagaccaaggtgtctatcagtgcatggccagaaattccgctggggaagccaagacacagagtgccatgctcagatactccagtcttccagccaaaccaagctttgtaatccagcctcaggacacagaggttttaattggcaccagcacaactttggaatgtatggccacaggccacccacaccctcttatcacttggaccagggacaatggattggagctggatggatccaggcacgtggcaacgtccagtggactttacttacagaacatcacacaacgggatcatggtcgatttacctgtcatgccaacaatagccacggcactgttcaagctgcagcaaacataattgtacaagctcctccacaatttacagtaacccccaaggatcaagtggtgctggaagaacatgctgtagagtggctctgtgaagctgacggcaacccacctcctgttattgtctggacaaaaacaggagggcagctccctgtggaaggccagcatacagttctctcctctggcactttgagaattgaccgtgcagcacagcacgatcaaggccaatatgaatgtcaagcagtcagttcgttgggggtgaaaaaggtgtctgtgcagctgactgtaaaacccaaagctcttgcagtgtttactcaacttcctcaggatacaagtgtcgaggttggaaagaatataaacatttcatgtcatgctcaaggagaaccacagcccataattacttggaataaggaaggtgtgcagattactgagagtggtaaattccatgtggatgatgaaggcacgctgactatctacgacgcagggttccctgaccagggaagatatgaatgtgtggctcggaattcttttggccttgctgtgaccaacatgtttcttacagtcacggctatacagggtagacaagctggcgatgactttgttgaatcttccattcttgatgctgtacagagagttgacagtgcaattaactccacacgaagacatttgttttcacaaaaacctcacacctccagtgacctgctggctcaatttcattacccgcgtgacccactgattgtggaaatggcaagagcaggggagatttttgagcacacgctgcagctgatacgggaacgtgtgaagcaggggctcactgtggacttggaaggcaaagaattccggtacaatgacttggtgtccccgcgctccctcagcctcatcgccaatttatctggatgcacagctcgcaggcctctgccaaactgctccaaccggtgtttccatgcgaagtaccgcgcccacgacggcacgtgcaacaacctgcagcagcccacgtggggcgcggcgctgaccgccttcgcgcgcctgctgcagccagcctaccgggacggcatccgcgcgccccgcgggctcggccttcctgtgggctcccgccagcccctcccgccgccccggctggtcgccacagtgtgggcgcgcgcggcggccgtcacccccgaccacagctacacgcgcatgctcatgcactggggctggtttctagagcacgacttggaccacacagtgcctgcgctgagcacagcccgcttctcggatgggcggccgtgcagctccgtctgcaccaacgaccctccttgtttccccatgaacacccggcacgccgacccccggggcacccacgcgccctgcatgctcttcgcgcgctccagccccgcgtgtgccagcggccgtccctctgcgacggtggattcagtctatgcacgagagcagatcaaccagcaaacagcctacatcgatggctccaacgtttacgggagctcggagcgggaatcccaggctctcagagacccttcggtgcctcggggtctcctgaagacaggctttccttggcctccctccggaaagcccttattgcccttttctacaggcccacccaccgagtgcgcgcgacaggagcaggagagcccctgtttcctggccggggaccaccgggccaacgagcatctggctctggccgccatgcacaccctgtggttccgggaacacaacaggatggccacggagctgtccgccctgaacccccactgggagggaaacacggtttaccaggaagccaggaagatcgtgggcgcggagctgcagcacatcacctacagccactggctgcctaaggtcctgggggaccctggcactaggatgctgaggggttaccgaggctacaaccccaacgtgaatgcaggcatcattaactcttttgctactgcagcctttagatttggccacacattaatcaatcctattctttaccgactgaatgccaccttaggtgaaatttccgaaggccaccttccgttccataaagcgctcttttcaccgtccagaataatcaaggaaggtgggatagacccggttctccgggggctgtttggcgtggctgctaaatggcgggcaccctcctaccttctcagtcctgagctgacccagaggctcttctccgcggcttattctgcggccgtggattcggctgccaccatcattcaaaggggtagagaccacgggatcccaccatatgttgacttcagagttttctgtaatttgacttcagttaagaactttgaggatcttcaaaatgaaattaaagattcagagattagacaaaaactgagaaagttgtacggctctccaggtgacattgacctctggcccgcccttatggttgaagacctgattcctggtacaagagtgggaccaacacttatgtgcctgtttgttacccagtttcagcggctaagagatggagataggttctggtatgaaaaccctggagtatttaccccggcacaactcactcagctgaagcaggcgtccctgagccgggtgctttgtgacaatggtgacagcattcagcaagtgcaggctgatgtctttgtaaaggcagaatacccacaggattacctgaactgcagcgagatcccgaaggtggacctgcgagtgtggcaagactgctgtgcagactgtaggagtagaggacagttcagagcagtgacgcaagagtctcaaaagaaacgctcagctcaatacagctatcctgttgataaggatatggagttaagtcatctaagaagtaggcaacaagataaaatatatgtgggtgaagatgctagaaatgtgacagttctggcaaaaacaaagttctcccaagatttcagcacgtttgcagcggaaattcaggaaaccatcacagcactcagagagcagataaacaagctggaggcacgcctgaggcaggcagggtgtacagatgttagaggggttccaaggaaggccgaggagcgctggatgaaagaagactgcactcactgcatttgtgagagtggccaggtcacctgtgtggtggagatttgtcccccggctccctgtcccagtcctgaattggtgaaaggaacctgctgtccagtttgcagagaccgaggaatgccaagtgattccccagagaagcgctaataaaagttttgtgctgttgagccccaaatgggaaatttctcaggaagagacatttaggacttcagaacttttaacttgtagtcacattgttgatatggaaaccactgacttaagcaacttagttcatctaatcttacatatacttacgatcttttattttttcattttctaacataccttgaaataattcaaaactaaaagcaataaagtgcatatgaagtgtttgatcataagaaatatttcttactgtaagctgtcagttttatatgccacacctggaaataaaaagaatatcatggaatatttaaaaaa

SEQ ID NO: 17102 - DNA, 768 bp, Homo sapiens
  source 1..768: mol_type = unassigned DNA
catgaatttataatagagaaagcagcttccctacctggctactggataatatgttatattaaatttgtcactgctctttcactgtttaaagtgaaatgaagaattcgttagcaaaagaaatactttaaggtctaaataatatatcaaatatatatgtaatacaacatgaaatttcctttatgtcataagaaatactttcttattattttagataaattacatgaaccagatgtgacactctggattatcatcttatctgccatttaattttaattttgaattccactcataccattttccttttaagatcacaaagaacaccaatcacaatgccttgtacatgccaaatgaccaaagaagatttgatgatattttaaaattctcacacgacttttatttttcagcattttatttgcttcttgttataaataggcaacaagataaaatatatgtgggtgaagatgctagaaatgtgacagttctggcaaaaacaaagttctcccaagatttcagcacgtttgcagcggaaattcaggaaaccatcacagcactcagagagcagataaacaagctggaggcacgcctgaggcaggcagggtgtacagatgttagaggggttccaaggaaggccgaggagcgctggatgaaagaagactgcactcactgcatttgtgagagtggccaggtcacctgtgtggtggagatttgtcccccggctccctgtcccagtcctgaattggtgaaaggaacctgctgtccagtttgcag

SEQ ID NO: 17103 - DNA, 2037 bp, Homo sapiens
  source 1..2037: mol_type = unassigned DNA
ggggcggcgcgtgttgacagcggcggcggtggaaccgggcgggcggcgggagtcggcgcctcgggttcctacctcgcgtccctaggcggcggcggccgggcgtcccgggatggccttcatggagaagccgccagccggcaaggtgctgctggacgacacggtgccgctgacagcagccatcgaggcgagccagagcctgcagtcccacacggaatatattattcgagtgcaaagaggaatttctgtggaaaacagctggcagattgttagaagatacagtgactttgatttgcttaacaacagcttacagattgcaggcctaagtctacctcttcctcccaaaaaattgattggtaacatggatcgtgaattcatagctgaaaggcagaaaggtcttcagaactatctcaacgtgatcacaacaaatcatatcttgtctaattgtgagctggttaagaagtttttagatccaaacaactattccgcaaactatactgagattgccttgcaacaggtttccatgttcttccgatcagaaccaaagtgggaggtggtggaacctttgaaagacataggttggagaataaggaagaaatatttcttgatgaagattaaaaatcagccaaaggaacggctagtgttaagctgggctgaccttggcccagacaagtatttgtcagataaagattttcagtgtctaatcaaacttctgccttcttgtttgcacccttacatctatcgggttacctttgccacagctaatgaatcctcagcgttgctaattaggatgtttaacgaaaagggaacattgaaggatctgatctacaaggcaaaaccaaaagacccatttctaaagaagtactgcaaccctaagaagattcagggcctggaactccagcaaataaaaacatatggacggcaaatattagaggtactgaagtttcttcatgacaagggattcccttatgggcatcttcacgcctccaatgtgatgctcgatggggacacttgccggctgctggaccttgagaattccttattgggcctgccttccttctaccgatcttatttttcacaattcaggaaaatcaatacattggaaagtgtggatgtccactgctttggccacttactgtatgaaatgacttatggacgaccgccagactcggtgcctgtggactccttccctcctgccccgtccatggctgtggtggccgtgttggagtctacgctgtcttgtgaagcctgtaaaaatggcatgcctaccatctcccggctcttacagatgccattattcagcgatgttttactaaccacttctgaaaaaccacagtttaagatccctacaaagttaaaagaggcattgagaattgccaaagaatgtatagagaagagactaattgaggaacagaaacagattcaccagcatcgaagactgacaagagctcagtcccaccatggatctgaggaggaaagaaaaaaaagaaagattttagctcgaaagaagtcaaaacgatctgctcttgaaaatagtgaagagcattcagcgaagtacagcaactccaataattcagcaggatctggggccagctcacctctcacgtccccgtcatcgccaactccaccctctacatcagggatatctgcattacctccacctcctccacctccaccaccaccagcagctcccttgcctcctgcgagcaccgaggcacctgcccagctctcgtctcaggctgtgaatggcatgagccgaggggccttgctcagctccatccagaatttccaaaaaggaactttgaggaaagccaaaacctgtgatcacagtgctccgaagatcggctgaagcttcctgtttacacttggagggaaaagttcttttttattcctactcacccctaccccccaaactaccctcttcctgggaaagtaattgctgagccagtacagccacaaacagtactattttgcagatgctcatgtaagcagcttttcgagagaaataattctttaagcagaataaagttaggctggcat

SEQ ID NO: 17104 - DNA, 1653 bp, Homo sapiens
  source 1..1653: mol_type = unassigned DNA
ggcgcgtgttgacagcggcggcggtggaaccgggcgggcggcgggagtcggcgcctcgggttcctacctcgcgtccctaggcggcggcggccgggcgtcccgggatggccttcatggagaagccgccagccggcaaggtgctgctggacgacacggtgccgctgacagcagccatcgaggcgagccagagcctgcagtcccacacgagattgccttgcaacaggtttccatgttcttccgatcagaaccaaagtgggaggtggtggaacctttgaaagacataggttggagaataaggaagaaatatttcttgatgaagattaaaaatcagccaaaggaacggctagtgttaagctgggctgaccttggcccagacaagtatttgtcagataaagattttcagtgtctaatcaaacttctgccttcttgtttgcacccttacatctatcgggttacctttgccacagctaatgaatcctcagcgttgctaattaggatgtttaacgaaaagggaacattgaaggatctgatctacaaggcaaaaccaaaagacccatttctaaagaagtactgcaaccctaagaagattcagggcctggaactccagcaaataaaaacatatggacggcaaatattagaggtactgaagtttcttcatgacaagggattcccttatgggcatcttcacgcctccaatgtgatgctcgatggggacacttgccggctgctggaccttgagaattccttattgggcctgccttccttctaccgatcttatttttcacaattcaggaaaatcaatacattggaaagtgtggatgtccactgctttggccacttactgtatgaaatgacttatggacgaccgccagactcggtgcctgtggactccttccctcctgccccgtccatggctgtggtggccgtgttggagtctacgctgtcttgtgaagcctgtaaaaatggcatgcctaccatctcccggctcttacagatgccattattcagcgatgttttactaaccacttctgaaaaaccacagtttaagatccctacaaagttaaaagaggcattgagaattgccaaagaatgtatagagaagagactaattgaggaacagaaacagattcaccagcatcgaagactgacaagagctcagtcccaccatggatctgaggaggaaagaaaaaaaagaaagattttagctcgaaagaagtcaaaacgatctgctcttgaaaatagtgaagagcattcagcgaagtacagcaactccaataattcagcaggatctggggccagctcacctctcacgtccccgtcatcgccaactccaccctctacatcagggatatctgcattacctccacctcctccacctccaccaccaccagcagctcccttgcctcctgcgagcaccgaggcacctgcccagctctcgtctcaggctgtgaatggcatgagccgaggggccttgctcagctccatccagaatttccaaaaaggaactttgaggaaagccaaaacctgtgatcacagtgctccgaagatcggctgaagcttcctgtttacacttggagggaaaagttcttttttattcctactcacccctaccccccaaactaccctcttcctgggaaagtaattgctgagcca

SEQ ID NO: 17105 - DNA, 2825 bp, Homo sapiens
  source 1..2825: mol_type = unassigned DNA
agcggcggcggtggaaccgggcgggcggcgggagtcggcgcctcgggttcctacctcgcgtccctaggcggcggcggccgggcgtcccgggatggccttcatggagaagccgccagccggcaaggtgctgctggacgacacggtgccgctgacagcagccatcgaggcgagccagagcctgcagtcccacacgattgcaggcctaagtctacctcttcctcccaaaaaattgattggtaacatggatcgtgaattcatagctgaaaggcagaaaggtcttcagaactatctcaacgtgatcacaacaaatcatatcttgtctaattgtgagctggttaagaagtttttagatccaaacaactattccgcaaactatactgagattgccttgcaacaggtttccatgttcttccgatcagaaccaaagtgggaggtggtggaacctttgaaagacataggttggagaataaggaagaaatatttcttgatgaagattaaaaatcagccaaaggaacggctagtgttaagctgggctgaccttggcccagacaagtatttgtcagataaagattttcagtgtctaatcaaacttctgccttcttgtttgcacccttacatctatcgggttacctttgccacagctaatgaatcctcagcgttgctaattaggatgtttaacgaaaagggaacattgaaggatctgatctacaaggcaaaaccaaaagacccatttctaaagaagtactgcaaccctaagaagattcagggcctggaactccagcaaataaaaacatatggacggcaaatattagaggtactgaagtttcttcatgacaagggattcccttatgggcatcttcacgcctccaatgtgatgctcgatggggacacttgccggctgctggaccttgagaattccttattgggcctgccttccttctaccgatcttatttttcacaattcaggaaaatcaatacattggaaagtgtggatgtccactgctttggccacttactgtatgaaatgacttatggacgaccgccagactcggtgcctgtggactccttccctcctgccccgtccatggctgtggtggccgtgttggagtctacgctgtcttgtgaagcctgtaaaaatggcatgcctaccatctcccggctcttacagatgccattattcagcgatgttttactaaccacttctgaaaaaccacagtttaagatccctacaaagttaaaagaggcattgagaattgccaaagaatgtatagagaagagactaattgaggaacagaaacagattcaccagcatcgaagactgacaagagctcagtcccaccatggatctgaggaggaaagaaaaaaaagaaagattttagctcgaaagaagtcaaaacgatctgctcttgaaaatagtgaagagcattcagcgaagtacagcaactccaataattcagcaggatctggggccagctcacctctcacgtccccgtcatcgccaactccaccctctacatcagtagagcatgcaccattttgaacgtgaattttcgggatatctgcattacctccacctcctccacctccaccaccaccagcagctcccttgcctcctgcgagcaccgaggcacctgcccagctctcgtctcaggctgtgaatggcatgagccgaggggccttgctcagctccatccagaatttccaaaaaggaactttgaggaaagccaaaacctgtgatcacagtgctccgaagatcggctgaagcttcctgtttacacttggagggaaaagttcttttttattcctactcacccctaccccccaaactaccctcttcctgggaaagtaattgctgagccagtacagccacaaacagtactattttgcagatgctcatgtaagcagcttttcgagagaaataattctttaagcagaataaagttaggctggcattgctcccttaagatcttgctcctttattaaccctgtaaaggagtcttgtttatcctctaatggccaggcttttgggacagcagcatattgaaatattttcaccaactaaaggaaatagacagaaaaacaatgacaatattcaatcacagcagtaaatggcctttgtgttgcaatcccttctaccccatcagacagctcctagaaacattcctcttacagttcatttctctaaagcattttctgattcttagataactccaatttttgctacctttatcttagacattaacactatagcccaaagcatagttactttgctaaatcagaaagcaactgagttctttgttttctcctcaaatagaatggggaacgttcacaacattctcttaagttctaacaggaataccattgtggttatagaactcagggctgctaaagcaactactctagacccatagttctttttagttagatgtattgaaacagacaaaaatattaacatcagaaaaagctcttgccaattagaggatcttcttaatcctcagcaattaagtttggggtttgaggggggcaggtcattgttacaacagaagtaaatttggcatctatagaaatcaattatgatttttgaaagatttatctaaatatatcaatatagcatctctttaatgttagtcatttattagaaagatcctttatcctgatttgcttaaacctttcaataaattgcactttaaaggattataaataatccatttaaaaattcaagtacacacatcagtgttggttactatgcagagaatgtcattgtgtatagtttcatgtaatctgttatgtcagctgtattttttattaaaatcatgtcaagaaaa

SEQ ID NO: 17106 - DNA, 1756 bp, Homo sapiens
  source 1..1756: mol_type = unassigned DNA
cggcggtggaaccgggcgggcggcgggagtcggcgcctcgggttcctacctcgcgtccctaggcggcggcggccgggcgtcccgggatggccttcatggagaagccgccagccggcaaggtgctgctggacgacacggtgccgctgacagcagccatcgaggcgagccagagcctgcagtcccacacgattgttagaagatacagtgactttgatttgcttaacaacagcttacagattgcaggcctaagtctacctcttcctcccaaaaaattgattggtaacatggatcgtgaattcatagctgaaaggcagaaaggtcttcagaactatctcaacgtgatcacaacaaatcatatcttgtctaattgtgagctggttaagaagtttttagatccaaacaactattccgcaaactatactgagattgccttgcaacaggtttccatgttcttccgatcagaaccaaagtgggaggtggtggaacctttgaaagacataggttggagaataaggaagaaatatttcttgatgaagattaaaaatcagccaaaggaacggctagtgttaagctgggctgaccttggcccagacaagtatttgtcagataaagattttcagtgtctaatcaaacttctgccttcttgtttgcacccttacatctatcgggttacctttgccacagctaatgaatcctcagcgttgctaattaggatgtttaacgaaaagggaacattgaaggatctgatctacaaggcaaaaccaaaagacccatttctaaagaagtactgcaaccctaagaagattcagggcctggaactccagcaaataaaaacatatggacggcaaatattagaggtactgaagtttcttcatgacaagggattcccttatgggcatcttcacgcctccaatgtgatgctcgatggggacacttgccggctgctggaccttgagaattccttattgggcctgccttccttctaccgatcttatttttcacaattcaggaaaatcaatacattggaaagtgtggatgtccactgctttggccacttactgtatgaaatgacttatggacgaccgccagactcggtgcctgtggactccttccctcctgccccgtccatggctgtggtggccgtgttggagtctacgctgtcttgtgaagcctgtaaaaatggcatgcctaccatctcccggctcttacagatgccattattcagcgatgttttactaaccacttctgaaaaaccacagtttaagatccctacaaagttaaaagaggcattgagaattgccaaagaatgtatagagaagagactaattgaggaacagaaacagattcaccagcatcgaagactgacaagagctcagtcccaccatggatctgaggaggaaagaaaaaaaagaaagattttagctcgaaagaagtcaaaacgatctgctcttgaaaatagtgaagagcattcagcgaagtacagcaactccaataattcagcaggatctggggccagctcacctctcacgtccccgtcatcgccaactccaccctctacatcagtagagcatgcaccattttgaacgtgaattttcggtaaagtaaactatgctgatttctcagactttaaagatgctctgtttctgtgtgtgaaataggacccaaagtgtctcgattgctgaagtgatgaacaagtgggaaagcagatttgagactatttccttatctgaatatttaaatgaaatacagcatcttt

SEQ ID NO: 17107 - DNA, 2031 bp, Homo sapiens
  source 1..2031: mol_type = unassigned DNA
gaaccgggcgggcggcgggagtcggcgcctcgggttcctacctcgcgtccctaggcggcggcggccgggcgtcccgggatggccttcatggagaagccgccagccggcaaggtgctgctggacgacacggtgccgctgacagcagccatcgaggcgagccagagcctgcagtcccacacggaatatattattcgagtgcaaagaggaatttctgtggaaaacagctggcagattgttagaagatacagtgactttgatttgcttaacaacagcttacagattgcaggcctaagtctacctcttcctcccaaaaaattgattggtaacatggatcgtgaattcatagctgaaaggcagaaaggtcttcagaactatctcaacgtgatcacaacaaatcatatcttgtctaattgtgagctggttaagaagtttttagatccaaacaactattccgcaaactatactgagattgccttgcaacaggtttccatgttcttccgatcagaaccaaagtgggaggtggtggaacctttgaaagacataggttggagaataaggaagaaatatttcttgatgaagattaaaaatcagccaaaggaacggctagtgttaagctgggctgaccttggcccagacaagtatttgtcagataaagattttcagtgtctaatcaaacttctgccttcttgtttgcacccttacatctatcgggttacctttgccacagctaatgaatcctcagcgttgctaattaggatgtttaacgaaaagggaacattgaaggatctgatctacaaggcaaaaccaaaagacccatttctaaagaagtactgcaaccctaagaagattcagggcctggaactccagcaaataaaaacatatggacggcaaatattagaggtactgaagtttcttcatgacaagggattcccttatgggcatcttcacgcctccaatgtgatgctcgatggggacacttgccggctgctggaccttgagaattccttattgggcctgccttccttctaccgatcttatttttcacaattcaggaaaatcaatacattggaaagtgtggatgtccactgctttggccacttactgtatgaaatgacttatggacgaccgccagactcggtgcctgtggactccttccctcctgccccgtccatggctgtggtggccgtgttggagtctacgctgtcttgtgaagcctgtaaaaatggcatgcctaccatctcccggctcttacagatgccattattcagcgatgttttactaaccacttctgaaaaaccacagtttaagatccctacaaagttaaaagaggcattgagaattgccaaagaatgtatagagaagagactaattgaggaacagaaacagattcaccagcatcgaagactgacaagagctcagtcccaccatggatctgaggaggaaagaaaaaaaagaaagattttagctcgaaagaagtcaaaacgatctgctcttgaaaatagtgaagagcattcagcgaagtacagcaactccaataattcagcaggatctggggccagctcacctctcacgtccccgtcatcgccaactccaccctctacatcagtagagcatgcaccattttgaacgtgaattttcggtaaagtaaactatgctgatttctcagactttaaagatgctctgtttctgtgtgtgaaataggacccaaagtgtctcgattgctgaagtgatgaacaagtgggaaagcagatttgagactatttccttatctgaatatttaaatgaaatacagcatctttaaaaagcacccagtgacttcatctatattcatttcattttcatcatgaccttcaaaatcttcattttcactctgatttcagttttaaaatacagctctaaaacctgcaaatcaactgcatggcattttggtatattttaattttggaaaccataactctcaaagtcccgttgctgcaaaaatgttgattcctagttactctgatgaagaggaaagagtgttaggcacttgag

SEQ ID NO: 17108 - DNA, 2817 bp, Homo sapiens
  source 1..2817: mol_type = unassigned DNA
ctacctcgcgtccctaggcggcggcggccgggcgtcccgggatggccttcatggagaagccgccagccggcaaggtgctgctggacgacacggtgccgctgacagcagccatcgaggcgagccagagcctgcagtcccacacgattgttagaagatacagtgactttgatttgcttaacaacagcttacagattgcaggcctaagtctacctcttcctcccaaaaaattgattggtaacatggatcgtgaattcatagctgaaaggcagaaaggtcttcagaactatctcaacgtgatcacaacaaatcatatcttgtctaattgtgagctggttaagaagtttttagatccaaacaactattccgcaaactatactgagattgccttgcaacaggtttccatgttcttccgatcagaaccaaagtgggaggtggtggaacctttgaaagacataggttggagaataaggaagaaatatttcttgatgaagattaaaaatcagccaaaggaacggctagtgttaagctgggctgaccttggcccagacaagtatttgtcagataaagattttcagtgtctaatcaaacttctgccttcttgtttgcacccttacatctatcgggttacctttgccacagctaatgaatcctcagcgttgctaattaggatgtttaacgaaaagggaacattgaaggatctgatctacaaggcaaaaccaaaagacccatttctaaagaagtactgcaaccctaagaagattcagggcctggaactccagcaaataaaaacatatggacggcaaatattagaggtactgaagtttcttcatgacaagggattcccttatgggcatcttcacgcctccaatgtgatgctcgatggggacacttgccggctgctggaccttgagaattccttattgggcctgccttccttctaccgatcttatttttcacaattcaggaaaatcaatacattggaaagtgtggatgtccactgctttggccacttactgtatgaaatgacttatggacgaccgccagactcggtgcctgtggactccttccctcctgccccgtccatggctgtggtggccgtgttggagtctacgctgtcttgtgaagcctgtaaaaatggcatgcctaccatctcccggctcttacagatgccattattcagcgatgttttactaaccacttctgaaaaaccacagtttaagatccctacaaagttaaaagaggcattgagaattgccaaagaatgtatagagaagagactaattgaggaacagaaacagattcaccagcatcgaagactgacaagagctcagtcccaccatggatctgaggaggaaagaaaaaaaagaaagattttagctcgaaagaagtcaaaacgatctgctcttgaaaatagtgaagagcattcagcgaagtacagcaactccaataattcaggatctggggccagctcacctctcacgtccccgtcatcgccaactccaccctctacatcagctgccttaggtttgagtaaaagatgtaaagaaagggatatctgcattacctccacctcctccacctccaccaccaccagcagctcccttgcctcctgcgagcaccgaggcacctgcccagctctcgtctcaggctgtgaatggcatgagccgaggggccttgctcagctccatccagaatttccaaaaaggaactttgaggaaagccaaaacctgtgatcacagtgctccgaagatcggctgaagcttcctgtttacacttggagggaaaagttcttttttattcctactcacccctaccccccaaactaccctcttcctgggaaagtaattgctgagccagtacagccacaaacagtactattttgcagatgctcatgtaagcagcttttcgagagaaataattctttaagcagaataaagttaggctggcattgctcccttaagatcttgctcctttattaaccctgtaaaggagtcttgtttatcctctaatggccaggcttttgggacagcagcatattgaaatattttcaccaactaaaggaaatagacagaaaaacaatgacaatattcaatcacagcagtaaatggcctttgtgttgcaatcccttctaccccatcagacagctcctagaaacattcctcttacagttcatttctctaaagcattttctgattcttagataactccaatttttgctacctttatcttagacattaacactatagcccaaagcatagttactttgctaaatcagaaagcaactgagttctttgttttctcctcaaatagaatggggaacgttcacaacattctcttaagttctaacaggaataccattgtggttatagaactcagggctgctaaagcaactactctagacccatagttctttttagttagatgtattgaaacagacaaaaatattaacatcagaaaaagctcttgccaattagaggatcttcttaatcctcagcaattaagtttggggtttgaggggggcaggtcattgttacaacagaagtaaatttggcatctatagaaatcaattatgatttttgaaagatttatctaaatatatcaatatagcatctctttaatgttagtcatttattagaaagatcctttatcctgatttgcttaaacctttcaataaattgcactttaaaggattataaataatccatttaaaaattcaagtacacacatcagtgttggttactatgcagagaatgtcattgtgtatagtttcatgtaatctgttatgtcagctgtattttttattaaaatcatgtcaag

SEQ ID NO: 17109 - DNA, 1610 bp, Homo sapiens
  source 1..1610: mol_type = unassigned DNA
ggatggccttcatggagaagccgccagccggcaaggtgctgctggacgacacggtgccgctgacagcagccatcgaggcgagccagagcctgcagtcccacacggaatatattattcgagtgcaaagaggaatttctgtggaaaacagctggcagattgttagaagatacagtgactttgatttgcttaacaacagcttacagattgcaggcctaagtctacctcttcctcccaaaaaattgattggtaacatggatcgtgaattcatagctgaaaggcagaaaggtcttcagaactatctcaacgtgatcacaacaaatcatatcttgtctaattgtgagctggttaagaagtttttagatccaaacaactattccgcaaactatactgcacccttacatctatcgggttacctttgccacagctaatgaatcctcagcgttgctaattaggatgtttaacgaaaagggaacattgaaggatctgatctacaaggcaaaaccaaaagacccatttctaaagaagtactgcaaccctaagaagattcagggcctggaactccagcaaataaaaacatatggacggcaaatattagaggtactgaagtttcttcatgacaagggattcccttatgggcatcttcacgcctccaatgtgatgctcgatggggacacttgccggctgctggaccttgagaattccttattgggcctgccttccttctaccgatcttatttttcacaattcaggaaaatcaatacattggaaagtgtggatgtccactgctttggccacttactgtatgaaatgacttatggacgaccgccagactcggtgcctgtggactccttccctcctgccccgtccatggctgtggtggccgtgttggagtctacgctgtcttgtgaagcctgtaaaaatggcatgcctaccatctcccggctcttacagatgccattattcagcgatgttttactaaccacttctgaaaaaccacagtttaagatccctacaaagttaaaagaggcattgagaattgccaaagaatgtatagagaagagactaattgaggaacagaaacagattcaccagcatcgaagactgacaagagctcagtcccaccatggatctgaggaggaaagaaaaaaaagaaagattttagctcgaaagaagtcaaaacgatctgctcttgaaaatagtgaagagcattcagcgaagtacagcaactccaataattcagcaggatctggggccagctcacctctcacgtccccgtcatcgccaactccaccctctacatcagggatatctgcattacctccacctcctccacctccaccaccaccagcagctcccttgcctcctgcgagcaccgaggcacctgcccagctctcgtctcaggctgtgaatggcatgagccgaggggccttgctcagctccatccagaatttccaaaaaggaactttgaggaaagccaaaacctgtgatcacagtgctccgaagatcggctgaagcttcctgtttacacttggagggaaaagttcttttttattcctactcacccctaccccccaaactaccctcttcctgggaaagtaattgctgagcca

SEQ ID NO: 17110 - DNA, 583 bp, Homo sapiens
  source 1..583: mol_type = unassigned DNA
accgcagctcccggcgccgcggggtggaaggagctcggcggcgaccaggaaagcgactccgagttggggggcgggggcgggggctgcgggattcccgggctcaccttggactaggggagcaggaacgagaccgctcaggaccatccacttctgcccgccgccagccttttcctttttgaggccgtgtaatttcctccttgcagctgagggtctgggtgatggggatgagggtgtgccgggccaaatgaagtgtgactccagagcctacttgttgggacagcagagtgtaagtggctggggtctgcagccccgtttccaggaatatattattcgagtgcaaagaggaatttctgtggaaaacagctggcagattgttagaagatacagtgactttgatttgcttaacaacagcttacagattgcaggcctaagtctacctcttcctcccaaaaaattgattggtaacatggatcgtgaattcatagctgaaaggcagaaaggtcttcagaactatctcaacgtgatcacaacaaatcatatcttgtctaattgtgagctggttaagaagtttttagatccaaac

SEQ ID NO: 17111 - DNA, 1852 bp, Homo sapiens
  source 1..1852: mol_type = unassigned DNA
catttctaaagaagtactgcaaccctaagaagattcagggcctggaactccagcaaataaaaacatatggacggcaaatattagaggtactgaagtttcttcatgacaagggattcccttatgggcatcttcacgcctccaatgtgatgctcgatggggacacttgccggctgctggaccttgagaattccttattgggcctgccttccttctaccgatcttatttttcacaattcaggaaaatcaatacattggaaagtgtggatgtccactgctttggccacttactgtatgaaatgacttatggacgaccgccagactcggtgcctgtggactccttccctcctgccccgtccatggctgtggtggccgtgttggagtctacgctgtcttgtgaagcctgtaaaaatggcatgcctaccatctcccggctcttacagatgccattattcagcgatgttttactaaccacttctgaaaaaccacagtttaagatccctacaaagttaaaagaggcattgagaattgccaaagaatgtatagagaagagactaattgaggaacagaaacagattcaccagcatcgaagactgacaagagctcagtcccaccatggatctgaggaggaaagaaaaaaaagaaagattttagctcgaaagaagtcaaaacgatctgctcttgaaaatagtgaagagcattcagcgaagtacagcaactccaataattcagggatatctgcattacctccacctcctccacctccaccaccaccagcagctcccttgcctcctgcgagcaccgaggcacctgcccagctctcgtctcaggctgtgaatggcatgagccgaggggccttgctcagctccatccagaatttccaaaaaggaactttgaggaaagccaaaacctgtgatcacagtgctccgaagatcggctgaagcttcctgtttacacttggagggaaaagttcttttttattcctactcacccctaccccccaaactaccctcttcctgggaaagtaattgctgagccagtacagccacaaacagtactattttgcagatgctcatgtaagcagcttttcgagagaaataattctttaagcagaataaagttaggctggcattgctcccttaagatcttgctcctttattaaccctgtaaaggagtcttgtttatcctctaatggccaggcttttgggacagcagcatattgaaatattttcaccaactaaaggaaatagacagaaaaacaatgacaatattcaatcacagcagtaaatggcctttgtgttgcaatcccttctaccccatcagacagctcctagaaacattcctcttacagttcatttctctaaagcattttctgattcttagataactccaatttttgctacctttatcttagacattaacactatagcccaaagcatagttactttgctaaatcagaaagcaactgagttctttgttttctcctcaaatagaatggggaacgttcacaacattctcttaagttctaacaggaataccattgtggttatagaactcagggctgctaaagcaactactctagacccatagttctttttagttagatgtattgaaacagacaaaaatattaacatcagaaaaagctcttgccaattagaggatcttcttaatcctcagcaattaagtttggggtttgaggggggcaggtcattgttacaacagaagtaaatttggcatctatagaaatcaattatgatttttgaaagatttatctaaatatatcaatatagcatctctttaatgttagtcatttattagaaagatcctttatcctgatttgcttaaacctttcaat

SEQ ID NO: 17112 - DNA, 2171 bp, Homo sapiens
  source 1..2171: mol_type = unassigned DNA
aattccttattgggcctgccttccttctaccgatcttatttttcacaattcaggaaaatcaatacattggaaagtgtggatgtccactgctttggccacttactgtatgaaatgacttatggacgaccgccagactcggtgcctgtggactccttccctcctgccccgtccatggctgtggtggccgtgttggagtctacgctgtcttgtgaagcctgtaaaaatggcatgcctaccatctcccggctcttacagatgccattattcagcgatgttttactaaccacttctgaaaaaccacagtttaagatccctacaaagttaaaagaggcattgagaattgccaaagaatgtatagagaagagactaattgaggaacagaaacagattcaccagcatcgaagactgacaagagctcagtcccaccatggatctgaggaggaaagaaaaaaaagaaagattttagctcgaaagaagtcaaaacgatctgctcttgaaaatagtgaagagcattcagcgaagtacagcaactccaataattcagcaggatctggggccagctcacctctcacgtccccgtcatcgccaactccaccctctacatcaggttagtgatggagtaaagtgacatgccaccttcctgtccgccaacaggaggagcgggctgtgcctcttcctgccttggcccaacaatttcaggggttagatagcagcagctttctcaagagaaatcagtgggagtgcaaattagcagtgtcatttgggagagctgaggggctagatttccaagctcggctttcacagggaatggaccggtttcagggccactagccacccccgggctccagcttgctgtctttgctgaaaagcttcatgcagagcttctcagattggagcctgtcttggtacatgcttagctgaacaacacaaatgcgccgtggcccaggggtcccgtcctgccaggcctctctcctcagggagcccgtccatagggtcagttttgtcacagagcacaactggtaagatgcctaggtggaggagtgaaagagtcactgcgtttctgattttctggcaacgatttgactctgttttgctctgtaatgtatttaattatctgaatatttttctgttattagcctttgcttcacttttgtaaattagatactagttttgattgaaaaatgtaaaaagaatttatcttggagactgcttataaaaataatccccaattttgttgagtagccccataatactatcttttatttttgaaccaagatgtctctcctaaagtcttttgcaagcccaataaaaacaattgggacaccagtatctccttttgcttcttaaatgaaccagttgttccagatgtgcgaggagctgcttctgccactcagagcttgctggctgtgcctggaagggttcctacaagctgtgtgaagggagaatcattggcagggagttggtatatgagttgatcccatattcattattaataactaacacagcacccaggagctgccaagagcattcttcagctccactcaaatgcttctaactgaccctcctaagaaaatgagagcaaggggactagtgtgaatgacttacttctggctgagggtggctactggtgccttactgctgaatgttctagggcctgttttgggtagcaaagtacctggtccatgggaggatattcttgtccttatctttgtcagcagatttcccaagaaagcccccaaatgttgatcaagacagaaaataggccttttttgtcttttatggagatacactgtttaggctgatcagaaatgtctggtgatctactgcccggactatattaagccattttctagaagataggatattaatttaacaccacttgggcatattaagaaaattggagaaaattagtagtgagaatccagaaatcctcctttaacaagcaaggcacttgaggcgtctgtttaagggttcacagcccctgtctgtgtggttagatctgcccctgctcacttgactgccggttcttatctctaaatgcctttgggaatttacaatttatttggacttttggggggaattctctaatttatctgtgtttaaatgggtgctgtctcatacagtagtaagtttgcgtgagataaggtaacttttagaatgagagaaaaaaa

SEQ ID NO: 17113 - DNA, 437 bp, Homo sapiens
  source 1..437: mol_type = unassigned DNA
gactaattgaggaacagaaacagattcaccagcatcgaagactgacaagagctcagtcccaccatggatctgaggaggaaagaaaaaaaagaaagattttagctcgaaagaagtcaaaacgatctgctcttgaaaatagtgaagagcattcagcgaagtacagcaactccaataattcaggatctggggccagctcacctctcacgtccccgtcatcgccaactccaccctctacatcagagcatgcaccattttgaacgtgaattttcggtaaagtaaactatgctgatttctcagactttaaagatgctctgtttctgtgtgtgaaataggacccaaagtgtctcgattgctgaagtgatgaacaagtgggaaagcagatttgagactatttccttatctgaatatttaaatgaaatacagcatctttaaaaagc

SEQ ID NO: 17114 - DNA, 590 bp, Homo sapiens
  source 1..590: mol_type = unassigned DNA
aagaagtcaaaacgatctgctcttgaaaatagtgaagagcattcagcgaagtacagcaactccaataattcaggatctggggccagctcacctctcacgtccccgtcatcgccaactccaccctctacatcagtagagcatgcaccattttgaacgtgaattttcgggatatctgcattacctccacctcctccacctccaccaccaccagcagctcccttgcctcctgcgagcaccgaggcacctgcccagctctcgtctcaggctgtgaatggcatgagccgaggggccttgctcagctccatccagaatttccaaaaaggaactttgaggaaagccaaaacctgtgatcacagtgctccgaagatcggctgaagcttcctgtttacacttggagggaaaagttcttttttattcctactcacccctaccccccaaactaccctcttcctgggaaagtaattgctgagccagtacagccacaaacagtactattttgcagatgctcatgtaagcagcttttcgagagaaataattctttaagcagaataaagttaggctggcattgctcccttaagatcttgctcctt

SEQ ID NO: 17115 - DNA, 3035 bp, Homo sapiens
  source 1..3035: mol_type = unassigned DNA
gtgttgacagcggcggcggtggaaccgggcgggcggcgggagtcggcgcctcgggttcctacctcgcgtccctaggcggcggcggccgggcgtcccgggatggccttcatggagaagccgccagccggcaaggtgctgctggacgacacggtgccgctgacagcagccatcgaggcgagccagagcctgcagtcccacacggaatatattattcgagtgcaaagaggaatttctgtggaaaacagctggcagattgttagaagatacagtgactttgatttgcttaacaacagcttacagattgcaggcctaagtctacctcttcctcccaaaaaattgattggtaacatggatcgtgaattcatagctgaaaggcagaaaggtcttcagaactatctcaacgtgatcacaacaaatcatatcttgtctaattgtgagctggttaagaagtttttagatccaaacaactattccgcaaactatactgagattgccttgcaacaggtttccatgttcttccgatcagaaccaaagtgggaggtggtggaacctttgaaagacataggttggagaataaggaagaaatatttcttgatgaagattaaaaatcagccaaaggaacggctagtgttaagctgggctgaccttggcccagacaagtatttgtcagataaagattttcagtgtctaatcaaacttctgccttcttgtttgcacccttacatctatcgggttacctttgccacagctaatgaatcctcagcgttgctaattaggatgtttaacgaaaagggaacattgaaggatctgatctacaaggcaaaaccaaaagacccatttctaaagaagtactgcaaccctaagaagattcagggcctggaactccagcaaataaaaacatatggacggcaaatattagaggtactgaagtttcttcatgacaagggattcccttatgggcatcttcacgcctccaatgtgatgctcgatggggacacttgccggctgctggaccttgagaattccttattgggcctgccttccttctaccgatcttatttttcacaattcaggaaaatcaatacattggaaagtgtggatgtccactgctttggccacttactgtatgaaatgacttatggacgaccgccagactcggtgcctgtggactccttccctcctgccccgtccatggctgtggtggccgtgttggagtctacgctgtcttgtgaagcctgtaaaaatggcatgcctaccatctcccggctcttacagatgccattattcagcgatgttttactaaccacttctgaaaaaccacagtttaagatccctacaaagttaaaagaggcattgagaattgccaaagaatgtatagagaagagactaattgaggaacagaaacagattcaccagcatcgaagactgacaagagctcagtcccaccatggatctgaggaggaaagaaaaaaaagaaagattttagctcgaaagaagtcaaaacgatctgctcttgaaaatagtgaagagcattcagcgaagtacagcaactccaataattcagcaggatctggggccagctcacctctcacgtccccgtcatcgccaactccaccctctacatcagtagagcatgcaccattttgaacgtgaattttcgggatatctgcattacctccacctcctccacctccaccaccaccagcagctcccttgcctcctgcgagcaccgaggcacctgcccagctctcgtctcaggctgtgaatggcatgagccgaggggccttgctcagctccatccagaatttccaaaaaggaactttgaggaaagccaaaacctgtgatcacagtgctccgaagatcggctgaagcttcctgtttacacttggagggaaaagttcttttttattcctactcacccctaccccccaaactaccctcttcctgggaaagtaattgctgagccagtacagccacaaacagtactattttgcagatgctcatgtaagcagcttttcgagagaaataattctttaagcagaataaagttaggctggcattgctcccttaagatcttgctcctttattaaccctgtaaaggagtcttgtttatcctctaatggccaggcttttgggacagcagcatattgaaatattttcaccaactaaaggaaatagacagaaaaacaatgacaatattcaatcacagcagtaaatggcctttgtgttgcaatcccttctaccccatcagacagctcctagaaacattcctcttacagttcatttctctaaagcattttctgattcttagataactccaatttttgctacctttatcttagacattaacactatagcccaaagcatagttactttgctaaatcagaaagcaactgagttctttgttttctcctcaaatagaatggggaacgttcacaacattctcttaagttctaacaggaataccattgtggttatagaactcagggctgctaaagcaactactctagacccatagttctttttagttagatgtattgaaacagacaaaaatattaacatcagaaaaagctcttgccaattagaggatcttcttaatcctcagcaattaagtttggggtttgaggggggcaggtcattgttacaacagaagtaaatttggcatctatagaaatcaattatgatttttgaaagatttatctaaatatatcaatatagcatctctttaatgttagtcatttattagaaagatcctttatcctgatttgcttaaacctttcaataaattgcactttaaaggattataaataatccatttaaaaattcaagtacacacatcagtgttggttactatgcagagaatgtcattgtgtatagtttcatgtaatctgttatgtcagctgtattttttattaaaatcatgtcaagaaaacgtgttgtctgtagcttgacaagatatttcaaatgagaactttttgtagcgtctgttgttagcaaagaatagattcacacagtctaaggtttccttcctacct

SEQ ID NO: 17116 - DNA, 1974 bp, Homo sapiens
  source 1..1974: mol_type = unassigned DNA
ggggcggcgcgtgttgacagcggcggcggtggaaccgggcgggcggcgggagtcggcgcctcgggttcctacctcgcgtccctaggcggcggcggccgggcgtcccgggatggccttcatggagaagccgccagccggcaaggtgctgctggacgacacggtgccgctgacagcagccatcgaggcgagccagagcctgcagtcccacacggaatatattattcgagtgcaaagaggaatttctgtggaaaacagctggcagattgttagaagatacagtgactttgatttgcttaacaacagcttacagattgcaggcctaagtctacctcttcctcccaaaaaattgattggtaacatggatcgtgaattcatagctgaaaggcagaaaggtcttcagaactatctcaacgtgatcacaacaaatcatatcttgtctaattgtgagctggttaagaagtttttagatccaaacaactattccgcaaactatactgagattgccttgcaacaggtttccatgttcttccgatcagaaccaaagtgggaggtggtggaacctttgaaagacataggttggagaataaggaagaaatatttcttgatgaagattaaaaatcagccaaaggaacggctagtgttaagctgggctgaccttggcccagacaagtatttgtcagataaagattttcagtgtctaatcaaacttctgccttcttgtttgcacccttacatctatcgggttacctttgccacagctaatgaatcctcagcgttgctaattaggatgtttaacgaaaagggaacattgaaggatctgatctacaaggcaaaaccaaaagacccatttctaaagaagtactgcaaccctaagaagattcagggcctggaactccagcaaataaaaacatatggacggcaaatattagaggtactgaagtttcttcatgacaagggattcccttatgggcatcttcacgcctccaatgtgatgctcgatggggacacttgccggctgctggaccttgagaattccttattgggcctgccttccttctaccgatcttatttttcacaattcaggaaaatcaatacattggaaagtgtggatgtccactgctttggccacttactgtatgaaatgacttatggacgaccgccagactcggtgcctgtggactccttccctcctgccccgtccatggctgtggtggccgtgttggagtctacgctgtcttgtgaagcctgtaaaaatggcatgcctaccatctcccggctcttacagatgccattattcagcgatgttttactaaccacttctgaaaaaccacagtttaagatccctacaaagttaaaagaggcattgagaattgccaaagaatgtatagagaagagactaattgaggaacagaaacagattcaccagcatcgaagactgacaagagctcagtcccaccatggatctgaggaggaaagaaaaaaaagaaagattttagctcgaaagaagtcaaaacgatctgctcttgaaaatagtgaagagcattcagcgaagtacagcaactccaataattcagggatatctgcattacctccacctcctccacctccaccaccaccagcagctcccttgcctcctgcgagcaccgaggcacctgcccagctctcgtctcaggctgtgaatggcatgagccgaggggccttgctcagctccatccagaatttccaaaaaggaactttgaggaaagccaaaacctgtgatcacagtgctccgaagatcggctgaagcttcctgtttacacttggagggaaaagttcttttttattcctactcacccctaccccccaaactaccctcttcctgggaaagtaattgctgagccagtacagccacaaacagtactattttgcagatgctcatgtaagcagcttttcgagagaaataattctttaagcagaataaagttaggctggcat

SEQ ID NO: 17117 - DNA, 3807 bp, Homo sapiens
  source 1..3807: mol_type = unassigned DNA
ttcccctgtgtactcctggctcggctggccggctaaggcagtttctcatcactgatgtgctctgggacagctgagtgggatgggctcctctggggtgggtgtggaggagtggtcgtgatgcctggaacactgcagtcactcctcagagacacgacttggcagccctcctgagcctgcctggtcacatgctgcctgtcttggaaggtcctctgtcccaagcagtggatgtgcagtttcttcacccctgcttagcttcatcaggcacaatgcgtctttgagacgccctgctggcggacttggagtctaccacctcccacatctccaaacggcctgtgttcttgtcggaggagaccccctactcatacccaactggaaaccacacataccaggagattgccgtgccaccccccgtccccccacccccgtccagcgaggccctcaatggcacaatccttgaccccttagaccagtggcagcccagcagctcccgattcatccaccagcagcctcagtcctcatcacctgtgtacggctccagtgccaaaacttccagtgtctccaaccctcaggacagtgttggctctccgtgctcccgagtgggtgaggaggagcacgtctacagcttccccaacaagcagaaatcagctgagccttcacccaccgtaatgagcacgtccctgggcagcaacctttctgaactcgaccgcctgctgctggaactgaacgctgtacagcataacccgccaggcttccctgcagatgaggccaactcaagccccccgcttcctggggccctgagccccctctatggtgtcccagagactaacagccccttgggaggcaaagctgggcccctgacgaaagagaagcctaagcggaatgggggccggggcctggaggacgtgcggcccagtgtggagagtctcttggatgaactggagagctccgtgcccagccccgtccctgccatcactgtgaaccagggcgagatgagcagcccgcagcgcgtcacctccacccaacagcagacacgcatctcggcctcctctgccaccagggagctggacgagctgatggcttcgctgtcggatttcaagttcatggcccaggggaagacagggagcagctcaccccctggggggcccccgaagcccgggagccagctggacagcatgctggggagcctgcagtctgacctgaacaagctgggggtcgccacagtcgccaaaggagtctgcggggcctgcaagaagcccatcgccgggcaggttgtgaccgccatggggaagacgtggcaccccgagcacttcgtctgcacccactgccaggaggagatcggatcccggaacttcttcgagcgggatggacagccctactgtgaaaaggactaccacaacctcttctccccgcgctgctactactgcaacggccccatcctggataaagtggtgacagcccttgaccggacgtggcaccctgaacacttcttctgtgcacagtgtggagccttctttggtcccgaagggttccacgagaaggacggcaaggcctactgtcgcaaggactacttcgacatgttcgcacccaagtgtggcggctgcgcccgggccatcctggagaactatatctcagccctcaacacgctgtggcatcctgagtgctttgtgtgccgggaatgcttcacgccattcgtgaacggcagcttcttcgagcacgacgggcagccctactgtgaggtgcactaccacgagcggcgcggctcgctgtgttctggctgccagaagcccatcaccggccgctgcatcaccgccatggccaagaagttccaccccgagcacttcgtctgtgccttctgcctcaagcagctcaacaagggcaccttcaaggagcagaacgacaagccttactgtcagaactgcttcctcaagctcttctgctaggtgccctgcccctgtctctgccccccttccccagccagcatccccaactgcgactgtgacctagagacttcacccgggggtgaaggggtaaacccgactgaaactggaacccttgtcctccgctggtgcgggatggacagagggccgtgaggggtccccctgcttgtcttcacccctgccagagcctctgggccccctcctccctcctgtagctctccctaggctgcccactctccatcctccccaggggtagaggctgggggctccaccccagcccatgtacgtccccacgaactggcctggccagcaccccacactggagccatctcttcctcatatttcagcagtgcagccggggggcagggaagggcaggcagggtctgttggggtctctttttatccttattcctcccccgacctaattgtctttgttctgtgattattgggggacacccggctccctccagacaatgccagcataaatccatccatccaaaggcagagaaccaaaggggccatggaaggttctctgtgctcctcctacccttccagtgccctaggcctggcgactgcccctgccttttagacccgccctccccttttatacctgctcttgttctactgagaaaagcctctccagcaataatgttttctagtcacttcctccgtctccgggacggcgtgcctggacactgtaccgactttgatagatttctacactgaggtttgaattcatatcgcctgagttgcttttacttctctatacaaaatgattttgaagagattttaaagacgttcccttttgtattctcttcctcatccaccgccactgggcctgtcactgatggtggctctggtgtgaagtttgctttgtactgagggttggggtggggaagcaatttgtattttattgtttcttagcacaagcaggtgaactgggagcagctctgtgactccccctctttcacttcatagctcaccaggactgttttataaactgctgtatttggaaaccccttctttacttcccaggccagcaagctcttcactgaaactggttgaagggtgttgcacccttttgggcctagaattctgaactttatctgttctgtttctgtgggaggagaaggggaagtatgttttggggggctgcttcctgtctgagtaagccctcaggagcctctgctcccctgtgaacccactgaaccttctgagcccccactgcttctatggggctctctcttctgccttctcaggaaagctggtgtctgattttggccatcaggactctgacgtctctttggtcttgttgatttcctctgggcatatcccttccccagatctgctcctcccctttcacaggtgggatcggcactcagggggtctggaaagaaggtcataagggagcatgataggatttggggcagagggacaggctcctctggggaaaccccccagagctctttaccaaggatgaaagaggagccaggccttgggctcctgatgaggagaaaggggccccaccggggtctaatggtgacagtccaaaccactccactggcctcctggcagaagccgagtgtgctggggtctccgaagagggtccctcctttttgggggaaggtcagcccagcccctccaaaggtctgatgtctccactttcacccgcaggccttaccgctctgtttatagtgacccaccctagatcttccccaagagggactggggtttctggggtccattctctgagtcagtggttatttgaaaatttgattttgattttattttttctctgtaaacttccaagctggcttttcccatttcaattcctgtgatttatgccaataaagtttgcccatgattttca

SEQ ID NO: 17118 - DNA, 3785 bp, Homo sapiens
  source 1..3785: mol_type = unassigned DNA
ggcgggcgcgggcgcgggcgcgcgcggcggcggcgcgttccgttccgggccgaggctcgcggcggaaaagttgcggggcatagacgagcggccccgggacgggcagctagcgcgaccctgagccggcgcccgtggtccggccatggacgacctcgacgccctgctggcggacttggagtctaccacctcccacatctccaaacggcctgtgttcttgtcggaggagaccccctactcatacccaactggaaaccacacataccaggagattgccgtgccaccccccgtccccccacccccgtccagcgaggccctcaatggcacaatccttgaccccttagaccagtggcagcccagcagctcccgattcatccaccagcagcctcagtcctcatcacctgtgtacggctccagtgccaaaacttccagtgtctccaaccctcaggacagtgttggctctccgtgctcccgagtgggtgaggaggagcacgtctacagcttccccaacaagcagaaatcagctgagccttcacccaccgtaatgagcacgtccctgggcagcaacctttctgaactcgaccgcctgctgctggaactgaacgctgtacagcataacccgccaggcttccctgcagatgaggccaactcaagccccccgcttcctggggccctgagccccctctatggtgtcccagagactaacagccccttgggaggcaaagctgggcccctgacgaaagagaagcctaagcggaatgggggccggggcctggaggacgtgcggcccagtgtggagagtctcttggatgaactggagagctccgtgcccagccccgtccctgccatcactgtgaaccagggcgagatgagcagcccgcagcgcgtcacctccacccaacagcagacacgcatctcggcctcctctgccaccagggagctggacgagctgatggcttcgctgtcggatttcaagatccagggcctggagcaaagagcggatggggagcggtgctgggcggccggctggcctcgggacggcgggcggagcagccccggagggcaggacgagggagggttcatggcccaggggaagacagggagcagctcaccccctggggggcccccgaagcccgggagccagctggacagcatgctggggagcctgcagtctgacctgaacaagctgggggtcgccacagtcgccaaaggagtctgcggggcctgcaagaagcccatcgccgggcaggttgtgaccgccatggggaagacgtggcaccccgagcacttcgtctgcacccactgccaggaggagatcggatcccggaacttcttcgagcgggatggacagccctactgtgaaaaggactaccacaacctcttctccccgcgctgctactactgcaacggccccatcctggataaagtggtgacagcccttgaccggacgtggcaccctgaacacttcttctgtgcacagtgtggagccttctttggtcccgaagggttccacgagaaggacggcaaggcctactgtcgcaaggactacttcgacatgttcgcacccaagtgtggcggctgcgcccgggccatcctggagaactatatctcagccctcaacacgctgtggcatcctgagtgctttgtgtgccgggaatgcttcacgccattcgtgaacggcagcttcttcgagcacgacgggcagccctactgtgaggtgcactaccacgagcggcgcggctcgctgtgttctggctgccagaagcccatcaccggccgctgcatcaccgccatggccaagaagttccaccccgagcacttcgtctgtgccttctgcctcaagcagctcaacaagggcaccttcaaggagcagaacgacaagccttactgtcagaactgcttcctcaagctcttctgctaggtgccctgcccctgtctctgccccccttccccagccagcatccccaactgcgactgtgacctagagacttcacccgggggtgaaggggtaaacccgactgaaactggaacccttgtcctccgctggtgcgggatggacagagggccgtgaggggtccccctgcttgtcttcacccctgccagagcctctgggccccctcctccctcctgtagctctccctaggctgcccactctccatcctccccaggggtagaggctgggggctccaccccagcccatgtacgtccccacgaactggcctggccagcaccccacactggagccatctcttcctcatatttcagcagtgcagccggggggcagggaagggcaggcagggtctgttggggtctctttttatccttattcctcccccgacctaattgtctttgttctgtgattattgggggacacccggctccctccagacaatgccagcataaatccatccatccaaaggcagagaaccaaaggggccatggaaggttctctgtgctcctcctacccttccagtgccctaggcctggcgactgcccctgccttttagacccgccctccccttttatacctgctcttgttctactgagaaaagcctctccagcaataatgttttctagtcacttcctccgtctccgggacggcgtgcctggacactgtaccgactttgatagatttctacactgaggtttgaattcatatcgcctgagttgcttttacttctctatacaaaatgattttgaagagattttaaagacgttcccttttgtattctcttcctcatccaccgccactgggcctgtcactgatggtggctctggtgtgaagtttgctttgtactgagggttggggtggggaagcaatttgtattttattgtttcttagcacaagcaggtgaactgggagcagctctgtgactccccctctttcacttcatagctcaccaggactgttttataaactgctgtatttggaaaccccttctttacttcccaggccagcaagctcttcactgaaactggttgaagggtgttgcacccttttgggcctagaattctgaactttatctgttctgtttctgtgggaggagaaggggaagtatgttttggggggctgcttcctgtctgagtaagccctcaggagcctctgctcccctgtgaacccactgaaccttctgagcccccactgcttctatggggctctctcttctgccttctcaggaaagctggtgtctgattttggccatcaggactctgacgtctctttggtcttgttgatttcctctgggcatatcccttccccagatctgctcctcccctttcacaggtgggatcggcactcagggggtctggaaagaaggtcataagggagcatgataggatttggggcagagggacaggctcctctggggaaaccccccagagctctttaccaaggatgaaagaggagccaggccttgggctcctgatgaggagaaaggggccccaccggggtctaatggtgacagtccaaaccactccactggcctcctggcagaagccgagtgtgctggggtctccgaagagggtccctcctttttgggggaaggtcagcccagcccctccaaaggtctgatgtctccactttcacccgcaggccttaccgctctgtttatagtgacccaccctagatcttccccaagagggactggggtttctggggtccattctctgagtcagtggttatttgaaaatttgattttgattttattttttctctgtaaacttccaagctggcttttcccatttcaattcctgtgatttatgccaataaagtttgcccatgattttca

SEQ ID NO: 17119 - DNA, 3683 bp, Homo sapiens
  source 1..3683: mol_type = unassigned DNA
ggcgggcgcgggcgcgggcgcgcgcggcggcggcgcgttccgttccgggccgaggctcgcggcggaaaagttgcggggcatagacgagcggccccgggacgggcagctagcgcgaccctgagccggcgcccgtggtccggccatggacgacctcgacgccctgctggcggacttggagtctaccacctcccacatctccaaacggcctgtgttcttgtcggaggagaccccctactcatacccaactggaaaccacacataccaggagattgccgtgccaccccccgtccccccacccccgtccagcgaggccctcaatggcacaatccttgaccccttagaccagtggcagcccagcagctcccgattcatccaccagcagcctcagtcctcatcacctgtgtacggctccagtgccaaaacttccagtgtctccaaccctcaggacagtgttggctctccgtgctcccgagtgggtgaggaggagcacgtctacagcttccccaacaagcagaaatcagctgagccttcacccaccgtaatgagcacgtccctgggcagcaacctttctgaactcgaccgcctgctgctggaactgaacgctgtacagcataacccgccaggcttccctgcagatgaggccaactcaagccccccgcttcctggggccctgagccccctctatggtgtcccagagactaacagccccttgggaggcaaagctgggcccctgacgaaagagaagcctaagcggaatgggggccggggcctggaggacgtgcggcccagtgtggagagtctcttggatgaactggagagctccgtgcccagccccgtccctgccatcactgtgaaccagggcgagatgagcagcccgcagcgcgtcacctccacccaacagcagacacgcatctcggcctcctctgccaccagggagctggacgagctgatggcttcgctgtcggatttcaagttcatggcccaggggaagacagggagcagctcaccccctggggggcccccgaagcccgggagccagctggacagcatgctggggagcctgcagtctgacctgaacaagctgggggtcgccacagtcgccaaaggagtctgcggggcctgcaagaagcccatcgccgggcaggttgtgaccgccatggggaagacgtggcaccccgagcacttcgtctgcacccactgccaggaggagatcggatcccggaacttcttcgagcgggatggacagccctactgtgaaaaggactaccacaacctcttctccccgcgctgctactactgcaacggccccatcctggataaagtggtgacagcccttgaccggacgtggcaccctgaacacttcttctgtgcacagtgtggagccttctttggtcccgaagggttccacgagaaggacggcaaggcctactgtcgcaaggactacttcgacatgttcgcacccaagtgtggcggctgcgcccgggccatcctggagaactatatctcagccctcaacacgctgtggcatcctgagtgctttgtgtgccgggaatgcttcacgccattcgtgaacggcagcttcttcgagcacgacgggcagccctactgtgaggtgcactaccacgagcggcgcggctcgctgtgttctggctgccagaagcccatcaccggccgctgcatcaccgccatggccaagaagttccaccccgagcacttcgtctgtgccttctgcctcaagcagctcaacaagggcaccttcaaggagcagaacgacaagccttactgtcagaactgcttcctcaagctcttctgctaggtgccctgcccctgtctctgccccccttccccagccagcatccccaactgcgactgtgacctagagacttcacccgggggtgaaggggtaaacccgactgaaactggaacccttgtcctccgctggtgcgggatggacagagggccgtgaggggtccccctgcttgtcttcacccctgccagagcctctgggccccctcctccctcctgtagctctccctaggctgcccactctccatcctccccaggggtagaggctgggggctccaccccagcccatgtacgtccccacgaactggcctggccagcaccccacactggagccatctcttcctcatatttcagcagtgcagccggggggcagggaagggcaggcagggtctgttggggtctctttttatccttattcctcccccgacctaattgtctttgttctgtgattattgggggacacccggctccctccagacaatgccagcataaatccatccatccaaaggcagagaaccaaaggggccatggaaggttctctgtgctcctcctacccttccagtgccctaggcctggcgactgcccctgccttttagacccgccctccccttttatacctgctcttgttctactgagaaaagcctctccagcaataatgttttctagtcacttcctccgtctccgggacggcgtgcctggacactgtaccgactttgatagatttctacactgaggtttgaattcatatcgcctgagttgcttttacttctctatacaaaatgattttgaagagattttaaagacgttcccttttgtattctcttcctcatccaccgccactgggcctgtcactgatggtggctctggtgtgaagtttgctttgtactgagggttggggtggggaagcaatttgtattttattgtttcttagcacaagcaggtgaactgggagcagctctgtgactccccctctttcacttcatagctcaccaggactgttttataaactgctgtatttggaaaccccttctttacttcccaggccagcaagctcttcactgaaactggttgaagggtgttgcacccttttgggcctagaattctgaactttatctgttctgtttctgtgggaggagaaggggaagtatgttttggggggctgcttcctgtctgagtaagccctcaggagcctctgctcccctgtgaacccactgaaccttctgagcccccactgcttctatggggctctctcttctgccttctcaggaaagctggtgtctgattttggccatcaggactctgacgtctctttggtcttgttgatttcctctgggcatatcccttccccagatctgctcctcccctttcacaggtgggatcggcactcagggggtctggaaagaaggtcataagggagcatgataggatttggggcagagggacaggctcctctggggaaaccccccagagctctttaccaaggatgaaagaggagccaggccttgggctcctgatgaggagaaaggggccccaccggggtctaatggtgacagtccaaaccactccactggcctcctggcagaagccgagtgtgctggggtctccgaagagggtccctcctttttgggggaaggtcagcccagcccctccaaaggtctgatgtctccactttcacccgcaggccttaccgctctgtttatagtgacccaccctagatcttccccaagagggactggggtttctggggtccattctctgagtcagtggttatttgaaaatttgattttgattttattttttctctgtaaacttccaagctggcttttcccatttcaattcctgtgatttatgccaataaagtttgcccatgattttca

SEQ ID NO: 17120 - DNA, 4132 bp, Homo sapiens
  source 1..4132: mol_type = unassigned DNA
gatgaccgagaggggaagtgtggccaggccaacccagggacctgaaaccccaaggagcccagagggcaccacggaagctgccacccaggacgggaaggaacagccagagcttccatgtgccatggccatgggcacacccagcaccacggagaggatttccacctctggccagatccgatctgtgatcaggaggagctgggagtctggccacgcacaccccatgtcccgggagccctcccctcgccgccggctggaccctgccaccttgagcaggaccccatcccaggaacagctcatcgcggagctgcaggggcggctgggcatccagcctgaggcagaggagccggcggaggcggcggggccctctgcccaggactggctgaccgagggcgtcatcatcactgtgcagccacgtgggaagcgggccggggggcagctcgtagagaaggtggcgaggagatgcccatggctggggctgggccagagccaagcacctggggtccgggttcttccctggccccagtgctggccggaggggagatctggggagagggtgggggtttcttgcctcctgtgactttggaagactggccccactcttggtgcagagtgggaaggcccagggggagcctggggaggtcccgccacccctgtgggctgagctggcgatttcttcctcatcgctctccctcctttcttctccccaggttgtcttccctcctggctctcccattcccctgagaagaaccatctctgtcctggcttctccttctgtccctttgctccagcatcgcacagacgccgcggccagcagctcttctcccctgcccagcctgctcgcctcctcccccctggggccctcagcttatacctgtggttcttctggggtccagagtgcaggggaagagccccatgatgagggggtgcagggccctgcccttcccattcctgcaccccacaccatgaggtccgtgggctgccagactgatgaggacccgctcttccccccgatgcagaaggtccgctgccctcttgcttttctgtgggtccacccatgtctgctccttcctcgactggtcctcagtactgccccgggctcccatcgaggaaagaagccactccagaagggagaccagaaacctgtctcctcccttccagcccccaggcccagcgcccgatccagggcctggagcaaagagcggatggggagcggtgctgggcggccggctggcctcgggacggcgggcggagcagccccggagggcaggacgagggagggggctcctggcccctggaggaggttgtacttcttgtctccatcagctcatctgtccaggagggagaaaagtacccccatccctgtgctgccagacaccgtaccccgagcctcaggagtcctgaccagccccctccgtgtccacagttcatggcccaggggaagacagggagcagctcaccccctggggggcccccgaagcccgggagccagctggacagcatgctggggagcctgcagtctgacctgaacaagctgggggtcgccacagtcgccaaaggagtctgcggggcctgcaagaagcccatcgccgggcaggttgtgaccgccatggggaagacgtggcaccccgagcacttcgtctgcacccactgccaggaggagatcggatcccggaacttcttcgagcgggatggacagccctactgtgaaaaggactaccacaacctcttctccccgcgctgctactactgcaacggccccatcctggataaagtggtgacagcccttgaccggacgtggcaccctgaacacttcttctgtgcacagtgtggagccttctttggtcccgaagggttccacgagaaggacggcaaggcctactgtcgcaaggactacttcgacatgttcgcacccaagtgtggcggctgcgcccgggccatcctggagaactatatctcagccctcaacacgctgtggcatcctgagtgctttgtgtgccgggaatgcttcacgccattcgtgaacggcagcttcttcgagcacgacgggcagccctactgtgaggtgcactaccacgagcggcgcggctcgctgtgttctggctgccagaagcccatcaccggccgctgcatcaccgccatggccaagaagttccaccccgagcacttcgtctgtgccttctgcctcaagcagctcaacaagggcaccttcaaggagcagaacgacaagccttactgtcagaactgcttcctcaagctcttctgctaggtgccctgcccctgtctctgccccccttccccagccagcatccccaactgcgactgtgacctagagacttcacccgggggtgaaggggtaaacccgactgaaactggaacccttgtcctccgctggtgcgggatggacagagggccgtgaggggtccccctgcttgtcttcacccctgccagagcctctgggccccctcctccctcctgtagctctccctaggctgcccactctccatcctccccaggggtagaggctgggggctccaccccagcccatgtacgtccccacgaactggcctggccagcaccccacactggagccatctcttcctcatatttcagcagtgcagccggggggcagggaagggcaggcagggtctgttggggtctctttttatccttattcctcccccgacctaattgtctttgttctgtgattattgggggacacccggctccctccagacaatgccagcataaatccatccatccaaaggcagagaaccaaaggggccatggaaggttctctgtgctcctcctacccttccagtgccctaggcctggcgactgcccctgccttttagacccgccctccccttttatacctgctcttgttctactgagaaaagcctctccagcaataatgttttctagtcacttcctccgtctccgggacggcgtgcctggacactgtaccgactttgatagatttctacactgaggtttgaattcatatcgcctgagttgcttttacttctctatacaaaatgattttgaagagattttaaagacgttcccttttgtattctcttcctcatccaccgccactgggcctgtcactgatggtggctctggtgtgaagtttgctttgtactgagggttggggtggggaagcaatttgtattttattgtttcttagcacaagcaggtgaactgggagcagctctgtgactccccctctttcacttcatagctcaccaggactgttttataaactgctgtatttggaaaccccttctttacttcccaggccagcaagctcttcactgaaactggttgaagggtgttgcacccttttgggcctagaattctgaactttatctgttctgtttctgtgggaggagaaggggaagtatgttttggggggctgcttcctgtctgagtaagccctcaggagcctctgctcccctgtgaacccactgaaccttctgagcccccactgcttctatggggctctctcttctgccttctcaggaaagctggtgtctgattttggccatcaggactctgacgtctctttggtcttgttgatttcctctgggcatatcccttccccagatctgctcctcccctttcacaggtgggatcggcactcagggggtctggaaagaaggtcataagggagcatgataggatttggggcagagggacaggctcctctggggaaaccccccagagctctttaccaaggatgaaagaggagccaggccttgggctcctgatgaggagaaaggggccccaccggggtctaatggtgacagtccaaaccactccactggcctcctggcagaagccgagtgtgctggggtctccgaagagggtccctcctttttgggggaaggtcagcccagcccctccaaaggtctgatgtctccactttcacccgcaggccttaccgctctgtttatagtgacccaccctagatcttccccaagagggactggggtttctggggtccattctctgagtcagtggttatttgaaaatttgattttgattttattttttctctgtaaacttccaagctggcttttcccatttcaattcctgtgatttatgccaataaagtttgcccatgattttc

SEQ ID NO: 17121 - DNA, 4112 bp, Homo sapiens
  source 1..4112: mol_type = unassigned DNA
tttgaggtcagagttattcaagagcttactgagacaacaggccctgagaagctaagcgatttgccctgtggcatggatggtagagaggggagctggcacttgaactcaggtctggctcgacctcagaatgagtgatcttgtgtctctgtgccccaggactgcatcctctcaccaatacttcaccagcctagggatctgtgctcccaagagcctgttgacattgtaaacctgaatccaatccataaaccaaaagcccaggcttagaatcacattgtggtggagcgggtgtttggtggagtccctgattcaaaatgtttgacaaggaagcctgaccatttgtcttctgttgggtgtttggagtccaagagacctgagatcagagtccagcattgtcacttcatccagccttggcagtgtgggatgtgactctgcctctgaaccgcagttataccatctgtgctggtggcgttgtgaggatggcagacgccctgctggcggacttggagtctaccacctcccacatctccaaacggcctgtgttcttgtcggaggagaccccctactcatacccaactggaaaccacacataccaggagattgccgtgccaccccccgtccccccacccccgtccagcgaggccctcaatggcacaatccttgaccccttagaccagtggcagcccagcagctcccgattcatccaccagcagcctcagtcctcatcacctgtgtacggctccagtgccaaaacttccagtgtctccaaccctcaggacagtgttggctctccgtgctcccgagtgggtgaggaggagcacgtctacagcttccccaacaagcagaaatcagctgagccttcacccaccgtaatgagcacgtccctgggcagcaacctttctgaactcgaccgcctgctgctggaactgaacgctgtacagcataacccgccaggcttccctgcagatgaggccaactcaagccccccgcttcctggggccctgagccccctctatggtgtcccagagactaacagccccttgggaggcaaagctgggcccctgacgaaagagaagcctaagcggaatgggggccggggcctggaggacgtgcggcccagtgtggagagtctcttggatgaactggagagctccgtgcccagccccgtccctgccatcactgtgaaccagggcgagatgagcagcccgcagcgcgtcacctccacccaacagcagacacgcatctcggcctcctctgccaccagggagctggacgagctgatggcttcgctgtcggatttcaagatccagggcctggagcaaagagcggatggggagcggtgctgggcggccggctggcctcgggacggcgggcggagcagccccggagggcaggacgagggagggttcatggcccaggggaagacagggagcagctcaccccctggggggcccccgaagcccgggagccagctggacagcatgctggggagcctgcagtctgacctgaacaagctgggggtcgccacagtcgccaaaggagtctgcggggcctgcaagaagcccatcgccgggcaggttgtgaccgccatggggaagacgtggcaccccgagcacttcgtctgcacccactgccaggaggagatcggatcccggaacttcttcgagcgggatggacagccctactgtgaaaaggactaccacaacctcttctccccgcgctgctactactgcaacggccccatcctggataaagtggtgacagcccttgaccggacgtggcaccctgaacacttcttctgtgcacagtgtggagccttctttggtcccgaagggttccacgagaaggacggcaaggcctactgtcgcaaggactacttcgacatgttcgcacccaagtgtggcggctgcgcccgggccatcctggagaactatatctcagccctcaacacgctgtggcatcctgagtgctttgtgtgccgggaatgcttcacgccattcgtgaacggcagcttcttcgagcacgacgggcagccctactgtgaggtgcactaccacgagcggcgcggctcgctgtgttctggctgccagaagcccatcaccggccgctgcatcaccgccatggccaagaagttccaccccgagcacttcgtctgtgccttctgcctcaagcagctcaacaagggcaccttcaaggagcagaacgacaagccttactgtcagaactgcttcctcaagctcttctgctaggtgccctgcccctgtctctgccccccttccccagccagcatccccaactgcgactgtgacctagagacttcacccgggggtgaaggggtaaacccgactgaaactggaacccttgtcctccgctggtgcgggatggacagagggccgtgaggggtccccctgcttgtcttcacccctgccagagcctctgggccccctcctccctcctgtagctctccctaggctgcccactctccatcctccccaggggtagaggctgggggctccaccccagcccatgtacgtccccacgaactggcctggccagcaccccacactggagccatctcttcctcatatttcagcagtgcagccggggggcagggaagggcaggcagggtctgttggggtctctttttatccttattcctcccccgacctaattgtctttgttctgtgattattgggggacacccggctccctccagacaatgccagcataaatccatccatccaaaggcagagaaccaaaggggccatggaaggttctctgtgctcctcctacccttccagtgccctaggcctggcgactgcccctgccttttagacccgccctccccttttatacctgctcttgttctactgagaaaagcctctccagcaataatgttttctagtcacttcctccgtctccgggacggcgtgcctggacactgtaccgactttgatagatttctacactgaggtttgaattcatatcgcctgagttgcttttacttctctatacaaaatgattttgaagagattttaaagacgttcccttttgtattctcttcctcatccaccgccactgggcctgtcactgatggtggctctggtgtgaagtttgctttgtactgagggttggggtggggaagcaatttgtattttattgtttcttagcacaagcaggtgaactgggagcagctctgtgactccccctctttcacttcatagctcaccaggactgttttataaactgctgtatttggaaaccccttctttacttcccaggccagcaagctcttcactgaaactggttgaagggtgttgcacccttttgggcctagaattctgaactttatctgttctgtttctgtgggaggagaaggggaagtatgttttggggggctgcttcctgtctgagtaagccctcaggagcctctgctcccctgtgaacccactgaaccttctgagcccccactgcttctatggggctctctcttctgccttctcaggaaagctggtgtctgattttggccatcaggactctgacgtctctttggtcttgttgatttcctctgggcatatcccttccccagatctgctcctcccctttcacaggtgggatcggcactcagggggtctggaaagaaggtcataagggagcatgataggatttggggcagagggacaggctcctctggggaaaccccccagagctctttaccaaggatgaaagaggagccaggccttgggctcctgatgaggagaaaggggccccaccggggtctaatggtgacagtccaaaccactccactggcctcctggcagaagccgagtgtgctggggtctccgaagagggtccctcctttttgggggaaggtcagcccagcccctccaaaggtctgatgtctccactttcacccgcaggccttaccgctctgtttatagtgacccaccctagatcttccccaagagggactggggtttctggggtccattctctgagtcagtggttatttgaaaatttgattttgattttattttttctctgtaaacttccaagctggcttttcccatttcaattcctgtgatttatgccaataaagtttgcccatgattttc

SEQ ID NO: 17122 - DNA, 5457 bp, Homo sapiens
  source 1..5457: mol_type = unassigned DNA
ggctcgcggcggaaaagttgcggggcatagacgagcggccccgggacgggcagctagcgcgaccctgagccggcgcccgtggtccggccatggacgacctcgacgccctgctggcggacttggagtctaccacctcccacatctccaaacggcctgtgttcttgtcggaggagaccccctactcatacccaactggaaaccacacataccaggagattgccgtgccaccccccgtccccccacccccgtccagcgaggccctcaatggcacaatccttgaccccttagaccagtggcagcccagcagctcccgattcatccaccagcagcctcagtcctcatcacctgtgtacggctccagtgccaaaacttccagtgtctccaaccctcaggacagtgttggctctccgtgctcccgagtgggtgaggaggagcacgtctacagcttccccaacaagcagaaatcagctgagccttcacccaccgtaatgagcacgtccctgggcagcaacctttctgaactcgaccgcctgctgctggaactgaacgctgtacagcataacccgccaggcttccctgcagatgaggccaactcaagccccccgcttcctggggccctgagccccctctatggtgtcccagagactaacagccccttgggaggcaaagctgggcccctgacgaaagagaagcctaagcggaatgggggccggggcctggaggacgtgcggcccagtgtggagagtctcttggatgaactggagagctccgtgcccagccccgtccctgccatcactgtgaaccagggcgagatgagcagcccgcagcgcgtcacctccacccaacagcagacacgcatctcggcctcctctgccaccagggagctggacgagctgatggcttcgctgtcggatttcaagaccagctcctccactgtggctctgagtgccccggggctgtccagctctgctccgtcctcatactgctcccttcctccttctcctcctcccatgccatctgtatttctgccacccaccactataccctcccctcgaggccagggccacactccggagttcccttgtactgagcagagtggacgaggccttctacctcctgtagcccccagctggcttgatttggctggtcttggggtgatgcctgacaccttcaactcaaggtctccctctgtggagggttctctgtgggcagtgggcacagagagtcagggtcgagattggaggcacctgccgaccatcacaagtgagctctctggggctccccgctgccacactgtaccctgtgctgggagcacagctctccaagagcctggggagccccaggggccaccagccagcccttcgtgcccagaggaggccttggctgccacatgggagcagccatgggcttcggaggtattcgggcctgagagaatgcccccctctggagctgctcgaagcttccaagaagtaacagagccagctgtagtggcagtggaccggcaggccatcttcccagatacctggactctcacggaggaacatggcctacagcaggagaggccaaggccagagccagggaggctgggaagcagctcccctgcctcagttaccacggagcagctaggtgcaaagatgaccgagaggggaagtgtggccaggccaacccagggacctgaaaccccaaggagcccagagggcaccacggaagctgccacccaggacgggaaggaacagccagagcttccatgtgccatggccatgggcacacccagcaccacggagaggatttccacctctggccagatccgatctgtgatcaggaggagctgggagtctggccacgcacaccccatgtcccgggagccctcccctcgccgccggctggaccctgccaccttgagcaggaccccatcccaggaacagctcatcgcggagctgcaggggcggctgggcatccagcctgaggcagaggagccggcggaggcggcggggccctctgcccaggactggctgaccgagggcgtcatcatcactgtgcagccacgtgggaagcgggccggggggcagctcgtagagaaggtggcgaggagatgcccatggctggggctgggccagagccaagcacctggggtccgggttcttccctggccccagtgctggccggaggggagatctggggagagggtgggggtttcttgcctcctgtgactttggaagactggccccactcttggtgcagagtgggaaggcccagggggagcctggggaggtcccgccacccctgtgggctgagctggcgatttcttcctcatcgctctccctcctttcttctccccaggttgtcttccctcctggctctcccattcccctgagaagaaccatctctgtcctggcttctccttctgtccctttgctccagcatcgcacagacgccgcggccagcagctcttctcccctgcccagcctgctcgcctcctcccccctggggccctcagcttatacctgtggttcttctggggtccagagtgcaggggaagagccccatgatgagggggtgcagggccctgcccttcccattcctgcaccccacaccatgaggtccgtgggctgccagactgatgaggacccgctcttccccccgatgcagatccagggcctggagcaaagagcggatggggagcggtgctgggcggccggctggcctcgggacggcgggcggagcagccccggagggcaggacgagggagggttcatggcccaggggaagacagggagcagctcaccccctggggggcccccgaagcccgggagccagctggacagcatgctggggagcctgcagtctgacctgaacaagctgggggtcgccacagtcgccaaaggagtctgcggggcctgcaagaagcccatcgccgggcaggttgtgaccgccatggggaagacgtggcaccccgagcacttcgtctgcacccactgccaggaggagatcggatcccggaacttcttcgagcgggatggacagccctactgtgaaaaggactaccacaacctcttctccccgcgctgctactactgcaacggccccatcctggataaagtggtgacagcccttgaccggacgtggcaccctgaacacttcttctgtgcacagtgtggagccttctttggtcccgaagggttccacgagaaggacggcaaggcctactgtcgcaaggactacttcgacatgttcgcacccaagtgtggcggctgcgcccgggccatcctggagaactatatctcagccctcaacacgctgtggcatcctgagtgctttgtgtgccgggaatgcttcacgccattcgtgaacggcagcttcttcgagcacgacgggcagccctactgtgaggtgcactaccacgagcggcgcggctcgctgtgttctggctgccagaagcccatcaccggccgctgcatcaccgccatggccaagaagttccaccccgagcacttcgtctgtgccttctgcctcaagcagctcaacaagggcaccttcaaggagcagaacgacaagccttactgtcagaactgcttcctcaagctcttctgctaggtgccctgcccctgtctctgccccccttccccagccagcatccccaactgcgactgtgacctagagacttcacccgggggtgaaggggtaaacccgactgaaactggaacccttgtcctccgctggtgcgggatggacagagggccgtgaggggtccccctgcttgtcttcacccctgccagagcctctgggccccctcctccctcctgtagctctccctaggctgcccactctccatcctccccaggggtagaggctgggggctccaccccagcccatgtacgtccccacgaactggcctggccagcaccccacactggagccatctcttcctcatatttcagcagtgcagccggggggcagggaagggcaggcagggtctgttggggtctctttttatccttattcctcccccgacctaattgtctttgttctgtgattattgggggacacccggctccctccagacaatgccagcataaatccatccatccaaaggcagagaaccaaaggggccatggaaggttctctgtgctcctcctacccttccagtgccctaggcctggcgactgcccctgccttttagacccgccctccccttttatacctgctcttgttctactgagaaaagcctctccagcaataatgttttctagtcacttcctccgtctccgggacggcgtgcctggacactgtaccgactttgatagatttctacactgaggtttgaattcatatcgcctgagttgcttttacttctctatacaaaatgattttgaagagattttaaagacgttcccttttgtattctcttcctcatccaccgccactgggcctgtcactgatggtggctctggtgtgaagtttgctttgtactgagggttggggtggggaagcaatttgtattttattgtttcttagcacaagcaggtgaactgggagcagctctgtgactccccctctttcacttcatagctcaccaggactgttttataaactgctgtatttggaaaccccttctttacttcccaggccagcaagctcttcactgaaactggttgaagggtgttgcacccttttgggcctagaattctgaactttatctgttctgtttctgtgggaggagaaggggaagtatgttttggggggctgcttcctgtctgagtaagccctcaggagcctctgctcccctgtgaacccactgaaccttctgagcccccactgcttctatggggctctctcttctgccttctcaggaaagctggtgtctgattttggccatcaggactctgacgtctctttggtcttgttgatttcctctgggcatatcccttccccagatctgctcctcccctttcacaggtgggatcggcactcagggggtctggaaagaaggtcataagggagcatgataggatttggggcagagggacaggctcctctggggaaaccccccagagctctttaccaaggatgaaagaggagccaggccttgggctcctgatgaggagaaaggggccccaccggggtctaatggtgacagtccaaaccactccactggcctcctggcagaagccgagtgtgctggggtctccgaagagggtccctcctttttgggggaaggtcagcccagcccctccaaaggtctgatgtctccactttcacccgcaggccttaccgctctgtttatagtgacccaccctagatcttccccaagagggactggggtttctggggtccattctctgagtcagtggttatttgaaaatttgattttgattttattttttctctgtaaacttccaagctggcttttcccatttcaattcctgtgatttatgccaataaagtttgcccatgatt

SEQ ID NO: 17123 - DNA, 1805 bp, Homo sapiens
  source 1..1805: mol_type = unassigned DNA
acgccctgctggcggacttggagtctaccacctcccacatctccaaacggcctgtgttcttgtcggaggagaccccctactcatacccaactggaaaccacacataccaggagattgccgtgccaccccccgtccccccacccccgtccagcgaggccctcaatggcacaatccttgaccccttagaccagtggcagcccagcagctcccgattcatccaccagcagcctcagtcctcatcacctgtgtacggctccagtgccaaaacttccagtgtctccaaccctcaggacagtgttggctctccgtgctcccgagtgggtgaggaggagcacgtctacagcttccccaacaagcagaaatcagctgagccttcacccaccgtaatgagcacgtccctgggcagcaacctttctgaactcgaccgcctgctgctggaactgaacgctgtacagcataacccgccaggcttccctgcagatgaggccaactcaagccccccgcttcctggggccctgagccccctctatggtgtcccagagactaacagccccttgggaggcaaagctgggcccctgacgaaagagaagcctaagcggaatgggggccggggcctggaggacgtgcggcccagtgtggagagtctcttggatgaactggagagctccgtgcccagccccgtccctgccatcactgtgaaccagggcgagatgagcagcccgcagcgcgtcacctccacccaacagcagacacgcatctcggcctcctctgccaccagggagctggacgagctgatggcttcgctgtcggatttcaagggctcctggcccctggaggaggttgtacttcttgtctccatcagctcatctgtccaggagggagaaaagtacccccatccctgtgctgccagacaccgtaccccgagcctcaggagtcctgaccagccccctccgtgtccacagttcatggcccaggggaagacagggagcagctcaccccctggggggcccccgaagcccgggagccagctggacagcatgctggggagcctgcagtctgacctgaacaagctgggggtcgccacagtcgccaaaggagtctgcggggcctgcaagaagcccatcgccgggcaggttgtgaccgccatggggaagacgtggcaccccgagcacttcgtctgcacccactgccaggaggagatcggatcccggaacttcttcgagcgggatggacagccctactgtgaaaaggactaccacaacctcttctccccgcgctgctactactgcaacggccccatcctggataaagtggtgacagcccttgaccggacgtggcaccctgaacacttcttctgtgcacagtgtggagccttctttggtcccgaagggttccacgagaaggacggcaaggcctactgtcgcaaggactacttcgacatgttcgcacccaagtgtggcggctgcgcccgggccatcctggagaactatatctcagccctcaacacgctgtggcatcctgagtgctttgtgtgccgggaatgcttcacgccattcgtgaacggcagcttcttcgagcacgacgggcagccctactgtgaggtgcactaccacgagcggcgcggctcgctgtgttctggctgccagaagcccatcaccggccgctgcatcaccgccatggccaagaagttccaccccgagcacttcgtctgtgccttctgcctcaagcagctcaacaagggcaccttcaaggagcagaacgacaagccttactgtcagaactgcttcctcaagctcttctgctag

SEQ ID NO: 17124 - DNA, 3246 bp, Homo sapiens
  source 1..3246: mol_type = unassigned DNA
atggacgacctcgacgccctgctggcggacttggagtctaccacctcccacatctccaaacggcctgtgttcttgtcggaggagaccccctactcatacccaactggaaaccacacataccaggagattgccgtgccaccccccgtccccccacccccgtccagcgaggccctcaatggcacaatccttgaccccttagaccagtggcagcccagcagctcccgattcatccaccagcagcctcagtcctcatcacctgtgtacggctccagtgccaaaacttccagtgtctccaaccctcaggacagtgttggctctccgtgctcccgagtgggtgaggaggagcacgtctacagcttccccaacaagcagaaatcagctgagccttcacccaccgtaatgagcacgtccctgggcagcaacctttctgaactcgaccgcctgctgctggaactgaacgctgtacagcataacccgccaggcttccctgcagatgaggccaactcaagccccccgcttcctggggccctgagccccctctatggtgtcccagagactaacagccccttgggaggcaaagctgggcccctgacgaaagagaagcctaagcggaatgggggccggggcctggaggacgtgcggcccagtgtggagagtctcttggatgaactggagagctccgtgcccagccccgtccctgccatcactgtgaaccagggcgagatgagcagcccgcagcgcgtcacctccacccaacagcagacacgcatctcggcctcctctgccaccagggagctggacgagctgatggcttcgctgtcggatttcaagaccagctcctccactgtggctctgagtgccccggggctgtccagctctgctccgtcctcatactgctcccttcctccttctcctcctcccatgccatctgtatttctgccacccaccactataccctcccctcgaggccagggccacactccggagttcccttgtactgagcagagtggacgaggccttctacctcctgtagcccccagctggcttgatttggctggtcttggggtgatgcctgacaccttcaactcaaggtctccctctgtggagggttctctgtgggcagtgggcacagagagtcagggtcgagattggaggcacctgccgaccatcacaagtgagctctctggggctccccgctgccacactgtaccctgtgctgggagcacagctctccaagagcctggggagccccaggggccaccagccagcccttcgtgcccagaggaggccttggctgccacatgggagcagccatgggcttcggaggtattcgggcctgagagaatgcccccctctggagctgctcgaagcttccaagaagtaacagagccagctgtagtggcagtggaccggcaggccatcttcccagatacctggactctcacggaggaacatggcctacagcaggagaggccaaggccagagccagggaggctgggaagcagctcccctgcctcagttaccacggagcagctaggtgcaaagatgaccgagaggggaagtgtggccaggccaacccagggacctgaaaccccaaggagcccagagggcaccacggaagctgccacccaggacgggaaggaacagccagagcttccatgtgccatggccatgggcacacccagcaccacggagaggatttccacctctggccagatccgatctgtgatcaggaggagctgggagtctggccacgcacaccccatgtcccgggagccctcccctcgccgccggctggaccctgccaccttgagcaggaccccatcccaggaacagctcatcgcggagctgcaggggcggctgggcatccagcctgaggcagaggagccggcggaggcggcggggccctctgcccaggactggctgaccgagggcgtcatcatcactgtgcagccacgtgggaagcgggccggggggcagctcgtagagaaggttgtcttccctcctggctctcccattcccctgagaagaaccatctctgtcctggcttctccttctgtccctttgctccagcatcgcacagacgccgcggccagcagctcttctcccctgcccagcctgctcgcctcctcccccctggggccctcagcttatacctgtggttcttctggggtccagagtgcaggggaagagccccatgatgagggggtgcagggccctgcccttcccattcctgcaccccacaccatgaggtccgtgggctgccagactgatgaggacccgctcttccccccgatgcagatccagggcctggagcaaagagcggatggggagcggtgctgggcggccggctggcctcgggacggcgggcggagcagccccggagggcaggacgagggagggttcatggcccaggggaagacagggagcagctcaccccctggggggcccccgaagcccgggagccagctggacagcatgctggggagcctgcagtctgacctgaacaagctgggggtcgccacagtcgccaaaggagtctgcggggcctgcaagaagcccatcgccgggcaggttgtgaccgccatggggaagacgtggcaccccgagcacttcgtctgcacccactgccaggaggagatcggatcccggaacttcttcgagcgggatggacagccctactgtgaaaaggactaccacaacctcttctccccgcgctgctactactgcaacggccccatcctggataaagtggtgacagcccttgaccggacgtggcaccctgaacacttcttctgtgcacagtgtggagccttctttggtcccgaagggttccacgagaaggacggcaaggcctactgtcgcaaggactacttcgacatgttcgcacccaagtgtggcggctgcgcccgggccatcctggagaactatatctcagccctcaacacgctgtggcatcctgagtgctttgtgtgccgggaatgcttcacgccattcgtgaacggcagcttcttcgagcacgacgggcagccctactgtgaggtgcactaccacgagcggcgcggctcgctgtgttctggctgccagaagcccatcaccggccgctgcatcaccgccatggccaagaagttccaccccgagcacttcgtctgtgccttctgcctcaagcagctcaacaagggcaccttcaaggagcagaacgacaagccttactgtcagaactgcttcctcaagctcttctgctag

SEQ ID NO: 17125 - DNA, 513 bp, Homo sapiens
  source 1..513: mol_type = unassigned DNA
catcgaggaaagaagccactccagaagggagaccagaaacctgtctcctcccttccagcccccaggcccagcgcccgatccagggcctggagcaaagagcggatggggagcggtgctgggcggccggctggcctcgggacggcgggcggagcagccccggagggcaggacgagggagggttcatggcccaggggaagacagggagcagctcaccccctggggggcccccgaagcccgggagccagctggacagcatgctggggagcctgcagtctgacctgaacaagctgggggtcgccacagtcgccaaaggagtctgcggggcctgcaagaagcccatcgccgggcaggttgtgaccgccatggggaagacgtggcaccccgagcacttcgtctgcacccactgccaggaggagatcggatcccggaacttcttcgagcgggatggacagccctactgtgaaaaggactaccacaacctcttctccccgcgctgctactactgcaacggcc

SEQ ID NO: 17126 - DNA, 621 bp, Homo sapiens
  source 1..621: mol_type = unassigned DNA
agtctcttggatgaactggagagctccgtgcccagccccgtccctgccatcactgtgaaccagggcgagatgagcagcccgcagcgcgtcacctccacccaacagcagacacgcatctcggcctcctctgccaccagggagctggacgagctgatggcttcgctgtcggatttcaaggttgtcttccctcctggctctcccattcccctgagaagaaccatctctgtcctggcttctccttctgtccctttgctccagcatcgcacagacgccgcggccagcagctcttctcccctgcccagcctgctcgcctcctcccccctggggccctcagcttatacctgtggttcttctggggtccagagtgcaggggaagagccccatgatgagggggtgcagggccctgcccttcccattcctgcaccccacaccatgaggtccgtgggctgccagactgatgaggacccgctcttccccccgatgcagatccagggcctggagcaaagagcggatggggagcggtgctgggcggccggctggcctcgggacggcgggcggagcagccccggagggcaggacgagggagggttcatggcccaggggaagacagggagcagctca

SEQ ID NO: 17127 - DNA, 1004 bp, Homo sapiens
  source 1..1004: mol_type = unassigned DNA
gcgttccgttccgggccgaggctcgcggcggaaaagttgcggggcatagacgagcggccccgggacgggcagctagcgcgaccctgagccggcgcccgtggtccggccatggacgacctcgattcagagttccagacaggcacttcactcgcggctgcgcggccctgtcaggagggaacgcagtgccaggtgcctgactcccagagacgccctgctggcggacttggagtctaccacctcccacatctccaaacggcctgtgttcttgtcggaggagaccccctactcatacccaactggaaaccacacataccaggagattgccgtgccaccccccgtccccccacccccgtccagcgaggccctcaatggcacaatccttgaccccttagaccagtggcagcccagcagctcccgattcatccaccagcagcctcagtcctcatcacctgtgtacggctccagtgccaaaacttccagtgtctccaaccctcaggacagtgttggctctccgtgctcccgagtgggtgaggaggagcacgtctacagcttccccaacaagcagaaatcagctgagccttcacccaccgtaatgagcacgtccctgggcagcaacctttctgaactcgaccgcctgctgctggaactgaacgctgtacagcataacccgccaggcttccctgcagatgaggccaactcaagccccccgcttcctggggccctgagccccctctatggtgtcccagagactaacagccccttgggaggcaaagctgggcccctgacgaaagagaagcctaagcggaatgggggccggggcctggaggacgtgcggcccagtgtggagagtctcttggatgaactggagagctccgtgcccagccccgtccctgccatcactgtgaaccagggcgagatgagcagcccgcagcgcgtcacctccacccaacagcagacacgcatctcggcctcctctgccaccagggagctggacgagctgatgg

SEQ ID NO: 17128 - DNA, 588 bp, Homo sapiens
  source 1..588: mol_type = unassigned DNA
gtattctagctgacgacactgaagcacagagagacgccctgctggcggacttggagtctaccacctcccacatctccaaacggcctgtgttcttgtcggaggagaccccctactcatacccaactggaaaccacacataccaggagattgccgtgccaccccccgtccccccacccccgtccagcgaggccctcaatggcacaatccttgaccccttagaccagtggcagcccagcagctcccgattcatccaccagcagcctcagtcctcatcacctgtgtacggctccagtgccaaaacttccagtgtctccaaccctcaggacagtgttggctctccgtgctcccgagtgggtgaggaggagcacgtctacagcttccccaacaagcagaaatcagctgagccttcacccaccgtaatgagcacgtccctgggcagcaacctttctgaactcgaccgcctgctgctggaactgaacgctgtacagcataacccgccaggcttccctgcagatgaggccaactcaagccccccgcttcctggggccctgagccccctctatggtgtcccagagactaacagcccct

SEQ ID NO: 17129 - DNA, 957 bp, Homo sapiens
  source 1..957: mol_type = unassigned DNA
agctaagcgatttgccctgtggcatggatggtagagaggggagctggcacttgaactcaggtctggctcgacctcagaatgagtgatcttgtgtctctgtgccccaggactgcatcctctcaccaatacttcaccagcctagggatctgtgctcccaagagcctgttgacattgtaaacctgaatccaatccataaaccaaaagcccaggcttagaatcacattgtggtggagcgggtgtttggtggagtccctgattcaaaatgtttgacaaggaagcctgaccatttgtcttctgttgggtgtttggagtccaagagacctgagatcagagtccagcattgtcacttcatccagccttggcagtgtgggatgtgactctgcctctgaaccgcagttataccatctgtgctggtggcgttgtgaggatggcaggtaacaaagacgccctgctggcggacttggagtctaccacctcccacatctccaaacggcctgtgttcttgtcggaggagaccccctactcatacccaactggaaaccacacataccaggagattgccgtgccaccccccgtccccccacccccgtccagcgaggccctcaatggcacaatccttgaccccttagaccagtggcagcccagcagctcccgattcatccaccagcagcctcagtcctcatcacctgtgtacggctccagtgccaaaacttccagtgtctccaaccctcaggacagtgttggctctccgtgctcccgagtgggtgaggaggagcacgtctacagcttccccaacaagcagaaatcagctgagccttcacccaccgtaatgagcacgtccctgggcagcaacctttctgaactcgaccgcctgctgctggaactgaacgctgtacagcataacccgccaggcttccctgcagatgaggccaactcaagccccccgcttcctggggc

SEQ ID NO: 17130 - DNA, 729 bp, Homo sapiens
  source 1..729: mol_type = unassigned DNA
agagacaggaagccaggcctcctccatgggacccggagggcggggcgggctgtaggacctgaacttccttggaggtcaggcgaccagacccggggtcctgggccttggaacagacatcccctctgtccatctgggcaggagcatgggattcagagttccagacaggcacttcactcgcggctgcgcggccctgtcaggagggaacgcagtgccaggtgcctgactcccagagacgccctgctggcggacttggagtctaccacctcccacatctccaaacggcctgtgttcttgtcggaggagaccccctactcatacccaactggaaaccacacataccaggagattgccgtgccaccccccgtccccccacccccgtccagcgaggccctcaatggcacaatccttgaccccttagaccagtggcagcccagcagctcccgattcatccaccagcagcctcagtcctcatcacctgtgtacggctccagtgccaaaacttccagtgtctccaaccctcaggacagtgttggctctccgtgctcccgagtgggtgaggaggagcacgtctacagcttccccaacaagcagaaatcagctgagccttcacccaccgtaatgagcacgtccctgggcagcaacctttctgaactcgaccgcctgctgctggaactgaacgctgtacagcataacccgccaggcttccctgcagatgaggccaactcaagc

SEQ ID NO: 17131 - DNA, 655 bp, Homo sapiens
  source 1..655: mol_type = unassigned DNA
agttccggtttgctagagacaggaagccaggcctcctccatgggacccggagggcggggcgggctgtaggacctgaacttccttggaggtcaggcgaccagacccggggtcctgggccttggaacagacatcccctctgtccatctgggcaggagcatgggacgccctgctggcggacttggagtctaccacctcccacatctccaaacggcctgtgttcttgtcggaggagaccccctactcatacccaactggaaaccacacataccaggagattgccgtgccaccccccgtccccccacccccgtccagcgaggccctcaatggcacaatccttgaccccttagaccagtggcagcccagcagctcccgattcatccaccagcagcctcagtcctcatcacctgtgtacggctccagtgccaaaacttccagtgtctccaaccctcaggacagtgttggctctccgtgctcccgagtgggtgaggaggagcacgtctacagcttccccaacaagcagaaatcagctgagccttcacccaccgtaatgagcacgtccctgggcagcaacctttctgaactcgaccgcctgctgctggaactgaacgctgtacagcataacccgccaggcttccctgcagatgaggccaactca

SEQ ID NO: 17132 - DNA, 588 bp, Homo sapiens
  source 1..588: mol_type = unassigned DNA
attctctccgcgttgccctgcagattcagagttccagacaggcacttcactcgcggctgcgcggccctgtcaggagggaacgcagtgccaggtgcctgactcccagagacgccctgctggcggacttggagtctaccacctcccacatctccaaacggcctgtgttcttgtcggaggagaccccctactcatacccaactggaaaccacacataccaggagattgccgtgccaccccccgtccccccacccccgtccagcgaggccctcaatggcacaatccttgaccccttagaccagtggcagcccagcagctcccgattcatccaccagcagcctcagtcctcatcacctgtgtacggctccagtgccaaaacttccagtgtctccaaccctcaggacagtgttggctctccgtgctcccgagtgggtgaggaggagcacgtctacagcttccccaacaagcagaaatcagctgagccttcacccaccgtaatgagcacgtccctgggcagcaacctttctgaactcgaccgcctgctgctggaactgaacgctgtacagcataacccgccaggcttccctgcag

SEQ ID NO: 17133 - DNA, 516 bp, Homo sapiens
  source 1..516: mol_type = unassigned DNA
aaaagttgcggggcatagacgagcggccccgggacgggcagctagcgcgaccctgagccggcgcccgtggtccggccatggacgacctcggctctgaggagtagattcagcagacaggactgatggacctctaccaagcagcgccgggcactaagttaagactggctatttgtagacgccctgctggcggacttggagtctaccacctcccacatctccaaacggcctgtgttcttgtcggaggagaccccctactcatacccaactggaaaccacacataccaggagattgccgtgccaccccccgtccccccacccccgtccagcgaggccctcaatggcacaatccttgaccccttagaccagtggcagcccagcagctcccgattcatccaccagcagcctcagtcctcatcacctgtgtacggctccagtgccaaaacttccagtgtctccaaccctcaggacagtgttggctctccgtgctcccgagtgggtgaggaggagcacgtctac

SEQ ID NO: 17134 - DNA, 579 bp, Homo sapiens
  source 1..579: mol_type = unassigned DNA
atagacgagcggccccgggacgggcagctagcgcgaccctgagccggcgcccgtggtccggccatggacgacctcggttgcccttttcatggtttgctcatattctacccagaaaagacttaggagacttagaagaagttagtactttgcatcctacctacactgctctccttggaggaagaccttattctggattttacagagcaaatcagatctgatgtttgtagcttccaatgtgctatggagcttcctcctgcagagtgacttgggtctggagagcctgatatttgcaactgatgtctgcagcttccagtgtacctgctagcccttataaacctcacaccagtactttgagacgccctgctggcggacttggagtctaccacctcccacatctccaaacggcctgtgttcttgtcggaggagaccccctactcatacccaactggaaaccacacataccaggagattgccgtgccaccccccgtccccccacccccgtccagcgaggccctcaatggcacaatccttgaccccttagaccagtggcagcccagcagctcccgattcatccaccag

SEQ ID NO: 17135 - DNA, 550 bp, Homo sapiens
  source 1..550: mol_type = unassigned DNA
gttgggtgtttggagtccaagagacctgagatcagagtccagcattgtcacttcatccagccttggcagtgtgggatgtgactctgcctctgaaccgcagttataccatctgtgctggtggcgttgtgaggatggcaggtaacaaaggtgaagctcctggccccagtgggccttcaaggatggcagctgctcctgccccctactggggttgcactcattcgttgcctgctctggggagtcctatggggtttcttagctggccctgcccatggtggagaaagagggatccacccattgctgattgggcccagaggaaatgaggacactgcgtgaagccaagacagcagacgccctgctggcggacttggagtctaccacctcccacatctccaaacggcctgtgttcttgtcggaggagaccccctactcatacccaactggaaaccacacataccaggagattgccgtgccaccccccgtccccccacccccgtccagcgaggccctcaatggcacaatccttgaccccttagaccagtggcagcccagc

SEQ ID NO: 17136 - DNA, 547 bp, Homo sapiens
  source 1..547: mol_type = unassigned DNA
aggtattctagctgacgacactgaagcacagagaggttgcccttttcatggtttgctcatattctacccagaaaagacttaggagacttagaagaagttagtactttgcatcctacctacactgctctccttggaggaagaccttattctggattttacagagcaaatcagatctgatgtttgtagcttccaatgtgctatggagcttcctcctgcagagtgacttgggtctggagagcctgatatttgcaactgatgtctgcagcttccagtgtacctgctagcccttataaacctcacaccagtactttgaggtcagagttattcaagagcttactgagacaacaggccctgagaagctaagcgatttgccctgtggcatggatggtagagaggggagctggcacttgaactcaggtctggctcgacctcagaatgagtgatcttgtgtctctgtgccccaggactgcatcctctcaccaatacttcaccagcctagggatctgtgctcccaagagcctgttgacattgtaaacctgaatccaat

SEQ ID NO: 17137 - DNA, 584 bp, Homo sapiens
  source 1..584: mol_type = unassigned DNA
gcgttccgttccgggccgaggctcgcggcggaaaagttgcggggcatagacgagcggccccgggacgggcagctagcgcgaccctgagccggcgcccgtggtccggccatggacgacctcggttgcccttttcatggtttgctcatattctacccagaaaagacttaggagacttagaagaagttagtactttgcatcctacctacactgctctccttggaggaagaccttattctggattttacagagcaaatcagatctgatgtttgtagcttccaatgtgctatggagcttcctcctgcagagtgacttgggtctggagagcctgatatttgcaactgatgtctgcagcttccagtgtacctgctagcccttataaacctcacaccagtactttgaggtcagagttattcaagagcttactgagacaacaggccctgagaagctaagcgatttgccctgtggcatggatggtagagaggggagctggcacttgaactcaggtctggctcgacctcagaatgagtgatcttgtgtctctgtgccccaggactgcatcctctcaccaatacttcaccagccta

SEQ ID NO: 17138 - DNA, 3835 bp, Homo sapiens
  source 1..3835: mol_type = unassigned DNA
ggcgggcgcgggcgcgggcgcgcgcggcggcggcgcgttccgttccgggccgaggctcgcggcggaaaagttgcggggcatagacgagcggccccgggacgggcagctagcgcgaccctgagccggcgcccgtggtccggccatggacgacctcgacgccctgctggcggacttggagtctaccacctcccacatctccaaacggcctgtgttcttgtcggaggagaccccctactcatacccaactggaaaccacacataccaggagattgccgtgccaccccccgtccccccacccccgtccagcgaggccctcaatggcacaatccttgaccccttagaccagtggcagcccagcagctcccgattcatccaccagcagcctcagtcctcatcacctgtgtacggctccagtgccaaaacttccagtgtctccaaccctcaggacagtgttggctctccgtgctcccgagtgggtgaggaggagcacgtctacagcttccccaacaagcagaaatcagctgagccttcacccaccgtaatgagcacgtccctgggcagcaacctttctgaactcgaccgcctgctgctggaactgaacgctgtacagcataacccgccaggcttccctgcagatgaggccaactcaagccccccgcttcctggggccctgagccccctctatggtgtcccagagactaacagccccttgggaggcaaagctgggcccctgacgaaagagaagcctaagcggaatgggggccggggcctggaggacgtgcggcccagtgtggagagtctcttggatgaactggagagctccgtgcccagccccgtccctgccatcactgtgaaccagggcgagatgagcagcccgcagcgcgtcacctccacccaacagcagacacgcatctcggcctcctctgccaccagggagctggacgagctgatggcttcgctgtcggatttcaagggctcctggcccctggaggaggttgtacttcttgtctccatcagctcatctgtccaggagggagaaaagtacccccatccctgtgctgccagacaccgtaccccgagcctcaggagtcctgaccagccccctccgtgtccacagttcatggcccaggggaagacagggagcagctcaccccctggggggcccccgaagcccgggagccagctggacagcatgctggggagcctgcagtctgacctgaacaagctgggggtcgccacagtcgccaaaggagtctgcggggcctgcaagaagcccatcgccgggcaggttgtgaccgccatggggaagacgtggcaccccgagcacttcgtctgcacccactgccaggaggagatcggatcccggaacttcttcgagcgggatggacagccctactgtgaaaaggactaccacaacctcttctccccgcgctgctactactgcaacggccccatcctggataaagtggtgacagcccttgaccggacgtggcaccctgaacacttcttctgtgcacagtgtggagccttctttggtcccgaagggttccacgagaaggacggcaaggcctactgtcgcaaggactacttcgacatgttcgcacccaagtgtggcggctgcgcccgggccatcctggagaactatatctcagccctcaacacgctgtggcatcctgagtgctttgtgtgccgggaatgcttcacgccattcgtgaacggcagcttcttcgagcacgacgggcagccctactgtgaggtgcactaccacgagcggcgcggctcgctgtgttctggctgccagaagcccatcaccggccgctgcatcaccgccatggccaagaagttccaccccgagcacttcgtctgtgccttctgcctcaagcagctcaacaagggcaccttcaaggagcagaacgacaagccttactgtcagaactgcttcctcaagctcttctgctaggtgccctgcccctgtctctgccccccttccccagccagcatccccaactgcgactgtgacctagagacttcacccgggggtgaaggggtaaacccgactgaaactggaacccttgtcctccgctggtgcgggatggacagagggccgtgaggggtccccctgcttgtcttcacccctgccagagcctctgggccccctcctccctcctgtagctctccctaggctgcccactctccatcctccccaggggtagaggctgggggctccaccccagcccatgtacgtccccacgaactggcctggccagcaccccacactggagccatctcttcctcatatttcagcagtgcagccggggggcagggaagggcaggcagggtctgttggggtctctttttatccttattcctcccccgacctaattgtctttgttctgtgattattgggggacacccggctccctccagacaatgccagcataaatccatccatccaaaggcagagaaccaaaggggccatggaaggttctctgtgctcctcctacccttccagtgccctaggcctggcgactgcccctgccttttagacccgccctccccttttatacctgctcttgttctactgagaaaagcctctccagcaataatgttttctagtcacttcctccgtctccgggacggcgtgcctggacactgtaccgactttgatagatttctacactgaggtttgaattcatatcgcctgagttgcttttacttctctatacaaaatgattttgaagagattttaaagacgttcccttttgtattctcttcctcatccaccgccactgggcctgtcactgatggtggctctggtgtgaagtttgctttgtactgagggttggggtggggaagcaatttgtattttattgtttcttagcacaagcaggtgaactgggagcagctctgtgactccccctctttcacttcatagctcaccaggactgttttataaactgctgtatttggaaaccccttctttacttcccaggccagcaagctcttcactgaaactggttgaagggtgttgcacccttttgggcctagaattctgaactttatctgttctgtttctgtgggaggagaaggggaagtatgttttggggggctgcttcctgtctgagtaagccctcaggagcctctgctcccctgtgaacccactgaaccttctgagcccccactgcttctatggggctctctcttctgccttctcaggaaagctggtgtctgattttggccatcaggactctgacgtctctttggtcttgttgatttcctctgggcatatcccttccccagatctgctcctcccctttcacaggtgggatcggcactcagggggtctggaaagaaggtcataagggagcatgataggatttggggcagagggacaggctcctctggggaaaccccccagagctctttaccaaggatgaaagaggagccaggccttgggctcctgatgaggagaaaggggccccaccggggtctaatggtgacagtccaaaccactccactggcctcctggcagaagccgagtgtgctggggtctccgaagagggtccctcctttttgggggaaggtcagcccagcccctccaaaggtctgatgtctccactttcacccgcaggccttaccgctctgtttatagtgacccaccctagatcttccccaagagggactggggtttctggggtccattctctgagtcagtggttatttgaaaatttgattttgattttattttttctctgtaaacttccaagctggcttttcccatttcaattcctgtgatttatgccaataaagtttgcccatgattttcacctgtgct

SEQ ID NO: 17139 - DNA, 568 bp, Homo sapiens
  source 1..568: mol_type = unassigned DNA
cagttgcttatagtctaggaagggatcacttgtgtaacatgggagcaaatgctgcctagcggaatattcgtgacttgggacatgttcccgatttgaggtgaaaccatgaagagaaaatagaatacttaataatgcttttccgcaaccgcttcttgctgctgctggccctggctgcgctgctggcctttgtgagcctcagcctgcagttcttccacctgatcccggtgtcgactcctaagaatggaatgagtagcaagagtcgaaagagaatcatgcccgaccctgtgacggagccccctgtgacagaccccgtttatgaagctcttttgtactgcaacatccccagcgtggccgagcgcagcatggaaggtcatgccccgcatcattttaagctggtctcagtgcatgtgttcattcgccacggagacaggtacccactgtatgtcattcccaaaacaaagcgaccagaaattgactgcactctggtggctaacaggaaaccgtatcacccaaaactggaagctttcattagtcacatgtcaaaaggatccggagcctctttcgaaag

SEQ ID NO: 17140 - DNA, 3742 bp, Homo sapiens
  source 1..3742: mol_type = unassigned DNA
gggccccgcgagctccccggtggcgggtgcgcgccgccctcgcctcccctcgcgccgggaggagctggcggcgagcgccgagccgggcgcgcagcgacggagctggggccggcctgggaccatgggcggacatgttcccgatttgaggtgaaaccatgaagagaaaatagaatacttaataatgcttttccgcaaccgcttcttgctgctgctggccctggctgcgctgctggcctttgtgagcctcagcctgcagttcttccacctgatcccggtgtcgactcctaagaatggaatgagtagcaagagtcgaaagagaatcatgcccgaccctgtgacggagccccctgtgacagaccccgtttatgaagctcttttgtactgcaacatccccagcgtggccgagcgcagcatggaaggtcatgccccgcatcattttaagctggtctcagtgcatgtgttcattcgccacggagacaggtacccactgtatgtcattcccaaaacaaagcgaccagaaattgactgcactctggtggctaacaggaaaccgtatcacccaaaactggaagctttcattagtcacatgtcaaaaggatccggagcctctttcgaaagccccttgaactccttgcctctttacccaaatcacccattgtgtgagatgggagagctcacacagacagtaagaaggtggctatctgcaagccaggaagagaggcctcactagcaactgaaaatgctgtctccctgaccttggacttctcagcctccagacctgtgagaaataaatgtctgttatttaaggcaaaaaagagaaatcagtaactggaaaaagactaagagggttggaaatggagcacgagatgcactttatgtgcaggatgggccagcacttgttgagcatttcaacgcccaagacatgcagtgtgctttttacgcagaaccttgtttcatctcacagtaacctgtgacttaaagattatcatccccttttctttttttttttttttttttttttggagacaagctctcacccttgtcatccaggcaggagtacaatggcagtaatagctccctgcagcctcaagctcctgggctcaagcaatcctcccacctcagcctcccgagcagctgggattgcaggcacgagctaccacactcagctaattttcatatatttttttggagatggggtcttgctgtgttgctcaggatggtctcaaactcctgggctcaagcaatctgtctagcttggcctcccacagtgctgggattatagacatgagccaccccgcccagcctatcatccccatttttaagacagggaaagaaactgagaggagaggtcacttgccaaggcctctcagccacgaagtggcagaactgggaggcaaactagtctgactcaagcccttactcatagtcattatatcattatattaaacattcctcacaggggtctacagaaagcatgtgtgatggcttaccaatacatactaaatagttctctccggcatgtatagattttacattcatgacagcgtaaatcaaattaaaaacgcttccttggccctccacagccttccagataaaatccaggctccctaagggcctccctgagtacatggactgcagttgttgatggattttctgcatgtctggaagacagaaaaagcgtcttggatcatggtgtggggtgtgagattgacaggatctccgagaggacagtcgcttccagagcacttcagaagccagtgatttctcagtcctccactcttctccccttccctatctgtggtctccagtgtgatcacctagaaaaagagctttggaaccatatagaccaagctcaaatccagttctctaccacttcgcaggtgtggagcctcaagcaaggtacccaggctcctacaatccctaaaccagggatgatgactcccgcagagtgtatgtgaagctccagacacatggaccatctccacctggcaggagtcattatttctcacaaatgactctctccattgctctgagacaccaaaaccagttgaaaccagaatgacagccctgcccacatttttttttaatgtgaaagatgaaaggtcctcatttcttgttctgatagcttcctgccacacactgaagtctcctcaaggacacgtcttttactgcatgcagcttcacagtcagctcctcaagcagaagactgaaccgtgacttgtttttagaagctctccgggtagggaggacatatccatatgcaggacagaaccttgcttttcaaattcaagaaaaaacagtaactaatctatcgattcttctgtgattcagtctgccagggtgttctgtaaagaatccttttccatccctatcacacatttgtacgaaaggggagggagaggtggcagggtcccagtacaccggcaggcacttcggcgatgcccggggctccgctccctttctgttgatagttgtaggcgtcatttctggcagctgctgcagctcgatgcagggaaggaaggggccacccaccaatcacctctttctgatgccacatttttgacgttcatggaagaggcctgtctcagagctccctaagctgacaatctttgggcagccatctctattcttctcctggctggtgcactccttacaataataggcatcagagactcccatggcctccacagatctcacagtgtccctgttggacttgctgttcatttgagaggaagctgctgaccacagagttcagcaaaagaatgggagtatggaggctcaaagtgtggcccctggagaagctgaatgagaagtagccctggatatggtgtagactcccacaaaccagagatcctgccctcagtgcctcagctttaggaagctgctccctgccttgctcctgggcagacagaagccagagagaccacaggtcgaagcaggaccacgcaaggacgcgcacgcctctttcccacgccgcagagcgatagaacccgcaacaggaaaacggaaaggccgtgcgccggaagaacagcagcctgagctctttgaagactccttagtctaaagcctctgatggccaatggtctgcatctttcccatgtgctcctgaggtacaaaatggacatttcagctgcttttaatagaaactcactgtgtcactcataaaactcaggaagctgtcccaaatcctgggaggacatgaaaagaggctcactctgtagtcaagcacaggtatgcctaaggtgtgcaggtcccaagactctcccacttctctcttagtttggagtgggcattcttttaagaagtggaggaccctgtggtcactggcttccttagtggtgaatcatagggcaatcagagagcaggaatctgcaaaggggcgctgtcatgtgctgaattgtatctcctcaacatttatagattgaagccctagcctccagtatctcaggatgtgacagtatttggaggtggggcttttaaagaggtggttaagttaaaatgaagccattagagtggtccttaatccaatatgactggtctccttataagaagaaacttgtacacagaagagatacacaagggacatggaggcacagagaaaagcccatgtgaagaggcagcaaaagagtggccatgtgcaatccaagaagagaggcctcagaggaagccagccctgccaacactttgatcttgaactttcgggttccagactgtgagaaaataaatttttattgtttaagcc

SEQ ID NO: 17141 - DNA, 629 bp, Homo sapiens
  source 1..629: mol_type = unassigned DNA
gcctcccctcgcgccgggaggagctggcggcgagcgccgagccgggcgcgcagcgacggagctggggccggcctgggaccatgggcggacatgttcccgatttgaggtgaaaccatgaagagaaaatagaatacttaataatgcttttccgcaaccgcttcttgctgctgctggccctggctgcgctgctggcctttgtgagcctcagcctgcagttctgaaaccgtatcacccaaaactggaagctttcattagtcacatgtcaaaaggatccggagcctctttcgaaagccccttgaactccttgcctctttacccaaatcacccattgtgtgagatgggagagctcacacagacaggagttgtgcagcatttgcagaacggtcagctgctgagggatatctatctaaagaaacacaaactcctgcccaatgattggtctgcagaccagctctatttagagaccactgggaaaagccggaccctacaaagtgggctggccttgctttatggctttctcccagattttgactggaagaagatttatttcaggcaccagccaagtgcgctgttctgctctggaagctgctattgcccggtaagaaaccagtatctggaaaaggagcagc

SEQ ID NO: 17142 - DNA, 3281 bp, Homo sapiens
  source 1..3281: mol_type = unassigned DNA
tcccctcgcgccgggaggagctggcggcgagcgccgagccgggcgcgcagcgacggagctggggccggcctgggaccatgggcggacatgttcccgatttgaggtgaaaccatgaagagaaaatagaatacttaataatgcttttccgcaaccgcttcttgctgctgctggccctggctgcgctgctggcctttgtgagcctcagcctgcagttcttccacctgatcccggtgtcgactcctaagaatggaatgagtagcaagagtcgaaagagaatcatgcccgaccctgtgacggagccccctgtgacagaccccgtttatgaagctcttttgtactgcaacatccccagcgtggccgagcgcagcatggaaggtcatgccccgcatcattttaagctggtctcagtgcatgtgttcattcgccacggagacaggtacccactgtatgtcattcccaaaacaaagcgaccagaaattgactgcactctggtggctaacaggaaaccgtatcacccaaaactggaagctttcattagtcacatgtcaaaaggatccggagcctctttcgaaagccccttgaactccttgcctctttacccaaatcacccattgtgtgagatgggagagctcacacagacaggagttgtgcagcatttgcagaacggtcagctgctgagggatatctatctaaagaaacacaaactcctgcccaatgattggtctgcagaccagctctatttagagaccactgggaaaagccggaccctacaaagtgggctggccttgctttatggctttctcccagattttgactggaagaagatttatttcaggcaccagccaagtgcgctgttctgctctggaagctgctattgcccggtaagaaaccagtatctggaaaaggagcagcgtcgtcagtacctcctacgtttgaaaaacagccagctggagaagacctacggggagatggccaagatcgtggatgtccccaccaagcagcttagagctgccaaccccatagactccatgctctgccacttctgccacaatgtcagctttccctgtaccagaaatggctgtgttgacatggagcacttcaaggtaattaagacccatcagatcgaggatgaaagggaaagacgggagaagaaattgtacttcgggtattctctcctgggtgcccaccccatcctgaaccaaaccatcggccggatgcagcgtgccaccgagggcaggaaagaagagctctttgccctctactctgctcatgatgtcactctgtcaccagttctcagtgccttgggcctttcagaagccaggttcccaaggtttgcagccaggttgatctttgagctttggcaagacagagaaaagcccagtgaacattccgtccggattctttacaatggcgtcgatgtcacattccacacctctttctgccaagaccaccacaagcgttctcccaagcccatgtgcccgcttgaaaacttggtccgctttgtgaaaagggacatgtttgtagccctgggtggcagtggtacaaattattatgatgcatgtcacagggaaggattctaaaaggtatgcagtacagcagtatagaatccatgccaatacagagcatagggaaaggtccacttctagttttgtctgttactaagggtagaagattattgctttttaaaggctaaatattgtttgtgggaaccacagatggttggggttgaacagtaagcacattgctgcaatgtggtacgtgaattgcttggtacaaaatggccagttcacagaggaatagaaggtactttatcatagccagacttcgcttagaatgccagaataatatagttcaagacctgaagttgccaatccaagtttgcactcttctggcctgccccatgttactatgtgatggaaccagcacacctcaaccaaaatttttttaatcttagacatttttaccttgtccttgttaagaatttcttgaagtgatttatctaaaataaaggttggcaaactttttctgtaaagggccagattgtaaatatttcagactgtgtggaccaaaaggccacatacagtctctgtcataactactcaactctgtttctgaagcaggaaagccaccacagacagtacataaaggaatatgtgtagctgggttcccaggccggacaaaacagatggtgaccagatttggcccctgggctgtagtttgctgacccctcatctaaaaaataggctatactacaattgcacttccagcactttgagaacgagttgaataccaagaattattcaatggttcctccagtaacttctgctagaaacacagaatttggtctgtatctgacactagaacaaaacttgagggtaaataaacattgaattagaatgaatcatagaaaactgattagaagaatacttgatgtttatgatgattgtggtacaagatagttttaagtatgttctaaatatttgtctgctgtagtctatttgctgtatatgctgaaatttttgtatgccatttagtatttttatagtttaggaaaatattttctaagaccagttttagatgactcttattcctgtagtaatattcaatttgctgtacctgcttggtggttagaaggaggctagaagatgaattcaggcactttcttccaataaaactaattatggctcattccctttgacaagctgtagaactggattcatttttaaaccattttcatcagtttcaaatggtaaattctgattgatttttaaatgcgtttttggaagaactttgctattagatagtttacagatctttataaggtgttttatatattagaagcaattataattacatctgtgatttctgaactaatggtgctaattcagagaaatggaaagtgaaagtgagattctctgttgtcatcggcattccaactttttctctttgtttttgtccagtgttgcatttgaatatgtctgtttctataaataaattttttaagaatacctatactatacaactaatggtttgtacctataagtcactcgagttattttcaagtgagagccagtattttatttttcccccttcattcaaatgtcatgcagagaaccagtattttaaaattttattttaactgctttactaactgctgaaagttgtgttatctctcaagtattcaaagactaaatgtgttttctttccttcccactcacaatatatctgaattagaactgctaaacacagcttgaagacttaaaaataaaagtgactcggaa

SEQ ID NO: 17143 - DNA, 4654 bp, Homo sapiens
  source 1..4654: mol_type = unassigned DNA
cccctcgcgccgggaggagctggcggcgagcgccgagccgggcgcgcagcgacggagctggggccggcctgggaccatgggcggacatgttcccgatttgaggtgaaaccatgaagagaaaatagaatacttaataatgcttttccgcaaccgcttcttgctgctgctggccctggctgcgctgctggcctttgtgagcctcagcctgcagttcttccacctgatcccggtgtcgactcctaagaatggaatgagtagcaagagtcgaaagagaatcatgcccgaccctgtgacggagccccctgtgacagaccccgtttatgaagctcttttgtactgcaacatccccagcgtggccgagcgcagcatggaaggtcatgccccgcatcattttaagctggtctcagtgcatgtgttcattcgccacggagacaggtacccactgtatgtcattcccaaaacaaagcgaccagaaattgactgcactctggtggctaacaggaaaccgtatcacccaaaactggaagctttcattagtcacatgtcaaaaggatccggagcctctttcgaaagccccttgaactccttgcctctttacccaaatcacccattgtgtgagatgggagagctcacacagacagtaagaaggtggctatctgcaagccaggaagagaggcctcactagcaactgaaaatgctgtctccctgaccttggacttctcagcctccagacctgtgagaaataaatgtctgttatttaaggcaaaaaagagaaatcagtaactggaaaaagactaagagggttggaaatggagcacgagatgcactttatgtgcaggatgggccagcacttgttgagcatttcaacgcccaagacatgcagtgtgctttttacgcagaaccttgtttcatctcacagtaacctgtgacttaaagattatcatccccttttctttttttttttttttttttttttggagacaagctctcacccttgtcatccaggcaggagtacaatggcagtaatagctccctgcagcctcaagctcctgggctcaagcaatcctcccacctcagcctcccgagcagctgggattgcaggcacgagctaccacactcagctaattttcatatatttttttggagatggggtcttgctgtgttgctcaggatggtctcaaactcctgggctcaagcaatctgtctagcttggcctcccacagtgctgggattatagacatgagccaccccgcccagcctatcatccccatttttaagacagggaaagaaactgagaggagaggtcacttgccaaggcctctcagccacgaagtggcagaactgggaggcaaactagtctgactcaagcccttactcatagtcattatatcattatattaaacattcctcacaggggtctacagaaagcatgtgtgatggcttaccaatacatactaaatagttctctccggcatgtatagattttacattcatgacagcgtaaatcaaattaaaaacgcttccttggccctccacagccttccagataaaatccaggctccctaagggcctccctgagtacatggactgcagttgttgatggattttctgcatgtctggaagacagaaaaagcgtcttggatcatggtgtggggtgtgagattgacaggatctccgagaggacagtcgcttccagagcacttcagaagccagtgatttctcagtcctccactcttctccccttccctatctgtggtctccagtgtgatcacctagaaaaagagctttggaaccatatagaccaagctcaaatccagttctctaccacttcgcaggtgtggagcctcaagcaaggtacccaggctcctacaatccctaaaccagggatgatgactcccgcagagtgtatgtgaagctccagacacatggaccatctccacctggcaggagtcattatttctcacaaatgactctctccattgctctgagacaccaaaaccagttgaaaccagaatgacagccctgcccacatttttttttaatgtgaaagatgaaaggtcctcatttcttgttctgatagcttcctgccacacactgaagtctcctcaaggacacgtcttttactgcatgcagcttcacagtcagctcctcaagcagaagactgaaccgtgacttgtttttagaagctctccgggtagggaggacatatccatatgcaggacagaaccttgcttttcaaattcaagaaaaaacagtaactaatctatcgattcttctgtgattcagtctgccagggtgttctgtaaagaatccttttccatccctatcacacatttgtacgaaaggggagggagaggtggcagggtcccagtacaccggcaggcacttcggcgatgcccggggctccgctccctttctgttgatagttgtaggcgtcatttctggcagctgctgcagctcgatgcagggaaggaaggggccacccaccaatcacctctttctgatgccacatttttgacgttcatggaagaggcctgtctcagagctccctaagctgacaatctttgggcagccatctctattcttctcctggctggtgcactccttacaataataggcatcagagactcccatggcctccacagatctcacagtgtccctgttggacttgctgttcatttgagaggaagctgctgaccacagagttcagcaaaagaatgggagtatggaggctcaaagtgtggcccctggagaagctgaatgagaagtagccctggatatggtgtagactcccacaaaccagagatcctgccctcagtgcctcagctttaggaagctgctccctgccttgctcctgggcagacagaagccagagagaccacaggtcgaagcaggaccacgcaaggacgcgcacgcctctttcccacgccgcagagcgatagaacccgcaacaggaaaacggaaaggccgtgcgccggaagaacagatggggtcttgctctgtcacccaggcggtggggcagtggcacaatcatagctcactacagccttgaactcctgggctcaagcaatcctcttgccccagcctgctgagtagctaggattacaggtgcatgccaccatgcctggttaattctttctatttttgagagatgggatctcactacattgcccacattgttctcaaactctggtcccaagttgctggaattacaggcttaaaccaccacacctgttttgtaacctgagcgcctccagacttctagccacatgtgcgatctcaatggattctggcgtagtctctctctcccctagggtcaggcaagatatcatcatttgtcatacatacatatacagcgtctatcagattctctcacaaaaagccctcatgaatagatatatactggggtggctgccataccctgaatccactttagacccctttaggaattcatctgagcaccttctaaatggaagtccacaagaggcataaaggtggcctcactacaccatggttgagtgagtggacctgctcccagtgtgatcaccgtatgtggtcccagggtccctccctctcaccaaagggcctttgggctaggaaagcaaatttctcttaatgtaactcttagaaattcataaatcaaagacaagtttccttctcttaatgtaactcttagaaatccataaacctgttaccagttgaacatcctaatcccaaaatctgaaacccaaaatgctccaaaatttgaaactttttgagtgcccatatgatgctcaaagaaaatgcttactggacattttggattttggattttcagattaaggatgctgaactggtaagtataatgcaaatattcagaaatctgaaaaagtccaaaatacccctggtcccaagcattttggataagtgatacacaagctataataaaattatttttatttttatttctttataaacagggtctcgctctgtcacccaggctggaatgcagtggtgtaatcagagctcactgtagcctcaaccttctaggctcaagtgatcctcctgcctcagccttctgagtgtctgggcatacaggagagtgccaccacacccagctcctgtgataatattagagaattaaataattcaattaacaagattagtagatacttgagcaaaatttgggctttgccaacatggaagacagggcatgactattaggtaggcacaaaaaaatgcctgctacaattccctgtatatatttaaattatttccacaataaaatatattgcctacatgattaaagaaggaaagaaataaaggtaatgaatatgaggggaaaatggaaatataaaactaagaagtgatgtcatattttgaggtatttgagaagacatgctggtaaaataaacagactaatttgctaaaagccaattcaatgattgaccaattcaccacatttacttgctccttttacttatttacaaggtttttggcaattcatactggatggtattcttttaacagtttttgaacatttctgcaaaatatttgttggccagtattcctttatatctgtataacagcattttaaggaatattcaatctgtctcagcccagttagttagaagacagggtatatgtagaagaaaaatattcacaagataaataa

SEQ ID NO: 17144 - DNA, 2066 bp, Homo sapiens
  source 1..2066: mol_type = unassigned DNA
gggaggagctggcggcgagcgccgagccgggcgcgcagcgacggagctggggccggcctgggaccatgggcggacatgttcccgatttgaggtgaaaccatgaagagaaaatagaatacttaataatgcttttccgcaaccgcttcttgctgctgctggccctggctgcgctgctggcctttgtgagcctcagcctgcagttctaattggaaaagaggtcaaaagaaggtgggcatcagaagtttaaaaatattccagatggcaaatgaattgtaaaatctgaatcctttccaaaaagtgtgtccacctgatcccggtgtcgactcctaagaatggaatgagtagcaagagtcgaaagagaatcatgcccgaccctgtgacggagccccctgtgacagaccccgtttatgaagctcttttgtactgcaacatccccagcgtggccgagcgcagcatggaaggtcatgccccgcatcattttaagctggtctcagtgcatgtgttcattcgccacggagacaggtacccactgtatgtcattcccaaaacaaagcgaccagaaattgactgcactctggtggctaacaggaaaccgtatcacccaaaactggaagctttcattagtcacatgtcaaaaggatccggagcctctttcgaaagccccttgaactccttgcctctttacccaaatcacccattgtgtgagatgggagagctcacacagacaggagttgtgcagcatttgcagaacggtcagctgctgagggatatctatctaaagaaacacaaactcctgcccaatgattggtctgcagaccagctctatttagagaccactgggaaaagccggaccctacaaagtgggctggccttgctttatggctttctcccagattttgactggaagaagatttatttcaggcaccagccaagtgcgctgttctgctctggaagctgctattgcccggtaagaaaccagtatctggaaaaggagcagcgtcgtcagtacctcctacgtttgaaaaacagccagctggagaagacctacggggagatggccaagatcgtggatgtccccaccaagcagcttagagctgccaaccccatagactccatgctctgccacttctgccacaatgtcagctttccctgtaccagaaatggctgtgttgacatggagcacttcaaggtaattaagacccatcagatcgaggatgaaagggaaagacgggagaagaaattgtacttcgggtattctctcctgggtgcccaccccatcctgaaccaaaccatcggccggatgcagcgtgccaccgagggcaggaaagaagagctctttgccctctactctgctcatgatgtcactctgtcaccagttctcagtgccttgggcctttcagaagccaggttcccaaggtttgcagccaggttgatctttgagctttggcaagacagagaaaagcccagtgaacattccgtccggattctttacaatggcgtcgatgtcacattccacacctctttctgccaagaccaccacaagcgttctcccaagcccatgtgcccgcttgaaaacttggtccgctttgtgaaaagggacatgtttgtagccctgggtggcagtggtacaaattattatgatgcatgtcacagggaaggattctaaaaggtatgcagtacagcagtatagaatccatgccaatacagagcatagggaaaggtccacttctagttttgtctgttactaagggtagaagattattgctttttaaaggctaaatattgtttgtgggaaccacagatggttggggttgaacagtaagcacattgctgcaatgtggtacgtgaattgcttggtacaaaatggccagttcacagaggaatagaaggtactttatcatagccagacttcgcttagaatgccagaataatatagttcaagacctgaagttgccaatccaagtttgcactcttctggcctgccccatgttactatgtgatggaaccagcacacctcaaccaaaatttttttaatcttagacatttttaccttgtccttgttaaga

SEQ ID NO: 17145 - DNA, 3160 bp, Homo sapiens
  source 1..3160: mol_type = unassigned DNA
ccgagccgggcgcgcagcgacggagctggggccggcctgggaccatgggcgtgagtgcaatctacggatcagtctctgatggtgggtcgttaacctcagtggggactccaagatttccatgaagaaaatcagttgtcttcattcaagaattggggtctggctcagaattcctgcagctggtgaaaatctgttttctagaagaggtttaattaatgcctgcagtctgacatgttcccgatttgaggtgaaaccatgaagagaaaatagaatacttaataatgcttttccgcaaccgcttcttgctgctgctggccctggctgcgctgctggcctttgtgagcctcagcctgcagttcttccacctgatcccggtgtcgactcctaagaatggaatgagtagcaagagtcgaaagagaatcatgcccgaccctgtgacggagccccctgtgacagaccccgtttatgaagctcttttgtactgcaacatccccagcgtggccgagcgcagcatggaaggtcatgccccgcatcattttaagctggtctcagtgcatgtgttcattcgccacggagacaggtacccactgtatgtcattcccaaaacaaagcgaccagaaattgactgcactctggtggctaacaggaaaccgtatcacccaaaactggaagctttcattagtcacatgtcaaaaggatccggagcctctttcgaaagccccttgaactccttgcctctttacccaaatcacccattgtgtgagatgggagagctcacacagacaggagttgtgcagcatttgcagaacggtcagctgctgagggatatctatctaaagaaacacaaactcctgcccaatgattggtctgcagaccagctctatttagagaccactgggaaaagccggaccctacaaagtgggctggccttgctttatggctttctcccagattttgactggaagaagatttatttcaggcaccagccaagtgcgctgttctgctctggaagctgctattgcccggtaagaaaccagtatctggaaaaggagcagcgtcgtcagtacctcctacgtttgaaaaacagccagctggagaagacctacggggagatggccaagatcgtggatgtccccaccaagcagcttagagctgccaaccccatagactccatgctctgccacttctgccacaatgtcagctttccctgtaccagaaatggctgtgttgacatggagcacttcaaggtaattaagacccatcagatcgaggatgaaagggaaagacgggagaagaaattgtacttcgggtattctctcctgggtgcccaccccatcctgaaccaaaccatcggccggatgcagcgtgccaccgagggcaggaaagaagagctctttgccctctactctgctcatgatgtcactctgtcaccagttctcagtgccttgggcctttcagaagccaggttcccaaggtttgcagccaggttgatctttgagctttggcaagacagagaaaagcccagtgaacattccgtccggattctttacaatggcgtcgatgtcacattccacacctctttctgccaagaccaccacaagcgttctcccaagcccatgtgcccgcttgaaaacttggtccgctttgtgaaaagggacatgtttgtagccctgggtggcagtggtacaaattattatgatgcatgtcacagggaaggattctaaaaggtatgcagtacagcagtatagaatccatgccaatacagagcatagggaaaggtccacttctagttttgtctgttactaagggtagaagattattgctttttaaaggctaaatattgtttgtgggaaccacagatggttggggttgaacagtaagcacattgctgcaatgtggtacgtgaattgcttggtacaaaatggccagttcacagaggaatagaaggtactttatcatagccagacttcgcttagaatgccagaataatatagttcaagacctgaagttgccaatccaagtttgcactcttctggcctgccccatgttactatgtgatggaaccagcacacctcaaccaaaatttttttaatcttagacatttttaccttgtccttgttaagaatttcttgaagtgatttatctaaaataaaggttggcaaactttttctgtaaagggccagattgtaaatatttcagactgtgtggaccaaaaggccacatacagtctctgtcataactactcaactctgtttctgaagcaggaaagccaccacagacagtacataaaggaatatgtgtagctgggttcccaggccggacaaaacagatggtgaccagatttggcccctgggctgtagtttgctgacccctcatctaaaaaataggctatactacaattgcacttccagcactttgagaacgagttgaataccaagaattattcaatggttcctccagtaacttctgctagaaacacagaatttggtctgtatctgacactagaacaaaacttgagggtaaataaacattgaattagaatgaatcatagaaaactgattagaagaatacttgatgtttatgatgattgtggtacaagatagttttaagtatgttctaaatatttgtctgctgtagtctatttgctgtatatgctgaaatttttgtatgccatttagtatttttatagtttaggaaaatattttctaagaccagttttagatgactcttattcctgtagtaatattcaatttgctgtacctgcttggtggttagaaggaggctagaagatgaattcaggcactttcttccaataaaactaattatggctcattccctttgacaagctgtagaactggattcatttttaaaccattttcatcagtttcaaatggtaaattctgattgatttttaaatgcgtttttggaagaactttgctattagatagtttacagatctttataaggtgttttatatattagaagcaattataattacatctgtgatttctgaactaatggtgctaattcagagaaatggaaagtgaaagtgagattctctgttgtcatcggcattccaactttttctctttgtttttgtccagtgttgcatttgaatatgtctgtttctataaataaattttttaagaatacctatactata

SEQ ID NO: 17146 - DNA, 684 bp, Homo sapiens
  source 1..684: mol_type = unassigned DNA
cgggcgcgcagcgacggagctggggccggcctgggaccatgggcgtgagtgcaatctacggatcagtctctgatggtgggtcgttaacctcagtggggactccaagatttccatgaagaaaatcagttgtcttcattcaagaattggggtctggctcagaattcctgcagctggtgaaaatctgttttctagaagaggtttaattaatgcctgcagtctgtgagtaagagaaagggaggagagggagaaagagacatactactatctagaggtgggtgggagaaaggataggagaatgttcaaggtcctgaaaattcatagggggagattttggccccagaacctgtccctggacaaggttcctggttggtggataaggaagtgtgcccacattccagtgtaggggttaccagttaggagcaaagtcactgagataggaaaaatgaccccatgggaatctgaaatccatttgctgggcccatcattctggttttgagaaggccttgaaagccagctgagacttgggcttagcacggcaggagagcactgagctgtttgaagtttttgaatgaggtgtgtgcccttttggaaataatggcttgagcaagattggtctggggtttggcctgggaagccactttaccatggcttaatttataggccctgagctgtagccccagtccc

SEQ ID NO: 17147 - DNA, 478 bp, Homo sapiens
  source 1..478: mol_type = unassigned DNA
agcgacggagctggggccggcctgggaccatgggcgtgagtgcaatctacggatcagtctctgatggtgggtcgttaacctcagtggggactccaagatttccatgaagaaaatcagttgtcttcattcaagaattggggacatgttcccgatttgaggtgaaaccatgaagagaaaatagaatacttaataatgcttttccgcaaccgcttcttgctgctgctggccctggctgcgctgctggcctttgtgagcctcagcctgcagttcttccacctgatcccggtgtcgactcctaagaatggaatgagtagcaagagtcgaaagagaatcatgcccgaccctgtgacggagccccctgtgacagaccccgtttatgaagctcttttgtactgcaacatccccagcgtggccgagcgcagcatggaaggtcatgccccgcatcattttaagctggtctcagtgcatgtgttcattc

SEQ ID NO: 17148 - DNA, 797 bp, Homo sapiens
  source 1..797: mol_type = unassigned DNA
gacggagctggggccggcctgggaccatgggcgccctctcccgcacggcccccgcactcccgccgctggattccagccgagattcaagctcccgggatcccccttcccgggcggtcctgagccggctagtctccagtgagtgcaatctacggatcagtctctgatggtgggtcgttaacctcagtggggactccaagatttccatgaagaaaatcagttgtcttcattcaagaattggggtctggctcagaattcctgcagctggtgaaaatctgttttctagaagaggtttaattaatgcctgcagtctgacatgttcccgatttgaggtgaaaccatgaagagaaaatagaatacttaataatgcttttccgcaaccgcttcttgctgctgctggccctggctgcgctgctggcctttgtgagcctcagcctgcagttctaattggaaaagaggtcaaaagaaggtgggcatcagaagtttaaaaatattccagatggcaaatgaattgtaaaatctgaatcctttccaaaaagtgtgtccacctgatcccggtgtcgactcctaagaatggaatgagtagcaagagtcgaaagagaatcatgcccgaccctgtgacggagccccctgtgacagaccccgtttatgaagctcttttgtactgcaacatccccagcgtggccgagcgcagcatggaaggtcatgccccgcatcattttaagctggtctcagtgcatgtgttcattcgccacggagacaggtacccactgtatgtcattcccaaaacaaagcgacca

SEQ ID NO: 17149 - DNA, 479 bp, Homo sapiens
  source 1..479: mol_type = unassigned DNA
ggagctggggccggcctgggaccatgggcgtgagtgcaatctacggatcagtctctgatggtgggtcgttaacctcagtggggactccaagatttccatgaagaaaatcagttgtcttcattcaagaattggggtctggctcagaattcctgcagctggtgaaaatctgttttctagaagaggtttaattaatgcctgcagtctgccctgagctgtagccccagtcccctttgacatcacccattttccaatggaggaagcttccagggagacagggtaccacttggagagcccccatggccacttcagattgcagccattgccacttcatctcacctgaggtgctgaggggagagtctagtttacagggcatccttttgtcacctgctcgccacccttatgcccctgggtgtgaccagcttcctcagaaagagctgtaatcaatagcatattgattaaaaagcatattaagatgaaaa

SEQ ID NO: 17150 - DNA, 582 bp, Homo sapiens
  source 1..582: mol_type = unassigned DNA
gagtgcggcgcgggcctgggccggggcggttgccgttggggccgagcagcgcagaggttctaggcgggacatgttcccgatttgaggtgaaaccatgaagagaaaatagaatacttaataatgcttttccgcaaccgcttcttgctgctgctggccctggctgcgctgctggcctttgtgagcctcagcctgcagttctaattggaaaagaggtcaaaagaaggtgggcatcagaagtttaaaaatattccagatggcaaatgaattgtaaaatctgaatcctttccaaaaagtgtggtaagatattcagtagtttaattgtttataaattttcattaaaaattttccatcctttggttggagaggtaggatgttacagtcaaccctgattttattttgagaggctgacaggttctgagacatgaatgtgtgttacttgtgtttgtggcatttctcttgcatgagctggtttccacgtcactgaattggcctgtgtgttttgcttatataactcttctgaaagtaccttctgttttaggaaagccaattttcagccatacttttttaaggaaaattttgcag

SEQ ID NO: 17151 - DNA, 2390 bp, Homo sapiens
  source 1..2390: mol_type = unassigned DNA
gacatgttcccgatttgaggtgaaaccatgaagagaaaatagaatacttaataatgcttttccgcaaccgcttcttgctgctgctggccctggctgcgctgctggcctttgtgagcctcagcctgcagttcttccacctgatcccggtgtcgactcctaagaatggaatgagtagcaagagtcgaaagagaatcatgcccgaccctgtgacggagccccctgtgacagaccccgtttatgaagctcttttgtactgcaacatccccagcgtggccgagcgcagcatggaaggtcatgccccgcatcattttaagctggtctcagtgcatgtgttcattcgccacggagacaggtacccactgtatgtcattcccaaaacaaagcgaccagaaattgactgcactctggtggctaacaggaaaccgtatcacccaaaactggaagctttcattagtcacatgtcaaaaggatccggagcctctttcgaaagccccttgaactccttgcctctttacccaaatcacccattgtgtgagatgggagagctcacacagacagttggacttgctgttcatttgagaggaagctgctgaccacagagttcagcaaaagaatgggagtatggaggctcaaagtgtggcccctggagaagctgaatgagaagtagccctggatatggtgtagactcccacaaaccagagatcctgccctcagtgcctcagctttaggaagctgctccctgccttgctcctgggcagacagaagccagagagaccacaggtcgaagcaggaccacgcaaggacgcgcacgcctctttcccacgccgcagagcgatagaacccgcaacaggaaaacggaaaggccgtgcgccggaagaacaggatgcagggtgaagaaataatcagcctctgttcatcttattagagaaataaatacctgtgtatatgaagcaagcaaggccactgagtctttggggaaacagagcagggaggtgcccagaggcattttctgcagagaaggaagaaaagaataaacaagtcttctgccaaaaatgcctggaacttaaagcgatttcctcagcccaagatcaggctgtgtgcagacactgacagtgaacctgatcagttgctgctgctcccttgattaaaagcatgtagctttctctcttgtgaaattcacctctataaattccacctgcctagggattcaaactacatggaacaagtgcaattcctcagagtggcaactggcagagctcccaggaacaaggtagaactacacaatgtcccaggcatcagaggcatagattgcctgagtcagggagagtggtctctgtgacctgacaccccacccacagtgggaaggaaagctgtgggtgtgttatcaaggaggcctccacaaggggctggaaattcctggttttgtcttcctcttggaatgagacatttactctaagagaatcatggaaaagtacaaaccacagaatcataaaccacagagggagaagctacctcgtaggtcattcttatgctgggcccagataccccgataagcagatgttctcttctcaccacccctcctcgcctttgcttgcccacagccattgccaggactcttcctcaggcccagaaaggcagctgattcctggtaggagggcgctaagagtagaaagtaactaccattgtcaggtccagatctgttcccaatcccttctcactcctcctgcactctaaaaccacaccacagttccaactctttctgagtctggaatctttgagagtgccgtcatgtccttcttcctgtagccttcttgtccaccccagatggactgaccctcccacctacatccatgaggccagaaggcaacaaagacaagcgtggactctggctcccgccgaggtactctgtaccccgtggctctcggattttgcatctaccacatgccacaggcttgcgtccatccgacctccctagtttctcatccccacttgaacctgatgactgattcgccctcctggctacgctgagtaagccacccacttgccaaacctcagacctggtgttgacgcagtaagaaggcatgaggcccatgttgccagaacattcctaattgtttcattgtttccttgtaggatgtggtttcaagtcccatctttgtctcttttctcctggccaggttgcccttggtcaatattccttcattcactccagccactcagcaccgtgattaagaaaacaggatgtgagattagatgatccaggctctgccatgaactaactagctgtgaggctttagagaagtgtcttaacctctctgagcatccatttctttctctatagcattaggaatattaatagtacctacctcacagcttttttgttgtgataa

SEQ ID NO: 17152 - DNA, 569 bp, Homo sapiens
  source 1..569: mol_type = unassigned DNA
tttctgttgcagtttgaatgatggaaagaagggcaggtggctcgaattggaaaagaggtcaaaagaaggtgggcatcagaagtttaaaaatattccagatggcaaatgaattgtaaaatctgaatcctttccaaaaagtgtgtccacctgatcccggtgtcgactcctaagaatggaatgagtagcaagagtcgaaagagaatcatgcccgaccctgtgacggagccccctgtgacagaccccgtttatgaagctcttttgtactgcaacatccccagcgtggccgagcgcagcatggaaggtcatgccccgcatcattttaagctggtctcagtgcatgtgttcattcgccacggagacaggtacccactgtatgtcattcccaaaacaaagcgaccagaaattgactgcactctggtggctaacaggaaaccgtatcacccaaaactggaagctttcattagtcacatgtcaaaaggatccggagcctctttcgaaagccccttgaactccttgcctctttacccaaatcacccattgtgtgagatgggagagctcacacagacagg

SEQ ID NO: 17153 - DNA, 1773 bp, Homo sapiens
  source 1..1773: mol_type = unassigned DNA
aaaattttgcagggtaaattagcctgtctgggtctgagctctttattcttggatacgttggagatcggaaagatattaagatatggacgttcttactgctcttcttttagtccacctgatcccggtgtcgactcctaagaatggaatgagtagcaagagtcgaaagagaatcatgcccgaccctgtgacggagccccctgtgacagaccccgtttatgaagctcttttgtactgcaacatccccagcgtggccgagcgcagcatggaaggtcatgccccgcatcattttaagctggtctcagtgcatgtgttcattcgccacggagacaggtacccactgtatgtcattcccaaaacaaagcgaccagaaattgactgcactctggtggctaacaggaaaccgtatcacccaaaactggaagctttcattagtcacatgtcaaaaggatccggagcctctttcgaaagccccttgaactccttgcctctttacccaaatcacccattgtgtgagatgggagagctcacacagacaggagttgtgcagcatttgcagaacggtcagctgctgagggatatctatctaaagaaacacaaactcctgcccaatgattggtctgcagaccagctctatttagagaccactgggaaaagccggaccctacaaagtgggctggccttgctttatggctttctcccagattttgactggaagaagatttatttcaggcaccagccaagtgcgctgttctgctctggaagctgctattgcccggtaagaaaccagtatctggaaaaggagcagcgtcgtcagtacctcctacgtttgaaaaacagccagctggagaagacctacggggagatggccaagatcgtggatgtccccaccaagcagcttagagctgccaaccccatagactccatgctctgccacttctgccacaatgtcagctttccctgtaccagaaatggctgtgttgacatggagcacttcaaggtaattaagacccatcagatcgaggatgaaagggaaagacgggagaagaaattgtacttcgggtattctctcctgggtgcccaccccatcctgaaccaaaccatcggccggatgcagcgtgccaccgagggcaggaaagaagagctctttgccctctactctgctcatgatgtcactctgtcaccagttctcagtgccttgggcctttcagaagccaggttcccaaggtttgcagccaggttgatctttgagctttggcaagacagagaaaagcccagtgaacattccgtccggattctttacaatggcgtcgatgtcacattccacacctctttctgccaagaccaccacaagcgttctcccaagcccatgtgcccgcttgaaaacttggtccgctttgtgaaaagggacatgtttgtagccctgggtggcagtggtacaaattattatgatgcatgtcacagggaaggattctaaaaggtatgcagtacagcagtatagaatccatgccaatacagagcatagggaaaggtccacttctagttttgtctgttactaagggtagaagattattgctttttaaaggctaaatattgtttgtgggaaccacagatggttggggttgaacagtaagcacattgctgcaatgtggtacgtgaattgcttggtacaaaatggccagttcacagaggaatagaaggtactttatcatagccagacttcgcttagaatgccagaataatatagttcaagacctgaagttgccaatccaagtt

SEQ ID NO: 17154 - DNA, 4158 bp, Homo sapiens
  source 1..4158: mol_type = unassigned DNA
ggaaagccagtccaagttccaaaactgaggaacttggatccgatgttcaagggcagggcgcatccagcatgggagaaagatgtaggttgggaggctaggccagcctgtctattcatattttttctgcctgcttatattccagctgcattggcagcttattagattgtgcccacccagattgagggtgggtctgcctttcccagcccactgactcaaatgtaaatctcctttggcagcacactcatagacacaccaaggagcaatactttgtgttcttcaacccaatcaagtggacacccagtattaaccatcacatctggtaacttcccaatatttcctttatatccatgtcttcactgcatcgtttccatacctgcaccccccaaccagcaaccagtgagtgcagggggccccgtgcctgagaaggctattttctccttatggtccatgtgctttctccccaccttttcttatttaatgtctgactgtcccccgcaactggattgtaaaccccgtgagggcagagaccttgtccattttattctctgaagaatccccagcatgtgctccatacatgttggatggccagatggacaaatgcataaataccgagcttagtgggtgagcaggtccgggcttacaggcttcaggaccttaggtaactcccttgacctgcctctgcctaaggtctactgtctggctgatggttactcttcctaggttgagatccaaagctgggaaaagcagagagaggatcagtttggcttgcatcctagctatagctatgggaatgtttactagtaatacatacagagtcatccactgtgcattcgggagatggggtggggaagggtggtggggagggagcctgcgtgggatagcatctggttgttttactcatgattctaagaaatttgttggttgcttttgagagggagggtcccaaggagatgctttagaggtcatgttctctgccatttctttgaaattgagaccttgtcggcatctttacacatgagggttatagatgtgtggacaggatgaaagtgatcgtagatgagatgagcagagaacaccgccataaaagagaggcttatttccaaaggtagcttacggaaatttgccctcctacttggtaatcacaccacagagaaattgcatgcccgttggtacagagttaatcatcagtaaaagatatctcgtatcctgttattcgtgttggtcctggtggcacagtggccccaggacactcatttagattcatgggttttcccacctacataatgaaactcgttatccttccatctatttatctgcccactattctttctgatgcccccacagcctctttctcttgccctgtgacatctgagctgctgtcatctgcctgaggtcagcagagtttctaattgttccacaggacagctagaggcacggggggcctgggcaaagcctgctgggaggagcagtgtcctggagcagtgtctgcccccagcccctgggtctgtccctcagctccctttatctaggtgatcggggcaagcctcaagagctgatgtggtgagtagcacagcaccagggcagaggcggcctgcagcccggggtctgctcctccaggccccttcccagccttcctcctggagcccggcctgcacatcgaccctggtgaggccaacctgaccaggccttacgggacccaaggcgtatcctgagccagcttgctgacccccatctgccatgtttggctgtgtttcacggcctcccctctgctcctctcctcttcccctccacacagccagcttcatcagtttttcaggcccagctaggtgtctcctctgggaagcctgtttggatgcccctcaccccagactggttcggcaaccctcagtgctccacatgaggagtcaatgagatatttcatcaaaagcatggagcacagcgtctgccccagttcagcagtccacctgatcccggtgtcgactcctaagaatggaatgagtagcaagagtcgaaagagaatcatgcccgaccctgtgacggagccccctgtgacagaccccgtttatgaagctcttttgtactgcaacatccccagcgtggccgagcgcagcatggaaggtcatgccccgcatcattttaagctggtctcagtgcatgtgttcattcgccacggagacaggtacccactgtatgtcattcccaaaacaaagcgaccagaaattgactgcactctggtggctaacaggaaaccgtatcacccaaaactggaagctttcattagtcacatgtcaaaaggatccggagcctctttcgaaagccccttgaactccttgcctctttacccaaatcacccattgtgtgagatgggagagctcacacagacaggagttgtgcagcatttgcagaacggtcagctgctgagggatatctatctaaagaaacacaaactcctgcccaatgattggtctgcagaccagctctatttagagaccactgggaaaagccggaccctacaaagtgggctggccttgctttatggctttctcccagattttgactggaagaagatttatttcaggcaccagccaagtgcgctgttctgctctggaagctgctattgcccggtaagaaaccagtatctggaaaaggagcagcgtcgtcagtacctcctacgtttgaaaaacagccagctggagaagacctacggggagatggccaagatcgtggatgtccccaccaagcagcttagagctgccaaccccatagactccatgctctgccacttctgccacaatgtcagctttccctgtaccagaaatggctgtgttgacatggagcacttcaaggtaattaagacccatcagatcgaggatgaaagggaaagacgggagaagaaattgtacttcgggtattctctcctgggtgcccaccccatcctgaaccaaaccatcggccggatgcagcgtgccaccgagggcaggaaagaagagctctttgccctctactctgctcatgatgtcactctgtcaccagttctcagtgccttgggcctttcagaagccaggttcccaaggtttgcagccaggttgatctttgagctttggcaagacagagaaaagcccagtgaacattccgtccggattctttacaatggcgtcgatgtcacattccacacctctttctgccaagaccaccacaagcgttctcccaagcccatgtgcccgcttgaaaacttggtccgctttgtgaaaagggacatgtttgtagccctgggtggcagtggtacaaattattatgatgcatgtcacagggaaggattctaaaaggtatgcagtacagcagtatagaatccatgccaatacagagcatagggaaaggtccacttctagttttgtctgttactaagggtagaagattattgctttttaaaggctaaatattgtttgtgggaaccacagatggttggggttgaacagtaagcacattgctgcaatgtggtacgtgaattgcttggtacaaaatggccagttcacagaggaatagaaggtactttatcatagccagacttcgcttagaatgccagaataatatagttcaagacctgaagttgccaatccaagtttgcactcttctggcctgccccatgttactatgtgatggaaccagcacacctcaaccaaaatttttttaatcttagacatttttaccttgtccttgttaagaatttcttgaagtgatttatctaaaataaaggttggcaaactttttctgtaaagggccagattgtaaatatttcagactgtgtggaccaaaaggccacatacagtctctgtcataactactcaactctgtttctgaagcaggaaagccaccacagacagtacataaaggaatatgtgtagctgggttcccaggccggacaaaacagatggtgaccagatttggcccctgggctgtagtttgctgacccctcatctaaaaaataggctatactacaattgcacttccagcactttgagaacgagttgaataccaagaattattcaatggttcctccagtaacttctgctagaaacacagaatttggtctgtatctgacactagaacaaaacttgagggtaaataaacattgaattagaatgaatcatagaaaactga

SEQ ID NO: 17155 - DNA, 289 bp, Homo sapiens
  source 1..289: mol_type = unassigned DNA
aaaaggatccggagcctctttcgaaagccccttgaactccttgcctctttacccaaatcacccattgtgtgagatgggagagctcacacagacaggagcataatcaacatactgttctacacttggcttttttccagtattctatctgggtatcaggagattgttccatatcatacagagaatgcatgtgtgttgacgagtctgtaaagcccccaggatcaggcagaacgtacccagcaggagttgtgcagcatttgcagaacggtcagctgctgagggatatctatct

SEQ ID NO: 17156 - DNA, 2152 bp, Homo sapiens
  source 1..2152: mol_type = unassigned DNA
ttgtagagatggggtttcatcatgttggccaggctggtcttgaactcctgacctcaagtaatccacccgcctcggcctcccaaagtgctgggtttacaggcgtgagccaccgcgccctgcttgaatcctgatatcttagcattggagagagattttccatgttattagtcttcaaaaatattttaaatgtttgtataacattccatcctatgagcatgtcacaacttatttaatcaattccatgtggctggacactaaggttaatttccggtttgttaaatattactgtgatgagcaaccttttaatgtctacgtccacatctgatgatttccttaagataattatcagaagggtgatatttctgagttaaaaagtatgagttcttaaggctcttgatacagattgccaaactgctttccagaaagtttctcccagtttacactcccacaacagcttcccagagttggcattaaacactgaaagaagtgtctcctgtgaggcttcactagaaagctggctgtcccatgggcaggagggagctgtgagatgttgtgagcatggtcccgcatgctcagaacgaggcctggaagaaccctctggctgcaggatggagacagtgctggagggggcaggtgggggaccactgtgggggctgacaccataatgcagggagagttgcctgagagtcgcacaagggactagagagtcgcacgagggattagagattttgtggggagcgctggtttctggttggaacggttaggttttgagactggcctgtggagcgctttgagccgtggtgggggcgctgagggtcagctgaagggttatctttttttttttttttgagatggagtcttgctctgttgcccaggctggagtgcaatggcatgatctcggttcactgcaacctccgcctcccgggttcaagtgattcttccacctcagcctcccgaggagctgggattacaggcacacgacaccatgcccggctactttttgtatttttgtagagactgggtttcaccatgttggccaggttggtcttgaactcctgacctcctcagatgatccgcccacctcggcctcccaaagtgctgggattacaggcgtgagccaccatgcctggcccagttgaagggttgtacctgttagctgctcttgctgccccagggcaaggccggatatggacttgggctactggaggagaaaagccattttggagcaaacaaactggttaagagacagcagtggcgtgtgggagaaaagagcttgtttgggggccttggctctaacacttagctttctgtatcctccgggcctcagtttcttcattcacaaaggagggatgaaaagctgagcagagaaggggagttgcagggaggccctgcaggggcgatgtggcagccctggggagcagcaggctggacctgggttttgaccctggggcatgggacttctcagcttttctctggaagaggagccaggaacccctttccggggagctgaccacagctctgtcctggcaggtacaatgcccaggagtactacgatcgcattcctgagcttcggcaggtcattgagcagctgagcagtggcttcttctcccccaaacagcccgacctgttcaaggacattgtcaatatgctcatgcaccatgaccggtttaaagtcttcgcagattatgaagactacattaaatgccaggagaaagtcagcgccttgtacaagaacccaagagagtggacgcggatggtgatccggaacatagccacctctggcaagttctccagtgaccgcaccattgcccagtatgcccgggagatctggggtgtggagccttcccgccagcgcctgccagccccggatgaggccatctgagcctccagaccagaccccaaaccagcccttgagtctgtcacactctcttgggccagccccagcacctcatgcagagggtggggtactggagttagatctctaagcccctcctggaaccctcattttccccactctcaatgtcccagtgtccagcgtgactaaggacacgggcccccttccgtcctcgggctcccggtcccctcctatttatggggtctgaccaactgcacccactccctaataaattcattctccttgggagcctcctta

SEQ ID NO: 17157 - DNA, 2611 bp, Homo sapiens
  source 1..2611: mol_type = unassigned DNA
actccttggctggaggcagtgctgaggccgccgtcccctctaccatcagtccagtccggcccgccctcctgcagccatgtcccggcccctgtcagaccaagagaaaagaaagcaaatcagtgtgcgtggcctggccggcgtggagaacgtgactgagctgaaaaagaacttcaaccggcacctgcatttcacactcgtaaaggaccgcaatgtggccaccccacgagactactactttgctctggcccataccgtgcgcgaccacctcgtggggcgctggatccgcacgcagcagcactactatgagaaggaccccaagaagatctccgggggctggcagatggaggaggccgatgactggcttcgctacggcaacccctgggagaaggcccggcccgagttcacgctacctgtgcacttctacggccatgtggagcacaccagccagggtgccaagtgggtggacacacaggtggtactggccatgccctacgatacgcccgtgcctggctatcgcaacaatgttgtcaacaccatgcgcctctggtctgccaaggctcccaatgacttcaacctcaaggacttcaatgtcggtggctacatccaggctgtgttggaccgaaacctggcggagaacatctctcgtgtcctgtaccccaatgataatttcttcgaagggaaggagctgcggctgaagcaggagtatttcgtggtggctgccaccctccaggacatcatccgtcgcttcaagtcttccaagttcggctgccgtgatcccgtgcgcacgaacttcgatgccttcccagataaggtggccatccagctcaatgacacccacccctccctggccatccccgagctgatgaggatcctggtggacctggaacggatggactgggacaaggcgtgggatgtgacagtgaggacctgtgcctacaccaaccacacggtgctgcccgaggccctggagcgctggccggtgcacctcttggagacgctgctgccgcggcacctccagatcatctacgagatcaaccagcgcttcctcaaccgggtggcggccgcattcccaggggacgtagaccggctgcggcgcatgtcgctggtggaggagggcgcagtgaagcgcatcaacatggcacacctgtgcatcgcggggtcgcacgccgtcaacggcgtggcgcgcatccactccgagatcctcaagaagaccatcttcaaagacttctatgagctggagcctcataagttccagaataagaccaacggcatcacccctcggcgctggctggttctgtgtaaccccgggctggcagaggtcattgctgagcgcatcggggaggacttcatctctgacctggaccagctgcgcaaactgctctcctttgtggatgatgaagctttcattcgggatgtggccaaagtgaagcaggaaaacaagttgaagtttgctgcctacctagagagggaatacaaagtccacatcaaccccaactcactcttcgacatccaggtgaagcggattcacgaatataaacgacagctcctcaactgcctccatgtcatcaccctgtacaaccgcatcaagagggagcccaataagttttttgtgcctcggactgtgatgattggagggaaggctgcacctgggtaccacatggccaagatgatcatcagactcgtcacagccatcggggatgtggtcaaccatgacccggcagtgggtgaccgcctccgtgtcatcttcctggagaactaccgagtctcactggccgagaaagtgatcccagctgcagacctctctgagcagatctccactgcgggcactgaagcctcaggcaccggcaacatgaagttcatgctcaacggggctctgaccattggcaccatggacggggccaatgtggagatggcagaagaggcgggagaggaaaacttcttcatctttggcatgcgggtggaggatgtggataagcttgaccaaagagggtacaatgcccaggagtactacgatcgcattcctgagcttcggcaggtcattgagcagctgagcagtggcttcttctcccccaaacagcccgacctgttcaaggacattgtcaatatgctcatgcaccatgaccggtttaaagtcttcgcagattatgaagactacattaaatgccaggagaaagtcagcgccttgtacaagaacccaagagagtggacgcggatggtgatccggaacatagccacctctggcaagttctccagtgaccgcaccattgcccagtatgcccgggagatctggggtgtggagccttcccgccagcgcctgccagccccggatgaggccatctgagcctccagaccagaccccaaaccagcccttgagtctgtcacactctcttgggccagccccagcacctcatgcagagggtggggtactggagttagatctctaagcccctcctggaaccctcattttccccactctcaatgtcccagtgtccagcgtgactaaggacacgggcccccttccgtcctcgggctcccggtcccctcctatttatggggtctgaccaactgcacccactccctaataaattcattctccttgggagcctcctta

SEQ ID NO: 17158 - DNA, 3198 bp, Homo sapiens
  source 1..3198: mol_type = unassigned DNA
ccatcctggttcagccactgacagacagctccccaatccagcactctgcctgctccttcttgtatccaaccctccaaaaggcagggacaagggacagaagaccatgtgcaaggcctggaggaagtgggtcagcacaggcctgtgaacaagccaggccagtcttggcggcccaagtggagctcacctctccctcccctctcctctcctccccttgccctcaaaatagctccctgagctgccaggccaagaccctcccattgcaggggaggcggggcgtgctgcccagagccaggctttaaatccccttgaggctggggagctccactccttggctggaggcagtgctgaggccgccgtcccctctaccatcagtccagtccggcccgccctcctgcagccatgtcccggcccctgtcagaccaagagaaaagaaagcaaatcagtgtgcgtggcctggccggcgtggagaacgtgactgagctgaaaaagaacttcaaccggcacctgcatttcacactcgtaaaggaccgcaatgtggccaccccacgagactactactttgctctggcccataccgtgcgcgaccacctcgtggggcgctggatccgcacgcagcagcactactatgagaaggaccccaagaggatctactacctgtctttagagttctatatgggacggacgctacagaacaccatggtgaacctggccttagagaatgcctgtgacgaggccacctaccagctgggcctggacatggaggagctggaggaaattgaggaggatgcggggctgggcaacgggggcctgggccggctggcagcctgctttcttgactccatggcaacactgggcctggccgcctatggctacgggattcgctatgagtttgggatttttaaccagaagatctccgggggctggcagatggaggaggccgatgactggcttcgctacggcaacccctgggagaaggcccggcccgagttcacgctacctgtgcacttctacggccatgtggagcacaccagccagggtgccaagtgggtggacacacaggtggtactggccatgccctacgatacgcccgtgcctggctatcgcaacaatgttgtcaacaccatgcgcctctggtctgccaaggctcccaatgacttcaacctcaaggacttcaatgtcggtggctacatccaggctgtgttggaccgaaacctggcggagaacatctctcgtgtcctgtaccccaatgataatttcttcgaagggaaggagctgcggctgaagcaggagtatttcgtggtggctgccaccctccaggacatcatccgtcgcttcaagtcttccaagttcggctgccgtgatcccgtgcgcacgaacttcgatgccttcccagataaggtggccatccagctcaatgacacccacccctccctggccatccccgagctgatgaggatcctggtggacctggaacggatggactgggacaaggcgtgggatgtgacagtgaggacctgtgcctacaccaaccacacggtgctgcccgaggccctggagcgctggccggtgcacctcttggagacgctgctgccgcggcacctccagatcatctacgagatcaaccagcgcttcctcaaccgggtggcggccgcattcccaggggacgtagaccggctgcggcgcatgtcgctggtggaggagggcgcagtgaagcgcatcaacatggcacacctgtgcatcgcggggtcgcacgccgtcaacggcgtggcgcgcatccactccgagatcctcaagaagaccatcttcaaagacttctatgagctggagcctcataagttccagaataagaccaacggcatcacccctcggcgctggctggttctgtgtaaccccgggctggcagaggtcattgctgagcgcatcggggaggacttcatctctgacctggaccagctgcgcaaactgctctcctttgtggatgatgaagctttcattcgggatgtggccaaagtgaagcaggaaaacaagttgaagtttgctgcctacctagagagggaatacaaagtccacatcaaccccaactcactcttcgacatccaggtgaagcggattcacgaatataaacgacagctcctcaactgcctccatgtcatcaccctgtacaaccgcatcaagagggagcccaataagttttttgtgcctcggactgtgatgattggagggaaggctgcacctgggtaccacatggccaagatgatcatcagactcgtcacagccatcggggatgtggtcaaccatgacccggcagtgggtgaccgcctccgtgtcatcttcctggagaactaccgagtctcactggccgagaaagtgatcccagctgcagacctctctgagcagatctccactgcgggcactgaagcctcaggcaccggcaacatgaagttcatgctcaacggggctctgaccattggcaccatggacggggccaatgtggagatggcagaagaggcgggagaggaaaacttcttcatctttggcatgcgggtggaggatgtggataagcttgaccaaagagggtacaatgcccaggagtactacgatcgcattcctgagcttcggcaggtcattgagcagctgagcagtggcttcttctcccccaaacagcccgacctgttcaaggacattgtcaatatgctcatgcaccatgaccggtttaaagtcttcgcagattatgaagactacattaaatgccaggagaaagtcagcgccttgtacaagaacccaagagagtggacgcggatggtgatccggaacatagccacctctggcaagttctccagtgaccgcaccattgcccagtatgcccgggagatctggggtgtggagccttcccgccagcgcctgccagccccggatgaggccatctgagcctccagaccagaccccaaaccagcccttgagtctgtcacactctcttgggccagccccagcacctcatgcagagggtggggtactggagttagatctctaagcccctcctggaaccctcattttccccactctcaatgtcccagtgtccagcgtgactaaggacacgggcccccttccgtcctcgggctcccggtcccctcctatttatggggtctgaccaactgcacccactccctaataaattcattctccttgggagcctcctta

SEQ ID NO: 17159 - DNA, 470 bp, Homo sapiens
  source 1..470: mol_type = unassigned DNA
ccccaactcactcttcgacatccaggtgaagcggattcacgaatataaacgacagctcctcaactgcctccatgtcatcaccctgtacaaccgcatcaagagggagcccaataagttttttgtgcctcggactgtgatgattggagggaaggctgcacctgggtaccacatggccaagatgatcatcagactcgtcacagccatcggggatgtggtcaaccatgacccggcagtgggtgaccgcctccgtgtcatcttcctggagaactaccgagtctcactggccgagaaaggtgggtgctgccaacagggaccctagggaggctctgactagttcagtctcaggaagaggtatcagtcgtctcttcctgggatacttgtacttgaaagaagaatctggagagggcaatgcttaaaccatgaggaggccaggcgcagtggcccatgcctgtaatcccagcactttggga

SEQ ID NO: 17160 - DNA, 328 bp, Homo sapiens
  source 1..328: mol_type = unassigned DNA
ctccaaatggcatagggcagtgaccatagcatggaatgtggtttggagcccagactgacccctccccctaccccaggtggccatccagctcaatgacacccacccctccctggccatccccgagctgatgaggatcctggtggacctggaacggatggactgggacaaggcgtgggatgtgacagtgaggacctgtgcctacaccaaccacacggtgctgcccgaggccctggagcgctggccggtgcacctcttggagacgctgctgccgcggcacctccagatcatctacgagatcaaccagcgcttcctcaaccgggtggcggcc

SEQ ID NO: 17161 - DNA, 2865 bp, Homo sapiens
  source 1..2865: mol_type = unassigned DNA
tgtcaaccagcactttttaagatgaactgtaaccaactagcttctcacatgcttctcatatggtaagagttaattttagctcatgaaacttttggttctgtgaaacacctgctgaacagactcctgggaagggggtctgtgggagtcgacatttatacaaccttccaggtgattctgagcttatcagagctggagaggcacttgctacccaggggcttggtgtggaacgtgagatgccaaagccaaattcaggcctctcagctcaaggcaccctgaagcacagctagtcactccagcacatgttgaagctgtgcatgtttacttcatgttgaactgttcatgttttatttttggaacactggggattggcaaaaaaaaaaaaaacccatgtgaataaagccttctagggcaccactgtgccgattgtgaaccacacgtggacaaaacaagccgcgcttgatagcaactacctacatgaccagcactcccctggatgctgatgctgccatgcgagacgggacgttggcgcagcagcatgccagccacccattgcttctcctgcttgccaactcaaccgtgctgctccctcagacaccatcacttgcgcctcccaagcaatggaagccctggcgatgctctcatgagcccctcactccagcagagcccctgaccaagccaggggagcaggacttttccagccaaggacacaacggactggtggctgtgagtacctccccacttgatcccacttcactggccctgggcgtgtggctctcagcagcctgggaaggagtgtgaagaagcaggtgggataagggccttgagagagaaggaaaaggcagcctagtcgatgctctctgctctccagtgctgactgggggctgggtcgaatgctcatctgcagccagctgtggacatcacaggctcctttcctccccttcccctaatggggaaaggtggtttccccatggcctgtgagggagtcagggagcttccagaaacaagctgacaaggtggggaagcatgtaaccaacacagcatgagagcaggcagcgtacctgcagagactgggggtgaacaccgccgtcttcgagaggcgccatgtgatcgggggtgcagctgtcactgaggagatcatcccagggtttaagttctcccgcgcgtcctacctgctcagcctgctgaggccgcagatttacactgatctggagctgaagaaacatgggctgaggcttcatcttcgaaacccctactccttcacccccatgctggaagagggtgcaggcagcaaggtgcccaggtgccttctgctgggcacagacatggcagaaaaccagaagcagatcgcccagttctcccagaaggatgcccaggtctttcccaaatatgaggagttcatgcatcgcttggcattagccattgaccctctgctggatgcggcccccgtggacatggcggccttccagcatggctccttgctgcaaaggatgaggtcgctctccaccctcaagcccctgctgaaggcaggccgcatcctgggagcccagcttccccgatattatgaggtcctcacagctcccattaccaaggtgctggatcagtggttcgagtctgagcctttaaaagccactctagccacagatgcagtgattggagccatgacaagtccccacactccggggagtgggtatgtgctgctgcaccatgtgatggggggcctggagggaatgcagggggcctggggctacgtccaggggggcatgggtgccctctctgatgcgatcgcaagctcagccaccacacatggagcaagcatcttcactgaaaagacagtggcgaaggtgcaggtgaacagtgaaggctgtgttcaaggagttgtgctggaagatggcacagaggtgagaagcaaaatggtgctgtccaacacatcaccgcagatcaccttcctgaagctgacgccacaggagtggcttcctgaggagttcctggagagaatctctcagctggacacccggtcgcctgtcaccaagatcaatggtaagaggcacaccacattgcagcactgtctcctttgacccatctgagtgagaaacctccaggctgggggcagctgaactcagtcatcatctccattcccggacctccagcctgtgtccccctgcagcctggtcagaagtggccgtagacaggctgcccagcttcctggcggcccccaatgctcccaggggccagccgctgccccatcaccaatgctccatccacctgaactgtgaagacaccctcctccttcatcaggcctttgaagatgccatggatggcctgccttcccacagtgtttgattgcatcgaggtctatgcccctggcttcaaggactctgtggttggcagagacatcctcacaccaccagatttggagagaatcttcgggcttcctggagggaacatattccactgcgccatgtccctggaccagctctacttcgcccgccccgtgcccctgcattctggctaccgctgccctctccagggcctgtatctctgtggaagtggggctcatcctggaggaggtgtgatgggagctgctgggcgaaatgcagcacatgtggcctttagggacctcaagagcatgtgaccctgaaccagctctgacccaggaagaagactccacccctgaattccaagtgctccattggatcagcttcccaggaagttcagcttcgggttagtacataaggccaccacaatgctcaagaaattattttagaaaaaacgtacgagttacatttagtgcaagttgaccttatgcccatgcctccatacatggactggttctgttttattaaaactaatatttcatacagatta

SEQ ID NO: 17162 - DNA, 2028 bp, Homo sapiens
  source 1..2028: mol_type = unassigned DNA
ccaatcgctagcaaactccctgcctagcaaggcccagcctggggcagaaatggctgcaagtggccgaggtctctgcaaggctgtggccgcctctcccttcccggcgtggagacgagataacacggaagccaggggaggtctgaagcctgagtatgatgcggtggtgataggagcaggacacaacggactggtggctgcagcgtacctgcagagactgggggtgaacaccgccgtcttcgagaggcgccatgtgatcgggggtgcagctgtcactgaggagatcatcccagggtttaagttctcccgcgcgtcctacctgctcagcctgctgaggccgcagatttacactgatctggagctgaagaaacatgggctgaggcttcatcttcgaaacccctactccttcacccccatgctggaagagggtgcaggcagcaaggtgcccaggtgccttctgctgggcacagacatggcagaaaaccagaagcagatcgcccagttctcccagaaggatgcccaggtctttcccaaatatgaggagttcatgcatcgcttggcattagccattgaccctctgctggatgcggcccccgtggacatggcggccttccagcatggctccttgctgcaaaggatgaggtcgctctccaccctcaagcccctgctgaaggcaggccgcatcctgggagcccagcttccccgatattatgaggtcctcacagctcccattaccaaggtgctggatcagtggttcgagtctgagcctttaaaagccactctagccacagatgcagtgattggagccatgacaagtccccacactccggggagtgggtatgtgctgctgcaccatgtgatggggggcctggagggaatgcagggggcctggggctacgtccaggggggcatgggtgccctctctgatgcgatcgcaagctcagccaccacacatggagcaagcatcttcactgaaaagacagtggcgaaggtgcaggtgaacagtgaaggctgtgttcaaggagttgtgctggaagatggcacagaggtgagaagcaaaatggtgctgtccaacacatcaccgcagatcaccttcctgaagctgacgccacaggagtggcttcctgaggagttcctggagagaatctctcagctggacacccggtcgcctgtcaccaagatcaatgtggccgtagacaggctgcccagcttcctggcggcccccaatgctcccaggggccagccgctgccccatcaccaatgctccatccacctgaactgtgaagacaccctcctccttcatcaggcctttgaagatgccatggatggcctgccttcccacaggcctgtgattgagctctgcatcccttcctcgctggaccccaccctggctccccctggctgccatgtagtctccctcttcactcagtacatgccctatacgctggctggaggcaaggcctgggacgagcaggagagagacgcttatgcagacagagtgtttgattgcatcgaggtctatgcccctggcttcaaggactctgtggttggcagagacatcctcacaccaccagatttggagagaatcttcgggcttcctggagggaacatattccactgcgccatgtccctggaccagctctacttcgcccgccccgtgcccctgcattctggctaccgctgccctctccagggcctgtatctctgtggaagtggggctcatcctggaggaggtgtgatgggagctgctgggcgaaatgcagcacatgtggcctttagggacctcaagagcatgtgaccctgaaccagctctgacccaggaagaagactccacccctgaattccaagtgctccattggatcagcttcccaggaagttcagcttcgggttagtacataaggccaccacaatgctcaagaaattattttagaaaaaacgtacgagttacatttagtgcaagttgaccttatgcccatgcctccatacatggactggttctgttttattaaaactaatatttcatacagatta

SEQ ID NO: 17163 - DNA, 410 bp, Homo sapiens
  source 1..410: mol_type = unassigned DNA
cctcttcactcagtacatgccctatacgctggctggaggcaaggcctgggacgagcaggagagagacgcttatgcagacagagcacagctgactgcacgaaccaaaggagacgcatgagccagagagacaaggaaggctttcaaaggaagggatggtcaagctgggtttccaaggatgactaggagctggccaggcagcaaagggcattccaagcaagagaaacagcttgatcaggccaggcgtgggggctcatgcctgtaattccagcacttcgggaggccgaggcaggcggatcacccgagtgtttgattgcatcgaggtctatgcccctggcttcaaggactctgtggttggcagagacatcctcacaccaccagatttggagagaatcttcgggcttcctggaggg

SEQ ID NO: 17164 - DNA, 501 bp, Homo sapiens
  source 1..501: mol_type = unassigned DNA
agccaggggaggtctgaagcctgagtatgatgcggtggtgataggagcaggcaggcacctgggattccggtgctggctctgctgtgtggcctggggcaaatgcttgccttctctgggcttggatcttcccatggagaatgacaggaagactagagggccccaaatgcatgattgccaactgggtctatacagagataatgacgggaccgaaagcagacggcactcaacatgcagctttgagggcatgccttcattttcatatgtactagagcagttgcgagctggtagatactcaacactcacctctccagggaaaaatgtgtgatgtatgtgtgtgtgtacatgtatatatatgtatatatacacacatatatgtgtatatatatgtatatgtgttacgtacatatatatacacatatacacatgcttattttaaatattgaaataaaagatacactgcacacaattttacaaataaagatacaatactctcaatttaaa

SEQ ID NO: 17165 - DNA, 279 bp, Homo sapiens
  source 1..279: mol_type = unassigned DNA
gcaaggcccagcctggggcagaaatggctgcaagtggccgaggtctctgcaaggctgtggccgcctctcccttcccggcgtggagacgagataacacggaagccaggggaggtctgaagcctgagtatgatgcggtggtgataggagcagagggccccaaatgcatgattgccaactgggtctatacagagataatgacgggaccgaaagcagacggcactcaacatgcagctttgagggcatgccttcattttcatatgtactagagcagttgcgagc

SEQ ID NO: 17166 - DNA, 584 bp, Homo sapiens
  source 1..584: mol_type = unassigned DNA
ctgccattttttgatgggggttggtgagggcgtctgacctgaaggaggaggccagatgcagctatttataaagtttttagggaatagagatctcaagagaagattgcatgtccttgctgtccccctggccgccagtggtcactgagccatcttctccccatttcccaggtatgatcgggtacggcatggccaagggtgctgttcaccagctctgccagagcctggctgggaagaacagcggcatgccgcccggggcagccgccatcgctgtgctcccggttaccctggataccccgatgaacaggaaatcaatgcctgaggctgacttcagctcctggacacccttagaattcctagttgagtgagtattacagacatgtccatgactgagcagcttccagcccctattctctgcctgctgtggtccagaggacaagtctgtgttccctgagatcgtcaatccgggtggtcttgggaggtctctgggactctgaggatgcattgcacatcagacggaatctcagagtagctggacttggagacaggcagcacagtggcagaatgggtagtgccgacatgaatcc

SEQ ID NO: 17167 - DNA, 781 bp, Homo sapiens
  source 1..781: mol_type = unassigned DNA
gagcgtggcagcgcgctaggcggcagcagcgggcgcggagcggggcgcggccgccgcgcgttccctcttggcggggttggccggccggggcggggcgcggcgctccggctcgaggcattcggagctgcgggagccgggctggcaggagcaggatggcggcggcggcggctgcaggcgaggcgcgccgggtgctggtgtacggcggcaggggcgctctgggttctcgatgcgtgcaggcttttcgggcccgcaactggatttgagtaacaacagataccatatggccagcaaagcctaagtgggttgccagcgttgatgtggtggagaatgaagaggccagcgctagcatcattgttaaaatgacagactcgttcactgagcaggctgaccaggtgactgctgaggttggaaagctcttgggtgaagagaaggtggatgcaattctttgcgttgctggaggatgggccgggggcaatgccaaatccaagtctctctttaagaactgtgacctgatgtggaagcagagcatatggacatcgaccatctccagccatctggctaccaagcatctcaaggaaggaggcctcctgaccttggctggcgcaaaggctgccctggatgggactcctgggttaccctggataccccgatgaacaggaaatcaatgcctgaggctgacttcagctcctggacacccttagaattcctagttgaaactttccatgactggatcacagggaaaaaccgaccgagctcaggaagcctaatccaggtggtaacc

SEQ ID NO: 17168 - DNA, 1068 bp, Homo sapiens
  source 1..1068: mol_type = unassigned DNA
gatgcgtgcaggcttttcgggcccgcaactggtgggttgccagcgttgatgtggtggagaatgaagaggccagcgctagcatcattgttaaaatgacagactcgttcactgagcaggctgaccaggtgactgctgaggttggaaagctcttgggtgaagagaaggtggatgcaattctttgcgttgctggaggatgggccgggggcaatgccaaatccaagtctctctttaagaactgtgacctgatgtggaagcagagcatatggacatcgaccatctccagccatctggctaccaagcatctcaaggaaggaggcctcctgaccttggctggcgcaaaggctgccctggatgggactcctgggttaccctggataccccgatgaacaggaaatcaatgcctgaggctgacttcagctcctggacacccttagaattcctagttgagtgagtattacagacatgtccatgactgagcagcttccagcccctattctctgcctgctgtggtccagaggacaagtctgtgttccctgagatcgtcaatccgggtggtcttgggaggtctctgggactctgaggatgcattgcacatcagacggaatctcagagtagctggacttggagacaggcagcacagtggcagaatgggtagtgccgacatgaatcctggctcgctccctcaccaccggccatgctgagcacattattgacctgctgaggcctcagtttccccacctgtatcatgaggtccatcatgcttgttaggattaaacgtgatagtgtgcggcaagcactcaacacagtgtctggccataacaagtgctcagtgatccccagctgcagtttgtgtccttactgctgtgatgaggagactccatgggggagggggacaccacgtagatggcctgggggcacatatctgaatctgtgtcaagccacagacccacagaaagtgccctttaatttccgaaatcctttttgcccatttgtgaatatgggtggcatttgaacgctcatgggacagagagctgaattcctcttttgtgtttgtttaggtatcagttc

SEQ ID NO: 17169 - DNA, 803 bp, Homo sapiens
  source 1..803: mol_type = unassigned DNA
gctctctgccattttttgatgggggttggtgagggcgtctgacctgaaggaggaggccagatgcagctatttataaagtttttagggaatagagatctcaagagaagattgcatgtccttgctgtccccctggccgccagtggtcactgagccatcttctccccatttcccaggtatgatcgggtacggcatggccaagggtgctgttcaccagctctgccagagcctggctgggaagaacagcggcatgccgcccggggcagccgccatcgctgtgctcccggttaccctggataccccgatgaacaggaaatcaatgcctgaggctgacttcagctcctggacacccttagaattcctagttgaaactttccatgactggatcacagggaaaaaccgaccgagctcaggaagcctaatccaggtggtaaccacagaaggaaggacggaactcaccccagcatatttttaggcctcatctcagtgcctatgaggggcctgccagaaaagtcactaacctgtctcagtgtggccttgtccagccttgtgttttctgtaacccctgtttgtggtacgagataatgagtcctatttttctctcacataatatgcatttgctctcctaggacagtgtaatacatttatgtgaagtaaagacatgcgagactggtggcctgcaaatagcatccgttgatctgtgttaactgcatagggagggctctgcatagcacctgctatagcggtgtcatgttggatcgcttttgtgactgttcatctgtccttgacagtggctgtcatcttga

SEQ ID NO: 17170 - DNA, 601 bp, Homo sapiens
  source 1..601: mol_type = unassigned DNA
cggagctgcgggagccgggctggcaggagcaggatggcggcggcggcggctgcaggcgaggcgcgccgggtgctggtgtacggcggcaggggcgctctgggttctcgatgcgtgcaggcttttcgggcccgcaactggtgggttgccagcgttgatgtggtggagaatgaagaggccagcgctagcatcattgttaaaatgacagactcgttcactgagcaggctgaccaggtgactgctgaggttggaaagctcttgggtgaagagaaggtggatgcaattctttgcgttgctggaggatgggccgggggcaatgccaaatccaagtctctctttaagaactgtgacctgatgtggaagcagagcatatggacatcgaccatctccagccatctggctaccaagcatctcaaggaaggaggcctcctgaccttggctggcgcaaaggctgccctggatgggactcctgaactttccatgactggatcacagggaaaaaccgaccgagctcaggaagcctaatccaggtggtaaccacagaaggaaggacggaactcaccccagcatatttttaggcctcatctcagtgcctatgaggggc

SEQ ID NO: 17171 - DNA, 1648 bp, Homo sapiens
  source 1..1648: mol_type = unassigned DNA
acagtccctccgggtggcggggcgccccgagcgtggcagcgcgctaggcggcagcagcgggcgcggagcggggcgcggccgccgcgcgttccctcttggcggggttggccggccggggcggggcgcggcgctccggctcgaggcattcggagctgcgggagccgggctggcaggagcaggatggcggcggcggcggctgcaggcgaggcgcgccgggtgctggtgtacggcggcaggggcgctctgggttctcgatgcgtgcaggcttttcgggcccgcaactggtgggttgccagcgttgatgtggtggagaatgaagaggccagcgctagcatcattgttaaaatgacagactcgttcactgagcaggctgaccaggtgactgctgaggttggaaagctcttgggtgaagagaaggtggatgcaattctttgcgttgctggaggatgggccgggggcaatgccaaatccaagtctctctttaagaactgtgacctgatgtggaagcagagcatatggacatcgaccatctccagccatctggctaccaagcatctcaaggaaggaggcctcctgaccttggctggcgcaaaggctgccctggatgggactcctggtatgatcgggtacggcatggccaagggtgctgttcaccagctctgccagagcctggctgggaagaacagcggcatgccgcccggggcagccgccatcgctgtgctcccggttaccctggataccccgatgaacaggaaatcaatgcctgaggctgacttcagctcctggacacccttagaattcctagttgaaactttccatgactggatcacagggaaaaaccgaccgagctcaggaagcctaatccaggtggtaaccacagaaggaaggacggaactcaccccagcatatttttaggcctcatctcagtgcctatgaggggcctgccagaaaagtcactaacctgtctcagtgtggccttgtccagccttgtgttttctgtaacccctgtttgtggtacgagataatgagtcctatttttctctcacataatatgcatttgctctcctaggacagtgtaatacatttatgtgaagtaaagacatgcgagactggtggcctgcaaatagcatccgttgatctgtgttaactgcatagggagggctctgcatagcacctgctatagcggtgtcatgttggatcgcttttgtgactgttcatctgtccttgacagtggctgtcatcttgactactttgttgatttgttggtattggggacattttaaaggctgagttatttttgaatgtcatgtttatgtcatagacgtagttttcgcatccttgaattaaactgccttaactccttttgtggtataagcaaaactacatggactctgtcctggtatccttttcctgtgtggttgccccgtgtcctctggcctagggttaagtgtgcaagataactactcgtgagtattcagaatgttgttcctaataaatgcacttgttgtctgtcttctttaatcaaatcacatcttatatacagcagtcagagatgagtatactagaatcatggattgctggaggtcttttaatctgatgttctcagaagggggtggatttaaatcctgaaataaatatttcaacacaa

SEQ ID NO: 17172 - DNA, 1278 bp, Homo sapiens
  source 1..1278: mol_type = unassigned DNA
ggagctgcgggagccgggctggcaggagcaggatggcggcggcggcggctgcaggcgaggcgcgccgggtgctggtgtacggcggcaggggcgctctgggttctcgatgcgtgcaggcttttcgggcccgcaactgggtgactgctgaggttggaaagctcttgggtgaagagaaggtggatgcaattctttgcgttgctggaggatgggccgggggcaatgccaaatccaagtctctctttaagaactgtgacctgatgtggaagcagagcatatggacatcgaccatctccagccatctggctaccaagcatctcaaggaaggaggcctcctgaccttggctggcgcaaaggctgccctggatgggactcctggtatgatcgggtacggcatggccaagggtgctgttcaccagctctgccagagcctggctgggaagaacagcggcatgccgcccggggcagccgccatcgctgtgctcccggttaccctggataccccgatgaacaggaaatcaatgcctgaggctgacttcagctcctggacacccttagaattcctagttgaaactttccatgactggatcacagggaaaaaccgaccgagctcaggaagcctaatccaggtggtaaccacagaaggaaggacggaactcaccccagcatatttttaggcctcatctcagtgcctatgaggggcctgccagaaaagtcactaacctgtctcagtgtggccttgtccagccttgtgttttctgtaacccctgtttgtggtacgagataatgagtcctatttttctctcacataatatgcatttgctctcctaggacagtgtaatacatttatgtgaagtaaagacatgcgagactggtggcctgcaaatagcatccgttgatctgtgttaactgcatagggagggctctgcatagcacctgctatagcggtgtcatgttggatcgcttttgtgactgttcatctgtccttgacagtggctgtcatcttgactactttgttgatttgttggtattggggacattttaaaggctgagttatttttgaatgtcatgtttatgtcatagacgtagttttcgcatccttgaattaaactgccttaactccttttgtggtataagcaaaactacatggactctgtcctggtatccttttcctgtgtggttgccccgtgtcctctggcctagggttaagtgtgcaagataactactcgtgagtattcagaatgttgttcctaataaatgcacttgttgtctgtcttcttt

SEQ ID NO: 17173 - DNA, 1374 bp, Homo sapiens
  source 1..1374: mol_type = unassigned DNA
gctggcaggagcaggatggcggcggcggcggctgcaggcgaggcgcgccgggtgctggtgtacggcggcaggggcgctctgggttctcgatgcgtgcaggcttttcgggcccgcaactggtgggttgccagcgttgatgtggtggagaatgaagaggccagcgctagcatcattgttaaaatgacagactcgttcactgagcaggctgaccaggtgactgctgaggttggaaagctcttgggtgaagagaaggtggatgcaattctttgcgttgctggaggatgggccgggggcaatgccaaatccaagtctctctttaagaactgtgacctgatgtggaagcagagcatatggacatcgaccatctccagccatctggctaccaagcatctcaaggaaggaggcctcctgaccttggctggcgcaaaggctgccctggatgggactcctgggttaccctggataccccgatgaacaggaaatcaatgcctgaggctgacttcagctcctggacacccttagaattcctagttgaaactttccatgactggatcacagggaaaaaccgaccgagctcaggaagcctaatccaggtggtaaccacagaaggaaggacggaactcaccccagcatatttttaggcctcatctcagtgcctatgaggggcctgccagaaaagtcactaacctgtctcagtgtggccttgtccagccttgtgttttctgtaacccctgtttgtggtacgagataatgagtcctatttttctctcacataatatgcatttgctctcctaggacagtgtaatacatttatgtgaagtaaagacatgcgagactggtggcctgcaaatagcatccgttgatctgtgttaactgcatagggagggctctgcatagcacctgctatagcggtgtcatgttggatcgcttttgtgactgttcatctgtccttgacagtggctgtcatcttgactactttgttgatttgttggtattggggacattttaaaggctgagttatttttgaatgtcatgtttatgtcatagacgtagttttcgcatccttgaattaaactgccttaactccttttgtggtataagcaaaactacatggactctgtcctggtatccttttcctgtgtggttgccccgtgtcctctggcctagggttaagtgtgcaagataactactcgtgagtattcagaatgttgttcctaataaatgcacttgttgtctgtcttctttaatcaaatcacatcttatatacagcagtcagagatgagtatactagaatcatggattgctggaggtcttttaatctgatgttctcagaagggggtggatttaaatcctgaaataaatatttcaacacaa

SEQ ID NO: 17174 - DNA, 1188 bp, Homo sapiens
  source 1..1188: mol_type = unassigned DNA
ttcggagctgcgggagccgggctggcaggagcaggatggcggcggcggcggctgcaggcgaggcgcgccgggtgctggtgtacggcggcaggggcgctctgggttctcgatgcgtgcaggcttttcgggcccgcaactggtgggttgccagcgttgatgtggtggagaatgaagaggccagcgctagcatcattgttaaaatgacagactcgttcactgagcaggctgaccaggtgactgctgaggttggaaagctcttgggtgaagagaaggtggatgcaattctttgcgttgctggaggatgggccgggggcaatgccaaatccaagtctctctttaagaactgtgacctgatgtggaagcagagcatatggacatcgaccatctccagccatctggctaccaagcatctcaaggaaggaggcctcctgaccttggctggcgcaaaggctgccctggatgggactcctgggttaccctggataccccgatgaacaggaaatcaatgcctgaggctgacttcagctcctggacacccttagaattcctagttgaaactttccatgactggatcacagggaaaaaccgaccgagctcaggaagcctaatccaggaactgactcagctgcaggaggacagcttcaattccctatgagttcatctcggacccaaccaatcagagctcttgactcactggcttccccctacccaccaagttgtccttaaaaactttgatccccgaatgcttggggaaaccaatctgagtaataataaaactcaagtcacctgcacagctggctctgtgtgaattactctctctattgcaattcccctgtcttgataaaatggctctatctaggcagctggcaaggtgaatccattgggtggttacaatacctcccttagtagactaaagaacaacttggataaaaccagcaagaaatggattatatcgagggaaattgtcatgcccatccaagaccatgataaggaatgaggaagtaacataatggaaggattctgtctcttctcattgggactgactctaagcacctctgattagatgtcattctatgtctgggatgatctcaggactatggtattgtcctcttgtgctatcaattttaactcacaaatggatgtcgatgtcatttattctcttattctacagaccttcattggctacat

SEQ ID NO: 17175 - DNA, 6085 bp, Homo sapiens
  source 1..6085: mol_type = unassigned DNA
gggcggagcgaccctcggaaggggcgtggcgaccgggctcgacgcgcgcacgcgctctggagccccacggctacgtgtcgggccacgtgatgcccaccccgaaagtcccccgtgaagcaacaggacgttaaaaaaaaatttctcttctgcggggtggataagaggttctgaaaaaactatagtaacgggaggcgaggcggaggcagcgctggcgcgtcccgctggaattcctctcgcctgccgcgccagccccgaccgcgcccgcagccccacccgccccgtgccgtggaaagccccgcgccccccccgcggccgtcggccccgcagcccacacccacccgccccgggcgccccgcacggcggcgacccagtccttgcgcccaggcccgccgagcgccgcagtccgtcacactcccgttgcccccgtcgcccgccccgccggggaggcagggaggagggggcgcggcgccggcggctgccccggtcgcggggcggcgggcagcaggcagcgggagcgcgccggccgggacccgctaacggccgccctgcgcggccccgcccgccgcccgcccccggccctccccgcgccgctgcccctccccccgccgccgccgctgctgccgccgccgctggcagcgccgcctgaactgaggcgaactccgccgccaagtgagtgaggaggaggaggaggagaaggaggaggaggaagaggaggagcgcagtcggagcgcggcggcagcggcagaggcgccgcggcggggaccagcccagagagaccccccgagcccgcggcacaggcggcggcggcgctgagcgggctcgaccagccgagcgagcggcggccccggctcctcctcgtccggcgccagcagcccgcgccccgcgcccgcactcggccagccgagacccgcctcccgcccgcccgccggcctcgtgagggacgcgccgagccgggcggccgagagcggcggcggctgggagcgcgtcgggcccgggcggaaagtgcctgcggggggcgggcgagcgcgcggtgccggccgccccggggctcggcgcgggagccagagcgggagccggcgcggagcgggacgccgggtcccgagcggcccgcggccggggctcgcccccgcccctccctcctctccggcggcggcggcggcggcggcgggcggagtgagctgcggagcctggaatatggtcggggaaatggaaacgaaggagaagccgaagcccaccccagattacctgatgcagctgatgaacgacaagaagctcatgagcagcctgcccaacttctgcgggatcttcaaccacctcgagcggctgctggacgaagaaattagcagagtacggaaagacatgtacaatgacacattaaatggcagtacagagaaaaggagtgcagaattgcctgatgctgtgggacctattgttcagttacaagagaaactttatgtgcctgtaaaagaatacccagattttaattttgttgggagaatccttggacctagaggacttacagccaaacaacttgaagcagaaaccggatgtaaaatcatggtccgaggcaaaggctcaatgagggataaaaaaaaggaggagcaaaatagaggcaagcccaattgggagcatctaaatgaagatttacatgtactaatcactgtggaagatgctcagaacagagcagaaatcaaattgaagagagcagttgaagaagtgaagaaattattggtacctgcagcagaaggagaagacagcctgaagaagatgcagctgatggagcttgcgattctgaatggcacctacagagatgccaacattaaatcaccagcccttgccttttctcttgcagcaacagcccaggctgctccaaggatcattactgggcctgcgccggttctcccaccagctgccctgcgtactcctacgccagctggccctaccataatgcctttgatcagacaaatacagaccgctgtcatgccaaacggaactcctcacccaactgctgcaatagttcctccagggcccgaagctggtttaatctatacaccctatgagtacccctacacattggcaccagctacatcaatccttgagtatcctattgaacctagtggtgtattaggtatggctttcccaacgaaaggctaagaattcaagaacggtcttaactgaaccctcatcagatctgaatttaacaaatgcttagtctcagcagcctccgggggaaaaaagcttagcctagcagtcagtgacttacttgcactttttgcacatagatataaagtaaaattatgttattaatttggtttagtctgtaatattacacagtaatggtaatttataaaggagtgtatagtagtatactgactgctaagtgtactatactgtttgctttactaatcacctaattcattgcagttcatacttattgactcagagtttaaaaccacaatctgtaggctttaagaattgcttttaaacctttttaagtgataaactcttgaagtggtcttaaggttagcaaataattgtctgtattaaacatggcgttatttaagtagtcctgctgcaagaaaggcacttcagtgaatatgtgactagtaaagcttaaatatgtttggatctaatagagctcatgaaatactgtaacttggggattgtaaatgaatggatacaataggttaaggcccaagatgtttgaaatgaatgcaatattaatagatgcatatatacatgacatattgtggttaattttaaaactactgtgccttaacgtgtttcttaaacttttgtagtaaatgaacatttgaaatccattttgataaacctgctgttaatgttttttccccccttgtgaatgttttctaactttgtcttggtaattgcaatttaactaggtgcggtggctactaaagttcgaaggcacgatatgcgtgtccatccttaccaaaggattgtgaccgcagaccgagccgccaccggcaactaacctatgaccttctgacctctgaactcttcacccaatgatgacctgaccatgcctgcctgctgatcagttaactggtaatcgcctttgcttgcctgtcgtcagtgcagcgagctgaggcacttgtccgttcgtcttaccatctaaccaaacaaaagacaaagaaattgttgtcctccaactcagctttttttttttttttttcctgtttgggtgaaagtggttctagaaactgcactgaatagtagtaaagcaataaggcccaattcatcccacagcactgatcatcttttaatatcccaccctaagcgaacggtaagaaggcctctcttaagaaggggagacagatggtccttaactactcaatgacagaggcagttactgtgagagacttctaggaatctttttcttctcatagcgaagtcaaagctctctctgaatgtactgtgtgatgatgcatcatgcatgaaccttcggtcagggatatcattggtgaagtgatttcaaaaagtattcaaaatttgatatgctgtttagtcactacagtgccctcaaagggcagaagttgcagccttttttatattgcctgccaaaatttgaagtattagaagaaagtgtgccatgagagaaaaacttaaggagttttgaaaagtaatgcaaataacaaaactgcaacactatttttaaaaagataaatatctgagttaaaattactgaatctttattttacacctaaaaaaatatgagaacaaggtacatgcattatgtgtcacattactgggcaaactgttcaagtatttttttttaaacctccctgtatagaaaaaaatcattaaggatgtaaaagccatgcttgcctatttgctgtatacatgtaatgaaattgtagataaagtgtagtgcattgaaacaaatgaacaaaaagtagatacttttactatacaagggtgctggtgcagaaaaaaatatatatatttttggaaatgtagcattttatactttcaagtgttataaaaaaaaagaaaaagaacaaagaaaccctttatttcattaaatgattttttctggtggttgtcaagaaacaaaagaccaaaagagcctttttgtctttcttttttattttttaagtattggaataagtctaaagaaaagaaagtgccttattttccttcatggtcattcagtcaagtgtctcataaagatcagctcctccctcagaatacaagttaatgcatgttactcagtcgcccagtatgtgaaagaagatatgagggagacaaatgagttgatagtttgaattataggatttttgccacgttaccttgatgcaaatttgccaaatctgatactgtgaaaagatttgataacttttctaatgcctgactagtaagttttaaaacatcattctttaaaagaatagtttaatacttttggttattccaatcttcaatgttaacccaaaggattctgagataaaaattatgtgtcatctaaacttcagtttacagacaaaattagagctttgttttatttggagaagggggatgcattcatttgattttgttttttgtttttaattaattgaatataataggatacctagcaaatgttttcacaaaagtgaatctttgtgattttcattctagaaaacaatgttttaaatcacccaaatttaatcacatgtctttatatcataccagataactggtgtagtgtatccttttactgtttcaataacctctgcctcccccaccccttaactttaaaagaatgtgaaaaactagcatcatagtgcatataaatactcaaccacatttcagcttaagcttctaatttctcaagaagttgaaacagttagttatgtagttgaagcaatttgtgtgcaaagcctacatctaaacacttgagtgaataatcattaactgctcagtaccagacgtggcaaatctcaagtgacagtggacccccccccccgcccagcttatcaactcgtcccctcttccacaccttcccagcatcacagtcagaggtcagcaggaagctgagtcattaccttcttggtgacctcccccaccatcttgtctcacttggaaaccgttgtcagtttatttactatgcaatagacattcattgttttgtatccagctagctttggtttaatatgccactgctttgtctttctgttacacatacagttttgatttatttacaatatatgctgtgccattttgatttttatattgtttggttggttgaataaatttgcgacactcaaacacttgaggtgatagttgttaaaaacaataccagtatttgatccagtttcatctcaactatgttatacctggacattttagatgtttatcaaaggtcttttatggggaagaaagtaaatgtatgaaataataaatgtgtgacatttatagggaatgttggctctgaacaaacttttgaaaacttggttgacaaaattttggatcaactgaaaaaagcatgacttttgaaatctctgaatgccttggttctcagtattatcattctttattgaatttatttcttattaaaatatgtagtttttaagactttttttctgacagtattatgtaattttttagcgtgggtagatgggagtgtcgcttgtatgttatcgtacagctgacatgtatttttgtctattctttattatcttagtttcatgctatgtatgtaccataaccaacctattgcctatgagaaacatgtaagataatgtatttacagccattgttacaagtttataatgtatttttctatcttgttttatatgtatgttatataacattcaaaaagaatttttttcttgattgagaaaaggatacaaaatgcaaaatccacaattttgataactgaaaattgccaattgttttgcagtactttattatattgggtgtcttgtcttttttgggcttttagttagctaatgaatgaatacattagacacttttgggttttagttgggattttacatagcttgcattttaattctttggttctttgctgtttctattaacccacagcattattttaataaatgttataataccaacctactaa

SEQ ID NO: 17176 - DNA, 5685 bp, Homo sapiens
  source 1..5685: mol_type = unassigned DNA
tgaactgaggcgaactccgccgccaagtgagtgaggaggaggaggaggagaaggaggaggaggaagaggaggagcgcagtcggagcgcggcggcagcggcagaggcgccgcggcggggaccagcccagagagaccccccgagcccgcggcacaggcggcggcggcgctgagcgggctcgaccagccgagcgagcggcggccccggctcctcctcgtccggcgccagcagcccgcgccccgcgcccgcactcggccagccgagacccgcctcccgcccgcccgccggcctcgtgagggacgcgccgagccgggcggccgagagcggcggcggctgggagcgcgtcgggcccgggcggaaagtgcctgcggggggcgggcgagcgcgcggtgccggccgccccggggctcggcgcgggagccagagcgggagccggcgcggagcgggacgccgggtcccgagcggcccgcggccggggctcgcccccgcccctccctcctctccggcggcggcggcggcggcggcgggcggagtgagctgcggagcctggaatatggtcggggaaatggaaacgaaggagaagccgaagcccaccccagattacctgatgcagctgatgaacgacaagaagctcatgagcagcctgcccaacttctgcgggatcttcaaccacctcgagcggctgctggacgaagaaattagcagagtacggaaagacatgtacaatgacacattaaatggcagtacagagaaaaggagtgcagaattgcctgatgctgtgggacctattgttcagttacaagagaaactttatgtgcctgtaaaagaatacccagattttaattttgttgggagaatccttggacctagaggacttacagccaaacaacttgaagcagaaaccggatgtaaaatcatggtccgaggcaaaggctcaatgagggataaaaaaaaggaggagcaaaatagaggcaagcccaattgggagcatctaaatgaagatttacatgtactaatcactgtggaagatgctcagaacagagcagaaatcaaattgaagagagcagttgaagaagtgaagaaattattggtacctgcagcagaaggagaagacagcctgaagaagatgcagctgatggagcttgcgattctgaatggcacctacagagatgccaacattaaatcaccagcccttgccttttctcttgcagcaacagcccaggctgctccaaggatcattactgggcctgcgccggttctcccaccagctgccctgcgtactcctacgccagctggccctaccataatgcctttgatcagacaaatacagaccgctgtcatgccaaacggaactcctcacccaactgctgcaatagttcctccagggcccgaagctggtttaatctatacaccctatgagtacccctacacattggcaccagctacatcaatccttgagtatcctattgaacctagtggtgtattaggtatggctttcccaacgaaaggctaagaattcaagaacggtcttaactgaaccctcatcagatctgaatttaacaaatgcttagtctcagcagcctccgggggaaaaaagcttagcctagcagtcagtgacttacttgcactttttgcacatagatataaagtaaaattatgttattaatttggtttagtctgtaatattacacagtaatggtaatttataaaggagtgtatagtagtatactgactgctaagtgtactatactgtttgctttactaatcacctaattcattgcagttcatacttattgactcagagtttaaaaccacaatctgtaggctttaagaattgcttttaaacctttttaagtgataaactcttgaagtggtcttaaggttagcaaataattgtctgtattaaacatggcgttatttaagtagtcctgctgcaagaaaggcacttcagtgaatatgtgactagtaaagcttaaatatgtttggatctaatagagctcatgaaatactgtaacttggggattgtaaatgaatggatacaataggttaaggcccaagatgtttgaaatgaatgcaatattaatagatgcatatatacatgacatattgtggttaattttaaaactactgtgccttaacgtgtttcttaaacttttgtagtaaatgaacatttgaaatccattttgataaacctgctgttaatgttttttccccccttgtgaatgttttctaactttgtcttggtaattgcaatttaactaggtgcggtggctactaaagttcgaaggcacgatatgcgtgtccatccttaccaaaggattgtgaccgcagaccgaggttagtttagttctgcagttcttgtctataagaaatgcgttgggtgtccataaaatttgcaacaccacacctgatggaaaaatgtaattgcttacctgcacacagttttttttccttttctaaatttgtttgtgatcattgacagatttaagggttgggttttttgttttggtttggttttttctcccttcatattttaacttattaaatcttctattattatgtactatgatttattcctactaaaacataaattagtcaatttggggagctattaaattttgatgttgcctcagttattttcattaataacttttgctaaaatttaccttttaaaagttctgaaatttggggttggtattgcaaaatgaattgaacggatggtgctttaatgagagaagtaaaggaatatatgcctcctgtgtacttttggagaaaactgaagatttagtttccatttttctttataataaaatatttgagccactgtataaacatgagggtgcacatgtcaagtacttagctaaaatcaacaaagtgaggactgtgaagataactttcatgtagttggatttttttatataaattagagcgtcaattcccttttattcttacattctcttgccaaaatggatcctttgatttttgtcatttgctgctaaaatatattatctgaaggtaaactgtctcttgaagttctgtggtggtatgagatccagctgtgtgaatataatttttgactaacctgtgactggaaaataagtcttcatttttctcctttacaacttttataatttgtgtcctgtatatgcccttggacccttttataaattatttttgcttattgaggaatggtattttcggtttattgacattgaattgttttctaagtttttccatcacaagataggaatatcaagcatggtagtaaaaaaggattttttacaagtttctattatggcacatttgtttcctacaaattaaattgatcaaagtctcaaatattagtggaggaaaaagtgctggatttgtacttcaattgtacatcttctatgaatttatgaaggacctacctgctttatgtgattaccttgagtactgatgataaatactagacacagctgttgtccacatcagaaataacatgcctttcccaaagacattgttaatatttgtttagcataatccataaagaacgttgaagacttttaaactaatgtattcatcactaacagtgattgttcagtgaacaaaatagaccccagctccgtggtcgtctatgaggatggtattccttgtaagtgttctgtatgagcacgtctcatagggatggggaagttttttggaaagtcacttgagttttaaagaaactggacaattccatgaataatttgaggttttattcatattgctaatgtctacaattgttctaaagagtattttaaagtagtttttttcccccagctaatctttccctatgtatgcccccttttaggagatttctcaccattttgctttaacacaataattattggcctacttaatactccagtgccttgagatagttggacatattttaggaagattttattgtatttggaaaattacgacacattccatgcatggatcttttgtagttacgtgttttgattagtcctgtcactgtttttatttaaaatgcagtgtcagcaaaccgaaatgctcatttcttttttagtaacagagtactcgtatacttatcactgtatgcactcattgggtctaagggagatgtctgaagtccttcacttaaattattttatgatactactgttttctctatttttgaggttaaaattattttaaaaaaatattttgaagagaagtttattagtataagcattcatttaatgcaaaaaaactcagcccttggacatataaccatgtaattctatatgaacgtttagagtactacatggttgaccaatatctagttctttactaaaagtaaactcacctctttatatatatttcaaaactgaatttgaagcctattagagaccaactgaccttttagttgtaatgaactgtatggtcttgcatggtgacacacctgtgtaggaggccaagacttggcagaggatgtagtctaggtgtcctggtatatataaatggtcactcacttcgtttatatattccacactcagaaaagaagtcagagttttttctgagtaatacaaaaaccatcacttacataatttgtataagaaactttaaacagttttaatcaaaactatgagtaacatcaaaaatgctttaagattctatattttggaatacctgtgaagtagtatgactacatcatgttaaatatttattttcttctatgattttggagcagcaatttttattttaaataaaattccacttttaagaaattcagggaagatttggtcacattgaagatacagtatttttgtagtatttataaactgttctaaatgatagactatagaaaacatttttgtcatatgaaggtaaatcagtccattattttggatcatttaaactgaacattacaccttctgggctttgatttatgaagtggcacagaatctaactttgcactgaatatcttttcattcacatctcctctgccttagtcacaatggcaacagtacagaaaattctatcaaacctcagaatatagtagaaataattaagctgttgaatgagtcttaaaaattatactactgttaagtggaccaagtttggtgaagcagaatgtgacaaaggttgattaaggaaggaacaactcaaggacattgggaatgataacttttccacttgagaactactttatgttttactgtaatttttaaagtttttttgtcctttttgttattttgcaaaagaaaatagtatttacaggtggcttcttttaaaatataaaaatataaagcaggaatgtatatgaaatgtcagattttattgtatttgcagagtattagctttgaaattgaataaagaaagctgtttgtagttttaaaatgccttattggtatcaattagaaatttcttctattttttgatgtacttagagctttttgagtgtagaattttaaatggcaggattttacagtgtttacatgcaagtgcattttataagtgttctatatgtgtaaaatagtattttcaactggaaagtgttggctagtgcaaaaggcctggccattttctggttcccatgatgttgcctacactgctagactacagtttagtatcgctttgtatcatgaggccaagaaattccatgttgtttgtaaatagaataattgaaaaagcaataaacatttattgaacaaaagaaa

SEQ ID NO: 17177 - DNA, 6964 bp, Homo sapiens
  source 1..6964: mol_type = unassigned DNA
tgaactgaggcgaactccgccgccaagtgagtgaggaggaggaggaggagaaggaggaggaggaagaggaggagcgcagtcggagcgcggcggcagcggcagaggcgccgcggcggggaccagcccagagagaccccccgagcccgcggcacaggcggcggcggcgctgagcgggctcgaccagccgagcgagcggcggccccggctcctcctcgtccggcgccagcagcccgcgccccgcgcccgcactcggccagccgagacccgcctcccgcccgcccgccggcctcgtgagggacgcgccgagccgggcggccgagagcggcggcggctgggagcgcgtcgggcccgggcggaaagtgcctgcggggggcgggcgagcgcgcggtgccggccgccccggggctcggcgcgggagccagagcgggagccggcgcggagcgggacgccgggtcccgagcggcccgcggccggggctcgcccccgcccctccctcctctccggcggcggcggcggcggcggcgggcggagtgagctgcggagcctggaatatggtcggggaaatggaaacgaaggagaagccgaagcccaccccagattacctgatgcagctgatgaacgacaagaagctcatgagcagcctgcccaacttctgcgggatcttcaaccacctcgagcggctgctggacgaagaaattagcagagtacggaaagacatgtacaatgacacattaaatggcagtacagagaaaaggagtgcagaattgcctgatgctgtgggacctattgttcagttacaagagaaactttatgtgcctgtaaaagaatacccagattttaattttgttgggagaatccttggacctagaggacttacagccaaacaacttgaagcagaaaccggatgtaaaatcatggtccgaggcaaaggctcaatgagggataaaaaaaaggaggagcaaaatagaggcaagcccaattgggagcatctaaatgaagatttacatgtactaatcactgtggaagatgctcagaacagagcagaaatcaaattgaagagagcagttgaagaagtgaagaaattattggtacctgcagcagaaggagaagacagcctgaagaagatgcagctgatggagcttgcgattctgaatggcacctacagagatgccaacattaaatcaccagcccttgccttttctcttgcagcaacagcccaggctgctccaaggatcattactgggcctgcgccggttctcccaccagctgccctgcgtactcctacgccagctggccctaccataatgcctttgatcagacaaatacagaccgctgtcatgccaaacggaactcctcacccaactgctgcaatagttcctccagggcccgaagctggtttaatctatacaccctatgagtacccctacacattggcaccagctacatcaatccttgagtatcctattgaacctagtggtgtattagagtggattgaaatgccagtcatgcctgatatttcagcccattgacttgctggatgaaggactagaatacagcagctgttataacacgaccagtcaatgtggaacaaactgtttctgtgcaacccctttgttttaccagacaaaatttgaatactttttttcctgaattgtatatgaccttggtgctgcatgcatgctgttgacttttaggactttgatcttttaaggttttttttccccagcattaatattgatttataaagatttgaaaatctttaatgaactggagaacactaagatttaaactcgaaaattcgttgttcaagtaaagaaagccatgatgctctgtatgttatctgtgtgtgtgcatgcactcaggtgccctttgtttcatgaacaaatacatttcattgtacatgttttctgtttaaatcattgtataaagtaattgcaggtcagaattataccacagaactgtttatgagaggcttgtgtctgttgcacatttcttgaagcatttttaaaataacatgtaacctgtaaccttgttgtttaagttttcttttctattaatactctgtcctgtggtcccgtgcatgctccttttcccagaactcctctctgctgcacccacagcatctgttcccgaggagttatgactcttgacttcctgcagggctggggctcttagccaccagctgctgttccagcactttcagcgcaagatctccctgattttgccacgtggaattgtacttgtatatgattaccttatctaaaatgaataagaggtgatggaccagtttactgcttagaaatagcaagaggcactgcagtaaaacttgtttctcattgtaaagcttcatgtcttttgtttgttggaaaatttttacttatagaaacttaattattagactggtaaaataaagaccaaaatatgcagatttctaattggcattcataaggtgaataataataagtgcccaatgaaaaaatctattatggttaatttcatttcttgctttgccacctaagcagtaaaacatgatattgaccacttggagaactcagaaaattattttaaatttctaagttataataaatttgcacacagataacatgcatgctatttatgtcacatctcacattaaattattttaaaataagcagtgcccttcaaaacagatgcagacatgtgtgttggtagtagtgaggagattggtattagcatcaagtcttcattgatgactaatttttaattcccttccttttatctttaggtatggctttcccaacgaaaggctaagaattcaagaacggtcttaactgaaccctcatcagatctgaatttaacaaatgcttagtctcagcagcctccgggggaaaaaagcttagcctagcagtcagtgacttacttgcactttttgcacatagatataaagtaaaattatgttattaatttggtttagtctgtaatattacacagtaatggtaatttataaaggagtgtatagtagtatactgactgctaagtgtactatactgtttgctttactaatcacctaattcattgcagttcatacttattgactcagagtttaaaaccacaatctgtaggctttaagaattgcttttaaacctttttaagtgataaactcttgaagtggtcttaaggttagcaaataattgtctgtattaaacatggcgttatttaagtagtcctgctgcaagaaaggcacttcagtgaatatgtgactagtaaagcttaaatatgtttggatctaatagagctcatgaaatactgtaacttggggattgtaaatgaatggatacaataggttaaggcccaagatgtttgaaatgaatgcaatattaatagatgcatatatacatgacatattgtggttaattttaaaactactgtgccttaacgtgtttcttaaacttttgtagtaaatgaacatttgaaatccattttgataaacctgctgttaatgttttttccccccttgtgaatgttttctaactttgtcttggtaattgcaatttaactaggtgcggtggctactaaagttcgaaggcacgatatgcgtgtccatccttaccaaaggattgtgaccgcagaccgaggttagtttagttctgcagttcttgtctataagaaatgcgttgggtgtccataaaatttgcaacaccacacctgatggaaaaatgtaattgcttacctgcacacagttttttttccttttctaaatttgtttgtgatcattgacagatttaagggttgggttttttgttttggtttggttttttctcccttcatattttaacttattaaatcttctattattatgtactatgatttattcctactaaaacataaattagtcaatttggggagctattaaattttgatgttgcctcagttattttcattaataacttttgctaaaatttaccttttaaaagttctgaaatttggggttggtattgcaaaatgaattgaacggatggtgctttaatgagagaagtaaaggaatatatgcctcctgtgtacttttggagaaaactgaagatttagtttccatttttctttataataaaatatttgagccactgtataaacatgagggtgcacatgtcaagtacttagctaaaatcaacaaagtgaggactgtgaagataactttcatgtagttggatttttttatataaattagagcgtcaattcccttttattcttacattctcttgccaaaatggatcctttgatttttgtcatttgctgctaaaatatattatctgaaggtaaactgtctcttgaagttctgtggtggtatgagatccagctgtgtgaatataatttttgactaacctgtgactggaaaataagtcttcatttttctcctttacaacttttataatttgtgtcctgtatatgcccttggacccttttataaattatttttgcttattgaggaatggtattttcggtttattgacattgaattgttttctaagtttttccatcacaagataggaatatcaagcatggtagtaaaaaaggattttttacaagtttctattatggcacatttgtttcctacaaattaaattgatcaaagtctcaaatattagtggaggaaaaagtgctggatttgtacttcaattgtacatcttctatgaatttatgaaggacctacctgctttatgtgattaccttgagtactgatgataaatactagacacagctgttgtccacatcagaaataacatgcctttcccaaagacattgttaatatttgtttagcataatccataaagaacgttgaagacttttaaactaatgtattcatcactaacagtgattgttcagtgaacaaaatagaccccagctccgtggtcgtctatgaggatggtattccttgtaagtgttctgtatgagcacgtctcatagggatggggaagttttttggaaagtcacttgagttttaaagaaactggacaattccatgaataatttgaggttttattcatattgctaatgtctacaattgttctaaagagtattttaaagtagtttttttcccccagctaatctttccctatgtatgcccccttttaggagatttctcaccattttgctttaacacaataattattggcctacttaatactccagtgccttgagatagttggacatattttaggaagattttattgtatttggaaaattacgacacattccatgcatggatcttttgtagttacgtgttttgattagtcctgtcactgtttttatttaaaatgcagtgtcagcaaaccgaaatgctcatttcttttttagtaacagagtactcgtatacttatcactgtatgcactcattgggtctaagggagatgtctgaagtccttcacttaaattattttatgatactactgttttctctatttttgaggttaaaattattttaaaaaaatattttgaagagaagtttattagtataagcattcatttaatgcaaaaaaactcagcccttggacatataaccatgtaattctatatgaacgtttagagtactacatggttgaccaatatctagttctttactaaaagtaaactcacctctttatatatatttcaaaactgaatttgaagcctattagagaccaactgaccttttagttgtaatgaactgtatggtcttgcatggtgacacacctgtgtaggaggccaagacttggcagaggatgtagtctaggtgtcctggtatatataaatggtcactcacttcgtttatatattccacactcagaaaagaagtcagagttttttctgagtaatacaaaaaccatcacttacataatttgtataagaaactttaaacagttttaatcaaaactatgagtaacatcaaaaatgctttaagattctatattttggaatacctgtgaagtagtatgactacatcatgttaaatatttattttcttctatgattttggagcagcaatttttattttaaataaaattccacttttaagaaattcagggaagatttggtcacattgaagatacagtatttttgtagtatttataaactgttctaaatgatagactatagaaaacatttttgtcatatgaaggtaaatcagtccattattttggatcatttaaactgaacattacaccttctgggctttgatttatgaagtggcacagaatctaactttgcactgaatatcttttcattcacatctcctctgccttagtcacaatggcaacagtacagaaaattctatcaaacctcagaatatagtagaaataattaagctgttgaatgagtcttaaaaattatactactgttaagtggaccaagtttggtgaagcagaatgtgacaaaggttgattaaggaaggaacaactcaaggacattgggaatgataacttttccacttgagaactactttatgttttactgtaatttttaaagtttttttgtcctttttgttattttgcaaaagaaaatagtatttacaggtggcttcttttaaaatataaaaatataaagcaggaatgtatatgaaatgtcagattttattgtatttgcagagtattagctttgaaattgaataaagaaagctgtttgtagttttaaaatgccttattggtatcaattagaaatttcttctattttttgatgtacttagagctttttgagtgtagaattttaaatggcaggattttacagtgtttacatgcaagtgcattttataagtgttctatatgtgtaaaatagtattttcaactggaaagtgttggctagtgcaaaaggcctggccattttctggttcccatgatgttgcctacactgctagactacagtttagtatcgctttgtatcatgaggccaagaaattccatgttgtttgtaaatagaataattgaaaaagcaataaacatttattgaacaaaagaaa

SEQ ID NO: 17178 - DNA, 7911 bp, Homo sapiens
  source 1..7911: mol_type = unassigned DNA
tgaactgaggcgaactccgccgccaagtgagtgaggaggaggaggaggagaaggaggaggaggaagaggaggagcgcagtcggagcgcggcggcagcggcagaggcgccgcggcggggaccagcccagagagaccccccgagcccgcggcacaggcggcggcggcgctgagcgggctcgaccagccgagcgagcggcggccccggctcctcctcgtccggcgccagcagcccgcgccccgcgcccgcactcggccagccgagacccgcctcccgcccgcccgccggcctcgtgagggacgcgccgagccgggcggccgagagcggcggcggctgggagcgcgtcgggcccgggcggaaagtgcctgcggggggcgggcgagcgcgcggtgccggccgccccggggctcggcgcgggagccagagcgggagccggcgcggagcgggacgccgggtcccgagcggcccgcggccggggctcgcccccgcccctccctcctctccggcggcggcggcggcggcggcgggcggagtgagctgcggagcctggaatatggtcggggaaatggaaacgaaggagaagccgaagcccaccccagattacctgatgcagctgatgaacgacaagaagctcatgagcagcctgcccaacttctgcgggatcttcaaccacctcgagcggctgctggacgaagaaattagcagagtacggaaagacatgtacaatgacacattaaatggcagtacagagaaaaggagtgcagaattgcctgatgctgtgggacctattgttcagttacaagagaaactttatgtgcctgtaaaagaatacccagattttaattttgttgggagaatccttggacctagaggacttacagccaaacaacttgaagcagaaaccggatgtaaaatcatggtccgaggcaaaggctcaatgagggataaaaaaaaggaggagcaaaatagaggcaagcccaattgggagcatctaaatgaagatttacatgtactaatcactgtggaagatgctcagaacagagcagaaatcaaattgaagagagcagttgaagaagtgaagaaattattggtacctgcagcagaaggagaagacagcctgaagaagatgcagctgatggagcttgcgattctgaatggcacctacagagatgccaacattaaatcaccagcccttgccttttctcttgcagcaacagcccaggctgctccaaggatcattactgggcctgcgccggttctcccaccagctgccctgcgtactcctacgccagctggccctaccataatgcctttgatcagacaaatacagaccgctgtcatgccaaacggaactcctcacccaactgctgcaatagttcctccagggcccgaagctggtttaatctatacaccctatgagtacccctacacattggcaccagctacatcaatccttgagtatcctattgaacctagtggtgtattaggtaagttcttctccccatggggttaacaacattctctttataaatatttttgctccctcagattttgaaatgattttatcagttttagagaggcaagacaagtttgcattagggaagaccgaaaactaaattttgttttatttcagcctctcataagggttcccctttgaaataattgcaccttaaatttattcagatccactttggtaactgaggttcagtttggttgggtaaatctgttgtgtacatttcaacaaatacttttacatttgacattactgaggtcattctgagttttaggtcccaccccattggcccgtcacctccatcagctccacttctcaaactttatttgagatttattttatctcacaggtttgtgtaattgttggaaaatttttaaacttctaagtgaaagtagtctgagcgctttataaaattcatattattgtgtgtgttttgtaatatttgcgatcacttaaaatatcagataaatacagtcatgcatcgcttaacaacggggatacagtctaagaattgccttgtctggcagtttcatcatttggtgtacatcatagagtgtacttacacagacatagatgatatcgtttactacacacctaggctgtgtggtatagccattataatcttatgggaccacatagtataagtggtccgttgttgaccaaaatgttgttatgcaggcatgactgtagttgtattcttaagatttttcagttcttgtgttttggagtcctagtcatattaaacatgagagatactcttaatttcagtagtacagtatggaatagttaaataaatagcaaatcactgaattcagaatctcacttaaggcagaaattaaaatcataatataaacgcttggttttacatgaacaaaaagtggtgtgctcgaaaaagacattactgatgccttttttttatagagtggattgaaatgccagtcatgcctgatatttcagcccattgacttgctggatgaaggactagaatacagcagctgttataacacgaccagtcaatgtggaacaaactgtttctgtgcaacccctttgttttaccagacaaaatttgaatactttttttcctgaattgtatatgaccttggtgctgcatgcatgctgttgacttttaggactttgatcttttaaggttttttttccccagcattaatattgatttataaagatttgaaaatctttaatgaactggagaacactaagatttaaactcgaaaattcgttgttcaagtaaagaaagccatgatgctctgtatgttatctgtgtgtgtgcatgcactcaggtgccctttgtttcatgaacaaatacatttcattgtacatgttttctgtttaaatcattgtataaagtaattgcaggtcagaattataccacagaactgtttatgagaggcttgtgtctgttgcacatttcttgaagcatttttaaaataacatgtaacctgtaaccttgttgtttaagttttcttttctattaatactctgtcctgtggtcccgtgcatgctccttttcccagaactcctctctgctgcacccacagcatctgttcccgaggagttatgactcttgacttcctgcagggctggggctcttagccaccagctgctgttccagcactttcagcgcaagatctccctgattttgccacgtggaattgtacttgtatatgattaccttatctaaaatgaataagaggtgatggaccagtttactgcttagaaatagcaagaggcactgcagtaaaacttgtttctcattgtaaagcttcatgtcttttgtttgttggaaaatttttacttatagaaacttaattattagactggtaaaataaagaccaaaatatgcagatttctaattggcattcataaggtgaataataataagtgcccaatgaaaaaatctattatggttaatttcatttcttgctttgccacctaagcagtaaaacatgatattgaccacttggagaactcagaaaattattttaaatttctaagttataataaatttgcacacagataacatgcatgctatttatgtcacatctcacattaaattattttaaaataagcagtgcccttcaaaacagatgcagacatgtgtgttggtagtagtgaggagattggtattagcatcaagtcttcattgatgactaatttttaattcccttccttttatctttaggtatggctttcccaacgaaaggctaagaattcaagaacggtcttaactgaaccctcatcagatctgaatttaacaaatgcttagtctcagcagcctccgggggaaaaaagcttagcctagcagtcagtgacttacttgcactttttgcacatagatataaagtaaaattatgttattaatttggtttagtctgtaatattacacagtaatggtaatttataaaggagtgtatagtagtatactgactgctaagtgtactatactgtttgctttactaatcacctaattcattgcagttcatacttattgactcagagtttaaaaccacaatctgtaggctttaagaattgcttttaaacctttttaagtgataaactcttgaagtggtcttaaggttagcaaataattgtctgtattaaacatggcgttatttaagtagtcctgctgcaagaaaggcacttcagtgaatatgtgactagtaaagcttaaatatgtttggatctaatagagctcatgaaatactgtaacttggggattgtaaatgaatggatacaataggttaaggcccaagatgtttgaaatgaatgcaatattaatagatgcatatatacatgacatattgtggttaattttaaaactactgtgccttaacgtgtttcttaaacttttgtagtaaatgaacatttgaaatccattttgataaacctgctgttaatgttttttccccccttgtgaatgttttctaactttgtcttggtaattgcaatttaactaggtgcggtggctactaaagttcgaaggcacgatatgcgtgtccatccttaccaaaggattgtgaccgcagaccgaggttagtttagttctgcagttcttgtctataagaaatgcgttgggtgtccataaaatttgcaacaccacacctgatggaaaaatgtaattgcttacctgcacacagttttttttccttttctaaatttgtttgtgatcattgacagatttaagggttgggttttttgttttggtttggttttttctcccttcatattttaacttattaaatcttctattattatgtactatgatttattcctactaaaacataaattagtcaatttggggagctattaaattttgatgttgcctcagttattttcattaataacttttgctaaaatttaccttttaaaagttctgaaatttggggttggtattgcaaaatgaattgaacggatggtgctttaatgagagaagtaaaggaatatatgcctcctgtgtacttttggagaaaactgaagatttagtttccatttttctttataataaaatatttgagccactgtataaacatgagggtgcacatgtcaagtacttagctaaaatcaacaaagtgaggactgtgaagataactttcatgtagttggatttttttatataaattagagcgtcaattcccttttattcttacattctcttgccaaaatggatcctttgatttttgtcatttgctgctaaaatatattatctgaaggtaaactgtctcttgaagttctgtggtggtatgagatccagctgtgtgaatataatttttgactaacctgtgactggaaaataagtcttcatttttctcctttacaacttttataatttgtgtcctgtatatgcccttggacccttttataaattatttttgcttattgaggaatggtattttcggtttattgacattgaattgttttctaagtttttccatcacaagataggaatatcaagcatggtagtaaaaaaggattttttacaagtttctattatggcacatttgtttcctacaaattaaattgatcaaagtctcaaatattagtggaggaaaaagtgctggatttgtacttcaattgtacatcttctatgaatttatgaaggacctacctgctttatgtgattaccttgagtactgatgataaatactagacacagctgttgtccacatcagaaataacatgcctttcccaaagacattgttaatatttgtttagcataatccataaagaacgttgaagacttttaaactaatgtattcatcactaacagtgattgttcagtgaacaaaatagaccccagctccgtggtcgtctatgaggatggtattccttgtaagtgttctgtatgagcacgtctcatagggatggggaagttttttggaaagtcacttgagttttaaagaaactggacaattccatgaataatttgaggttttattcatattgctaatgtctacaattgttctaaagagtattttaaagtagtttttttcccccagctaatctttccctatgtatgcccccttttaggagatttctcaccattttgctttaacacaataattattggcctacttaatactccagtgccttgagatagttggacatattttaggaagattttattgtatttggaaaattacgacacattccatgcatggatcttttgtagttacgtgttttgattagtcctgtcactgtttttatttaaaatgcagtgtcagcaaaccgaaatgctcatttcttttttagtaacagagtactcgtatacttatcactgtatgcactcattgggtctaagggagatgtctgaagtccttcacttaaattattttatgatactactgttttctctatttttgaggttaaaattattttaaaaaaatattttgaagagaagtttattagtataagcattcatttaatgcaaaaaaactcagcccttggacatataaccatgtaattctatatgaacgtttagagtactacatggttgaccaatatctagttctttactaaaagtaaactcacctctttatatatatttcaaaactgaatttgaagcctattagagaccaactgaccttttagttgtaatgaactgtatggtcttgcatggtgacacacctgtgtaggaggccaagacttggcagaggatgtagtctaggtgtcctggtatatataaatggtcactcacttcgtttatatattccacactcagaaaagaagtcagagttttttctgagtaatacaaaaaccatcacttacataatttgtataagaaactttaaacagttttaatcaaaactatgagtaacatcaaaaatgctttaagattctatattttggaatacctgtgaagtagtatgactacatcatgttaaatatttattttcttctatgattttggagcagcaatttttattttaaataaaattccacttttaagaaattcagggaagatttggtcacattgaagatacagtatttttgtagtatttataaactgttctaaatgatagactatagaaaacatttttgtcatatgaaggtaaatcagtccattattttggatcatttaaactgaacattacaccttctgggctttgatttatgaagtggcacagaatctaactttgcactgaatatcttttcattcacatctcctctgccttagtcacaatggcaacagtacagaaaattctatcaaacctcagaatatagtagaaataattaagctgttgaatgagtcttaaaaattatactactgttaagtggaccaagtttggtgaagcagaatgtgacaaaggttgattaaggaaggaacaactcaaggacattgggaatgataacttttccacttgagaactactttatgttttactgtaatttttaaagtttttttgtcctttttgttattttgcaaaagaaaatagtatttacaggtggcttcttttaaaatataaaaatataaagcaggaatgtatatgaaatgtcagattttattgtatttgcagagtattagctttgaaattgaataaagaaagctgtttgtagttttaaaatgccttattggtatcaattagaaatttcttctattttttgatgtacttagagctttttgagtgtagaattttaaatggcaggattttacagtgtttacatgcaagtgcattttataagtgttctatatgtgtaaaatagtattttcaactggaaagtgttggctagtgcaaaaggcctggccattttctggttcccatgatgttgcctacactgctagactacagtttagtatcgctttgtatcatgaggccaagaaattccatgttgtttgtaaatagaataattgaaaaagcaataaacatttattgaacaaaagaaa

SEQ ID NO: 17179 - DNA, 9463 bp, Homo sapiens
  source 1..9463: mol_type = unassigned DNA
tgaactgaggcgaactccgccgccaagtgagtgaggaggaggaggaggagaaggaggaggaggaagaggaggagcgcagtcggagcgcggcggcagcggcagaggcgccgcggcggggaccagcccagagagaccccccgagcccgcggcacaggcggcggcggcgctgagcgggctcgaccagccgagcgagcggcggccccggctcctcctcgtccggcgccagcagcccgcgccccgcgcccgcactcggccagccgagacccgcctcccgcccgcccgccggcctcgtgagggacgcgccgagccgggcggccgagagcggcggcggctgggagcgcgtcgggcccgggcggaaagtgcctgcggggggcgggcgagcgcgcggtgccggccgccccggggctcggcgcgggagccagagcgggagccggcgcggagcgggacgccgggtcccgagcggcccgcggccggggctcgcccccgcccctccctcctctccggcggcggcggcggcggcggcgggcggagtgagctgcggagcctggaatatggtcggggaaatggaaacgaaggagaagccgaagcccaccccagattacctgatgcagctgatgaacgacaagaagctcatgagcagcctgcccaacttctgcgggatcttcaaccacctcgagcggctgctggacgaagaaattagcagagtacggaaagacatgtacaatgacacattaaatggcagtacagagaaaaggagtgcagaattgcctgatgctgtgggacctattgttcagttacaagagaaactttatgtgcctgtaaaagaatacccagattttaattttgttgggagaatccttggacctagaggacttacagccaaacaacttgaagcagaaaccggatgtaaaatcatggtccgaggcaaaggctcaatgagggataaaaaaaaggaggagcaaaatagaggcaagcccaattgggagcatctaaatgaagatttacatgtactaatcactgtggaagatgctcagaacagagcagaaatcaaattgaagagagcagttgaagaagtgaagaaattattggtacctgcagcagaaggagaagacagcctgaagaagatgcagctgatggagcttgcgattctgaatggcacctacagagatgccaacattaaatcaccagcccttgccttttctcttgcagcaacagcccaggctgctccaaggatcattactgggcctgcgccggttctcccaccagctgccctgcgtactcctacgccagctggccctaccataatgcctttgatcagacaaatacagaccgctgtcatgccaaacggaactcctcacccaactgctgcaatagttcctccagggcccgaagctggtttaatctatacaccctatgagtacccctacacattggcaccagctacatcaatccttgagtatcctattgaacctagtggtgtattaggtgcggtggctactaaagttcgaaggcacgatatgcgtgtccatccttaccaaaggattgtgaccgcagaccgagccgccaccggcaactaacctatgaccttctgacctctgaactcttcacccaatgatgacctgaccatgcctgcctgctgatcagttaactggtaatcgcctttgcttgcctgtcgtcagtgcagcgagctgaggcacttgtccgttcgtcttaccatctaaccaaacaaaagacaaagaaattgttgtcctccaactcagctttttttttttttttttcctgtttgggtgaaagtggttctagaaactgcactgaatagtagtaaagcaataaggcccaattcatcccacagcactgatcatcttttaatatcccaccctaagcgaacggtaagaaggcctctcttaagaaggggagacagatggtccttaactactcaatgacagaggcagttactgtgagagacttctaggaatctttttcttctcatagcgaagtcaaagctctctctgaatgtactgtgtgatgatgcatcatgcatgaaccttcggtcagggatatcattggtgaagtgatttcaaaaagtattcaaaatttgatatgctgtttagtcactacagtgccctcaaagggcagaagttgcagccttttttatattgcctgccaaaatttgaagtattagaagaaagtgtgccatgagagaaaaacttaaggagttttgaaaagtaatgcaaataacaaaactgcaacactatttttaaaaagataaatatctgagttaaaattactgaatctttattttacacctaaaaaaatatgagaacaaggtacatgcattatgtgtcacattactgggcaaactgttcaagtatttttttttaaacctccctgtatagaaaaaaatcattaaggatgtaaaagccatgcttgcctatttgctgtatacatgtaatgaaattgtagataaagtgtagtgcattgaaacaaatgaacaaaaagtagatacttttactatacaagggtgctggtgcagaaaaaaatatatatatttttggaaatgtagcattttatactttcaagtgttataaaaaaaaagaaaaagaacaaagaaaccctttatttcattaaatgattttttctggtggttgtcaagaaacaaaagaccaaaagagcctttttgtctttcttttttattttttaagtattggaataagtctaaagaaaagaaagtgccttattttccttcatggtcattcagtcaagtgtctcataaagatcagctcctccctcagaatacaagttaatgcatgttactcagtcgcccagtatgtgaaagaagatatgagggagacaaatgagttgatagtttgaattataggatttttgccacgttaccttgatgcaaatttgccaaatctgatactgtgaaaagatttgataacttttctaatgcctgactagtaagttttaaaacatcattctttaaaagaatagtttaatacttttggttattccaatcttcaatgttaacccaaaggattctgagataaaaattatgtgtcatctaaacttcagtttacagacaaaattagagctttgttttatttggagaagggggatgcattcatttgattttgttttttgtttttaattaattgaatataataggatacctagcaaatgttttcacaaaagtgaatctttgtgattttcattctagaaaacaatgttttaaatcacccaaatttaatcacatgtctttatatcataccagataactggtgtagtgtatccttttactgtttcaataacctctgcctcccccaccccttaactttaaaagaatgtgaaaaactagcatcatagtgcatataaatactcaaccacatttcagcttaagcttctaatttctcaagaagttgaaacagttagttatgtagttgaagcaatttgtgtgcaaagcctacatctaaacacttgagtgaataatcattaactgctcagtaccagacgtggcaaatctcaagtgacagtggacccccccccccgcccagcttatcaactcgtcccctcttccacaccttcccagcatcacagtcagaggtcagcaggaagctgagtcattaccttcttggtgacctcccccaccatcttgtctcacttggaaaccgttgtcagtttatttactatgcaatagacattcattgttttgtatccagctagctttggtttaatatgccactgctttgtctttctgttacacatacagttttgatttatttacaatatatgctgtgccattttgatttttatattgtttggttggttgaataaatttgcgacactcaaacacttgaggtgatagttgttaaaaacaataccagtatttgatccagtttcatctcaactatgttatacctggacattttagatgtttatcaaaggtcttttatggggaagaaagtaaatgtatgaaataataaatgtgtgacatttatagggaatgttggctctgaacaaacttttgaaaacttggttgacaaaattttggatcaactgaaaaaagcatgacttttgaaatctctgaatgccttggttctcagtattatcattctttattgaatttatttcttattaaaatatgtagtttttaagactttttttctgacagtattatgtaattttttagcgtgggtagatgggagtgtcgcttgtatgttatcgtacagctgacatgtatttttgtctattctttattatcttagtttcatgctatgtatgtaccataaccaacctattgcctatgagaaacatgtaagataatgtatttacagccattgttacaagtttataatgtatttttctatcttgttttatatgtatgttatataacattcaaaaagaatttttttcttgattgagaaaaggatacaaaatgcaaaatccacaattttgataactgaaaattgccaattgttttgcagtactttattatattgggtgtcttgtcttttttgggcttttagttagctaatgaatgaatacattagacacttttgggttttagttgggattttacatagcttgcattttaattctttggttctttgctgtttctattaacccacagcattattttaataaatgttataataccaacctactaactctggactttgtctgtttattaacctttatatgtttaattaaaataaacaaataaagacaaaagaatgtaaagtcttgagttactggactaaccctgaagaacgtgaccacagataacatagtgtgacttgtttttatgttgtttgtcagctgacagttttgcacactactgttaaaatggctttggttattctggtcttttagcttgggggccggggcgggtgtgggtgtaggtgcagtagagatgggaacaaagtagcctttgtttgaggcattcttctcttgccacttgcctttcagcatctgcattactaattccacaccttatttttccttctccaaaataatcactgtctgctcacagcatcgagtaaaaagatacattgtcatggtatatacctggagaaaccagtttgattctttgttgaaccatttcttttaatttctgtaaataagtaattttatggtcacattgtaaagcagagaaactgttgatattttacctttatttagatttttgttttaacttgacctttttcctttggaaagcgttgaacttgtttagctaactactcctattaggggagcttaacttgggtaaagtcaaaggcccactggctgtttctcatggtggcctgaagccccgctgctttccagtgaggaaaagaaccctcagcacgttactgagctttcctcaggtatttttttctctgtcacctactttacaaatacagtcagactaaaacattaaacaagaagtttaagggggaataacattgggatttgaaaagttgtatgtgattaatttcttgcatgcaaatcaatttaagatttcttaaatatcttcatgcttttcttggctggaacttgggtaaattaacctgtaattatgaattatttagtttaactcaaggtgcatttttatttcacagattgatacttgcttttttctgtgaaacagttctcctagataccaaaatcctcaggatgaatttttgcatttgtaaataacaatttatctttgtaaattacattttatttatttagagttctaaaattgagggctgaaatgaatgacatgtaatagaagacaaaactgtaccaatacgctgttaaccaatcagactgtccaggtattctcatttcataaatatgtatacacacatataaatacacagagtagtgttagctgatgtgagtgataacagcgaatcaccattgagatggtcatttggatcatgtaaacaaaccgtgtcatgtctctgatgggagcggtgggtagtgtactgttaggtggacaggtcttttaacatgctactatttgtaaaagtttccgttgccataacagttcatgtagtagtctgtgaaaattcgaagctgtctgtcaagctgctaatatacaagttgtcatggtaccatgtaacttaaattgatgaatttctatgcaatttactattctctgaagcctatgaatgcagcctcatctcattttcagttaagggtactttatgtataattatgtcattgctgccttttatgtaggaaatgtaaaaaagttttaaaaggcgaaaataacattacagatttcatttttatacaggttacaatattaaacatgaaactaccaaattccaagaatagtaaaattctagagtcagttgattgattgaaactatttgacaaaacagttgaaagctgagctttcagtcaagaagttggtgaaattaatgtccttaaacttttcctttaggcaaaatgtcagggaaaacttaacatgaaagtagttactcccatacgcaccagtgcagtagctccaggtgtaagaggtcacgaaggcaccctgcccataaaaccaggatgtgcatacgtacacacaatcggtgtctggttatggttttctaaacactacataaggatctgaattttttagtgtgccaaaagcaaacgataggtttaaatgaaattgctcactaccaaatcaagactcttcatatatatacgtgtgtgtatatatatatgtcataacactttcacgtgtgacagcctaaggtttctttagttttaggatggggtggggtgggagtggttttgcatgtttgaccaggatgtgatgcctgtctttattccttgataagaagtagctgttacagcatttcaagcaaattattttaggtagaatagaacttactgccaaatgattatttatttagcaaaaattattctccaacttttcgaattcacaatttttctaagtgcatagagtagttttttacattgtcacgaattccttaatacctttatttaaaatggaaaaaatatggacaatattttagaaatatgtgctacacatctaattttatctgtagtttaagtgatctaaattgagatgcctttgatatgaagagatttaccaacattatatgcactcgtgccttcaatgtggaatcaaactggttaacctcagcacagtcctctcgtttctgtgtttctgctgcactaattgccagggggtgggggagaaggcgaatgaattaattcatagtagaaggaggcgataggtgcagcaaagggcagccacagtgttgattccacattataatgttgttgcctcttcttggcaaaagacaccacattgtgggaagatctcagcttccagggtaaaagttaatttataacttaaaagtgctattaagtttttattaccaaatatatcttttatggtttatattgtagtggtatgtatgaaacatttaaaattttactgtggaaattgtgtatatatatatatatagtcgaaataggtgttcacaggtcacatgtgaacggagaactgcatgaccgtacatgaaatgcaataaaccaactggaaaaagtgcatgtgcttcatcctctcaagccaactgcagctggaaagtgctgcttatcctccacccccagaaaatgcatgtatcaatatgagaataaagaacgcacactttcaattttattgaggctttcaacactatttaaaagaaaatgtaagaatttgacattctggagttattataacattagaaaatgagcataacattcactctgattttagccattaagggagattagtaaacagactgctacagtgttccatagttggactgtgcatccaaaacatttttttatctttaataaatggtacagtttttatgtagttttcgaatgtaagaagaaaggaatgctgaccaaaacttgatttcatcagcttcatgaaaaggactagtgtcattaacctgttgaacagaattggtttattaaaaaaatcatttccagtagtgtgaaacctttacgagtctttaacatctaaatgttatgactccttgtaccttaagttttccagtctttcttatttatatcatctccaagtacctctggctcctttcctcttgctcaccggaaccttagttttcctcaacagaatgctttgttaaagtagcccacagttgcaggatccatagcaccgtcgtgcagactagcagcccaaaggtgtgtttggtttggcttatacggtgttttgctttttaaactacttgccataatttaaaagtggcaacactagacttaaaaaaaaaaaagtctgattgcccatattagattttttttttaattcttcacaaaatctgctcttcctgaaagatcaaagtgtctagaaagcccaaacatgtattcttaacatagtaggcaccagctgaaactgagtaattaaacggtcccctgaagccaagtattccctggttagtcgccaccccaccactccttcctgtctctagtgtcacacttgggctgttgattttcttactcttctcttgctttaatccttccccccggctctctggctcctgtggatatctgtgcttgtttcctggtccaggatggtgatctgactttcaaaccagcttctcaaaaggggtgacataaaatcagttttgatgtttttcctcctgaaaaatcagatgaatattttagtcactgttactcatgcacattgtgttcttatgtttacagaagtgcttaagtgaatggaagcactagacatttggatttccttcctaacgtaatttttaatgattaccccttttatacagtaatttgtggtctttagaaagcagttaaactaattgaccatctaatagttgtactatacatatgtctaaaataatagtcatggtaagtttggcatcatatcttccccaaaaaatgtttattaaaattagattattccagtttaatgctattttgtgaactgtataccctctgaaagcgcttatttttacatgctacacaacagttccaattttaaggagtgtctcctaaaattgggatgaaaatctactgtagtctgttttaaagtatgctatactatgttcattggttacttaactggatattaatataaaggttattacaagaaaaatgatgaagagcaaaaggagaagaaaatatttgcaagtgaatccacaattcttgcagaactatttgagttgatactaaagattttatgttcactcctttaccttagaactgtcaagcttgggaatgaggaaagtgccttggctgtgcttgaaacctgaattttagtgcttcccttattacattcattgttttcaatgattgatttataaaattaagacatactggtagtacaagttgaaagttggtttgaatacattttaattaaatgataatatgttaatatgcttttgttcattgctttctcactgaggtaaaacagcattaaaaagttgtccagaatttaaactga

SEQ ID NO: 17180 - DNA, 1063 bp, Homo sapiens
  source 1..1063: mol_type = unassigned DNA
ggagtgagctgcggagcctggaatatggtcggggaaatggaaacgaaggagaagccgaagcccaccccagattacctgatgcagctgatgaacgacaagaagctcatgagcagcctgcccaacttctgcgggatcttcaaccacctcgagcggctgctggacgaagaaattagcagagtacggaaagacatgtacaatgacacattaaatggcagtacagagaaaaggagtgcagaattgcctgatgctgtgggacctattgttcagttacaagagaaactttatgtgcctgtaaaagaatacccagattttaattttgttgggagaatccttggacctagaggacttacagccaaacaacttgaagcagaaaccggatgtaaaatcatggtccgaggcaaaggctcaatgagggataaaaaaaaggaggagcaaaatagaggcaagcccaattgggagcatctaaatgaagatttacatgtactaatcactgtggaagatgctcagaacagagcagaaatcaaattgaagagagcagttgaagaagtgaagaaattattggtacctgcagcagaaggagaagacagcctgaagaagatgcagctgatggagcttgcgattctgaatggcacctacagagatgccaacattaaatcaccaacagcccaggctgctccaaggatcattactgggcctgcgccggttctcccaccagctgccctgcgtactcctacgccagctggccctaccataatgcctttgatcagacaaatacagaccgctgtcatgccaaacggaactcctcacccaactgctgcaatagttcctccagggcccgaagctggtttaatctatacaccctatgagtacccctacacattggcaccagctacatcaatccttgagtatcctattgaacctagtggtgtattaggtgcggtggctactaaagttcgaaggcacgatatgcgtgtccatccttaccaaaggattgtgaccgcagaccgagccgccaccggcaactaacctatgaccttctgacctctgaactcttcacccaatg

SEQ ID NO: 17181 - DNA, 954 bp, Homo sapiens
  source 1..954: mol_type = unassigned DNA
atggtcggggaaatggaaacgaaggagaagccgaagcccaccccagattacctgatgcagctgatgaacgacaagaagctcatgagcagcctgcccaacttctgcgggatcttcaaccacctcgagcggctgctggacgaagaaattagcagagtacggaaagacatgtacaatgacacattaaatggcagtacagagaaaaggagtgcagaattgcctgatgctgtgggacctattgttcagttacaagagaaactttatgtgcctgtaaaagaatacccagattttaattttgttgggagaatccttggacctagaggacttacagccaaacaacttgaagcagaaaccggatgtaaaatcatggtccgaggcaaaggctcaatgagggataaaaaaaaggaggagcaaaatagaggcaagcccaattgggagcatctaaatgaagatttacatgtactaatcactgtggaagatgctcagaacagagcagaaatcaaattgaagagagcagttgaagaagtgaagaaattattggtacctgcagcagaaggagaagacagcctgaagaagatgcagctgatggagcttgcgattctgaatggcacctacagagatgccaacattaaatcaccaacagcccaggctgctccaaggatcattactgggcctgcgccggttctcccaccagctgccctgcgtactcctacgccagctggccctaccataatgcctttgatcagacaaatacagaccgctgtcatgccaaacggaactcctcacccaactgctgcaatagttcctccagggcccgaagctggtttaatctatacaccctatgagtacccctacacattggcaccagctacatcaatccttgagtatcctattgaacctagtggtgtattagagtggattgaaatgccagtcatgcctgatatttcagcccattga

SEQ ID NO: 17182 - DNA, 846 bp, Homo sapiens
  source 1..846: mol_type = unassigned DNA
agattacctgatgcagctgatgaacgacaagaagctcatgagcagcctgcccaacttctgcgggatcttcaaccacctcgagcggctgctggacgaagtttaattttgttgggagaatccttggacctagaggacttacagccaaacaacttgaagcagaaaccggatgtaaaatcatggtccgaggcaaaggctcaatgagggataaaaaaaaggaggagcaaaatagaggcaagcccaattgggagcatctaaatgaagatttacatgtactaatcactgtggaagatgctcagaacagagcagaaatcaaattgaagagagcagttgaagaagtgaagaaattattggtacctgcagcagaaggagaagacagcctgaagaagatgcagctgatggagcttgcgattctgaatggcacctacagagatgccaacattaaatcaccaacagcccaggctgctccaaggatcattactgggcctgcgccggttctcccaccagctgccctgcgtactcctacgccagctggccctaccataatgcctttgatcagacaaatacagaccgctgtcatgccaaacggaactcctcacccaactgctgcaatagttcctccagggcccgaagctggtttaatctatacaccctatgagtacccctacacattggcaccagctacatcaatccttgagtatcctattgaacctagtggtgtattaggtgcggtggctactaaagttcgaaggcacgatatgcgtgtccatccttaccaaaggattgtgaccgcagaccgagccgccaccggcaactaacctatgaccttctgacctctgaactcttcac

SEQ ID NO: 17183 - DNA, 495 bp, Homo sapiens
  source 1..495: mol_type = unassigned DNA
agtacctgaagtattaatttctagtagctgtgggtttctgtggacgcctagagaaaaaaaagaccacaaaaaaagtctgtttcgaaaatcgactggccaggagtttgtttgtttttttttcctgcttagaggcaccaccggaggactgtgtaaaggaaactgaaaactacagaaattagcagagtacggaaagacatgtacaatgacacattaaatggcagtacagagaaaaggagtgcagaattgcctgatgctgtgggacctattgttcagttacaagagaaactttatgtgcctgtaaaagaatacccagattttaattttgttgggagaatccttggacctagaggacttacagccaaacaacttgaagcagaaaccggatgtaaaatcatggtccgaggcaaaggctcaatgagggataaaaaaaaggaggagcaaaatagaggcaagcccaattgggagcatctaaatgaagatttacatgtactaatc

SEQ ID NO: 17184 - DNA, 583 bp, Homo sapiens
  source 1..583: mol_type = unassigned DNA
aaaaattagccgggcatggtagagtgtgcctacagtgccagctacttgggaggctgaagcagaagaatcgcttgaacctgaaattagcagagtacggaaagacatgtacaatgacacattaaatggcagtacagagaaaaggagtgcagaattgcctgatgctgtgggacctattgttcagttacaagagaaactttatgtgcctgtaaaagaatacccagattttaattttgttgggagaatccttggacctagaggacttacagccaaacaacttgaagcagaaaccggatgtaaaatcatggtccgaggcaaaggctcaatgagggataaaaaaaaggaggagcaaaatagaggcaagcccaattgggagcatctaaatgaagatttacatgtactaatcactgtggaagatgctcagaacagagcagaaatcaaattgaagagagcagttgaagaagtgaagaaattattggtacctgcagcagaaggagaagacagcctgaagaagatgcagctgatggagcttgcgattctgaatggcacctacagagatgccaacattaaatcaccaacagcccag

SEQ ID NO: 17185 - DNA, 551 bp, Homo sapiens
  source 1..551: mol_type = unassigned DNA
aacctggtaggcggcggttgcagggagaggagattgcgccactgcactccagcctgggtgacagagcgagattccatctcaaaaacaaataaaatttggaaccttttttgtaaactcttcaatgtcatagttttacagggtctcaaacttactttgcagattatatcagagaattgtgttttagagctgcaggggacctgagagttgggagtatatgttcatttcataggtgcaaagacaagtgggcagcagagctagagcaagacactcacttctgccctctgttccattttgtggcgtgcctctccacaaggggaactggagggaaaaacctggaatatttccatatgctaaaaatctgctgctgttgcctcaagttgtgaagaaattagcagagtacggaaagacatgtacaatgacacattaaatggcagtacagagaaaaggagtgcagaattgcctgatgctgtgggacctattgttcagttacaagagaaactttatgtgcctgtaaaagaatacccagattttaattttgttgggagaatcct

SEQ ID NO: 17186 - DNA, 457 bp, Homo sapiens
  source 1..457: mol_type = unassigned DNA
agttcatctttggcagtagcatgaaattagcagagtacggaaagacatgtacaatgacacattaaatggcagtacagagaaaaggagtgcagaattgcctgatgctgtgggacctattgttcagttacaagagaaactttatgtgcctgtaaaagaatacccagatttgtgacttcttgccacggtgaactactattaccgactggtgtgttggagcatggcatttgtcttgatcggtgattctcaaaacacagtccttggaccatagtatctacgctttctgggaactgtaaatgttcaagcccctttccatacttattgaatcagaaactctgggtttaattttgttgggagaatccttggacctagaggacttacagccaaacaacttgaagcagaaaccggatgtaaaatcatggtccgaggcaaaggctcaatgagggataaaaaaaaggag

SEQ ID NO: 17187 - DNA, 597 bp, Homo sapiens
  source 1..597: mol_type = unassigned DNA
ttcctctggactagcaagaatattttttttgtctaacacatttaaaatttttacttttaacagaaattagcagagtacggaaagacatgtacaatgacacattaaatggcagtacagagaaaaggagtgcagaattgcctgatgctgtgggacctattgttcagttacaagagaaactttatgtgcctgtaaaagaatacccagattttaattttgttgggagaatccttggacctagaggacttacagccaaacaacttgaagcagaaaccggatgtaaaatcatggtccgaggcaaaggctcaatgagggataaaaaaaaggaggagcaaaatagaggcaagcccaattgggagcatctaaatgaagatttacatgtactaatcactgtggaagatgctcagaacagagcagaaatcaaattgaagagagcagttgaagaagtgaagaaattattggtacctgcagcagaaggagaagacagcctgaagaagatgcagctgatggagcttgcgattctgaatggcacctacagagatgccaacattaaatcaccagcccttgccttttctcttgcagcaacagcccaggctgctc

SEQ ID NO: 17188 - DNA, 1106 bp, Homo sapiens
  source 1..1106: mol_type = unassigned DNA
agagaaaaggagtgcagaattgcctgatgctgtgggacctattgttcagttacaagagaaactttatgtgcctgtaaaagaatacccagatgaggagcaaaatagaggcaagcccaattgggagcatctaaatgaagatttacatgtactaatcactgtggaagatgctcagaacagagcagaaatcaaattgaagagagcagttgaagaagtgaagaaattattggtacctgcagcagaaggagaagacagcctgaagaagatgcagctgatggagcttgcgattctgaatggcacctacagagatgccaacattaaatcaccagcccttgccttttctcttgcagcaacagcccaggctgctccaaggatcattactgggcctgcgccggttctcccaccagctgccctgcgtactcctacgccagctggccctaccataatgcctttgatcagacaaatacagaccgctgtcatgccaaacggaactcctcacccaactgctgcaatagttcctccagggcccgaagctggtttaatctatacaccctatgagtacccctacacattggcaccagctacatcaatccttgagtatcctattgaacctagtggtgtattaggtgcggtggctactaaagttcgaaggcacgatatgcgtgtccatccttaccaaaggattgtgaccgcagaccgagccgccaccggcaactaacctatgaccttctgacctctgaactcttcacccaatgatgacctgaccatgcctgcctgctgatcagttaactggtaatcgcctttgcttgcctgtcgtcagtgcagcgagctgaggcacttgtccgttcgtcttaccatctaaccaaacaaaagacaaagaaattgttgtcctccaactcagctttttttttttttttttcctgtttgggtgaaagtggttctagaaactgcactgaatagtagtaaagcaataaggcccaattcatcccacagcactgatcatcttttaatatcccaccctaagcgaacggtaagaaggcctctcttaagaaggggagacagatggtccttaactactcaatgacagaggcagttactgtgagagactt

SEQ ID NO: 17189 - DNA, 588 bp, Homo sapiens
  source 1..588: mol_type = unassigned DNA
catgtactctgtaaattttttaggaggagcaaaatagaggcaagcccaattgggagcatctaaatgaagatttacatgtactaatcactgtggaagatgctcagaacagagcagaaatcaaattgaagagagcagttgaagaagtgaagaaattattggtacctgcagcagaaggagaagacagcctgaagaagatgcagctgatggagcttgcgattctgaatggcacctacagagatgccaacattaaatcaccagcccttgccttttctcttgcagcaacagcccaggctgctccaaggatcattactgggcctgcgccggttctcccaccagctgccctgcgtactcctacgccagctggccctaccataatgcctttgatcagacaaatacagaccgctgtcatgccaaacggaactcctcacccaactgctgcaatagttcctccagggcccgaagctggtttaatctatacaccctatgagtacccctacacattggcaccagctacatcaatccttgagtatcctattgaacctagtggtgtattagagtggattgaaatgccagtcatgcctgatattt

SEQ ID NO: 17190 - DNA, 613 bp, Homo sapiens
  source 1..613: mol_type = unassigned DNA
attgaagagagcagttgaagaagtgaagaaattattggtacctgcagcagaaggagaagacagcctgaagaagatgcagctgatggagcttgcgattctgaatggcacctacagagatgccaacattaaatcaccagcccttgccttttctcttgcagcaacagcccaggctgctccaaggatcattactgggcctgcgccggttctcccaccagctgccctgcgtactcctacgccagctggccctaccataatgcctttgatcagacaaatacagaccgctgtcatgccaaacggaactcctcacccaactgctgcaatagttcctccagggcccgaagctggtttaatctatacaccctatgagtacccctacacattggcaccagctacatcaatccttgagtatcctattgaacctagtggtgtattaggtgcggtggctactaaagttcgaaggcacgatatgcgtgtccatccttaccaaaggattgtgaccgcagaccgagtcacaatggcaacagtacagaaaattctatcaaacctcagaatatagtagaaataattaagctgttgaatgagtcttaaaaattatactactgttaagtggacc

SEQ ID NO: 17191 - DNA, 1097 bp, Homo sapiens
  source 1..1097: mol_type = unassigned DNA
catgaaatactgtaacttggggattgtaaatgaatggatacaataggttaaggcccaagatgtttgaaatgaatgcaatattaatagatgcatatatacatgacatattgtggttaattttaaaactactgtgccttaacgtgtttcttaaacttttgtagtaaatgaacatttgaaatccattttgataaacctgctgttaatgttttttccccccttgtgaatgttttctaactttgtcttggtaattgcaatttaactaggtgcggtggctactaaagttcgaaggcacgatatgcgtgtccatccttaccaaaggattgtgaccgcagaccgagccgccaccggcaactaacctatgaccttctgacctctgaactcttcacccaatgatgacctgaccatgcctgcctgctgatcagttaactggtaatcgcctttgcttgcctgtcgtcagtgcagcgagctgaggcacttgtccgttcgtcttaccatctaaccaaacaaaagacaaagaaattgttgtcctccaactcagctttttttttttttttttcctgtttgggtgaaagtggttctagaaactgcactgaatagtagtaaagcaataaggcccaattcatcccacagcactgatcatcttttaatatcccaccctaagcgaacggtaagaaggcctctcttaagaaggggagacagatggtccttaactactcaatgacagaggcagttactgtgagagacttctaggaatctttttcttctcatagcgaagtcaaagctctctctgaatgtactgtgtgatgatgcatcatgcatgaaccttcggtcagggatatcattggtgaagtgatttcaaaaagtattcaaaatttgatatgctgtttagtcactacagtgccctcaaagggcagaagttgcagccttttttatattgcctgccaaaatttgaagtattagaagaaagtgtgccatgagagaaaaacttaaggagttttgaaaagtaatgcaaataacaaaactgcaacactatttttaaaaagataaatatctgagttaaaattactgaatctttattttacacctaaaaaaatatg

SEQ ID NO: 17192 - DNA, 6085 bp, Homo sapiens; identical to SEQ ID NO: 17175
  source 1..6085: mol_type = unassigned DNA

SEQ ID NO: 17193 - DNA, 5685 bp, Homo sapiens; identical to SEQ ID NO: 17176
  source 1..5685: mol_type = unassigned DNA

SEQ ID NO: 17194 - DNA, 6964 bp, Homo sapiens; identical to SEQ ID NO: 17177
  source 1..6964: mol_type = unassigned DNA

SEQ ID NO: 17195 - DNA, 7911 bp, Homo sapiens; identical to SEQ ID NO: 17178
  source 1..7911: mol_type = unassigned DNA

SEQ ID NO: 17196 - DNA, 9463 bp, Homo sapiens; identical to SEQ ID NO: 17179
  source 1..9463: mol_type = unassigned DNA

SEQ ID NO: 17197 - DNA, 1063 bp, Homo sapiens; identical to SEQ ID NO: 17180
  source 1..1063: mol_type = unassigned DNA

SEQ ID NO: 17198 - DNA, 954 bp, Homo sapiens; identical to SEQ ID NO: 17181
  source 1..954: mol_type = unassigned DNA

SEQ ID NO: 17199 - DNA, 846 bp, Homo sapiens; identical to SEQ ID NO: 17182
  source 1..846: mol_type = unassigned DNA

SEQ ID NO: 17200 - DNA, 495 bp, Homo sapiens; identical to SEQ ID NO: 17183
  source 1..495: mol_type = unassigned DNA

SEQ ID NO: 17201 - DNA, 583 bp, Homo sapiens; identical to SEQ ID NO: 17184
  source 1..583: mol_type = unassigned DNA

SEQ ID NO: 17202 - DNA, 551 bp, Homo sapiens; identical to SEQ ID NO: 17185
  source 1..551: mol_type = unassigned DNA

SEQ ID NO: 17203 - DNA, 457 bp, Homo sapiens; identical to SEQ ID NO: 17186
  source 1..457: mol_type = unassigned DNA

SEQ ID NO: 17204 - DNA, 597 bp, Homo sapiens; identical to SEQ ID NO: 17187
  source 1..597: mol_type = unassigned DNA

SEQ ID NO: 17205 - DNA, 1106 bp, Homo sapiens; identical to SEQ ID NO: 17188
  source 1..1106: mol_type = unassigned DNA

SEQ ID NO: 17206 - DNA, 588 bp, Homo sapiens; identical to SEQ ID NO: 17189
  source 1..588: mol_type = unassigned DNA

SEQ ID NO: 17207 - DNA, 613 bp, Homo sapiens; identical to SEQ ID NO: 17190
  source 1..613: mol_type = unassigned DNA

SEQ ID NO: 17208 - DNA, 1097 bp, Homo sapiens; identical to SEQ ID NO: 17191
  source 1..1097: mol_type = unassigned DNA

SEQ ID NO: 17209 - DNA, 913 bp, Homo sapiens
  source 1..913: mol_type = unassigned DNA
gactttcagggcctgctgaggaatctgcaggcctggcagaggacaggagggaggcttggggagcctgggaagggccggctgacagcttgatgggccctccctccctccacagtcccacccccagcctggggcctctgggagccttggtcctgagcagccaacacaccagcccagacagctgcaagtcaccatggacgctgaaggcggtgcgggcggccagacaggcggctgacttcactctgaaggtggaagtggaatgcagcagcctgcaggaggccgtgcaggcagctgaggctggtgccgaccttgtcctgctggacaacttcaagccagaggagctgcaccccacggccaccgtgctgaaggcccagttcccgagtgtggctgtggaagccagtgggggcatcaccctggacaacctcccccagttctgcgggccgcacatagacgtcatctccatggggatgctgacccaggcggccccagcccttgatttctccctcaagctgtttgccaaagaggtggctccagtgcccaaaatccactagtcctaaaccggaagaggatgacaccggccatgggttaacgtggctcctcaggaccctctgggtcacacatctttagggtcagtggccaatggggcacatttggcactagcttgagcccaactctggctctgccacctgctgctcctgtgacctgtcagggctgacttcacctctgctcatctcagtttcctaatctgtaaaatgggtctaataaaggatcaaccacatggggttctgcggtgataatgagcacatagtgaggggtcagcaaatgtcagaagttacctgggacagccgggcacgatggctcacacctgtaatcccagcactttgggaggctgaggcgggaagatcacttgagttca

SEQ ID NO: 17210 - DNA, 2343 bp, Homo sapiens
  source 1..2343: mol_type = unassigned DNA
ggcctggcagaggacaggagggaggcttggggagcctgggaagggccggctgacagcttgatgggccctccctccctccacagtcccacccccagcctggggcctctgggagccttggtcctgagcagccaacacaccagcccagacagctgcaagtcaccatggacgctgaaggcctggcgctgctgctgccgcccgtcaccctggcagccctggtggacagctggctccgagaggactgcccagggctcaactacgcagccttggtcagcggggcaggcccctcgcaggcggcgctgtgggccaaatcccctggggtactggcagggcagcctttcttcgatgccatatttacccaactcaactgccaagtctcctggttcctccccgagggatcgaagctggtgccggtggccagagtggccgaggtccggggccctgcccactgcctgctgctgggggaacgggtggccctcaacacgctggcccgctgcagtggcattgccagtgctgccgccgctgcagtggaggccgccaggggggccggctggactgggcacgtggcaggcacgaggaagaccacgccaggcttccggctggtggagaagtatgggctcctggtgggcggggccgcctcgcaccgctacgacctgggagggctggtgatggtgaaggataaccatgtggtggccgccggtggcgtggagaaggcggtgcgggcggccagacaggcggctgacttcactctgaaggtggaagtggaatgcagcagcctgcaggaggccgtgcaggcagctgaggctggtgccgaccttgtcctgctggacaacttcaagccagaggagctgcaccccacggccaccgtgctgaaggcccagttcccgagtgtggctgtggaagccagtgggggcatcaccctggacaacctcccccagttctgcgggccgcacatagacgtcatctccatggggatgctgacccaggcggccccagcccttgatttctccctcaagctgtttgccaaagaggtggctccagtgcccaaaatccactagtcctaaaccggaagaggatgacaccggccatgggttaacgtggctcctcaggaccctctgggtcacacatctttagggtcagtggccaatggggcacatttggcactagcttgagcccaactctggctctgccacctgctgctcctgtgacctgtcagggctgacttcacctctgctcatctcagtttcctaatctgtaaaatgggtctaataaaggatcaaccacatggggttctgcggtgataatgagcacatagtgaggggtcagcaaatgtcagaagttacctgggacagccgggcacgatggctcacacctgtaatcccagcactttgggaggctgaggcgggaagatcacttgagttcaggagtttgagaccagcctggccaacatggtgaaaccccatctctaccaaaaatagaagaattagctgggtgtggtggcacgcgcctgtaatcccagctacttaggaggctgaggcaggagaatcgcttgaacccaggaagtggaggttgcagtgagctgatggtgccactgcactccagcctgggtgatagagcgagactctgtctccaaagaagaaacaaaggaaagaaagagagaaagagagagggagggagggagggagggaaaggaaggatggaaagaaaggaagaaaggcaggcaaaagccccagacaggccaaaaccttcatccttcatgcacccaacctgtaccaaacaccagcatggcctggctgtgagtgcacagcagatggaggtttgctgggcagagacactgggctggcctagacactgcctttggtgataccctaaaccaaaggggccagtcccacagtaagaaggagaccactactactcctgctgccctcctccccccaccttgcctagtttacaagacaggaggaaagagagaaagcaaaaagttagaaaacaaaacaaaacagaagtaagataaatagccagaagaccttggcgacaccacccggccctggtagttaaaaaaaagtaacaataataataatatcaacccctgacctaaactacttgtgttatctgtaaattccagacattgtatgaaaaagcattgcaaaactttctgctctgttagctgatgcgtgtagcccccagtcacgttccccgcttgcttgagatatcatgaccctttcacgtggaccccttagagttgtaagcctttaaaaaggccaagaatttctttttcagggatctcagctattaagatgcaagtctgccaatgctcctggccaaataaacctcttccttctttaa

SEQ ID NO: 17211 - DNA, 579 bp, Homo sapiens
  source 1..579: mol_type = unassigned DNA
acagctgcaagtcaccatggacgctgaaggcctggcgctgctgctgccgcccgtcaccctggcagccctggtggacagctggctccgagaggactgcccagggctcaactacgcagccttggcggtgcgggcggccagacaggcggctgacttcactctgaaggtggaagtggaatgcagcagcctgcaggaggccgtgcaggcagctgaggctggtgccgaccttgtcctgctggacaacttcaagccagaggagctgcaccccacggccaccgtgctgaaggcccagttcccgagtgtggctgtggaagccagtgggggcatcaccctggacaacctcccccagttctgcgggccgcacatagacgtcatctccatggggatgctgacccaggcggccccagcccttgatttctccctcaagctgtttgccaaagaggtggctccagtgcccaaaatccactagtcctaaaccggaagaggatgacaccggccatgggttaacgtggctcctcaggaccctctgggtcacacatctttagggtcagtggccaatggggcacatttggcactagcttg

SEQ ID NO: 17212 - DNA, 2199 bp, Homo sapiens
  source 1..2199: mol_type = unassigned DNA
tttttttttttttttttttttgagatggggtctcactatgttgcccaggctggtctcaaacttctggactcaagtgatcctcccaccttggccacccaaagtgctgggattataggcataagccaccatgcctggttttggaattggttctttatctttgttctgctgctgcgtggcgtgatgttcaagagcaaaggacaacacaggggaagccagtgtcactggcaccacagccttgagcccatctctctagccctctgcaccttatttcccatctgtgaaatgcccttaaacaccccttctaattttaatattctgagtcaaattgagctcaggtccaaatgccaaatattgctgatattcatccactttttgacccacaaaagtggtcattttaacctacaataaaacatcctggctcagtggctcatacctgtaatcccagcactttgggaggcccagttggggggattacttaagtccaggagtctgagaccagcctgggccatatagcaagattctgtctctacaaaaaattaaaaaattagccatgcttgtgggcaagcccctgtagtcccagccacttgggaggctgaggtgggaggatcacttgatcccaggaggtggaggctgcagtgaactatgactgcactgaactccagcctgggcgacagagcgggaccctgactcaaaaacaaaacagtggccaggtgcggtggctcacgcctgtaatcccagcactttgggaggctgagatgggtggatcacgaggtcatgagttagagaccatcctggccaccatggtgaaacgtcgtctctattaaaaatacaaaaattagctgggcatggtggcacgcacctgtagtcccagctactcgggagactgaggtgggagaatcacttgatcccaggaggtagaggctgcagtgagctatcattgcaccactgcactccagcctgggcgacaggttgagaccctgtctcaaaaacaaaacaaagcaaaaacaaccccaaagtctggtttccttattaaccccaagttcatggtccacccgaagcttttcaaatgtcagtcccggctccccgcgccccagctgcagtgctgggccctatcgtcaccctcgccctcccggctccctgcgccccagtgccaggtgctgggcccagtcctcacccttgtcctcccggctgcccagcaggcggtgcgggcggccagacaggcggctgacttcactctgaaggtggaagtggaatgcagcagcctgcaggaggccgtgcaggcagctgaggctggtgccgaccttgtcctgctggacaacttcaagccagaggtaaggtgggctctgcctccggggagggatctgtggtgggctcttacctccccttggcttgtgtcccgcaggagctgcaccccacggccaccgtgctgaaggcccagttcccgagtgtggctgtggaagccagtgggggcatcaccctggacaacctcccccagttctgcgggccgcacatagacgtcatctccatggggatgctgacccaggcggccccagcccttgatttctccctcaagctgtttgccaaagaggtggctccagtgcccaaaatccactagtcctaaaccggaagaggatgacaccggccatgggttaacgtggctcctcaggaccctctgggtcacacatctttagggtcagtggccaatggggcacatttggcactagcttgagcccaactctggctctgccacctgctgctcctgtgacctgtcagggctgacttcacctctgctcatctcagtttcctaatctgtaaaatgggtctaataaaggatcaaccacatggggttctgcggtgataatgagcacatagtgaggggtcagcaaatgtcagaagttacctgggacagccgggcacgatggctcacacctgtaatcccagcactttgggaggctgaggcgggaagatcacttgagttcaggagtttgagaccagcctggccaacatggtgaaaccccatctctaccaaaaatagaagaattagctgggtgtggtggcacgcgcctgtaatcccagctacttaggaggctgaggcaggagaatcgcttgaacccaggaagtggaggttgcagtgagctgatggtgccactgcactccagcctgggtgatagagcgagactctgtctccaaagaagaaac

SEQ ID NO: 17213 - DNA, 6253 bp, Homo sapiens
  source 1..6253: mol_type = unassigned DNA
ctcgcttctggagtgttatcgtcaccatgtccctaatggtctcggctggccggggcctgggggccgtgtggtccccaacccacgtgcaggtgacggtgctgcaggcgcggggcctgcgggccaagggccccgggggcacgagcgacgcgtacgcggtgatccaggtgggcaaggagaagtacgccacctccgtgtcggagcgcagcctgggcgcgcccgtgtggcgcgaggaggccaccttcgagctgccatcgctgctgtcctccggacccgcggccgccgccaccctgcagctcaccgtgctgcaccgcgcgctgctcggcctcgacaagttcctgggccgcgccgaggtggacctgcgggatctgcaccgcgaccagggccgcaggaagacgcagtggtataagttgaaatccaaaccaggaaagaaggacaaggagcgaggagaaattgaggttgacatccagtttatgagaaacaacatgactgccagcatgtttgacctttctatgaaagacaagtctcggaatccatttggaaagctgaaggacaagatcaaggggaagaataaggacagtgggtcagacaccgcctccgccatcatccctagcacgacaccttcggtcgacagtgatgatgagtctgtggttaaagacaagaaaaagaaatcaaagatcaagaccttactttccaagtcaaatttgcagaagacgcctctttcccagtccatgtctgtcctgccgacttcaaagccagaaaaagtgctgcttcgtcccggagactttcagtcccagtgggatgaagatgacaatgaggatgagtcctcctcggcctcggatgtcatgtctcacaagagaacagcgagtacggatcttaagcaactgaaccaggtcaactttacccttcccaagaaggaaggactttcctttcttggtggccttcggtctaagaatgatgtcctttcccgctctaatgtctgcatcaatgggaaccatgtttacctggagcagccagaagccaagggtgagatcaaggatagcagcccgtcctcctccccatcccccaagggcttcagaaagaagcatttgttctcttctacagagaacctggcggctgggtcttggaaggagcctgctgaaggaggtgggctgtcttctgacaggcagctctccgaatcttccaccaaggactccttgaagtctatgaccctgccgtcctaccgacctgccccactggtcagtggggacctcagggaaaacatggcccccgcaaactcagaggccacaaaagaagctaaggagagcaagaagccagagagcaggaggtcctctttgctgtctctgatgacggggaagaaggatgtggctaagggcagtgaaggtgaaaaccctctcacggtcccagggagggagaaggaaggcatgctgatgggggttaagccgggggaggacgcatcggggcctgctgaagaccttgtgagaagatctgagaaagatactgcagctgttgtctccagacagggcagctccctgaacctctttgaagatgtgcagatcacagaaccagaagctgagccagagtccaagtctgaaccgagacctccaatttcctctccgagggctccccagaccagagctgtcaagccccgacttcatcctgtgaagccaatgaatgcaatggccaccaaggttgctaactgcagcttgggaactgccaccatcatcagtgagaacttgaacaatgaggtcatgatgaagaaatacagcccctcggaccctgcatttgcatatgcgcagctgacccacgatgagctgattcagctggtcctcaaacagaaggaaacgataagcaagaaggagttccaggtccgcgagctggaagactacattgacaacctgcttgtcagggtcatggaagaaacccccaatatcctccgcatcccgactcaggttggcaaaaaagcaggaaagatgtaaatcagcagaaaaaaaacaccgagacgtttctgtgacttcactttcacctgctccaggggtcaaggacttgccttgcctgataaccagccagcaggctccgaatcaccatctccctcacatgttatccggcaagagtgaattctaccaatggaagccaggttaatgattacaattaatcttttactgtacattcccaaggctttagttttaaatgccactgtgcctttaacaaggttgtaaatattttatgcccaccagagatgtggtcataagatctgatcctgagccagagattcagatggcacaggaagtattcatgtattttaacactggggttttctttctttcatactgagattttttttcagtatgtatcctccagctcttaaagcttacctgagaaagctttaaatgagaaaaggaccatgcgattggtgctgtgttacatacacatactttcttggcttctgagtagctcaggtgtggcttttggctgcagatgttaaattttgataccatgtaaacctacccagcttctcagacttgggtcttgttttttgatgggaacagaggtgtttagagaaagcctctgagtatgcctttcagattttgaacaagcggccttttctaaacatcgacttctactactctctagccttaaaataccttctgcttagatccagggcccttctactggagataggaaaagtagaattcaggaattaaaagaattactctttattcaatttgaggaacttggtgaaagcccctcctcttatgacagccaggttcctgctggctagaccagcctattcagcgctttgctaggggattgggtggtccacgcactcgctaatacagttctccaggtgtggaatgatgtcaatacgattgcttggccttttccccctgtgcctttgctcggtgctctggtttcctcagcaacactccttgtaaggggcagagacagggtccaccaactccccaagatgaagaagccccttcaggccagtcgtggtggctcatgcctgtaatcccagcactttgcaaggccgaggagggtggatcacttgaggtcaggagttcgagaccagcctgaccaacatggcgaaaccccatctctactaaaaatacaaaaattagcttggcatggtggtgcgtgcctgtaatcccagctactcgggaggctggggcaggagaattgcttgaacttgggagatggaggctgcagcgagccaagatcgtgccactgcactccagcctgggcaagagtttttttaagactcttaaaaaaagagcctgggcaatttttttaagactctgtcttaaaaaaaactaaaaagaaaaaaagaagccccttcactctacaggggacaggagaccatggattggaccccaaagggattgaactgcatctgcatgtctgtcctttgaacactttctctccctgcccaaaaggaaacccaaattatttgtgggatactggggaaattgtagtgaagggcttaatgtagttaataaaagttaaaagtcagtagaaaacaggtgcctcagccttcaaatggttgctttttttccattttccctcatgaatagactcaccagcattttacccccttgttataaaactgtgcagagcaagaagatgatacttatttttgaatttgtatttttaaaactagatttatagactttttttttttttaactagggcacttgcttccttcttagctaaaagcaccagctgagatttttcaggtaattttgttgttactcacttaagactggaattagaatgtttctggtatttctcatttttttccctggctatgatagaatctcatctaatcttgacatctctcctaggggaagaatatcacaggctaatagcgtggttgggggtgaagatgatagcagttattaaatcaggaatctcttttatgtgtgtccttgttacattgaggttaagagacaaaatcattggcagtgcaatctctttccaggatttcgtttgctgtggcattggttatatcagagcactttaatctgaaggatgatactgtaacttgatttatctaattagcttttaattatctacagctattttattttatttaattctctcctacagtactgggaccactgtaaacttctcagatgacttgtatttttgtagtgctatgaaatttatttacatacttataaagaaaactgtatgttcacttgaactctgaaaatgtacatgtatggctggacgcggtggctcacgcctgtaatcccagcactttgggaggctgaggcgggtgaatcacttgattgaggtcaggagttcgagaccagcctggccaacatggcaaaaccccgtctctactaaaaaatacagaaattagctgggtgtggtggcagacagctgtaatctcagctgctcgggaggctgaggcacaagaatcgcttgagccagggaggtggaggttgcagtgagctgagatcacatcattgcactccagcctgggcaacgggcgagactctgtctcaaaaaaaagaaagaaagaaaaggtacatgtatatatttgtcctgcattatgttttttacttgatataaatgtatttttactgtgatagtccaagtgccctggggggcaggtgtgctctatgtggttcttcttccattggagagctggcgtagagatctgcagtgttcacaaggatgttggtttggagatgtctgctgctaggacctggggtgtgtgactcagtccatatgagagggacatctgggtggaggagtaaattcctgtgctctgaaatgccacttggtagctctggacaatgaaggacaattgactcaagggtgcctggcttctgctgctgctgggaaaaaattcagtttatagcattcctgcacctcccaaagtagataacctggaggtcattcagttaacaactgtccctgaggactcagttttgggggaggggttatctgggagaagctttagcctgttctgagccattaggagacattagtgaattggagcactggagaatcctacaaatggcctatgtctcagaagagctgggacctccttccagctgctgcagatgctgacaggccctgggaggctgctgtgctctggagaagctggagcagctcatttcttggcctagcctggctgcctcagaaagagcagtcaggacttgagggaagcatcaaattctatacccataaactgcagttggaagtcagctttttgaaatgtccagcctttgcccaattgtttcagatcatctcatgcctcaggctttggcaggtatcctgccctccatcttattccagtgtgttcacctcatcaaggcagcagagtggatgaaggagtaagtctgccctttgccatactgaacagctgtggaccccgattggtgagggctctgcatatgcctgtatgaaggagatacaggtgtgtgtgcacatgccggtatgaagaagacacaggcatgtgcttctcagttttgctaacagtgggagctcaacggggcagagggaggaaggtccatgatgctcagccacatactgtagagagaggcaatttaatgttaaatgacgcaccatcctccctcccacccttctcccagtcaactttttttctttttctagaactactaattatctctcaaggctgaaaaattaattgccttaggtggagaacttaattcctagtatccaccaaacttaactccgtatctccatatggtgtctccatatctactgtgtgagctacttaactgacgccctcttcctccaactgaaggatcgcccaacgtttttggattatagaattattatttcctgctttctttctttgggacttttgaatttctttggtttcgtttttaagaagtaacccaacatttcctacaacactaaataaaatggtacttacctttcaaagatttgtgtctgtagtttggtatgggtgcaataaaaatttattttgtcttcctggaaaacctctcttggtgggggtggggggatgaccagtgtttctcatcccatgagggtctctcactgggatttctgttgctgccatcttgcctggttcccaggagtcccaaggccctttttctcaaagaggacggacatgtctggtcccttcggatgcacccttcatcttggcctgagggaccatggcactggccagagaaactgagttggaacgtgctgcccccttttcctttgcagccggtacccttggctgagcatttggacagggtctttcctc

SEQ ID NO: 17214 - DNA, 7811 bp, Homo sapiens
  source 1..7811: mol_type = unassigned DNA
tgttatcgtcaccatgtccctaatggtctcggctggccggggcctgggggccgtgtggtccccaacccacgtgcaggtgacggtgctgcaggcgcggggcctgcgggccaagggccccgggggcacgagcgacgcgtacgcggtgatccaggtgggcaaggagaagtacgccacctccgtgtcggagcgcagcctgggcgcgcccgtgtggcgcgaggaggccaccttcgagctgccatcgctgctgtcctccggacccgcggccgccgccaccctgcagctcaccgtgctgcaccgcgcgctgctcggcctcgacaagttcctgggccgcgccgaggtggacctgcgggatctgcaccgcgaccagggccgcaggaagacgcagtggtataagttgaaatccaaaccaggaaagaaggacaaggagcgaggagaaattgaggttgacatccagtttatgagaaacaacatgactgccagcatgtttgacctttctatgaaagacaagtctcggaatccatttggaaagctgaaggacaagatcaaggggaagaataaggacagtgggtcagacaccgcctccgccatcatccctagcacgacaccttcggtcgacagtgatgatgagtctgtggttaaagacaagaaaaagaaatcaaagatcaagaccttactttccaagtcaaatttgcagaagacgcctctttcccagtccatgtctgtcctgccgacttcaaagccagaaaaagtgctgcttcgtcccggagactttcagtcccagtgggatgaagatgacaatgaggatgagtcctcctcggcctcggatgtcatgtctcacaagagaacagcgagtacggatcttaagcaactgaaccaggtcaactttacccttcccaagaaggaaggactttcctttcttggtggccttcggtctaagaatgatgtcctttcccgctctaatgtctgcatcaatgggaaccatgtttacctggagcagccagaagccaagggtgagatcaaggatagcagcccgtcctcctccccatcccccaagggcttcagaaagaagcatttgttctcttctacagagaacctggcggctgggtcttggaaggagcctgctgaaggaggtgggctgtcttctgacaggcagctctccgaatcttccaccaaggactccttgaagtctatgaccctgccgtcctaccgacctgccccactggtcagtggggacctcagggaaaacatggcccccgcaaactcagaggccacaaaagaagctaaggagagcaagaagccagagagcaggaggtcctctttgctgtctctgatgacggggaagaaggatgtggctaagggcagtgaaggtgaaaaccctctcacggtcccagggagggagaaggaaggcatgctgatgggggttaagccgggggaggacgcatcggggcctgctgaagaccttgtgagaagatctgagaaagatactgcagctgttgtctccagacagggcagctccctgaacctctttgaagatgtgcagatcacagaaccagaagctgagccagagtccaagtctgaaccgagacctccaatttcctctccgagggctccccagaccagagctgtcaagccccgactggaagtgtctccagaggcgcaacccacagccaggcttccttcccctactgactccccttcctctcttcctcctcttccttctagctctggccaggcatctgtcccctctgaattgggacatggtgcagacacacagtcctctgagagtccttctgtcttctcctctctctcatctcccatagcagctcccatttccacatccactccaattgaaagctggcctctcgtagacaggggccaggccaagtctgaaggaccacccttgctccctaaggcagagttgcaaactgagagtttaacaccggttccaaattctggttcttctgccctgggatcacttttcaaacagccatcctttccagcaaataaagggacagaagattctctgatgggcaggacccgtgagacaggcacagagaagaacaccagcagccttgagttggaggagtctctcccagagcagcctgaaacagggcgacaagaggaagaacttccgagattcccctgcaaaaaacaagactacagcccatcatctggagaagcccaggaagtaccgtttgccctttcactcagcagtgatggagctgtgagccctgttggggagcttgcagcaggaggagacagagacttggagagtcaggctgggtctcttgtggagagcaaagccagggatgcagctgaagaagtggcgccccctcttcccatgggagcatcagtcccttccattgattccatgatgcggaagctggaagagatgggtctgaacctccgcaaggaccagaagaaaaccaagaagcgtgtgtcattttctgagcagctcttcacggaagaggcagtggcgggggctgccttgctggtggaaggacacagcagttgtccccaggagctgaaccctgcatggtctgttgctggaaacgcgtctgacggagagcctcctgagtctccccacgcagaggactcagaaagggaatcggtgaccacacctgggccagcgacgtgtggtgcgccagcctccccagcggatcacctcctcctcccctcccaggaggagagtttctccgaagtccccatgagtgaagcaagctcagcgaaagacactccactctttaggatggagggagaggatgcccttgtgactcagtatcagagcaaagccagtgaccacgaaggtttattgtctgaccccttgagtgaccttcagttggtctcagattttaaatctccaatcatggccgatctgaacttaagccttccttccattcctgaagtcgcatcggatgatgaaagaatagatcaggttgaagatgacggagatcaggttgaagatgatggagagacagcaaagtcgtcaactctggacataggagctttgtccttgggcttggtagtcccctgtcctgagaggggaaaggggcccagtggcgaggcagataggttggtactgggggagggcctgtgtgatttcaggctgcaagcaccccaggcatctgtgacagctccttcagagcagaccacagagttcggaattcacaaaccacatcttggcaagagctcaagcttggataaacagctgccaggccccagtggtggtgaggaagaaaaaccgatgggaaatgggagtccaagcccgcctcctggcacatccctggacaatcctgtacccagcccctccccttctgagatctttcctgtcacacactctttccccagctctgcacattctgacactcaccacaccagcacagcagaatctcaaaaaaaagccacagcagagggctccgctggtagagttgaaaattttggcaagaggaagccactcctccaggcctgggtctcaccctcggagacacatccagtctcagctcagccaggcgctggaactgggtcagccaagcacagacttcatcctgtgaagccaatgaatgcaatggccaccaaggttgctaactgcagcttgggaactgccaccatcatcagtgagaacttgaacaatgaggtcatgatgaagaaatacagcccctcggaccctgcatttgcatatgcgcagctgacccacgatgagctgattcagctggtcctcaaacagaaggaaacgataagcaagaaggagttccaggtccgcgagctggaagactacattgacaacctgcttgtcagggtcatggaagaaacccccaatatcctccgcatcccgactcaggttggcaaaaaagcaggaaagatgtaaatcagcagaaaaaaaacaccgagacgtttctgtgacttcactttcacctgctccaggggtcaaggacttgccttgcctgataaccagccagcaggctccgaatcaccatctccctcacatgttatccggcaagagtgaattctaccaatggaagccaggttaatgattacaattaatcttttactgtacattcccaaggctttagttttaaatgccactgtgcctttaacaaggttgtaaatattttatgcccaccagagatgtggtcataagatctgatcctgagccagagattcagatggcacaggaagtattcatgtattttaacactggggttttctttctttcatactgagattttttttcagtatgtatcctccagctcttaaagcttacctgagaaagctttaaatgagaaaaggaccatgcgattggtgctgtgttacatacacatactttcttggcttctgagtagctcaggtgtggcttttggctgcagatgttaaattttgataccatgtaaacctacccagcttctcagacttgggtcttgttttttgatgggaacagaggtgtttagagaaagcctctgagtatgcctttcagattttgaacaagcggccttttctaaacatcgacttctactactctctagccttaaaataccttctgcttagatccagggcccttctactggagataggaaaagtagaattcaggaattaaaagaattactctttattcaatttgaggaacttggtgaaagcccctcctcttatgacagccaggttcctgctggctagaccagcctattcagcgctttgctaggggattgggtggtccacgcactcgctaatacagttctccaggtgtggaatgatgtcaatacgattgcttggccttttccccctgtgcctttgctcggtgctctggtttcctcagcaacactccttgtaaggggcagagacagggtccaccaactccccaagatgaagaagccccttcaggccagtcgtggtggctcatgcctgtaatcccagcactttgcaaggccgaggagggtggatcacttgaggtcaggagttcgagaccagcctgaccaacatggcgaaaccccatctctactaaaaatacaaaaattagcttggcatggtggtgcgtgcctgtaatcccagctactcgggaggctggggcaggagaattgcttgaacttgggagatggaggctgcagcgagccaagatcgtgccactgcactccagcctgggcaagagtttttttaagactcttaaaaaaagagcctgggcaatttttttaagactctgtcttaaaaaaaactaaaaagaaaaaaagaagccccttcactctacaggggacaggagaccatggattggaccccaaagggattgaactgcatctgcatgtctgtcctttgaacactttctctccctgcccaaaaggaaacccaaattatttgtgggatactggggaaattgtagtgaagggcttaatgtagttaataaaagttaaaagtcagtagaaaacaggtgcctcagccttcaaatggttgctttttttccattttccctcatgaatagactcaccagcattttacccccttgttataaaactgtgcagagcaagaagatgatacttatttttgaatttgtatttttaaaactagatttatagactttttttttttttaactagggcacttgcttccttcttagctaaaagcaccagctgagatttttcaggtaattttgttgttactcacttaagactggaattagaatgtttctggtatttctcatttttttccctggctatgatagaatctcatctaatcttgacatctctcctaggggaagaatatcacaggctaatagcgtggttgggggtgaagatgatagcagttattaaatcaggaatctcttttatgtgtgtccttgttacattgaggttaagagacaaaatcattggcagtgcaatctctttccaggatttcgtttgctgtggcattggttatatcagagcactttaatctgaaggatgatactgtaacttgatttatctaattagcttttaattatctacagctattttattttatttaattctctcctacagtactgggaccactgtaaacttctcagatgacttgtatttttgtagtgctatgaaatttatttacatacttataaagaaaactgtatgttcacttgaactctgaaaatgtacatgtatggctggacgcggtggctcacgcctgtaatcccagcactttgggaggctgaggcgggtgaatcacttgattgaggtcaggagttcgagaccagcctggccaacatggcaaaaccccgtctctactaaaaaatacagaaattagctgggtgtggtggcagacagctgtaatctcagctgctcgggaggctgaggcacaagaatcgcttgagccagggaggtggaggttgcagtgagctgagatcacatcattgcactccagcctgggcaacgggcgagactctgtctcaaaaaaaagaaagaaagaaaaggtacatgtatatatttgtcctgcattatgttttttacttgatataaatgtatttttactgtgatagtccaagtgccctggggggcaggtgtgctctatgtggttcttcttccattggagagctggcgtagagatctgcagtgttcacaaggatgttggtttggagatgtctgctgctaggacctggggtgtgtgactcagtccatatgagagggacatctgggtggaggagtaaattcctgtgctctgaaatgccacttggtagctctggacaatgaaggacaattgactcaagggtgcctggcttctgctgctgctgggaaaaaattcagtttatagcattcctgcacctcccaaagtagataacctggaggtcattcagttaacaactgtccctgaggactcagttttgggggaggggttatctgggagaagctttagcctgttctgagccattaggagacattagtgaattggagcactggagaatcctacaaatggcctatgtctcagaagagctgggacctccttccagctgctgcagatgctgacaggccctgggaggctgctgtgctctggagaagctggagcagctcatttcttggcctagcctggctgcctcagaaagagcagtcaggacttgagggaagcatcaaattctatacccataaactgcagttggaagtcagctttttgaaatgtccagcctttgcccaattgtttcagatcatctcatgcctcaggctttggcaggtatcctgccctccatcttattccagtgtgttcacctcatcaaggcagcagagtggatgaaggagtaagtctgccctttgccatactgaacagctgtggaccccgattggtgagggctctgcatatgcctgtatgaaggagatacaggtgtgtgtgcacatgccggtatgaagaagacacaggcatgtgcttctcagttttgctaacagtgggagctcaacggggcagagggaggaaggtccatgatgctcagccacatactgtagagagaggcaatttaatgttaaatgacgcaccatcctccctcccacccttctcccagtcaactttttttctttttctagaactactaattatctctcaaggctgaaaaattaattgccttaggtggagaacttaattcctagtatccaccaaacttaactccgtatctccatatggtgtctccatatctactgtgtgagctacttaactgacgccctcttcctccaactgaaggatcgcccaacgtttttggattatagaattattatttcctgctttctttctttgggacttttgaatttctttggtttcgtttttaagaagtaacccaacatttcctacaacactaaataaaatggtacttacctttcaaa

SEQ ID NO: 17215 - DNA, 1866 bp, Homo sapiens
  source 1..1866: mol_type = unassigned DNA
tgttatcgtcaccatgtccctaatggtctcggctggccggggcctgggggccgtgtggtccccaacccacgtgcaggtgacggtgctgcaggcgcggggcctgcgggccaagggccccgggggcacgagcgacgcgtacgcggtgatccaggtggtataagttgaaatccaaaccaggaaagaaggacaaggagcgaggagaaattgaggttgacatccagtttatgagaaacaacatgactgccagcatgtttgacctttctatgaaagacaagtctcggaatccatttggaaagctgaaggacaagatcaaggggaagaataaggacagtgggtcagacaccgcctccgccatcatccctagcacgacaccttcggtcgacagtgatgatgagtctgtggttaaagacaagaaaaagaaatcaaagatcaagaccttactttccaagtcaaatttgcagaagacgcctctttcccagtccatgtctgtcctgccgacttcaaagccagaaaaagtgctgcttcgtcccggagactttcagtcccagtgggatgaagatgacaatgaggatgagtcctcctcggcctcggatgtcatgtctcacaagagaacagcgagtacggatcttaagcaactgaaccaggtcaactttacccttcccaagaaggaaggactttcctttcttggtggccttcggtctaagaatgatgtcctttcccgctctaatgtctgcatcaatgggaaccatgtttacctggagcagccagaagccaagggtgagatcaaggatagcagcccgtcctcctccccatcccccaagggcttcagaaagaagcatttgttctcttctacagagaacctggcggctgggtcttggaaggagcctgctgaaggaggtgggctgtcttctgacaggcagctctccgaatcttccaccaaggactccttgaagtctatgaccctgccgtcctaccgacctgccccactggtcagtggggacctcagggaaaacatggcccccgcaaactcagaggccacaaaagaagctaaggagagcaagaagccagagagcaggaggtcctctttgctgtctctgatgacggggaagaaggatgtggctaagggcagtgaaggtgaaaaccctctcacggtcccagggagggagaaggaaggcatgctgatgggggttaagccgggggaggacgcatcggggcctgctgaagaccttgtgagaagatctgagaaagatactgcagctgttgtctccagacagggcagctccctgaacctctttgaagatgtgcagatcacagaaccagaagctgagccagagtccaagtctgaaccgagacctccaatttcctctccgagggctccccagaccagagctgtcaagccccgacttcatcctgtgaagccaatgaatgcaatggccaccaaggttgctaactgcagcttgggaactgccaccatcatcagtgagaacttgaacaatgaggtcatgatgaagaaatacagcccctcggaccctgcatttgcatatgcgcagctgacccacgatgagctgattcagctggtcctcaaacagaaggaaacgataagcaagaaggagttccaggtccgcgagctggaagactacattgacaacctgcttgtcagggtcatggaagaaacccccaatatcctccgcatcccgactcaggttggcaaaaaagcaggaaagatgtaaatcagcagaaaaaaaacaccgagacgtttctgtgacttcactttcacctgctccaggggtcaaggacttgccttgcctgataaccagccagcaggctccgaatcaccatctccctcacatgttatccggcaagagt

SEQ ID NO: 17216 - DNA, 2329 bp, Homo sapiens
  source 1..2329: mol_type = unassigned DNA
gacgttctcccctggtgaatgacttgtttttgtgtattttctttgtctctcgtgatgcatctgcactgacctgcagattttattttgtcctttttgcagactggaagtgtctccagaggcgcaacccacagccaggcttccttcccctactgactccccttcctctcttcctcctcttccttctagctctggccaggcatctgtcccctctgaattgggacatggtgcagacacacagtcctctgagagtccttctgtcttctcctctctctcatctcccatagcagctcccatttccacatccactccaattgaaagctggcctctcgtagacaggggccaggccaagtctgaaggaccacccttgctccctaaggcagagttgcaaactgagagtttaacaccggttccaaattctggttcttctgccctgggatcacttttcaaacagccatcctttccagcaaataaagggacagaagattctctgatgggcaggacccgtgagacaggcacagagaagaacaccagcagccttgagttggaggagtctctcccagagcagcctgaaacagggcgacaagaggaagaacttccgagattcccctgcaaaaaacaagactacagcccatcatctggagaagcccaggaagtaccgtttgccctttcactcagcagtgatggagctgtgagccctgttggggagcttgcagcaggaggagacagagacttggagagtcaggctgggtctcttgtggagagcaaagccagggatgcagctgaagaagtggcgccccctcttcccatgggagcatcagtcccttccattgattccatgatgcggaagctggaagagatgggtctgaacctccgcaaggaccagaagaaaaccaagaagcgtgtgtcattttctgagcagctcttcacggaagaggcagtggcgggggctgccttgctggtggaaggacacagcagttgtccccaggagctgaaccctgcatggtctgttgctggaaacgcgtctgacggagagcctcctgagtctccccacgcagaggactcagaaagggaatcggtgaccacacctgggccagcgacgtgtggtgcgccagcctccccagcggatcacctcctcctcccctcccaggaggagagtttctccgaagtccccatgagtgaagcaagctcagcgaaagacactccactctttaggatggagggagaggatgcccttgtgactcagtatcagagcaaagccagtgaccacgaaggtttattgtctgaccccttgagtgaccttcagttggtctcagattttaaatctccaatcatggccgatctgaacttaagccttccttccattcctgaagtcgcatcggatgatgaaagaatagatcaggttgaagatgacggagatcaggttgaagatgatggagagacagcaaagtcgtcaactctggacataggagctttgtccttgggcttggtagtcccctgtcctgagaggggaaaggggcccagtggcgaggcagataggttggtactgggggagggcctgtgtgatttcaggctgcaagcaccccaggcatctgtgacagctccttcagagcagaccacagagttcggaattcacaaaccacatcttggcaagagctcaagcttggataaacagctgccaggccccagtggtggtgaggaagaaaaaccgatgggaaatgggagtccaagcccgcctcctggcacatccctggacaatcctgtacccagcccctccccttctgagatctttcctgtcacacactctttccccagctctgcacattctgacactcaccacaccagcacagcagaatctcaaaaaaaagccacagcagagggctccgctggtagagttgaaaattttggcaagaggaagccactcctccaggcctgggtctcaccctcggagacacatccagtctcagctcagccaggcgctggaactgggtcagccaagcacagacttcatcctgtgaagccaatgaatgcaatggccaccaaggttgctaactgcagcttgggaactgccaccatcatcagtgagaacttgaacaatgaggtcatgatgaagaaatacagcccctcggaccctgcatttgcatatgcgcagctgacccacgatgagctgattcagctggtcctcaaacagaaggaaacgataagcaagaaggagttccaggtccgcgagctggaagactacattgacaacctgcttgtcagggtcatggaagaaacccccaatatcctccgcatcccgactcaggttggcaaaaaagcaggaaagatgtaa

SEQ ID NO: 17217 - DNA, 3078 bp, Homo sapiens
  source 1..3078: mol_type = unassigned DNA
gacgttctcccctggtgaatgacttgtttttgtgtattttctttgtctctcgtgatgcatctgcactgacctgcagattttattttgtcctttttgcagactggaagtgtctccagaggcgcaacccacagccaggcttccttcccctactgactccccttcctctcttcctcctcttccttctagctctggccaggcatctgtcccctctgaattgggacatggtgcagacacacagtcctctgagagtccttctgtcttctcctctctctcatctcccatagcagctcccatttccacatccactccaattgaaagctggcctctcgtagacaggggccaggccaagtctgaaggaccacccttgctccctaaggcagagttgcaaactgagagtttaacaccggttccaaattctggttcttctgccctgggatcacttttcaaacagccatcctttccagcaaataaagggacagaagattctctgatgggcaggacccgtgagacaggcacagagaagaacaccagcagccttgagttggaggagtctctcccagagcagcctgaaacagggcgacaagaggaagaacttccgagattcccctgcaaaaaacaagactacagcccatcatctggagaagcccaggaagtaccgtttgccctttcactcagcagtgatggagctgtgagccctgttggggagcttgcagcaggaggagacagagacttggagagtcaggctgggtctcttgtggagagcaaagccagggatgcagctgaagaagtggcgccccctcttcccatgggagcatcagtcccttccattgattccatgatgcggaagctggaagagatgggtctgaacctccgcaaggaccagaagaaaaccaagaagcgtgtgtcattttctgagcagctcttcacggaagaggcagtggcgggggctgccttgctggtggaaggacacagcagttgtccccaggagctgaaccctgcatggtctgttgctggaaacgcgtctgacggagagcctcctgagtctccccacgcagaggactcagaaagggaatcggtgaccacacctgggccagcgacgtgtggtgcgccagcctccccagcggatcacctcctcctcccctcccaggaggagagtttctccgaagtccccatgagtgaagcaagctcagcgaaagacactccactctttaggatggagggagaggatgcccttgtgactcagtatcagagcaaagccagtgaccacgaaggtttattgtctgaccccttgagtgaccttcagttggtctcagattttaaatctccaatcatggccgatctgaacttaagccttccttccattcctgaagtcgcatcggatgatgaaagaatagatcaggttgaagatgacggagatcaggttgaagatgatggagagacagcaaagtcgtcaactctggacataggagctttgtccttgggcttggtagtcccctgtcctgagaggggaaaggggcccagtggcgaggcagataggttggtactgggggagggcctgtgtgatttcaggctgcaagcaccccaggcatctgtgacagctccttcagagcagaccacagagttcggaattcacaaaccacatcttggcaagagctcaagcttggataaacagctgccaggccccagtggtggtgaggaagaaaaaccgatgggaaatgggagtccaagcccgcctcctggcacatccctggacaatcctgtacccagcccctccccttctgagatctttcctgtcacacactctttccccagctctgcacattctgacactcaccacaccagcacagcagaatctcaaaaaaaagccacagcagagggctccgctggtagagttgaaaattttggcaagaggaagccactcctccaggcctgggtctcaccctcggagacacatccagtctcagctcagccaggcgctggaactgggtcagccaagcacaggtgagagatgggggagattgtctatgtaaatgtgagcaatgtccccctttgcttcctacctgcagaggttacggctttctaaccacacagacgtctgatgtgacaacccacctgtcactgtcctgctggtagggctgccccttgtggtggtaatacctcaagacactgctgcgtttatagcaagaacataatagtagtctgtaaatatagcttaggaattgttctgcacggtcagatttggagctcgcacattgcagaaacgcaatgccaccagtatcttaactgtctcagaactaactggcattgagtggtagtagtatctagcagtgtcaaaaacttcttcaagcactccccaacgtgaagcttgtatgtttgttttgagctgtctttactgtggagggacagaagcctctgcagagttttacagtgaatgcctaggctctagttgacttaaaaaaataagagactgcctttaatgttctgatgtttgtaacaagaccaagggtcccgtgaagatatcaggacatctggacaaggacatgctttcctggcttgcatgtggcagccctgtcctgactgcttttgtttccacaggaactgagacattggagtgctttggcccagagatgagggcagcatgtgacccacctgccccttgtctggcttactggctgccgtctttgcagtgggcagttgctcagttttgccatgaccggagggtctaaagatccttttccccttctctttagacttcatcctgtgaagccaatgaatgcaatggccaccaaggttgctaactgcagcttgggaactgccaccatcatcagtgagaacttgaacaatgaggtcatgatgaagaaatacagcccctcggaccctgcatttgcatatgcgcagctgacccacgatgagctgattcagctggtcctcaaacagaaggaaacgataagcaagaaggagttccaggtccgcgagctggaagactacattgacaacctgcttgtcagggtcatggaagaaacccccaatatcctccgcatcccgactcaggttggcaaaaaagcaggaaagatgtaa

SEQ ID NO: 17218 - DNA, 1959 bp, Homo sapiens
  source 1..1959: mol_type = unassigned DNA
acactggatcctatctttgtctagcgcgtgtcttctcaaaaataaaagtgcaaaataaaaaacaaaacaaaagaaataaaagtgcaaattctgctctcagccgggtgcagtggctcacgcctgtaatcccaacattttgggaggctgaggcgggcggatcatctgaggtcaggagttcgagtccagcctggctaccatggtgaaaccccatctctactaaaaatacaaaaattagctggacatggtcacgcgctcctgtaatctcagctactcaggaggctgaggcaggagaatcacttgaacccaggaggcagaggctgcagtgagccgagatggtggcattgcactccagcctgggtgacagagcaagactctgtgtcaaaaaaaaaaaaaaaaaaaaaaaaaaaaattctgctctcatctaccacttcccgaagagaaagcatgagaatgcatgcattgaagaggctgctggtagcagagaggagaggccagttcatggggattgtgaacattgttgcagttgcttccattcaaaggtaactcctcagcctttctcctttcaggtggtataagttgaaatccaaaccaggaaagaaggacaaggagcgaggagaaattgaggttgacatccagtttatgagaaacaacatgactgccagcatgtttgacctttctatgaaagacaagtctcggaatccatttggaaagctgaaggacaagatcaaggggaagaataaggacagtgggtcagacaccgcctccgccatcatccctagcacgacaccttcggtcgacagtgatgatgagtctgtggttaaagacaagaaaaagaaatcaaagatcaagaccttactttccaagtcaaatttgcagaagacgcctctttcccagtccatgtctgtcctgccgacttcaaagccagaaaaagtgctgcttcgtcccggagactttcagtcccagtgggatgaagatgacaatgaggatgagtcctcctcggcctcggatgtcatgtctcacaagagaacagcgagtacggatcttaagcaactgaaccaggtcaactttacccttcccaagaaggaaggactttcctttcttggtggccttcggtctaagaatgatgtcctttcccgctctaatgtctgcatcaatgggaaccatgtttacctggagcagccagaagccaagggtgagatcaaggatagcagcccgtcctcctccccatcccccaagggcttcagaaagaagcatttgttctcttctacagagaacctggcggctgggtcttggaaggagcctgctgaaggaggtgggctgtcttctgacaggcagctctccgaatcttccaccaaggactccttgaagtctatgaccctgccgtcctaccgacctgccccactggtcagtggggacctcagggaaaacatggcccccgcaaactcagaggccacaaaagaagctaaggagagcaagaagccagagagcaggaggtcctctttgctgtctctgatgacggggaagaaggatgtggctaagggcagtgaaggtgaaaaccctctcacggtcccagggagggagaaggaaggcatgctgatgggggttaagccgggggaggacgcatcggggcctgctgaagaccttgtgagaagatctgagaaagatactgcagctgttgtctccagacagggcagctccctgaacctctttgaagatgtgcagatcacagaaccagaagctgagccagagtccaagtctgaaccgagacctccaatttcctctccgagggctccccagaccagagctgtcaagccccgacttcatcctgtgaagccaatgaatgcaatggccaccaaggttgctaactgcagcttgggaactgccaccatcatcagtgagaacttgaacaatgaggtcatgatgaaggtatgtcctctgagaagctggtgtgttcgttag

SEQ ID NO: 17219 - DNA, 3391 bp, Homo sapiens
  source 1..3391: mol_type = unassigned DNA
gggcgcgggccgcgatggcagcggcggagcagggctgagcccgctgcccgcccgcagttcccggccccgctggccccagtcatggcgaagcagtacgatgtgctgttccggctgctgctgatcggggactccggggtgggcaagacctgcctgctgtgccgcttcaccgacaacgagttccactcctcgcacatctccaccatcggtgttgactttaagatgaagaccatagaggtagacggcatcaaagtgcggatacagatctgggacactgcagggcaggagagataccagaccatcacaaagcagtactatcggcgggcccaggggatatttttggtctatgacattagcagcgagcgctcttaccagcacatcatgaagtgggtcagtgacgtggatgaggtaggagatgccacctcactgccggggtgtggagagggtgcctcaccggggaaggcaaggcgagggccagatgggaaggcaaatgcttccaggaagctttgccttccacagccctggatgaagacctctggtacgcaccagaaggcgtccagaagatccttattgggaataaggctgatgaggagcagaaacggcaggtgggaagagagcaagggcagcagctggcgaaggagtatggcatggacttctatgaaacaagtgcctgcaccaacctcaacattaaagagtcattcacgcgtctgacagagctggtgctgcaggcccataggaaggagctggaaggcctccggatgcgtgccagcaatgagttggcactggcagagctggaggaggaggagggcaaacccgagggcccagcgaactcttcgaaaacctgctggtgctgagtcctgtgtggggcaccccacacgacacccctcttccctcaggaggcccgtgggcagacaggggagccggggctttgccctgctgctgtcctctcgtgtgatgaccctattgagtatcagtagccactactccccctgcctggccctgagagcggctctgctgtcatctcaagcagcccctgtccccagcccgtccaccctggagtggtcttcttcagcctgtttccccagccacaggcctgctacgacccccacgatgtgccgcaagcactgtctcaccatcccgcacccaccagacaacagccagggctggagtccaggccactttcagctgctcctttctccgtgcatcgtgtctcttctctgctttttctctcttcccccacttctctttctctgacccctcccctccggtgcgtttcgtatcaaagctcctcaaaccccgtcccccgtgtgtcctgctgtgtgcagctcgctctttccttccttcctaagctatccaaggggatggacccaggctcgtggggaggttccacccttggatccaggaagaaccctccaccctgcctcgtgggtgggccaaaggctacagggtgcttcttcctcttcccccacccccactgtccctcatgtgccatgggcctgcctccccagtgacctgcgaaagtggagcatcgaggtaggagggaaacggcaaccagggagtcctcgagcctggggctgccctacctctacccattccccgaccagagctttgcccttgcttggctgcccgcctgcctctttggggaactgagctcagaggcaggtgcttcagagaaggaaacaaaatgaggggtggcagggataaaaagtcacctccattctctacctcccatgcagcatgaacacaatttctctccacctggctcccaaatttaaagatgtggaccaaggcctgtgggtactccaggggcaaggagagccctggggtcagtgacactgtcaggccaaccatgcactccacaaaggggagcatttggaaatgaaggactagctcctatgtatcaggttaagagcaagggagagctggccagggacagcagtttgcacagcagaggggaatgtagcaacagcagggcctcctaggccccatcttccatttcttaggtaagaagagcatttcctcagactcccaggcggaggactgagcctagccttcagcaaccaaggttctcctgggacccaaagtttatgggagaagggcaaagacttcatgggaagagagaaggaaggccctgggtagaaacgcttggtgctgttctctttggcctttaagacaaagcgctcatcttgccctctacctcctgataggcttgagggtttgccaaccacactgtggctacaggtggagggaagaggactccttcctccagagtgctatgttcaggaagtttctttaaccccatatggcccaagagtagctcgtaggaggccctttaaagacggaacaagtaatttaccagttctactggggttcctgcccaccgtcccaaggtgggcgaggcctaggaagagggtcattcttaagccacacattagctgcactgcgtggctgcagccaaaacaaagaactgggtgttgagtattcatcaactaagaaccaaaatccagggcactcatatgtgaaggataagaacctcacttccttactcctccaaaaagaagtggggaaagaaccatcaaacctttcctcctgacttaccaaaccaggaaaacagcaggagagggtggctcaggacttagggacagggtatagcttagatggtggaaagcaaaggagagcaggaagttgtaaatcactggctaatgagaaaaggagacagctaactctaggatgaagctgtgactaggctggagttgcttccttgaagatgggactccttgggtatcaagacctatgccacatcacactggggctagggaagtaggtgatgccagccctcaagtctgtcttcagccagggacttgagaagttatattgggcagtggctccaatctgtggaccagtatttcagctttccctgaagatcaggcagggtgccattcattgtctttctctcctagccccctcaggaaagaaggactatatttgtactgtaccctaggggttctggaagggaaaacatggaatcaggattctatagactgataggccctatccacaagggccatgactgggaaaaggtatgggagcagaaggagaattgggattttagggtgcagctacgctcaccctaaacttttggtggcctggggcatgtcttgaggcccagactgttaaccaggctctgctggcctgtttactcgtcaccacctctgcacctgctgtcttgagactccatccagccccaggcacgccacctgctcctgagcctccactatctccctgtgacgggtgaacttcgtgtactgtgtctcgggtccatatatgaattgtgagcagggttcatctattttaaacacagatgtttacaaaataaagattatttcaaaccacc

SEQ ID NO: 17220 - DNA, 3515 bp, Homo sapiens
  source 1..3515: mol_type = unassigned DNA
cgcgcgctccccgccccctctctccggggcggcggcggcggcgcaggggaaggggcgggcaggggccgccgccggtttctcctcccaccgcctcgcgccagcccagccgagccgagccgagccgagcgggcgccgcgccgggctcccgccgcagccgcgcttcccggcacccagcgagcgagtgggcaggcgggcgggcgaggcagccgcgggggccgggcccggcgtcctcctcgccgcccgcagcgtccccgggcgggcgcgggccgcgatggcagcggcggagcagggctgagcccgctgcccgcccgcagttcccggccccgctggccccagtcatggcgaagcagtacgatgtgctgttccggctgctgctgatcggggactccggggtgggcaagacctgcctgctgtgccgcttcaccgacaacgagttccactcctcgcacatctccaccatcggtgttgactttaagatgaagaccatagaggtagacggcatcaaagtgcggatacagatctgggacactgcagggcaggagagataccagaccatcacaaagcagtactatcggcgggcccaggggatatttttggtctatgacattagcagcgagcgctcttaccagcacatcatgaagtgggtcagtgacgtggatgagtacgcaccagaaggcgtccagaagatccttattgggaataaggctgatgaggagcagaaacggcaggtgggaagagagcaagggcagcagctggcgaaggagtatggcatggacttctatgaaacaagtgcctgcaccaacctcaacattaaagagtcattcacgcgtctgacagagctggtgctgcaggcccataggaaggagctggaaggcctccggatgcgtgccagcaatgagttggcactggcagagctggaggaggaggagggcaaacccgagggcccagcgaactcttcgaaaacctgctggtgctgagtcctgtgtggggcaccccacacgacacccctcttccctcaggaggcccgtgggcagacaggggagccggggctttgccctgctgctgtcctctcgtgtgatgaccctattgagtatcagtagccactactccccctgcctggccctgagagcggctctgctgtcatctcaagcagcccctgtccccagcccgtccaccctggagtggtcttcttcagcctgtttccccagccacaggcctgctacgacccccacgatgtgccgcaagcactgtctcaccatcccgcacccaccagacaacagccagggctggagtccaggccactttcagctgctcctttctccgtgcatcgtgtctcttctctgctttttctctcttcccccacttctctttctctgacccctcccctccggtgcgtttcgtatcaaagctcctcaaaccccgtcccccgtgtgtcctgctgtgtgcagctcgctctttccttccttcctaagctatccaaggggatggacccaggctcgtggggaggttccacccttggatccaggaagaaccctccaccctgcctcgtgggtgggccaaaggctacagggtgcttcttcctcttcccccacccccactgtccctcatgtgccatgggcctgcctccccagtgacctgcgaaagtggagcatcgaggtaggagggaaacggcaaccagggagtcctcgagcctggggctgccctacctctacccattccccgaccagagctttgcccttgcttggctgcccgcctgcctctttggggaactgagctcagaggcaggtgcttcagagaaggaaacaaaatgaggggtggcagggataaaaagtcacctccattctctacctcccatgcagcatgaacacaatttctctccacctggctcccaaatttaaagatgtggaccaaggcctgtgggtactccaggggcaaggagagccctggggtcagtgacactgtcaggccaaccatgcactccacaaaggggagcatttggaaatgaaggactagctcctatgtatcaggttaagagcaagggagagctggccagggacagcagtttgcacagcagaggggaatgtagcaacagcagggcctcctaggccccatcttccatttcttaggtaagaagagcatttcctcagactcccaggcggaggactgagcctagccttcagcaaccaaggttctcctgggacccaaagtttatgggagaagggcaaagacttcatgggaagagagaaggaaggccctgggtagaaacgcttggtgctgttctctttggcctttaagacaaagcgctcatcttgccctctacctcctgataggcttgagggtttgccaaccacactgtggctacaggtggagggaagaggactccttcctccagagtgctatgttcaggaagtttctttaaccccatatggcccaagagtagctcgtaggaggccctttaaagacggaacaagtaatttaccagttctactggggttcctgcccaccgtcccaaggtgggcgaggcctaggaagagggtcattcttaagccacacattagctgcactgcgtggctgcagccaaaacaaagaactgggtgttgagtattcatcaactaagaaccaaaatccagggcactcatatgtgaaggataagaacctcacttccttactcctccaaaaagaagtggggaaagaaccatcaaacctttcctcctgacttaccaaaccaggaaaacagcaggagagggtggctcaggacttagggacagggtatagcttagatggtggaaagcaaaggagagcaggaagttgtaaatcactggctaatgagaaaaggagacagctaactctaggatgaagctgtgactaggctggagttgcttccttgaagatgggactccttgggtatcaagacctatgccacatcacactggggctagggaagtaggtgatgccagccctcaagtctgtcttcagccagggacttgagaagttatattgggcagtggctccaatctgtggaccagtatttcagctttccctgaagatcaggcagggtgccattcattgtctttctctcctagccccctcaggaaagaaggactatatttgtactgtaccctaggggttctggaagggaaaacatggaatcaggattctatagactgataggccctatccacaagggccatgactgggaaaaggtatgggagcagaaggagaattgggattttagggtgcagctacgctcaccctaaacttttggtggcctggggcatgtcttgaggcccagactgttaaccaggctctgctggcctgtttactcgtcaccacctctgcacctgctgtcttgagactccatccagccccaggcacgccacctgctcctgagcctccactatctccctgtgacgggtgaacttcgtgtactgtgtctcgggtccatatatgaattgtgagcagggttcatctattttaaacacagatgtttacaaaataaagattatttcaaacca

SEQ ID NO: 17221 - DNA, 2209 bp, Homo sapiens
  source 1..2209: mol_type = unassigned DNA
gcccccgtccccagctggggaggaattgccagcccctccggctggaggcggtggcgccggaggccggagtccgggataaatctcggggtgttgactttaagatgaagaccatagaggtagacggcatcaaagtgcggatacagatctgggacactgcagggcaggagagataccagaccatcacaaagcagtactatcggcgggcccaggggatatttttggtctatgacattagcagcgagcgctcttaccagcacatcatgaagtgggtcagtgacgtggatgaggtaggagatgccacctcactgccggggtgtggagagggtgcctcaccggggaaggcaaggcgagggccagatgggaaggcaaatgcttccaggaagctttgccttccacagccctggatgaagacctctgggtgagtaagacatggggaagaaaccgaagctgccatgccctcactctctataccctgccaggcctccacggctgtgtctttcccggaaatgaattagttccaagtcttccctgtgagcagcttctttcctgaaatcttgggaccaggtggagttgcaagattgggatctagtcctggctctgcacaatagctgtggagccttgggaagccatttgaatcctctgggtccccagttcctgtagaatgagggctggacttacatccaatgtcctttccagctctgataccagtggtctaacccaaggaagcaccagtcttagccagagtgtcttctaccctaagctctccccgtgatacccttgagtacgcaccagaaggcgtccagaagatccttattgggaataaggctgatgaggagcagaaacggcaggtgggaagagagcaagggcagcagctggcgaaggagtatggcatggacttctatgaaacaagtgcctgcaccaacctcaacattaaagagtcattcacgcgtctgacagagctggtgctgcaggcccataggaaggagctggaaggcctccggatgcgtgccagcaatgagttggcactggcagagctggaggaggaggagggcaaacccgagggcccagcgaactcttcgaaaacctgctggtgctgagtcctgtgtggggcaccccacacgacacccctcttccctcaggaggcccgtgggcagacaggggagccggggctttgccctgctgctgtcctctcgtgtgatgaccctattgagtatcagtagccactactccccctgcctggccctgagagcggctctgctgtcatctcaagcagcccctgtccccagcccgtccaccctggagtggtcttcttcagcctgtttccccagccacaggcctgctacgacccccacgatgtgccgcaagcactgtctcaccatcccgcacccaccagacaacagccagggctggagtccaggccactttcagctgctcctttctccgtgcatcgtgtctcttctctgctttttctctcttcccccacttctctttctctgacccctcccctccggtgcgtttcgtatcaaagctcctcaaaccccgtcccccgtgtgtcctgctgtgtgcagctcgctctttccttccttcctaagctatccaaggggatggacccaggctcgtggggaggttccacccttggatccaggaagaaccctccaccctgcctcgtgggtgggccaaaggctacagggtgcttcttcctcttcccccacccccactgtccctcatgtgccatgggcctgcctccccagtgacctgcgaaagtggagcatcgaggtaggagggaaacggcaaccagggagtcctcgagcctggggctgccctacctctacccattccccgaccagagctttgcccttgcttggctgcccgcctgcctctttggggaactgagctcagaggcaggtgcttcagagaaggaaacaaaatgaggggtggcagggataaaaagtcacctccattctctacctcccatgcagcatgaacacaatttctctccacctggctcccaaatttaaagatgtggaccaaggcctgtgggtactccaggggcaaggagagccctggggtcagtgacactgtcaggccaaccatgcactccacaaaggggagcatttggaaatgaaggactagctcctatgtatcaggttaagagcaagggagagctggccagggacagcagtttgcacagcagaggggaatgtagcaa

SEQ ID NO: 17222 - DNA, 683 bp, Homo sapiens
  source 1..683: mol_type = unassigned DNA
ctgggcgacagaggaagactccgtcaagaaaaaagagaaaaggcatcaggtgttgactttaagatgaagaccatagaggtagacggcatcaaagtgcggatacagatctgggacactgcagggcaggagagataccagaccatcacaaagcagtactatcggcgggcccaggggatatttttggtctatgacattagcagcgagcgctcttaccagcacatcatgaagtgggtcagtgacgtggatgagtacgcaccagaaggcgtccagaagatccttattgggaataaggctgatgaggagcagaaacggcaggtgggaagagagcaagggcagcagctggcgaaggagtatggcatggacttctatgaaacaagtgcctgcaccaacctcaacattaaagagtcattcacgcgtctgacagagctggtgctgcaggcccataggaaggagctggaaggcctccggatgcgtgccagcaatgagttggcactggcagagctggaggaggaggagggcaaacccgagggcccagcgaactcttcgaaaacctgctggtgctgagtcctgtgtggggcaccccacacgacacccctcttccctcaggaggcccgtgggcagacaggggagccggggctttgccctgctgctgtcctctcgtgtgatgaccctattgagtatca

SEQ ID NO: 17223 - DNA, 533 bp, Homo sapiens
  source 1..533: mol_type = unassigned DNA
acactctcggggactcatggagacgggtgttcgaatccagatcctgctcaaggccttcctacctcgggtgttgactttaagatgaagaccatagaggtagacggcatcaaagtgcggatacagatctgggacactgcagggcaggagagataccagaccatcacaaagcagtactatcggcgggcccaggggatatttttggtctatgacattagcagcgagcgctcttaccagcacatcatgaagtgggtcagtgacgtggatgagtacgcaccagaaggcgtccagaagatccttattgggaataaggctgatgaggagcagaaacggcaggtgggaagagagcaagggcagcagctggcgaaggagtatggcatggacttctatgaaacaagtgcctgcaccaacctcaacattaaagagtcattcacgcgtctgacagagctggtgctgcaggcccataggaaggagctggaaggcctccggatgcgtgccagcaatgagttggcactggcagagctggaggaggagga

SEQ ID NO: 17224 - DNA, 560 bp, Homo sapiens
  source 1..560: mol_type = unassigned DNA
agcagcttctttcctgaaatcttgggaccaggtggagttgcaagattgggatctagtcctggctctgcacaatagctgtggagccttgggaagccatttgaatcctctgggtccccagttcctgtagaatgagggctggacttacatccaatgtcctttccagctctgataccagtggtctaacccaaggaagcaccagtcttagccagagtgtcttctaccctaagctctccccgtgatacccttgaggtcagccatggcacttgggggagcctggcacctgcatccagtcggcccaccctgtccctagggctctggaattggtggtgggctggaggcagtgcagactctgtagggaaaattgggggggcaggcagcactcactggctgttctgcccatcctttgtccctagtacgcaccagaaggcgtccagaagatccttattgggaataaggctgatgaggagcagaaacggcaggtgggaagagagcaagggcagcagctggcgaaggagtatggcatggacttctatgaaacaagtgcctgcaccaacctcaac

SEQ ID NO: 17225 - DNA, 3459 bp, Homo sapiens
  source 1..3459: mol_type = unassigned DNA
gatgcctgttttgaaagttgatggagcgaactgcttttccaaagactcttttgaaaaactttttaagtaggccattctgactttaacatttctctttgtcttaacattagacaaaaagtaaccttcctgaagaggacatgtgattggaagttgtcaattgttgaagcattggtaactccagtctctaacgttttagaaaatcataacaagcggttctctaccctgtaaaggtgaactactgagttcttcattatgtctgatggagattatgattacctcatcaagtttttagctttgggagactctggtgtagggaagaccagtgtactttaccaatatacagatggtaaatttaactccaaatttatcacaacagtgggcattgatttcagggaaaaaagagtggtgtacagagccagtgggccggatggagccactggcagaggccagagaatccacctgcagttatgggacacagcagggcaggagaggtttcgtagcttaacgacagcgttcttcagagatgctatgggttttcttctactttttgatctgacaaatgagcaaagtttcctcaatgtcagaaactggataagccagctacagatgcatgcatattgtgaaaacccagatatagtgctgtgtggaaacaagagtgatctggaggaccagagagtagtgaaagaggaggaagccatagcactcgcagagaaatatggaatcccctactttgaaactagtgctgccaatgggacaaacataagccaagcaattgagatgcttctggacctgataatgaagcgaatggaacggtgtgtggacaagtcctggattcctgaaggagtggtgcgatcaaatggtcatgcctctacggatcagttaagtgaagaaaaggagaaaggggcatgtggctgttgagaagtcaagtaagcgacatagtagttcaggtggcccatgcctgggatcttctctatgattgatacatggcacagtgagagattaatgggcattgtgtacaaattgcttctcaccatccccattagacctacgaataaagcatccggttctaaaattaatttgttgcagctttgtaaatatttctttaagattcagcctgagagttaggagaaatatttcagagccaaaagtgccttatacaaccttagcctattatagtaaatcattcaaggattcagaattttgcagtcacagaagagtgtatttattatgtagaatgaatgagggtactgtcacctgccttaatgtaggtaggcccagagtcttacatttaagatcttacatgcagttataaaaccgccacagtcttcaatccagatttgaagactcatgccataggtgacattctaaaataccattaaagccacttaaatgttaaataagaatatacatgcacatcagctcaatgtctttgagtattaattttatgtaagcattctatttaacatgaatataggacaaatcatggctatatctatagaccttggataaactggattgaccaattatacactcacggtgacttttttattggtgggaaggggattggggtggggcaggctggcttaatgtaatatgagcaaccaaagtgggacttctgtctccccgctatattcccattgctctgaatggttgattgaagggtcagggaactagattttatggctttagttcactgtgattgtacatttatacttggcctatgtgctggccgcacctgaacatagctggtgcttatgccgagttatttgcgatgagtaaatatttagtttctttttcttcatatttataatgttgatctggcatcctcaggctgcagctttattagcttataacttactcatctctatctttaccagcaggctctgtattgttgatatttgcaacttgttttgcttttccattggtggaattgaaataattagtttttaattacataagatgcctgtttgctatttggtggaagatagatgttcatattgaagcagtcacatttgtactgtagttcaataaaagaaaaatgaagtattctgtagcctatatttttcatagagctcatgagcatttactgtacttgctgggtcttgccaagatcatttattccgctgcattgccaaagtgtcttcataccaaattaaaggtggttttaatatatgtttcatggaagttgtttataaaattcaaaggtatttcatttaggtgaaaagtcttatttattaaagtggtttgaataaagtagatcaaaacttccagagatcttaatggctatataggaagaaatatcactcaccataatttaaataaagaataaaaatacttgtattttgtggtggcaaatgtttggtagaactgtaattagaaaaatacaagtatatttgcgtgatggttacactagaagcccagactttacgactacacaatatattcatgtatctaaactgtacttgtaccccctaaatttatttttaaaaaaggaaaaataaaagtatcatgaaaaaacctatttttttttccactgtccttccactactcccataacaaacttatccatggttggtaaaattttacatatttctatccttgaaatgaaggcttcttttaaattccaaagaagtcatggaggcctgtgcatttgaattgtatatgctagtgaggaaaagatttagacatttcaagagcagggttggccaggcgcggtggctcacacctgtaatcccagcactttgggaggccgaggagggcggatcacgaggtcaggagatcgagaccatcctggctaacacagtgaaaccccatctctactaaaaaaaaaaaaaaaaaaaaaatgggctgggcgtggtggtgggcacctgtagtcccagctactcaggaggctgaggcaggagaatggcgtgaacctgggaggcggagcttgcagtgagccgagattgcgccactgcactccagcctgggcgacagaggagactctgtctcaaaaaaaaaaaaaaaaaaaaagagcagggtcataatcacacagcagtgccttatatagttgccataagacttcagtgcagtacaacataattttacagctacatatcagggcatattctatatggtgtatttgtgttagaataacacattaaatgtctttaaacataaaaataagaatgtttgcatgtttcagttttcaagaaccaaatgagtaattagctatagattccactggccttaaacatacaattaagtgtatacatgatatagtgcacacacaaaagccacctttaattattgaaataacctgtattctttttggaaatcatttaagtttggtattgaagtactatattttttgtgcatcaatgtatttttctatttacaagcctatgtaaaagtgaagtgtatcttcagtgaaccatgtgccaattaagctgtaataaaaaagtggtctagtctgtcaaa

SEQ ID NO: 17226 - DNA, 1057 bp, Homo sapiens
  source 1..1057: mol_type = unassigned DNA
agacaaaaagtaaccttcctgaagaggacatgtgattggaagttgtcaattgttgaagcattggtaactccagtctctaacgttttagaaaatcataacaagcggttctctaccctgtaaagaacagaaacctggaaatctaaggctcaaagacatccaagtaattggtatctgggagatttgggattcaaacccagctctgcttgacttggtgaactactgagttcttcattatgtctgatggagattatgattacctcatcaagtttttagctttgggagactctggtgtagggaagaccagtgtactttaccaatatacagatggtaaatttaactccaaatttatcacaacagtgggcattgatttcagggaaaaaagagtggtgtacagagccagtgggccggatggagccactggcagaggccagagaatccacctgcagttatgggacacagcagggcaggagaggtttcgtagcttaacgacagcgttcttcagagatgctatgggttttcttctactttttgatctgacaaatgagcaaagtttcctcaatgtcagaaactggataagccagctacagatgcatgcatattgtgaaaacccagatatagtgctgtgtggaaacaagagtgatctggaggaccagagagtagtgaaagaggaggaagccatagcactcgcagagaaatatggaatcccctactttgaaactagtgctgccaatgggacaaacataagccaagcaattgagatgcttctggacctgataatgaagcgaatggaacggtgtgtggacaagtcctggattcctgaaggagtggtgcgatcaaatggtcatgcctctacggatcagttaagtgaagaaaaggagaaaggggcatgtggctgttgagaagtcaagtaagcgacatagtagttcaggtggcccatgcctgggatcttctctatgattgatacatggcacagtgagagattaatgggcattgtgtacaaattgcttctcaccatccccattagacctacgaataaagcatccggttctaaaattaa

SEQ ID NO: 17227 - DNA, 1013 bp, Homo sapiens
  source 1..1013: mol_type = unassigned DNA
cacaggaagagaagtgggtttgaagcaaggttgtggagaaaagcaaaggagacaaaaagtaaccttcctgaagaggacatgtgattggaagttgtcaattgttgaagcattggtaactccagtctctaacgttttagaaaatcataacaagcggttctctaccctgtaaaggtgaactactgagttcttcattatgtctgatggagattatgattacctcatcaagtttttagctttgggagactctggtgtagggaagaccagtgtactttaccaatatacagatggtaaatttaactccaaatttatcacaacagtgggcattgatttcagggaaaaaagagtggtgtacagagccagtgggccggatggagccactggcagaggccagagaatccacctgcagttatgggacacagcagggcaggagaggtttcgtagcttaacgacagcgttcttcagagatgctatgggttttcttctactttttgatctgacaaatgagcaaagtttcctcaatgtcagaaactggataagccagctacagatgcatgcatattgtgaaaacccagatatagtgctgtgtggaaacaagagtgatctggaggaccagagagtagtgaaagaggaggaagccatagcactcgcagagaaatatggaatcccctactttgaaactagtgctgccaatgggacaaacataagccaagcaattgagatgcttctggacctgataatgaagcgaatggaacggtgtgtggacaagtcctggattcctgaaggagtggtgcgatcaaatggtcatgcctctacggatcagttaagtgaagaaaaggagaaaggggcatgtggctgttgagaagtcaagtaagcgacatagtagttcaggtggcccatgcctgggatcttctctatgattgatacatggcacagtgagagattaatgggcattgtgtacaaattgcttctcaccatccccattagacctacgaataaagcatccggttctaaaa

SEQ ID NO: 17228 - DNA, 663 bp, Homo sapiens
  source 1..663: mol_type = unassigned DNA
actctgcatactgaataataggtgaaataaggaaagactttgagaagcaataagaaatatatctgatttgaccttgtccattaggtgaactactgagttcttcattatgtctgatggagattatgattacctcatcaagtttttagctttgggagactctggtgtagggaagaccagtgtactttaccaatatacagatggtaaatttaactccaaatttatcacaacagtgggcattgatttcagggaaaaaagagtggtgtacagagccagtgggccggatggagccactggcagaggccagagaatccacctgcagttatgggacacagcagggcaggagaggtttcgtagcttaacgacagcgttcttcagagatgctatgggttttcttctactttttgatctgacaaatgagcaaagtttcctcaatgtcagaaactggataagccagctacagatgcatgcatattgtgaaaacccagatatagtgctgtgtggaaacaagagtgatctggaggaccagagagtagtgaaagaggaggaagccatagcactcgcagagaaatatggaatcccctactttgaaactagtgctgccaatgggacaaacataagccaagcaattgagatgcttctggacctgataatgaagcgaatgga

SEQ ID NO: 17229 - DNA, 701 bp, Homo sapiens
  source 1..701: mol_type = unassigned DNA
gagaaaagcaaaggaggtgagtacgggacatgctggatttgagatgccagcaagatatctgggtggactcccttgtaggcagttttacttatgaaattggaggccagctgcaaggtctgacaaaaagtaaccttcctgaagaggacatgtgattggaagttgtcaattgttgaagcattggtaactccagtctctaacgttttagaaaatcataacaagcggttctctaccctgtaaaggtgaactactgagttcttcattatgtctgatggagattatgattacctcatcaagtttttagctttgggagactctggtgtagggaagaccagtgtactttaccaatatacagatggtaaatttaactccaaatttatcacaacagtgggcattgatttcagggaaaaaagagtggtgtacagagccagtgggccggatggagccactggcagaggccagagaatccacctgcagttatgggacacagcagggcaggagaggtttcgtagcttaacgacagcgttcttcagagatgctatgggttttcttctactttttgatctgacaaatgagcaaagtttcctcaatgtcagaaactggataagccagctacagatgcatgcatattgtgaaaacccagatatagtgctgtgtggaaacaagagtgatctggaggaccagagagtagtgaaagaggagga

SEQ ID NO: 17230 - DNA, 809 bp, Homo sapiens
  source 1..809: mol_type = unassigned DNA
gagaagtgggtttgaagcaaggttgtggagaaaagcaaaggagacaaaaagtaaccttcctgaagaggacatgtgattggaagttgtcaattgttgaagcattggtaactccagtctctaacgttttagaaaatcataacaagcggttctctaccctgtaaagaacagaaacctggaaatctaaggctcaaagacatccaagtaattggtatctgggagatttgggattcaaacccagctctgcttgacttgaggctctgcccttatccacgggctagccatacctgaaacgtgaggttgcagatctgcactgaagcactctgaggaaacacactgcagtggcttttggggctcagcattcaggagttttcagcataaggtgaactactgagttcttcattatgtctgatggagattatgattacctcatcaagtttttagctttgggagactctggtgtagggaagaccagtgtactttaccaatatacagatggtaaatttaactccaaatttatcacaacagtgggcattgatttcagggaaaaaagagtggtgtacagagccagtgggccggatggagccactggcagaggccagagaatccacctgcagttatgggacacagcagggcaggagaggtttcgtagcttaacgacagcgttcttcagagatgctatgggttttcttctactttttgatctgacaaatgagcaaagtttcctcaatgtcagaaactggataagccagctacagatgcatgcatattgtgaaaacccagatatagtgctgtgtggaaacaagagtgat

SEQ ID NO: 17231 - DNA, 702 bp, Homo sapiens
  source 1..702: mol_type = unassigned DNA
cccgacgtggtggcctccttgcggtttcctttcgccgtttccgaaccgagggattgctactcgcctttggcttggcggtctctgtgctcgggggtccgaaaactgctggaaggcccccggtctctggaggggagcaggcggtagcgagtttagtgacgtggagcaggcgcagaacagtcggagatacagtctcgctgtgatgcccaggctggagtgcaatggcgtgattttggctcactgcaacctctcccacccaggttcaagtgattctcctgcctcagcctcccgagcagctgggattacagaacagaaacctggaaatctaaggctcaaagacatccaagtaattggtatctgggagatttgggattcaaacccagctctgcttgacttggtgaactactgagttcttcattatgtctgatggagattatgattacctcatcaagtttttagctttgggagactctggtgtagggaagaccagtgtactttaccaatatacagatggtaaatttaactccaaatttatcacaacagtgggcattgatttcagggaaaaaagagtggtgtacagagccagtgggccggatggagccactggcagaggccagagaatccacctgcagttatgggacacagcagggcaggagaggtttcgtagcttaacgacagcgttcttcagagatgctatgggttttc

SEQ ID NO: 17232 - DNA, 432 bp, Homo sapiens
  source 1..432: mol_type = unassigned DNA
tgtgattggaagttgtcaattgttgaagcattggtaactccagtctctaacgttttagaaaatcataacaagcggttctctaccctgtaaagatttatgtgatcccaatgcaatgcaatgcaattccaataagaatccccatatggtttttgaggaactcagatggaaatgtgaagggttcatgtccttggtaaggtgaactactgagttcttcattatgtctgatggagattatgattacctcatcaagtttttagctttgggagactctggtgtagggaagaccagtgtactttaccaatatacagatggtaaatttaactccaaatttatcacaacagtgggcattgatttcagggaaaaaagagtggtgtacagagccagtgggccggatggagccactggcagaggccagagaatccacctgcagtt

SEQ ID NO: 17233 - DNA, 592 bp, Homo sapiens
  source 1..592: mol_type = unassigned DNA
ggaaaatacccgccaacgacccaaaaaaggccggcggcgggtggacgcggcgcgcgaggacccgagccaggcggggacaggacggcggggcgagccagacaaaaagtaaccttcctgaagaggacatgtgattggaagttgtcaattgttgaagcattggtaactccagtctctaacgttttagaaaatcataacaagcggttctctaccctgtaaagaacagaaacctggaaatctaaggctcaaagacatccaagtaattggtatctgggagatttgggattcaaacccagctctgcttgacttggtgagtttcctattaggttaccttgtaagataccatactactggtcactttaaagcccaatgtgcatttataacaaaaatgaataatggatatgaagcttggggtagaataggcattggacttggagctaggagatctagattctagatcgtgcaaatcagtctacctctctgggttctgttttaccctttagaaaactgaacccagagagtggaaggtctgaacatttattttcagatcaagaaagcagataattgtcttaaagatacaatctgaaaagtgcaa

SEQ ID NO: 17234 - DNA, 567 bp, Homo sapiens
  source 1..567: mol_type = unassigned DNA
aaaaaaggccggcggcgggtggacgcggcgcgcgaggacccgagccaggcggggacaggacggcggggcgagccagacaaaaagtaaccttcctgaagaggacatgtgattggaagttgtcaattgttgaagcattggtaactccagtctctaacgttttagaaaatcataacaagcggttctctaccctgtaaaggtatggttttgtatttatcttttttttttttggtagtggttttgagctctgtcatgtcaattttcatgcgcttaaattatgtgcaatataacatacaataccattgcacgtactgtttttaaactaaagacttaatgatgtctactaaatttcttgggattagtttgaaaagtgcattttcagtgaccacggagtgggtatgaatactgaccgcattcttcctttcttttctgtacttgaataaagaaacataggtttttactttcaggaaattgttgaatatgagagctgattaggaaattgaattattctgagagtcttgcttatcctctgagggttgtttgacaaaaattcaagcttattggtgtttt

SEQ ID NO: 17235 - DNA, 830 bp, Homo sapiens
  source 1..830: mol_type = unassigned DNA
gacgtggtggcctccttgcggtttcctttcgccgtttccgaaccgagggattgctactcgcctttggcttggcggtctctgtgctcgggggtccgaaaactgctggaaggcccccggtctctggaggggagcaggcggtagcgagtttagtgacgtggagcaggcgcagaacagtcggagatacagtctcgctgtgatgcccaggctggagtgcaatggcgtgattttggctcactgcaacctctcccacccaggttcaagtgattctcctgcctcagcctcccgagcagctgggattacaggtgcctgctaccacacccggaatcctgggcattcccttgccccggaaacgccgtgtccaggccgacctaagccaggagccgcaggggcgggaagccgggggcagggccgggcctgggacgccgcctcaggagccgcgcggactcgggaacctcgggcggggccggcgtgagtacgcccggcacctccggctgctacggtggcgaccgcgaactgatgccgtggaaaacacccttagaacatggctttttggggaggtgaataggggagagtccccaaacgacacctcgccgcgcaccggtccttggtgcagtttgtaaatgtccctcctgtgtcccaaaacgaaaacactcctatattttgtagcgccttccagaatggggcagcggaaactagtgttgggacaaaggaggcgagcggggccttttcggggctcacagaggacccctcggaggcgcggccgccggggagagcgcgacagcaccccgccccccgccagccgggcgggggccgctcccgaggtgacagga

SEQ ID NO: 17236 - DNA, 3446 bp, Homo sapiens
  source 1..3446: mol_type = unassigned DNA
gcggaaaatacccgccaacgacccaaaaaaggccggcggcgggtggacgcggcgcgcgaggacccgagccaggcggggacaggacggcggggcgagccagacaaaaagtaaccttcctgaagaggacatgtgattggaagttgtcaattgttgaagcattggtaactccagtctctaacgttttagaaaatcataacaagcggttctctaccctgtaaaggtgaactactgagttcttcattatgtctgatggagattatgattacctcatcaagtttttagctttgggagactctggtgtagggaagaccagtgtactttaccaatatacagatggtaaatttaactccaaatttatcacaacagtgggcattgatttcagggaaaaaagagtggtgtacagagccagtgggccggatggagccactggcagaggccagagaatccacctgcagttatgggacacagcagggcaggagaggtttcgtagcttaacgacagcgttcttcagagatgctatgggttttcttctactttttgatctgacaaatgagcaaagtttcctcaatgtcagaaactggataagccagctacagatgcatgcatattgtgaaaacccagatatagtgctgtgtggaaacaagagtgatctggaggaccagagagtagtgaaagaggaggaagccatagcactcgcagagaaatatggaatcccctactttgaaactagtgctgccaatgggacaaacataagccaagcaattgagatgcttctggacctgataatgaagcgaatggaacggtgtgtggacaagtcctggattcctgaaggagtggtgcgatcaaatggtcatgcctctacggatcagttaagtgaagaaaaggagaaaggggcatgtggctgttgagaagtcaagtaagcgacatagtagttcaggtggcccatgcctgggatcttctctatgattgatacatggcacagtgagagattaatgggcattgtgtacaaattgcttctcaccatccccattagacctacgaataaagcatccggttctaaaattaatttgttgcagctttgtaaatatttctttaagattcagcctgagagttaggagaaatatttcagagccaaaagtgccttatacaaccttagcctattatagtaaatcattcaaggattcagaattttgcagtcacagaagagtgtatttattatgtagaatgaatgagggtactgtcacctgccttaatgtaggtaggcccagagtcttacatttaagatcttacatgcagttataaaaccgccacagtcttcaatccagatttgaagactcatgccataggtgacattctaaaataccattaaagccacttaaatgttaaataagaatatacatgcacatcagctcaatgtctttgagtattaattttatgtaagcattctatttaacatgaatataggacaaatcatggctatatctatagaccttggataaactggattgaccaattatacactcacggtgacttttttattggtgggaaggggattggggtggggcaggctggcttaatgtaatatgagcaaccaaagtgggacttctgtctccccgctatattcccattgctctgaatggttgattgaagggtcagggaactagattttatggctttagttcactgtgattgtacatttatacttggcctatgtgctggccgcacctgaacatagctggtgcttatgccgagttatttgcgatgagtaaatatttagtttctttttcttcatatttataatgttgatctggcatcctcaggctgcagctttattagcttataacttactcatctctatctttaccagcaggctctgtattgttgatatttgcaacttgttttgcttttccattggtggaattgaaataattagtttttaattacataagatgcctgtttgctatttggtggaagatagatgttcatattgaagcagtcacatttgtactgtagttcaataaaagaaaaatgaagtattctgtagcctatatttttcatagagctcatgagcatttactgtacttgctgggtcttgccaagatcatttattccgctgcattgccaaagtgtcttcataccaaattaaaggtggttttaatatatgtttcatggaagttgtttataaaattcaaaggtatttcatttaggtgaaaagtcttatttattaaagtggtttgaataaagtagatcaaaacttccagagatcttaatggctatataggaagaaatatcactcaccataatttaaataaagaataaaaatacttgtattttgtggtggcaaatgtttggtagaactgtaattagaaaaatacaagtatatttgcgtgatggttacactagaagcccagactttacgactacacaatatattcatgtatctaaactgtacttgtaccccctaaatttatttttaaaaaaggaaaaataaaagtatcatgaaaaaacctatttttttttccactgtccttccactactcccataacaaacttatccatggttggtaaaattttacatatttctatccttgaaatgaaggcttcttttaaattccaaagaagtcatggaggcctgtgcatttgaattgtatatgctagtgaggaaaagatttagacatttcaagagcagggttggccaggcgcggtggctcacacctgtaatcccagcactttgggaggccgaggagggcggatcacgaggtcaggagatcgagaccatcctggctaacacagtgaaaccccatctctactaaaaaaaaaaaaaaaaaaaaaatgggctgggcgtggtggtgggcacctgtagtcccagctactcaggaggctgaggcaggagaatggcgtgaacctgggaggcggagcttgcagtgagccgagattgcgccactgcactccagcctgggcgacagaggagactctgtctcaaaaaaaaaaaaaaaaaaaaagagcagggtcataatcacacagcagtgccttatatagttgccataagacttcagtgcagtacaacataattttacagctacatatcagggcatattctatatggtgtatttgtgttagaataacacattaaatgtctttaaacataaaaataagaatgtttgcatgtttcagttttcaagaaccaaatgagtaattagctatagattccactggccttaaacatacaattaagtgtatacatgatatagtgcacacacaaaagccacctttaattattgaaataacctgtattctttttggaaatcatttaagtttggtattgaagtactatattttttgtgcatcaatgtatttttctatttacaagcctatgtaaaagtgaagtgtatcttcagtgaaccatgtgccaattaagctgtaataaaaaagtggtctagtctgtc

SEQ ID NO: 17237 - DNA, 432 bp, Homo sapiens
  source 1..432: mol_type = unassigned DNA
tttgctgttacacaggaagagagcaggcagcatcagtatcggctcagcatccttcccccttctgttcgattagaagctgatcgaagcaacagtgccataaagaaatgggctagatatttccagaggctgcaatctggaggcgtttggaggtaccgaccaagaccatcactatgaccgatggagactatgattatctgatcaaactcctggccctcggggattcaggggtggggaagacaacatttctttatagatacacagataataaattcaatcccaaattcatcactacagtaggaatagactttcgggaaaaacgtgtggtttataatgcacaaggaccgaatggatcttcagggaaagcatttaaagtgcatcttcagctttgggacactgcgggacaagagcggttccggagtctcaccactgcat

SEQ ID NO: 17238 - DNA, 7281 bp, Homo sapiens
  source 1..7281: mol_type = unassigned DNA
agcgccctgggctctttgaatgagagacatcaaagaaaacacagaacaaaaatgaataaaaatgagctcgctggtaaggctagaagccccacagtgtggagacttcatccccgagaggagtgtgtttctcactgcagcagttgagtcaccagcaagacttgcctgaggtgagctccgcacatccgcgttgggacttgcagacacgccttcttctcacacaaaccttacccagccccgccgccgcggcggactccgagggtggtgccaccagccctgccactcgcagtcctgacgggcaggggctgcggaccgcccggccttggacccatccggagccacaggttggaggagataagtagctgtccccgtgctcatcgccctgtggagcagatcctgtctccttgctgacggtggagcccgggagttccagggcttgggaaggggaaggaaacctctctgaaatctgacacctgctctcccggcaaggaaacttcgcaggctgaccgaccaagaccatcactatgaccgatggagactatgattatctgatcaaactcctggccctcggggattcaggggtggggaagacaacatttctttatagatacacagataataaattcaatcccaaattcatcactacagtaggaatagactttcgggaaaaacgtgtggtttataatgcacaaggaccgaatggatcttcagggaaagcatttaaagtgcatcttcagctttgggacactgcgggacaagagcggttccggagtctcaccactgcatttttcagagacgccatgggcttcttattaatgtttgacctcaccagtcaacagagcttcttaaatgtcagaaactggatgagccaactgcaagcaaatgcttattgtgaaaatccagatatagtattaattggcaacaaggcagacctaccagatcagagggaagtcaatgaacggcaagctcgggaactggctgacaaatatggcataccatattttgaaacaagtgcagcaactggacagaatgtggagaaagctgtagaaacccttttggacttaatcatgaagcgaatggaacagtgtgtggagaagacacaaatccctgatactgtcaatggtggaaattctggaaacttggatggggaaaagccaccagagaagaaatgtatctgctagactctacatagaaactgaacatcaagaaccccaccaaaatattacttttaaaaacaatgacaaaccacacaattgttgttgagtaaaccacgcacaatggcatgtctttctttttctgccagaaaatctattttaagaaaccagaatagtcaacagtgttcaaaagaattgactagttatccctgaggccctttcaaacatgatcaaagatttcccaatgtgatctcatcatcatggatactcaatttgttttttcttatagagaaaatgagtatataagacaatatacaagaagaaatatcagtgagttttaaatcagaacaagttacctgtcacattgaagaaaagggtaggcactaaagggagaacacagaaagaagaatttctaaaatattggatttacttcttatattgagtcagatgcatacttttagatttgcattggggaaaatgtactagctaaaaatggatacacaatgaagaattctatttggctaattaagaatgatatactatgtacacccaataagctgtactagaatgaataaattactgataaggttacaaataggtaaatgtcacacttctgttaaaatgcaggaggtagtgtcataatgccgtctttatattcttaataaatagcactttgacaagaacaggactgtaaatgatgaagtacaagacaaataccctgggaaaaaaaatgaaagtatgagaaattggcatttctacagctgaaattcaatgtatctgttagagatgtctggaagggttacttagccaaattttactcaagccaattaggagctgatattatcagttggaattaagagaactccagaggtttccatttcaaacaaaattttagaaattggtttggtgttcagcttcacatttcattttttcttagcacatgttgataaaatagtcacaaggagaaattaccagttacggtttattaaatctcttttaaaatgcagtcaaggaaaactagccttgaattttttttagataaaataagatggtgatatgaaacaaaaagtggcaattattgcaggtttccttttagtttacaaaagtactggaaactaaatcatatttcttccctccaaatttcacccattcctgactttgaatcaattgcagaaatgcaggtgtgttactttgttgatcaataactttggaacaattatggatcaattctatggtcactctgaattttcatgtcattaatcacataaaaattgataatacctcattctgtattacaatatgattttattttgccaaaggcaagacacctatagttgagctgtattttgggggattgggtgaggaaggacttctgatcttatctcaacaaaaaactggccagtatttttgttaatgtaaagcttccttttctttctaaaaaatagtaacaaaattatttttcattggcctattctgttcttgtgtctaaactaacattacattaatttttaatcttagtttctgataaacacaagccattcctatcaaaatattatttatttcagtcaattttaccaaataacaaagacaatatattttcgtttttttttattatgagcatatgattttttgacaggctgtttcctcgtcgtatagattttttccaatcaaacctactttttccatactctgtgcatattttttgtgaagttatacacattgaagaccctaaaaatcccagtccatcattcagcttacctctgcgaacttctatctggtattgaatcagtttcagaaacacagacagatccaaggaaatgtctctttataatgttcttaggatggactagacccataaatgtgccatgaatcaaaatattaataatttgaaagctttcatgctgttagcccctgatgaaattctcagcattaactggccagctcctctgatttctgcagcatcgcaacaggttcgaagatgggttgtggctgggtattccctcccatggtgtttcctctgggatgctcttcattatctcaatgcctgtgccatgaagatagaaaactgtaagctaacatttaagatgtttcttctggaaggaaagtgagcaggaacaagttatattgccactgctgtggcaaattttggtgaacttttggggtcattatatcaattttttctttggattcaaattgtaatgtcccctgcatttccttaatagggaatgtgaaacctttataaaactctaaaagtattctgttttgatatgtctttttgtttctattcattttcagttatatgattgatttacttatgccaagattctgtcactgtcagttatttaatgagtgttttttcagggtctgttttaagatcattatttgatagctgtagcatgaagcagaggttgatgatgcccataattgcaagactattcctgtaaaaataacaattattgggtaataacttcaagaggaatgagaagtgacaaaattgatttaaaatattgttctacttataaataaatgcttgatataaaaaattttctccataaagtttgacatctgaccccagattctatgtaatcattattagaaattccttctctcattatttcaggattagtagttctgtgtaattcattttacaatttcaaattgttctggtgccataaagtatacagactactttaaagatttccaaatcccctaatttaccccacaacagcatgtaattttagccaagatatgtcctgttactaagtatctcccaatgctttagtaaaacgtatttaggagaaatgttgaaaatgtacatgaagctcctttctgatatagaaaccatttctggagtatttacactggtttgatgtttacattgctctaactcggtgcctcagatacctctgtgaccaaatttgtctccaaccacatagctcatttcctataatgttatatcataggaagccctcacagagacactaacacagctaaagatcttctgatattatcagcaagggatgcaaggactttattggaatctggagagtttaactgccttctcttggtctcctcacttacttcttatgaagttggcattacctgagactcttagctgtgattaggtacaagcttaccttttagggtagaaaaagaaagatcatttgaaaaatgtatctaaaataatccagagaacataatgtttgtcttggtctgataatgataagaagtcaaggattggcagagaaaatactaaacgccaagagttgagcctgtgggtctctccataagagttttaaaactcttgccagttaccactttatccaatttgctatcattttcgtattatcagctatcgccctgtaaaatattcaaaactagctatttctaaagtaaacattttatctgttacttttaaccagataggtgtctttgtcatccttctactataaattgttctttgccaacctgtacaggtagatgaaccaggcgagagttttaatcagccttttcttgtcccctttgtaagaaagagatgcttgccatagagaaggacatgagtacattaaaaataatttaatagccacaatatgatgttctttaagctgcaaattgagtacactgggaatcaacaaatttgatgaagcctgtctgtctcttcaccagtggagtgagtgcagcagttagaaagagaagcaatattgtgcaactggtgcagtggtgagttaatcatagtgtataaccttgtgttcatgaaacaggttgttcattgttctgcatctctcttcatttaaaaaggatacacaattctttcctcattgcatattacaccaaacgtttgagggaaaaatcctcattcgtaaaggattttggatgtataatctaaaactcaacaataaagaaataatattccaagtctctggtttcctaagatacataataactgtttataaagaaggtctaagagctgatatttgccaaagtgatagaagagttgttttttcctctctactaccaagctttaagacattaaaagaagtctagtgtatttgaatattttagagaaagctttatcattttttaagatgccaagatgctgcctacgtttgcaaaagttgtctaagaattcaccatgagctatattttcttctggatctttgaccaaggtgatgtcagcttatttctggggaaggtgttgagctcttatacatgaaaatggatataggctattctctgggatgagtgtcatttcaatgctttataaatccatgaagctgcttgtctcataaagtagaactgatacaaattttggttggatatatagagaattttataaatgtattgccttagaatttctgggtggagacccaactacaatgacattgtcatgccagaactataaagataattagagttaaaagttgtttaaattgtgcccttaaatacagcagaacctggagaaggtcatacttcaaaggtcgattttgagtccgaataaagaaagacctagtaacagatagtttttttttgttcattttcttctaccaagtagaggtttatgccctcagaactaaactagtaaaaatatctgaacaaaaaacctttcgttgttggcataaaaatgtgatacacttagagacattttgtttattgcatataaatctaatttttccataaattagatttatgatattttcataaagcacttgattagtttttcaaggcgtaccatcacaaagatgctttcctgcagagttctttgtatcaacagcctatggttgagatgttttctcatttcctgtagagagagaataccactaacaaacaaacaaaaactttagtgccaaaatagtggaactattttgtcatcttttgagaaaaaaatatacaaagaagtcatcttttcattaagtggattccctggttcctttccagctggttgtggaagtaatggctaacatccttcagctgactttgtctacaaggattattagcaaattctgtaggagcaagcatgtctgaccttaacttaatggatcccttattcaatcagtggcttctgtctttatgtctgttggcatatcaaaatggtttctgttcctagaaaagtaataacatatgcttatctttattctttttccaggtgattttgttttcaaatgctccttgtgaaaacacctagtgttgtagaaaggaaagtggccagaaagaacaacttgggaccatgagtaggtcattaaatagcttagtgatttatcctcatatagggcttataaaccctgtatgtgtttatatgtgcttcacagagttcgtgtcaggctcaaaggagatatgtataagaaagtggtttgtaaattatgttccatttcataaatagacactattcacaaactaaaatctaataaaaaaccacagttgtaatttaaactgcttgatataaaaagaggtatcatagcagggaaaacacactaattttcatacagtagaggtattgaaaactgaaaatgggaaggcaacttgaagtcattgtatttgattgaaaatgtttaatacatctcattattgacaaaatatgtcatcttgtatttatttcaaggaaaccaatgaattctaggtagtatattacaagttggtcaaaatattccatgtacaaatagggcttctgtgtccatagccttgtaagagatactgattgtatctgaaattattttttaaaaaaataaattatcctgctttagttagtgtgttaaaagtagacgatgttctaatataacactgaagtgcttcattgtatcccaacagtttaccttcaagtaatattatctttatttttaggctaagcacgtttgattattttgtctgtctcctatatagatctgttttgtctagtgctatgaatgtaacttaaaactataaacttgaagtttttattctatatgccccttaatagactgtggttcctgacgcacactgttaggtcattattttgttgtaccaaagttctagtggcttcagaaatcatagcatccaatgattttttggtgtctggctatgaatactatggttgagaattgtattcagtgattgtttctgcacacttttcaaataaaaaatgaatttttatcaatta

SEQ ID NO: 17239 - DNA, 597 bp, Homo sapiens
  source 1..597: mol_type = unassigned DNA
gcagtcctgacgggcaggggctgcggaccgcccggccttggacccatccggagccacaggttggaggagataagtagctgtccccgtgctcatcgccctgtggagcagatcctgtctccttgctgacggtggagcccgggagttccagggcttgggaaggggaaggaaacctctctgaaatctgacacctgctctcccggcaaggaaacttcgcaggctgaccgaccaagaccatcactatgaccgatggagactatgattatctgatcaaactcctggccctcggggattcaggggtggggaagacaacatttctttatagatacacagataataaattcaatcccaaattcatcactacagtaggaatagactttcgggaaaaacgtgtggtttataatgcacaaggaccgaatggatcttcagggaaagcatttaaagtgcatcttcagctttgggacactgcgggacaagagcggccaactgcaagcaaatgcttattgtgaaaatccagatatagtattaattggcaacaaggcagacctaccagatcagagggaagtcaatgaacggcaagctcgggaactggctgacaaa

SEQ ID NO: 17240 - DNA, 423 bp, Homo sapiens
  source 1..423: mol_type = unassigned DNA
tttcagagacgccatgggcttcttattaatgtttgacctcaccagtcaacagagcttcttaaatgtcagaaactggatgagccaactgcaagcaaatgcttattgtgaaaatccagatatagtattaattggcaacaaggcagacctaccagatcagagggaagtcaatgaacggcaagctcgggaactggctgacaaatatggctgcaaattgagtacactgggaatcaacaaatttgatgaagcctgtctgtctcttcaccagtggagttgttcattgttctgcatctctcttcatttaaaaaggatacacaattctttcctcattgcatattacaccaaacgtttgagggaaaaatcctcattcgtaaaggattttggatgtataatctaaaactcaacaataaagaaataatattccaa

SEQ ID NO: 17241 - DNA, 4055 bp, Homo sapiens
  source 1..4055: mol_type = unassigned DNA
ccgtccgggggcgttcctgggagctgggggccggcgaggctggacccgacgcgcccgggaggagccggccggcggccacgtgacccaccgcggcggggccggcggcccagaaatagcagcggcggcggttccgcccgcgggcggcgcgagcgaggggcagaggcgagagacgccggcggggcgcgggcgcggcggccccggaggatgctgctgagccccggcactgcctggctgcgagcacatgatggcgatacgggagctcaaagtgtgccttctcggggacactggggttgggaaatcaagcatcgtgtgtcgatttgtccaggatcactttgaccacaacatcagccctactattggggcatcttttatgaccaaaactgtgccttgtggaaatgaacttcacaagttcctcatctgggacactgctggtcaggaacggtttcattcattggctcccatgtactatcgaggctcagctgcagctgttatcgtgtatgatattaccaagcaggattcattttataccttgaagaaatgggtcaaggagctgaaagaacatggtccagaaaacattgtaatggccatcgctggaaacaagtgcgacctctcagatattagggaggttcccctgaaggatgctaaggaatacgctgaatccataggtgccatcgtggttgagacaagtgcaaaaaatgctattaatatcgaagagctctttcaaggaatcagccgccagatcccacccttggacccccatgaaaatggaaacaatggaacaatcaaagttgagaagccaaccatgcaagccagccgccggtgctgttgacccaagggccgtggtccacggtacttgaagaagccagagcccacatcctgtgcactgctgaaggaccctacgctcggtggcctggcacctcactttgagaagagtgagcacactggctttgcatcctggaagacctgcagggggcggggcaggaaatgtacctgaaaaggattttagaaaaccctgggaaaacccaccacaccaccacaaaatggcctttagtgtatgaaatgcacatggaggggatgtagttgcatttttgctaaaaaaaaaaaaaaacctttaaaaattgttggatgtgtacaaaagtcttactgccttattatgtgtatgggattctaaagtggcattccacttggatttcctgtgctacctatccaaattccagtaactacttcagtgtcattgcctttgttacctaaccaaccttcactgaaaggcaaatttagttcaggaggttagtttttagctagctttggaagtaagcctttatttattactttttggaggaaatcagagaagtgtcaatggaccgtcactcagactgagacttgagttattacagaagccaggaaaagtgtattagaaactgttgtctacaccacttttaattggtgaacaatttttctaagttatggtcatatatacccaaacaaaccaaatcaaactaaattactgcatataattttgggattgggtggcctagtttgaaagagtgatttaagtaatcactatgtaagtggtgagagatgcaggacatacacattattcaagagaccacctgacatgcatctcctccgcaggaatacattcgtcctctcttagagaagtttaacgcacatagtattattttactaagagaatatctcttggtgtcatatctaggggaagagaattaactagaattaaatttaatgtttgaatctaaatcattgggcaaacttctaataataacaattaataataggttacaggaaagccagccagaggaagtgtcagcactttaaaattctagaccccaaaaaactacaaaatcagaaaaagtatttttatgtttctagcttgaggagaagggctttagggctaaccagaggtctgaccctagaatgccaaggaactgagaatgggctccgatgaaaaccttccttttcagattccctgtctgctcaattaaagatgtttgaatccaaaggaagtcaaggaagaaaaagcatggaaaggaagagaactgattcctactgaaaattcaaattctattaccattctaactttcataaaaagttgggatcaagaagcagctgatttcctgccagggcttatattagggggtgattcttaaaggacattaggattggtgctcagaaatggttaatcatgctgtgtgctagccagggccagctggtaccttctttgccatgagcattcaagggacggctaacctttattgacaatctatatcgcaaaagtcaggaaagaggttgtgagctgattggattaaagacctggcacttcagtaactcagcacgcttccacttcactcaacttaagagagttcattgacagtgttaggatgtgaaggctgggaaacacttattttgcttcaagagttccacttggctctcccaaataggtacctcaaaaactgttagcaagcggcatttggatgtcttgacaggggctttgcagggatttttagggttttttccacattgtccacattaatggttggcatgattgtgcttgcaggccaagaaatgatcataccccttgccaaaggtaaaaaaaaaaaaaaaaaaatgagttgaaaattgaagtgacctctttccagctgagttgcaggcttattttgtaacctttcctcatccagttttccctgagaacctgggtttatctctagatagctgttcaggttttttagctgaggggtaagtatcctagctgagagttttgcatctttgggctgggtttgcagtggttgtgttttgcataaaatgtctagtctttgccacagatagtgagctacccactaatgagcccatggttttatttcagaagcacatgagggtgtgaaaccactctgttacctttctgtattgtcttagctattcaagccagtcagaggataatatatatattctcatcagcactcagagtagtcagtgaagagagtagatcacacttgggcacaccaggattcacataaacattgtatcttctctgtggatgctcaggccttgtctacaatgaggctttacaaccttcctttgttttggctcgggattacttcctggctgtctaataattgaaccataaccatgtaatattatgtaaaggcctggaaattactgttgctaaaaaaagtcatgtagtttcatgtagtgtagcatccttggcatcgttttccaaaatttgttccttctcccttttttttttctttcgtgtgtggcatgagtgtgtatctgtgtaaatatgattgtatatgtgttactccgatatgtaatccatttcactggctgagtttggcccctagccatgtgttaatataaagtaggcatggcttcccaatggaaatctctgagaatgacagtggagttgtgcaagcattttacattgccacataattgacttgccattttatggttaaaaacggcacattaggcagttgaatatgacgttaccttgcagactaaaaggttgaaggcccgaaactaacttttagctaacaataagggctgtgccccaatggaaactgagttcattttctgagaaaggtttggatgactgaaatatttcctctacagtcaaggactttggcatgtggtggctgaaactgagcttttttgtgtgggctccagttctcactgttctgcaatgctcatggcaagttgaatggtgagctagcttataaattaaagagctctgaactgtattcagaccgactgggtatctagcttactgttttaacatcattgttgaaaccagaccctgtagtccagtggtgctgccctgttgtgcaaactgctcctttttctcgtgtttttgtaaagagcttccatctgggctggacccagttcttgcacatacaagacaccgctgcagtcagctaggacctttccgccatgtattctattctgtagtaaagcatttccatcaacaatgcctaattgtatctgttatttttggtttaacacacactgattcatactaataaatattttcagtttta

SEQ ID NO: 17242 - DNA, 783 bp, Homo sapiens
  source 1..783: mol_type = unassigned DNA
aaatagcagcggcggcggttccgcccgcgggcggcgcgagcgaggggcagaggcgagagacgccggcggggcgcgggcgcggcggccccggaggatgctgctgagccccggcactgcctggctgcgagcacatgatggcgatacgggagctcaaagtgtgccttctcgggggcatcttttatgaccaaaactgtgccttgtggaaatgaacttcacaagttcctcatctgggacactgctggtcaggaacggtttcattcattggctcccatgtactatcgaggctcagctgcagctgttatcgtgtatgatattaccaagcaggattcattttataccttgaagaaatgggtcaaggagctgaaagaacatggtccagaaaacattgtaatggccatcgctggaaacaagtgcgacctctcagatattagggaggttcccctgaaggatgctaaggaatacgctgaatccataggtgccatcgtggttgagacaagtgcaaaaaatgctattaatatcgaagagctctttcaaggaatcagccgccagatcccacccttggacccccatgaaaatggaaacaatggaacaatcaaagttgagaagccaaccatgcaagccagccgccggtgctgttgacccaagggccgtggtccacggtacttgaagaagccagagcccacatcctgtgcactgctgaaggaccctacgctcggtggcctggcacctcactttgagaagagtgagcacactggctttgcatcctggaagacctgcaggggg

SEQ ID NO: 17243 - DNA, 469 bp, Homo sapiens
  source 1..469: mol_type = unassigned DNA
ggcgcgagcgaggggcagaggcgagagacgccggcggggcgcgggcgcggcggccccggaggatgctgctgagccccggcactgcctggctgcgagcacatgatggcgatacgggagctcaaagtgtgccttctcggggacactggggttgggaaatcaagcatcgtgtgtcgatttgtccaggatcactttgaccacaacatcagccctactattggggcatcttttatgaccaaaactgtgccttgtggaaatgaacttcacaagttcctcatctgggacactgctggtcaggaacggggaggttcccctgaaggatgctaaggaatacgctgaatccataggtgccatcgtggttgagacaagtgcaaaaaatgctattaatatcgaagagctctttcaaggaatcagccgccagatcccacccttggacccccatgaaaatggaaacaatggaacaatcaaagtt

SEQ ID NO: 17244 - DNA, 714 bp, Homo sapiens
  source 1..714: mol_type = unassigned DNA
agaggcgagagacgccggcggggcgcgggcgcggcggccccggaggatgctgctgagccccggcactgcctggctgcgagcacatgatggcgatacgggagctcaaagtgtgccttctcgggggactgatggaaccgatctgttcccttacgaagtgtcacagtattggcaggactctggacaaggacaaggaaggctgcattcctgtggcaccaccaggtggaagatggaggtatgttctcagaacacctgcgactgggtaatatataaagaaattggctcacgattctggtggctggaaagtccaggacggggcagctgcatctggtgagggcctcagtctgcttccactcatggcagaaagtggaagcgaagtgggtgtgtgcaaagagatcacatggtgtgaaggacagaggcttagccatgtgaaatgtttttgctcaatgtcataaaggccatgtgggaagtggaccctaagccaggcagtgtgactgctccagggttcccagctccacagtgcaggaggtcaaaacaaccttgatgttatcgtacttaccgtaaatcttgctgtaaagcagttgttccgcacatcccttctgaagcacggacactgtccccctgtggtgcgtaagccctgggcctggggatggtagcacagggatcccccatttcgcctgtgggccacccgagacgcggctcctgttcatacgtccc

SEQ ID NO: 17245 - DNA, 518 bp, Homo sapiens
  source 1..518: mol_type = unassigned DNA
gttgggaaatcaagcatcgtgtgtcgatttgtccaggatcactttgaccacaacatcagccctactattggggcatcttttatgaccaaaactgtgccttgtggaaatgaacttcacaagttcctcatctgggacactgctggtcaggaacgggccgccagatcccacccttggacccccatgaaaatggaaacaatggaacaatcaaagttgagaagccaaccatgcaagccagccgccggtgctgttgacccaagggccgtggtccacggtacttgaagaagccagagcccacatcctgtgcactgctgaaggaccctacgctcggtggcctggcacctcactttgagaagagtgagcacactggctttgcatcctggaagacctgcagggggcggggcaggaaatgtacctgaaaaggattttagaaaaccctgggaaaacccaccacaccaccacaaaatggcctttagtgtatgaaatgcacatggaggggatgtagttgcatttttgctaaa

SEQ ID NO: 17246 - DNA, 328 bp, Homo sapiens
  source 1..328: mol_type = unassigned DNA
gggcatcttttatgaccaaaactgtgccttgtggaaatgaacttcacaagttcctcatctgggacactgctggtcaggaacggtttcattcattggctcccatgtactatcgaggctcagctgcagctgttatcgtgtatgatattaccaagcaggattcattttataccttgaagaaatgggtcaaggagctgaaagaacatggtccagaaaacattgtaatggccatcgctggaaacaagtgcgacctctcagatattagatgctgtcctccatccctgagtgtcatccgtgtagatgctgtcctccatccctgagtgtcatccct

SEQ ID NO: 17247 - DNA, 583 bp, Homo sapiens
  source 1..583: mol_type = unassigned DNA
agcgatgcttctgcttctcctgctggcggacgttccctgatgacttgctgtgttccatgtactgttctgagtgcctgtgtgtactgatgcattcagccctcctcgcaaaagcactttgaggttgaaactgtcgttattcccatttgcagtttcattcattggctcccatgtactatcgaggctcagctgcagctgttatcgtgtatgatattaccaagcaggattcattttataccttgaagaaatgggtcaaggagctgaaagaacatggtccagaaaacattgtaatggccatcgctggaaacaagtgcgacctctcagatattagggaggttcccctgaaggatgctaaggaatacgctgaatccataggtgccatcgtggttgagacaagtgcaaaaaatgctattaatatcgaagagctctttcaaggaatcagccgccagatcccacccttggacccccatgaaaatggaaacaatggaacaatcaaagttgagaagccaaccatgcaagccagccgccggtgctgttgacccaagggccgtggtccacggtacttgaagaagccagagcccacatc

SEQ ID NO: 17248 - DNA, 367 bp, Homo sapiens
  source 1..367: mol_type = unassigned DNA
gaggctcagctgcagctgttatcgtgtatgatattaccaagcaggattcattttataccttgaagaaatgggtcaaggagctgaaagaacatggtccagaaaacattgtaatggccatcgctggaaacaagtgcgacctctcagatattaggtaagatgcattgaaatctcttttgtgtagatactgtcctccatccctgagtgtcatccgtgtagatactgtcctccatccctgagtgtcatccgtgtagatgctgtcctccatccctgagtgtcatccgtgtagatgctgtcctccatccctgagtgtcatgcgtgtagatgctgtcctccatccctgagtgtcatccgtgtagatgctgtcctc

SEQ ID NO: 17249 - DNA, 295 bp, Homo sapiens
  source 1..295: mol_type = unassigned DNA
gttactttccacgagttcctgaccacttctacctaaatgtggtgtgttgcccttggcctgttttctagaggacaattgattcattttataccttgaagaaatgggtcaaggagctgaaagaacatggtccagaaaacattgtaatggccatcgctggaaacaagtgcgacctctcagatattagggaggttcccctgaaggatgctaaggaatacgctgaatccataggtgccatcgtggttgagacaagtgcaaaaaatgctattaatatcgaagagctctttcaaggaatcag

SEQ ID NO: 17250 - DNA, 272 bp, Homo sapiens
  source 1..272: mol_type = unassigned DNA
gaggacaattgtgagtgaagggccaacaggaagacaggactctaaatatatatgtttcttccttggtgattcattttataccttgaagaaatgggtcaaggagctgaaagaacatggtccagaaaacattgtaatggccatcgctggaaacaagtgcgacctctcagatattagggaggttcccctgaaggatgctaaggaatacgctgaatccataggtgccatcgtggttgagacaagtgcaaaaaatgctattaatatcgaagagctct

SEQ ID NO: 17251 - DNA, 342 bp, Homo sapiens
  source 1..342: mol_type = unassigned DNA
gatcggtgtctggtgactcttggtaattggtgctgcgcggcgaaggagtggactgtgagaggccgccagatcccacccttggacccccatgaaaatggaaacaatggaacaatcaaagttgagaagccaaccatgcaagccagccgccggtgctgttgacccaagggccgtggtccacggtacttgaagaagccagagcccacatcctgtgcactgctgaaggaccctacgctcggtggcctggcacctcactttgagaagagtgagcacactggctttgcatcctggaagacctgcagggggcggggcaggaaatgtacctgaaaaggattttagaaaacc

SEQ ID NO: 17252 - DNA, 604 bp, Homo sapiens
  source 1..604: mol_type = unassigned DNA
ggaatgctgactctctcacatctcaaaactcttcctaccaaaggagaaaaatgaagtctgagaaatattttactctaataagtgaaattttgaatattctgaagataaaagaacctggcactcctaagaagccatgttcaacagctgattcaagagtgctgctaagagttcaaaacatgcaggaggggagtcttcttgagacagagccaggccttcctcaattttgcattctgtgcatcagtgctcattgttgactggggagagaaatgagaagcagcaaagaggaaggaggtggcggaaagcggggaaaggccgccagatcccacccttggacccccatgaaaatggaaacaatggaacaatcaaagttgagaagccaaccatgcaagccagccgccggtgctgttgacccaagggccgtggtccacggtacttgaagaagccagagcccacatcctgtgcactgctgaaggaccctacgctcggtggcctggcacctcactttgagaagagtgagcacactggctttgcatcctggaagacctgcagggggcggggcaggaaatgtacctgaaaaggattttagaaaaccctgggaaaaccc

SEQ ID NO: 17253 - DNA, 1258 bp, Homo sapiens
  source 1..1258: mol_type = unassigned DNA
cgggtccgtcccgggaatgcaggcaggggagggtgtgggccgaggcgcggcggcggctggagcagcgcggtagggtccttcgccagagcatccggtccgagggcgcacacaggcagaaggctcgcggctcgtccactctcctccctctctcctcctctccctggcttttgtgttggtgcctccgagctgcaaggagggtgcgctggaggaggaggaggggggcccggagtgagaggcacccccttcacgcgcgcgcgcgcacacggtgccggcgcacgcacacacgggcggacacacacacacgcgcgcacacacacacgcacagagctcgctcgcctcgagcgcacgaacgtggacgttctctttgtgtggagccctcaaggggggttggggccccggttcggtccgggggagatggcgcagcccatcctgggccatgggagcctgcagcccgcctcggccgctggcctggcgtccctggagctcgactcgtcgctggaccagtacgtgcagattcgcatcttcaaaataatcgtgattggggactccaacgtgggcaagacctgcctgaccttccgcttctgcgggggtaccttcccagacaagactgaagccaccatcggcgtggacttcagggagaagaccgtggaaatcgagggcgagaagatcaaggttcaggtgtgggacacagcaggtcaggaacgtttccgcaaaagcatggtcgagcattactaccgcaacgtacatgccgtggtcttcgtctatgacgtcaccaagatgacatctttcaccaacctcaaaatgtggatccaagaatgcaatgggcatgctgtgcccccactagtccccaaagtgcttgtgggcaacaagtgtgacttgagggaacagatccaggtgccctccaacttagccctgaaatttgctgatgcccacaacatgctcttgtttgagacatcggccaaggaccccaaagagagccagaacgtggagtcgattttcatgtgcttggcttgccgattgaaggcccagaaatccctgctgtatcgtgatgctgagaggcagcaggggaaggtgcagaaactggagttcccacaggaagctaacagtaaaacttcctgtccttgttgaaaccaaacgatataaatacaagataaattatcactggagttttttctttcccttttttctgtgcctgcataatgctgacacctgcttgtttccatacaaattgatatcaaaataaaatttgtatagatta

SEQ ID NO: 17254 - DNA, 1597 bp, Homo sapiens
  source 1..1597: mol_type = unassigned DNA
cgtgtggcggggccgctccgcgcccccgggccgctctgtaatggtagggcagcctcagccccgagatgacgtcgggtctccgcggccccgggttattgtaggaaccatccggccccgcgtaatcgtaggaactatccggccccgcgtaatcgtagggtctgcgcgggcccggcccccaccagacgggactccccgcccccaattggcggccgaagagtctcctcgccccagagtcatcttcgggacgcccagggcccgggtgattttgggctcgccgcggccccgggtgattgtttcatctccgtggcccgcggtggtcgtagcgtctccgagaccgcggactcccgtagggtccccgtggccccgagttgtagtcgggacaccccggccgcgggtgatcgtcgggtctccacgcgcccgggtcgctgacgcggatccggcctcggcgccttctcagggcgccctgcaaggccgcaggcaggatgaacattctggcacccgtgcggagggatcgcgtcctggcggagctgccccagtgcctgaggaaggaggccgctttgcacgggcacaaagacttccacccccgcgtcacctgcgcctgccaggagcaccggacaggcaccgtgggatttaagatctccaaggtcattgtggtgggggacctgtcggtggggaagacttgcctcattaataggttctgcaaagacacctttgataagaattacaaggccaccattggagtggacttcgagatggaacgatttgaggtgctgggcattcccttcagtttgcagctttgggataccgctgggcaggagaggttcaaatgcattgcatcaacctactatagaggagctcaagccatcatcattgtcttcaacctgaatgatgtggcatctctggaacataccaagcagtggctggccgatgccctgaaggagaatgacccttccagtgtgcttctcttccttacccctgctcagtatgcgctgatggagaaagacgccctccaggtggcccaggagatgaaggctgagtactgggcagtctcatctctcactggtgagaatgtccgagaattcttcttccgtgtggcagcactgacctttgaggccaatgtgctggctgagctggagaaatcgggggctcgacgcattggggatgttgtccgcatcaacagtgatgacagcaacctctacctaactgccagcaagaagaagcccacatgttgcccatgagggctgaggagactgttcagagactgcccagccctagggcactgtgccaccctcattcctccagagcttgacccctggacatttgcactgactttatccagaccaaagagctgcctcttggtggcagtattcccacagaggggtagctgggatcatgctagtcacttcctgcccccaggcaccgtgccaaagactggatgccccctactcctcaggggactgtccagggcgcccagtggtagtgagggagagtgtctctgttcttttgctcagcctgctgggccctttgtgtttgaggatgcttaatgattccagcctctcactgtgccttatgcattaaaatttctttgttacgagca

SEQ ID NO: 17255 - DNA, 994 bp, Homo sapiens
  source 1..994: mol_type = unassigned DNA
gatgctgcgcagcagtctccgattccccatcaccaattcggctggggcgccctgcaaggccgcaggcaggatgaacattctggcacccgtgcggagggatcgcgtcctggcggagctgccccagtgcctgaggaaggaggccgctttgcacgggcacaaagacttccacccccgcgtcacctgcgcctgccaggagcaccggacaggcaccgtgggcagatttaagatctccaaggtcattgtggtgggggacctgtcggtggggaagacttgcctcattaataggttctgcaaagacacctttgataagaattacaaggccaccattggagtggacttcgagatggaacgatttgaggtgctgggcattcccttcagtttgcagctttgggataccgctgggcaggagaggttcaaatgcattgcatcaacctactatagaggagctcaagccatcatcattgtcttcaacctgaatgatgtggcatctctggaacataccaagcagtggctggccgatgccctgaaggagaatgacccttccagtgtgcttctcttccttgtaggttccaagaaggatctgagtacccctgctcagtatgcgctgatggagaaagacgccctccaggtggcccaggagatgaagactgttcagagactgcccagccctagggcactgtgccaccctcattcctccagagcttgacccctggacatttgcactgactttatccagaccaaagagctgcctcttggtggcagtattcccacagaggggtagctgggatcatgctagtcacttcctgcccccaggcaccgtgccaaagactggatgccccctactcctcaggggactgtccagggcgcccagtggtagtgagggagagtgtctctgttcttttgctcagcctgctgggccctttgtgtttgaggatgcttaatgattccagcctctcactgtgccttatgcattaaaatttctttgttacgagca

SEQ ID NO: 17256 - DNA, 1592 bp, Homo sapiens
  source 1..1592: mol_type = unassigned DNA
cagccttgaaggaaaagacgccagacttcagacgtctctctcctcggtgggcacctcattctaaccctggcacccccttcgcacgcttcccctccaccatcctcacccccgacctcccagggcagaagggcgagagggggcagactctatgagtcacctcccaggcctggagttgaggagggaagcgccgcctctccttgggccccttctctccccctttcccctccctgctggttcctggcatcgccagatgctgcgcagcagtctccgattccccatcaccaattcggctggcgtctccgagaccgcggactcccgtagggtccccgtggccccgagttgtagtcgggacaccccggccgcgggtgatcgtcgggtctccacgcgcccgggtcgctgacgcggatccggcctcggcgccttctcagggcgccctgcaaggccgcaggcaggatgaacattctggcacccgtgcggagggatcgcgtcctggcggagctgccccagtgcctgaggaaggaggccgctttgcacgggcacaaagacttccacccccgcgtcacctgcgcctgccaggagcaccggacaggcaccgtgggatttaagatctccaaggtcattgtggtgggggacctgtcggtggggaagacttgcctcattaataggttctgcaaagacacctttgataagaattacaaggccaccattggagtggacttcgagatggaacgatttgaggtgctgggcattcccttcagtttgcagctttgggataccgctgggcaggagaggttcaaatgcattgcatcaacctactatagaggagctcaagccatcatcattgtcttcaacctgaatgatgtggcatctctggaacataccaagcagtggctggccgatgccctgaaggagaatgacccttccagtgtgcttctcttccttgtaggttccaagaaggatctgagtacccctgctcagtatgcgctgatggagaaagacgccctccaggtggcccaggagatgaaggctgagtactgggcagtctcatctctcactggtgagaatgtccgagaattcttcttccgtgtggcagcactgacctttgaggccaatgtgctggctgagctggagaaatcgggggctcgacgcattggggatgttgtccgcatcaacagtgatgacagcaacctctacctaactgccagcaagaagaagcccacatgttgcccatgagggctgaggagactgttcagagactgcccagccctagggcactgtgccaccctcattcctccagagcttgacccctggacatttgcactgactttatccagaccaaagagctgcctcttggtggcagtattcccacagaggggtagctgggatcatgctagtcacttcctgcccccaggcaccgtgccaaagactggatgccccctactcctcaggggactgtccagggcgcccagtggtagtgagggagagtgtctctgttcttttgctcagcctgctgggccctttgtgtttgaggatgcttaatgattccagcctctcactgtgccttatgcattaaaatttctttgttacgagca

SEQ ID NO: 17257 - DNA, 1184 bp, Homo sapiens
  source 1..1184: mol_type = unassigned DNA
gatgctgcgcagcagtctccgattccccatcaccaattcggctggggcgccctgcaaggccgcaggcaggatgaacattctggcacccgtgcggagggatcgcgtcctggcggagctgccccagtgcctgaggaaggaggccgctttgcacgggcacaaagacttccacccccgcgtcacctgcgcctgccaggagcaccggacaggcaccgtgggatttaagatctccaaggtcattgtggtgggggacctgtcggtggggaagacttgcctcattaataggttctgcaaagacacctttgataagaattacaaggccaccattggagtggacttcgagatggaacgatttgaggtgctgggcattcccttcagtttgcagctttgggataccgctgggcaggagaggttcaaatgcattgcatcaacctactatagaggagctcaagccatcatcattgtcttcaacctgaatgatgtggcatctctggaacataccaagcagtggctggccgatgccctgaaggagaatgacccttccagtgtgcttctcttccttacccctgctcagtatgcgctgatggagaaagacgccctccaggtggcccaggagatgaaggctgagtactgggcagtctcatctctcactggtgagaatgtccgagaattcttcttccgtgtggcagcactgacctttgaggccaatgtgctggctgagctggagaaatcgggggctcgacgcattggggatgttgtccgcatcaacagtgatgacagcaacctctacctaactgccagcaagaagaagcccacatgttgcccatgagggctgaggagactgttcagagactgcccagccctagggcactgtgccaccctcattcctccagagcttgacccctggacatttgcactgactttatccagaccaaagagctgcctcttggtggcagtattcccacagaggggtagctgggatcatgctagtcacttcctgcccccaggcaccgtgccaaagactggatgccccctactcctcaggggactgtccagggcgcccagtggtagtgagggagagtgtctctgttcttttgctcagcctgctgggccctttgtgtttgaggatgcttaatgattccagcctctcactgtgccttatgcattaaaatttctttgttacgagc

SEQ ID NO: 17258 - DNA, 1293 bp, Homo sapiens
  source 1..1293: mol_type = unassigned DNA
ggttcctggcatcgccagatgctgcgcagcagtctccgattccccatcaccaattcggctggcgtctccgagaccgcggactcccgtagggtccccgtggccccgagttgtagtcgggacaccccggccgcgggtgatcgtcgggtctccacgcgcccgggtcgctgacgcggatccggcctcggcgccttctcagggcgccctgcaaggccgcaggcaggatgaacattctggcacccgtgcggagggatcgcgtcctggcggagctgccccagtgcctgaggaaggaggccgctttgcacgggcacaaagacttccacccccgcgtcacctgcgcctgccaggagcaccggacaggcaccgtggggttctgcaaagacacctttgataagaattacaaggccaccattggagtggacttcgagatggaacgatttgaggtgctgggcattcccttcagtttgcagctttgggataccgctgggcaggagaggttcaaatgcattgcatcaacctactatagaggagctcaagccatcatcattgtcttcaacctgaatgatgtggcatctctggaacataccaagcagtggctggccgatgccctgaaggagaatgacccttccagtgtgcttctcttccttgtaggttccaagaaggatctgagtacccctgctcagtatgcgctgatggagaaagacgccctccaggtggcccaggagatgaaggctgagtactgggcagtctcatctctcactggtgagaatgtccgagaattcttcttccgtgtggcagcactgacctttgaggccaatgtgctggctgagctggagaaatcgggggctcgacgcattggggatgttgtccgcatcaacagtgatgacagcaacctctacctaactgccagcaagaagaagcccacatgttgcccatgagggctgaggagactgttcagagactgcccagccctagggcactgtgccaccctcattcctccagagcttgacccctggacatttgcactgactttatccagaccaaagagctgcctcttggtggcagtattcccacagaggggtagctgggatcatgctagtcacttcctgcccccaggcaccgtgccaaagactggatgccccctactcctcaggggactgtccagggcgcccagtggtagtgagggagagtgtctctgttcttttgctcagcctgctgggccctttgtgtttgaggatgcttaatgattccagcctctcactgtgccttatgcattaaaatttctttgttacgagc

SEQ ID NO: 17259 - DNA, 745 bp, Homo sapiens
  source 1..745: mol_type = unassigned DNA
gaatgatgtggcatctctggaacataccaagttccaagaaggatctgagtgtgagtgtgccagtggggggacttcccagcttggtgagggaatgcccccctctgactctggccttccctcagacccctgctcagtatgcgctgatggagaaagacgccctccaggtggcccaggagatgaaggctgagtactgggcagtctcatctctcactggtgagaatgtccgagaattcttcttccgtgtggcagcactgacctttgaggccaatgtgctggctgagctggagaaatcgggggctcgacgcattggggatgttgtccgcatcaacagtgatgacagcaacctctacctaactgccagcaagaagaagcccacatgttgcccatgagggctgaggagactgttcagagactgcccagccctagggcactgtgccaccctcattcctccagagcttgacccctggacatttgcactgactttatccagaccaaagagctgcctcttggtggcagtattcccacagaggggtagctgggatcatgctagtcacttcctgcccccaggcaccgtgccaaagactggatgccccctactcctcaggggactgtccagggcgcccagtggtagtgagggagagtgtctctgttcttttgctcagcctgctgggccctttgtgtttgaggatgcttaatgattccagcctctcactgtgccttatgcattaaaatttctttgttacga

SEQ ID NO: 17260 - DNA, 1201 bp, Homo sapiens
  source 1..1201: mol_type = unassigned DNA
ccgtggccccgagttgtagtcgggacaccccggccgcgggtgatcgtcgggtctccacgcgcccgggtcgctgacgcggatccggcctcggcgccttctcagggcgccctgcaaggccgcaggcaggatgaacattctggcacccgtgcggagggatcgcgtcctggcggagctgccccagtgcctgaggaaggaggccgctttgcacgggcacaaagacttccacccccgcgtcacctgcgcctgccaggagcaccggacaggcaccgtgggatttaagatctccaaggtcattgtggtgggggacctgtcggtggggaagacttgcctcattaataggttctgcaaagacacctttgataagaattacaaggccaccattggagtggacttcgagatggaacgatttgaggtgctgggcattcccttcagtttgcagctttgggataccgctgggcaggagaggttcaaatgcattgcatcaacctactatagaggagctcaagccatcatcattgtcttcaacctgaatgatgtggcatctctggaacataccaagttccaagaaggatctgagtacccctgctcagtatgcgctgatggagaaagacgccctccaggtggcccaggagatgaaggctgagtactgggcagtctcatctctcactggtgagtgagaatgtccgagaattcttcttccgtgtggcagcactgacctttgaggccaatgtgctggctgagctggagaaatcgggggctcgacgcattggggatgttgtccgcatcaacagtgatgacagcaacctctacctaactgccagcaagaagaagcccacatgttgcccatgagggctgaggagactgttcagagactgcccagccctagggcactgtgccaccctcattcctccagagcttgacccctggacatttgcactgactttatccagaccaaagagctgcctcttggtggcagtattcccacagaggggtagctgggatcatgctagtcacttcctgcccccaggcaccgtgccaaagactggatgccccctactcctcaggggactgtccagggcgcccagtggtagtgagggagagtgtctctgttcttttgctcagcctgctgggccctttgtgtttgaggatgcttaatgattccagcctctcactgtgccttatgcattaaaatttctttgtt

SEQ ID NO: 17261 - DNA, 1108 bp, Homo sapiens
  source 1..1108: mol_type = unassigned DNA
tccttccttccagttgggataccgctgggcaggagaggttcaaatgcattgcatcaacctactatagaggagctcaagccatcatcattgtcttcaacctgaatgatgtggcatctctggaacataccaagcagtggctggccgatgccctgaaggagaatgacccttccagtgtgcttctcttccttgtaggttccaagaaggatctgagtgtgagtgtgccagtggggggacttcccagcttggtgagggaatgcccccctctgactctggccttccctcagacccctgctcagtatgcgctgatggagaaagacgccctccaggtggcccaggagatgaaggctgagtactgggcagtctcatctctcactggtgagttggaggctttagggctctgctgtgacactcttgcctggctctcctctcactgctacacctccagctgtgccctgtgtccccagacccagcactgcccctgagcacctatctgctctctgtgtcaggtgagaatgtccgagaattcttcttccgtgtggcagcactgacctttgaggccaatgtgctggctgagctggagaaatcgggggctcgacgcattggggatgttgtccgtgagtgcttgcctggttgagggtggcagagggcacagtgagcctccaatccctgcttcacatattttccacccttctttaggcatcaacagtgatgacagcaacctctacctaactgccagcaagaagaagcccacatgttgcccatgagggctgaggagactgttcagagactgcccagccctagggcactgtgccaccctcattcctccagagcttgacccctggacatttgcactgactttatccagaccaaagagctgcctcttggtggcagtattcccacagaggggtagctgggatcatgctagtcacttcctgcccccaggcaccgtgccaaagactggatgccccctactcctcaggggactgtccagggcgcccagtggtagtgagggagagtgtctctgttcttttgctcagcctgctgggccctttgtgtttgaggatgcttaatgattccagcctctcactgtgccttatgcattaaaatt

SEQ ID NO: 17262 - DNA, 863 bp, Homo sapiens
  source 1..863: mol_type = unassigned DNA
tgcgcagcagtctccgattccccatcaccaattcggctggggcgccctgcaaggccgcaggcaggatgaacattctggcacccgtgcggagggatcgcgtcctggcggagctgccccagtgcctgaggaaggaggccgctttgcacgggcacaaagacttccacccccgcgtcacctgcgcctgccaggagcaccggacaggcaccgtgggatttaagatctccaaggtcattgtggtgggggacctgtcggtggggaagacttgcctcattaataggttctgcaaagacacctttgataagaattacaaggccaccattggagtggacttcgagatggaacgatttgaggtgctgggcattcccttcagtttgcagctttgggataccgctgggcaggagaggttcaaatgcattgcatcaacctactatagaggagctcaagccatcatcattgtcttcaacctgaatgatgtggcatctctggaacataccaagcagtggctggccgatgccctgaaggagaatgacccttccagtgtgcttctcttccttgtaggttccaagaaggatctgagtacccctgctcagtatgcgctgatggagaaagacgccctccaggtggcccaggagatgaaggctgagtactgggcagtctcatctctcactggtgagaatgtccgagaattcttcttccgtgtggcagcactgacctttgaggccaatgtgctggctgagctggagaaatcgggggctcgacgcattggggatgttgtccgcatcaacagtgatgacagcaacctctacctaactgccagcaagaagaagcccacatgttgcccatgagggctgaggagactgttc

SEQ ID NO: 17263 - DNA, 914 bp, Homo sapiens
  source 1..914: mol_type = unassigned DNA
ggaaaagacgccagacttcagacgtctctctcctcggtgggcacctcattctaaccctggcacccccttcgcacgcttcccctccaccatcctcacccccgacctcccagggcagaagggcgagagggggcagactctatgagtcacctcccaggcctggagttgaggagggaagcgccgcctctccttgggccccttctctccccctttcccctccctgctggttcctggcatcgccagatgctgcgcagcagtctccgattccccatcaccaattcggctggatttaagatctccaaggtcattgtggtgggggacctgtcggtggggaagacttgcctcattaataggttctgcaaagacacctttgataagaattacaaggccaccattggagtggacttcgagatggaacgatttgaggtgctgggcattcccttcagtttgcagctttgggataccgctgggcaggagaggttcaaatgcattgcatcaacctactatagaggagctcaagccatcatcattgtcttcaacctgaatgatgtggcatctctggaacataccaagcagtggctggccgatgccctgaaggagaatgacccttccagtgtgcttctcttccttgtaggttccaagaaggatctgagtacccctgctcagtatgcgctgatggagaaagacgccctccaggtggcccaggagatgaaggctgagtactgggcagtctcatctctcactggtgagaatgtccgagaattcttcttccgtgtggcagcactgacctttgaggccaatgtgctggctgagctggagaaatcgggggctcgacgcattggggatgttgtccgcatcaacagtgatgacagcaacctctacctaactgccagcaagaagaagcccacatgttgccc

SEQ ID NO: 17264 - DNA, 467 bp, Homo sapiens
  source 1..467: mol_type = unassigned DNA
agatgctgcgcagcagtctccgattccccatcaccaattcggctggtttgcagctttgggataccgctgggcaggagaggttcaaatgcattgcatcaacctactatagaggagctcaagccatcatcattgtcttcaacctgaatgatgtggcatctctggaacataccaagcagtggctggccgatgccctgaaggagaatgacccttccagtgtgcttctcttccttacccctgctcagtatgcgctgatggagaaagacgccctccaggtggcccaggagatgaaggctgagtactgggcagtctcatctctcactggtgagaatgtccgagaattcttcttccgtgtggcagcactgacctttgaggccaatgtgctggctgagctggagaaatcgggggctcgacgcattggggatgttgtccgcatcaacagtgatgacagcaacctctacctaactgcc

SEQ ID NO: 17265 - DNA, 1180 bp, Homo sapiens
  source 1..1180: mol_type = unassigned DNA
gagcggagtgggactcgaggccctgtagccggactgggcccctcgccccctcctccagcggcctgcgggccttggcagcgccgcccctgcccacactgaccccgtgtggcggggccgctccgcgcccccgggccgctctgtaatggtagggcagcctcagccccgagatgacgtcgggtctccgcggccccgggttattgtaggaaccatccggccccgcgtaatcgtaggaactatccggccccgcgtaatcgtagggtctgcgcgggcccggcccccaccagacgggactccccgcccccaattggcggccgaagagtctcctcgccccagagtcatcttcgggacgcccagggcccgggtgattttgggctcgccgcggccccgggtgattgtttcatctccgtggcccgcggtggtcgtagcgtctccgagaccgcggactcccgtagggtccccgtggccccgagttgtagtcgggacaccccggccgcgggtgatcgtcgggtctccacgcgcccgggtcgctgacgcggatccggcctcggcgccttctcagggcgccctgcaaggccgcaggcaggatgaacattctggcacccgtgcggagggatcgcgtcctggcggagctgccccagatttaagatctccaaggtcattgtggtgggggacctgtcggtggggaagacttgcctcattaataggttctgcaaagacacctttgataagaattacaaggccaccattggagtggacttcgagatggaacgatttgaggtgctgggcattcccttcagtttgcagctttgggataccgctgggcaggagaggttcaaatgcattgcatcaacctactatagaggagctcaagccatcatcattgtcttcaacctgaatgatgtggcatctctggaacataccaagcagtggctggccgatgccctgaaggagaatgacccttccagtgtgcttctcttccttacccctgctcagtatgcgctgatggagaaagacgccctccaggtggcccaggagatgaaggctgagtactgggcagtctcatctctcactggtgagaatgtccgagaattcttcttccgtgtggcagcactgacctttgaggccaatgtgctggctgagctggagaaatcgggggctcgacgcattggggatgttgtcc

SEQ ID NO: 17266 - DNA, 1060 bp, Homo sapiens
  source 1..1060: mol_type = unassigned DNA
ctccttgggccccttctctccccctttcccctccctgctggttcctggcatcgccagatgctgcgcagcagtctccgattccccatcaccaattcggctggggtctgcgcgggcccggcccccaccagacgggactccccgcccccaattggcggccgaagagtctcctcgccccagagtcatcttcgggacgcccagggcccgggtgattttgggctcgccgcggccccgggtgattgtttcatctccgtggcccgcggtggtcgtagcgtctccgagaccgcggactcccgtagggtccccgtggccccgagttgtagtcgggacaccccggccgcgggtgatcgtcgggtctccacgcgcccgggtcgctgacgcggatccggcctcggcgccttctcagggcgccctgcaaggccgcaggcaggatgaacattctggcacccgtgcggagggatcgcgtcctggcggagctgccccagtgcctgaggaaggaggccgctttgcacgggcacaaagacttccacccccgcgtcacctgcgcctgccaggagcaccggacaggcaccgtgggatttaagatctccaaggtcattgtggtgggggacctgtcggtggggaagacttgcctcattaataggttctgcaaagacacctttgataagaattacaaggccaccattggagtggacttcgagatggaacgatttgaggtgctgggcattcccttcagtttgcagctttgggataccgctgggcaggagaggttcaaatgcattgcatcaacctactatagaggagctcaagccatcatcattgtcttcaacctgaatgatgtggcatctctggaacataccaagcagtggctggccgatgccctgaaggagaatgacccttccagtgtgcttctcttccttgtaggttccaagaaggatctgagtacccctgctcagtatgcgctgatggagaaagacgccctccaggtggcccaggagatgaaggctgagtactgggcagtctcatctctcactggtgagaatgtccgagaattcttcttccg

SEQ ID NO: 17267 - DNA, 717 bp, Homo sapiens
  source 1..717: mol_type = unassigned DNA
cacaatctacacagcagccttgaaggaaaagacgccagacttcagacgtctctctcctcgggcgccctgcaaggccgcaggcaggatgaacattctggcacccgtgcggagggatcgcgtcctggcggagctgccccagtgcctgaggaaggaggccgctttgcacgggcacaaagacttccacccccgcgtcacctgcgcctgccaggagcaccggacaggcaccgtgggatttaagatctccaaggtcattgtggtgggggacctgtcggtggggaagacttgcctcattaataggttctgcaaagacacctttgataagaattacaaggccaccattggagtggacttcgagatggaacgatttgaggtgctgggcattcccttcagtttgcagctttgggataccgctgggcaggagaggttcaaatgcattgcatcaacctactatagaggagctcaagccatcatcattgtcttcaacctgaatgatgtggcatctctggaacataccaagcagtggctggccgatgccctgaaggagaatgacccttccagtgtgcttctcttccttgtaggttccaagaaggatctgagtacccctgctcagtatgcgctgatggagaaagacgccctccaggtggcccaggagatgaaggctgagtactgggcagtctcatctctcactggtgagaatgtccgagaattcttcttccg

SEQ ID NO: 17268 - DNA, 434 bp, Homo sapiens
  source 1..434: mol_type = unassigned DNA
cactcttccagccatcatcattgtcttcaacctgaatgatgtggcatctctggaacataccaagcagtggctggccgatgccctgaaggagaatgacccttccagtgtgcttctcttccttgtaggttccaagaaggatctgagtgtgagtgtgccagtggggggacttcccagcttggtgagggaatgcccccctctgactctggccttccctcagacccctgctcagtatgcgctgatggagaaagacgccctccaggtggcccaggagatgaaggctgagtactgggcagtctcatctctcactggtgagttggaggctttagggctctgctgtgacactcttgcctggctctcctctcactgctacacctccagctgtgccctgtgtccccagacccagcactgcccctgagcacctatctgctctctgt

SEQ ID NO: 17269 - DNA, 888 bp, Homo sapiens
  source 1..888: mol_type = unassigned DNA
atggtagggcagcctcagccccgagatgacgtcgggtctccgcggccccgggttattgtaggaaccatccggccccgcgtaatcgtaggaactatccggccccgcgtaatcgtagggtctgcgcgggcccggcccccaccagacgggactccccgcccccaattggcggccgaagagtctcctcgccccagagtcatcttcgggacgcccagggcccgggtgattttgggctcgccgcggccccgggtgattgtttcatctccgtggcccgcggtggtcgtagcgtctccgagaccgcggactcccgtagggtccccgtggccccgagttgtagtcgggacaccccggccgcgggtgatcgtcgggtctccacgcgcccgggtcgctgacgcggatccggcctcggcgccttctcagggcgccctgcaaggccgcaggcaggatgaacattctggcacccgtgcggagggatcgcgtcctggcggagctgccccaggttctgcaaagacacctttgataagaattacaaggccaccattggagtggacttcgagatggaacgatttgaggtgctgggcattcccttcagtttgcagctttgggataccgctgggcaggagaggttcaaatgcattgcatcaacctactatagaggagctcaagccatcatcattgtcttcaacctgaatgatgtggcatctctggaacataccaagcagtggctggccgatgccctgaaggagaatgacccttccagtgtgcttctcttccttgtaggttccaagaaggatctgagtacccctgctcagtatgcgctgatggagaaagacgccctccaggtggcccaggagatgaaggctgagtactgggcagtctcatctctcactg

SEQ ID NO: 17270 - DNA, 626 bp, Homo sapiens
  source 1..626: mol_type = unassigned DNA
agatgctgcgcagcagtctccgattccccatcaccaattcggctggggtccccgtggccccgagttgtagtcgggacaccccggccgcgggtgatcgtcgggtctccacgcgcccgggtcgctgacgcggatccggcctcggcgccttctcagggcgccctgcaaggccgcaggcaggatgaacattctggcacccgtgcggagggatcgcgtcctggcggagctgccccagtgcctgaggaaggaggccgctttgcacgggcacaaagacttccacccccgcgtcacctgcgcctgccaggagcaccggacaggcaccgtgggatttaagatctccaaggtcattgtggtgggggacctgtcggtggggaagacttgcctcattaataggttctgcaaagacacctttgataagaattacaaggccaccattggagtggacttcgagatggaacgatttgaggtgctgggcattcccttcagtttgcagctttgggataccgctgggcaggagaggttcaaatgcattgcatcaacctactatagaggagctcaagccatcatcattgtcttcaacctgaatgatgtggcatctctggaacataccaagcagtggctggccgatg

SEQ ID NO: 17271 - DNA, 711 bp, Homo sapiens
  source 1..711: mol_type = unassigned DNA
caacgacccagtaaaatatatactaactttacttaaatgtttaaactgaggcttagagaggctaaataacgtgtccaaagtcacacagctaatcagtgtgagagctgggattcaaattcatgtctctctgcttctggagcacaaaacactcctcctccccagcacacctgtccacgcagctgcctgggatgcctggtgtctataataccctcagcctgggtgcagctacctttctggacctagtcgggagcattggaactccctagggtgaaagagctcgtgcccactccccttgcccactcttgtgtccagcagatttaagatctccaaggtcattgtggtgggggacctgtcggtggggaagacttgcctcattaataggttctgcaaagacacctttgataagaattacaaggccaccattggagtggacttcgagatggaacgatttgaggtgctgggcattcccttcagtttgcagctgtgagtgcttccacaccccttccagctatcccttctccccagcacccacaccccccaagatacatacctgtgcttcactcttccttccttccagttgggataccgctgggcaggagaggttcaaatgcattgcatcaacctactatagaggagctcaagccatcatcattgtcttcaacctgaatgatgtggcatctctggaacataccaagtaagtgagcatcctgc

SEQ ID NO: 17272 - DNA, 730 bp, Homo sapiens
  source 1..730: mol_type = unassigned DNA
atggtagggcagcctcagccccgagatgacgtcgggtctccgcggccccgggttattgtaggaaccatccggccccgcgtaatcgtaggaactatccggccccgcgtaatcgtagggtctgcgcgggcccggcccccaccagacgggactccccgcccccaattggcggccgaagagtctcctcgccccagagtcatcttcgggacgcccagggcccgggtgattttgggctcgccgcggccccgggtgattgtttcatctccgtggcccgcggtggtcgtagcgtctccgagaccgcggactcccgtagggtccccgtggccccgagttgtagtcgggacaccccggccgcgggtgatcgtcgggtctccacgcgcccgggtcgctgacgcggatccggcctcggcgccttctcagggcgccctgcaaggccgcaggcaggatgaacattctggcacccgtgcggagggatcgcgtcctggcggagctgccccagtgcctgaggaaggaggccgctttgcacgggcacaaagacttccacccccgcgtcacctgcgcctgccaggagcaccggacaggcaccgtgggcagatttaagatctccaaggtcattgtggtgggggacctgtcggtggggaagacttgcctcattaataggttctgcaaagacacctttgataagaattacaaggccaccattggagtggacttcgagatggaacgatttgag

SEQ ID NO: 17273 - DNA, 527 bp, Homo sapiens
  source 1..527: mol_type = unassigned DNA
tatgagtcacctcccaggcctggagttgaggagggaagcgccgcctctccttgggccccttctctccccctttcccctccctgctggttcctggcatcgccagatgctgcgcagcagtctccgattccccatcaccaattcggctggcgtctccgagaccgcggactcccgtagggtccccgtggccccgagttgtagtcgggacaccccggccgcgggtgatcgtcgggtctccacgcgcccgggtcgctgacgcggatccggcctcggcgccttctcagggcgccctgcaaggccgcaggcaggatgaacattctggcacccgtgcggagggatcgcgtcctggcggagctgccccagtgcctgaggaaggaggccgctttgcacgggcacaaagacttccacccccgcgtcacctgcgcctgccaggagcaccggacaggcaccgtgggcagatttaagatctccaaggtcattgtggtgggggacctgtcggtggggaagacttgcctcattaataggttctg

SEQ ID NO: 17274 - DNA, 582 bp, Homo sapiens
  source 1..582: mol_type = unassigned DNA
agatgctgcgcagcagtctccgattccccatcaccaattcggctgggaaccatccggccccgcgtaatcgtaggaactatccggccccgcgtaatcgtagggtctgcgcgggcccggcccccaccagacgggactccccgcccccaattggcggccgaagagtctcctcgccccagagtcatcttcgggacgcccagggcccgggtgattttgggctcgccgcggccccgggtgattgtttcatctccgtggcccgcggtggtcgtagcgtctccgagaccgcggactcccgtagggtccccgtggccccgagttgtagtcgggacaccccggccgcgggtgatcgtcgggtctccacgcgcccgggtcgctgacgcggatccggcctcggcgccttctcagggcgccctgcaaggccgcaggcaggatgaacattctggcacccgtgcggagggatcgcgtcctggcggagctgccccagtgcctgaggaaggaggccgctttgcacgggcacaaagacttccacccccgcgtcacctgcgcctgccaggagcaccggacaggcaccgtgggcagatttaa

SEQ ID NO: 17275 - DNA, 1253 bp, Homo sapiens
  source 1..1253: mol_type = unassigned DNA
tggtagggcagcctcagccccgagatgacgtcgggtctccgcggccccgggttattgtaggaaccatccggccccgcgtaatcgtaggaactatccggccccgcgtaatcgtagggtctgcgcgggcccggcccccaccagacgggactccccgcccccaattggcggccgaagagtctcctcgccccagagtcatcttcgggacgcccagggcccgggtgattttgggctcgccgcggccccgggtgattgtttcatctccgtggcccgcggtggtcgtagcgtctccgagaccgcggactcccgtagggtccccgtggccccgagttgtagtcgggacaccccggccgcgggtgatcgtcgggtctccacgcgcccgggtcgctgacgcggatccggcctcggcgccttctcagggcgccctgcaaggccgcaggcaggatgaacattctggcacccgtgcggagggatcgcgtcctggcggagctgccccagtgcctgaggaaggaggccgctttgcacgggcacaaagacttccacccccgcgtcacctgcgcctgccaggagcaccggacaggcaccgtggggtgagttagggacacccacaacaaagagaggaggtcccaggaaactctgtagtcatagcgagggtaaacaaccacccccttggggcttcatttcagcccctaccagctatatggttatttccccctctttaagcccctgtatcccctccttttctcccaacaaggttgttgtgagttctatgagatggggttgggtagaagggtggcagctggatttctgagtagagactaaggtgtctgaaatgggaaggtggtcacctgctcagatccccacatagcatccatggagccccagggcaggggtctggctgtgcttacagggatgagtcttattgtgggttttaaaggtaatactgataacagttggcaccattaattaagcatttgctgtgtgccaggcagtgttgggtactatcatctttattgaatggaaaagtccatcacttaagatatatcctgatttcagacattaaaatgcgggggggagggtgtcttagaatataggacatttatctcattttaaccttcacaacgacccagtaaaatatatactaactttacttaaatgtttaaactgaggcttagagaggctaaataacgtgtccaaagtcacacagctaatcagtgtgagagctgggattcaaattcatgtctctctgcttctgg

SEQ ID NO: 17276 - DNA, 498 bp, Homo sapiens
  source 1..498: mol_type = unassigned DNA
agatgctgcgcagcagtctccgattccccatcaccaattcggctggcgtctccgagaccgcggactcccgtagggtccccgtggccccgagttgtagtcgggacaccccggccgcgggtgatcgtcgggtctccacgcgcccgggtcgctgacgcggatccggcctcggcgccttctcagggcgccctgcaaggccgcaggcaggatgaacattctggcacccgtgcggagggatcgcgtcctggcggagctgccccagtgcctgaggaaggaggccgctttgcacgggcacaaagacttccacccccgcgtcacctgcgcctgccaggagcaccggacaggcaccgtggggtgagttagggacacccacaacaaagagaggaggtcccaggaaactctgtagtcatagcgagggtaaacaaccacccccttggggcttcatttcagcccctaccagctatatggttatttccccctctttaagcccctgtatcccct

SEQ ID NO: 17277 - DNA, 546 bp, Homo sapiens
  source 1..546: mol_type = unassigned DNA
agatgctgcgcagcagtctccgattccccatcaccaattcggctgggaactatccggccccgcgtaatcgtagggtctgcgcgggcccggcccccaccagacgggactccccgcccccaattggcggccgaagagtctcctcgccccagagtcatcttcgggacgcccagggcccgggtgattttgggctcgccgcggccccgggtgattgtttcatctccgtggcccgcggtggtcgtagcgtctccgagaccgcggactcccgtagggtccccgtggccccgagttgtagtcgggacaccccggccgcgggtgatcgtcgggtctccacgcgcccgggtcgctgacgcggatccggcctcggcgccttctcagggcgccctgcaaggccgcaggcaggatgaacattctggcacccgtgcggagggatcgcgtcctggcggagctgccccagtgcctgaggaaggaggccgctttgcacgggcacaaagacttccacccccgcgtcacctgcgcctgccaggagcaccggacaggcaccgtggg

SEQ ID NO: 17278 - DNA, 1099 bp, Homo sapiens
  source 1..1099: mol_type = unassigned DNA
tatgagtcacctcccaggcctggagttgaggagggaagcgccgcctctccttgggccccttctctccccctttcccctccctgctggttcctggcatcgccagatgctgcgcagcagtctccgattccccatcaccaattcggctggggcgccctgcaaggccgcaggcaggatgaacattctggcacccgtgcggagggatcgcgtcctggcggagctgccccagtgcctgaggaaggaggccgctttgcacgggcacaaagacttccacccccgcgtcacctgcgcctgccaggagcaccggacaggcaccgtgggcagatttaagatctccaaggtcattgtggtgggggacctgtcggtggggaagacttgcctcattaataggttctgcaaagacacctttgataagaattacaaggccaccattggagtggacttcgagatggaacgatttgaggtgctgggcattcccttcagtttgcagctttgggataccgctgggcaggagaggttcaaatgcattgcatcaacctactatagaggagctcaagccatcatcattgtcttcaacctgaatgatgtggcatctctggaacataccaagcagtggctggccgatgccctgaaggagaatgacccttccagtgtgcttctcttccttgtaggttccaagaaggatctgagtacccctgctcagtatgcgctgatggagaaagacgccctccaggtggcccaggagatgaagactgttcagagactgcccagccctagggcactgtgccaccctcattcctccagagcttgacccctggacatttgcactgactttatccagaccaaagagctgcctcttggtggcagtattcccacagaggggtagctgggatcatgctagtcacttcctgcccccaggcaccgtgccaaagactggatgccccctactcctcaggggactgtccagggcgcccagtggtagtgagggagagtgtctctgttcttttgctcagcctgctgggccctttgtgtttgaggatgcttaatgattccagcctctcactgtgccttatgcattaaaatttctttgttacgagcactt

SEQ ID NO: 17279 - DNA, 1766 bp, Homo sapiens
  source 1..1766: mol_type = unassigned DNA
aggaatttccggggatcgtgttacagcgttggcggagcccgagcggagtgggactcgaggccctgtagccggactgggcccctcgccccctcctccagcggcctgcgggccttggcagcgccgcccctgcccacactgaccccgtgtggcggggccgctccgcgcccccgggccgctctgtaatggtagggcagcctcagccccgagatgacgtcgggtctccgcggccccgggttattgtaggaaccatccggccccgcgtaatcgtaggaactatccggccccgcgtaatcgtagggtctgcgcgggcccggcccccaccagacgggactccccgcccccaattggcggccgaagagtctcctcgccccagagtcatcttcgggacgcccagggcccgggtgattttgggctcgccgcggccccgggtgattgtttcatctccgtggcccgcggtggtcgtagcgtctccgagaccgcggactcccgtagggtccccgtggccccgagttgtagtcgggacaccccggccgcgggtgatcgtcgggtctccacgcgcccgggtcgctgacgcggatccggcctcggcgccttctcagggcgccctgcaaggccgcaggcaggatgaacattctggcacccgtgcggagggatcgcgtcctggcggagctgccccagtgcctgaggaaggaggccgctttgcacgggcacaaagacttccacccccgcgtcacctgcgcctgccaggagcaccggacaggcaccgtgggatttaagatctccaaggtcattgtggtgggggacctgtcggtggggaagacttgcctcattaataggttctgcaaagacacctttgataagaattacaaggccaccattggagtggacttcgagatggaacgatttgaggtgctgggcattcccttcagtttgcagctttgggataccgctgggcaggagaggttcaaatgcattgcatcaacctactatagaggagctcaagccatcatcattgtcttcaacctgaatgatgtggcatctctggaacataccaagcagtggctggccgatgccctgaaggagaatgacccttccagtgtgcttctcttccttgtaggttccaagaaggatctgagtacccctgctcagtatgcgctgatggagaaagacgccctccaggtggcccaggagatgaaggctgagtactgggcagtctcatctctcactggtgagaatgtccgagaattcttcttccgtgtggcagcactgacctttgaggccaatgtgctggctgagctggagaaatcgggggctcgacgcattggggatgttgtccgcatcaacagtgatgacagcaacctctacctaactgccagcaagaagaagcccacatgttgcccatgagggctgaggagactgttcagagactgcccagccctagggcactgtgccaccctcattcctccagagcttgacccctggacatttgcactgactttatccagaccaaagagctgcctcttggtggcagtattcccacagaggggtagctgggatcatgctagtcacttcctgcccccaggcaccgtgccaaagactggatgccccctactcctcaggggactgtccagggcgcccagtggtagtgagggagagtgtctctgttcttttgctcagcctgctgggccctttgtgtttgaggatgcttaatgattccagcctctcactgtgccttatgcattaaaatttctttgttacgagcactt

SEQ ID NO: 17280 - DNA, 3804 bp, Homo sapiens
  source 1..3804: mol_type = unassigned DNA
ttcatcccctgccaggagagcatagtagctcacatttattgagttcttagtacacgctgggcactgttctaggctttttacatgaattaactcattaaatactcagaacaaaaccatgaggcaggtactattataatattatctccattttgtggacacttaggaaagattaatttgcccgagtttgcacgactaataattttcagaatcgagatttgaatcctggagcctgtgctcctaaccaaaccaccatctgcctctcctgagcccattgtccttaacttcttgcggtcatgtgtgctggagagaatgtgatcaaagccctggaccttctccctaggaaaacgcaggtaaacagaattttgcatatttcagggactttggggacacctaagacccatctactgtcgacctcagacttagaagctctatttatctcatacatcctggagagaattgtccagggacaaaaacagaagcgccgccagcgccgcaggacttcgcctctgcaaacgtgtgaggagagctgcgctgcgctgagctgcgtggtgacggagatgcccgttcgctcgggatcaggaacggtgagctcctgggaccgcaatgccctgagaacgcagccgggtgctgagcctccggagtccggtagctgaatgaaatacgcagggatcaccagccggacccaaatcttgcgtccctgccagcatcctggagtcctaagaggcagggattggagcggacaggatctcagaactctggtcccgggcgcacaacggcggagtcgctgttcctggtgctgaaacgctcagtcctggaagaacgtggccgcctgcccgcctggtaccgcgccgcggccgctgcggggaactgtccagtgctgaaaacggatgcggcccggcccgcagagctcagacccaagcctgccgcacccagcggagctcgaaccgagctcctggaagcgctgacgcagagcgcagggagagccggagcggcgagctccaagcctggcatggacctgcagagacccgattcctaccagggaggagctggccctgacttcaacgaccacgtcctgcataagaccatcctggtgggtgacagtggtgtgggaaagacgtctctgctggttcagttcgatcagggcaagttcatccccggctccttctcggccactgtgggcatcggattcacgaacaaggtggtgactgtggatggcgtgagagtgaagctgcagatctgggacaccgctgggcaggaacggttccgaagcgtcacccatgcttattacagagatgctcaggccttgcttctgctgtatgacatcaccaacaaatcttctttcgacaacatcagggcctggctcactgagattcatgagtatgcccagagggacgtggtgatcatgctgctaggcaacaaggcggatatgagcagcgaaagagtgatccgttccgaagacggagagaccttggccagggagtacggtgttcccttcctggagaccagcgccaagactggcatgaatgtggagttagcctttctggccatcgccaagtgagagctgggcagggaagggaagtgtgcggggcagggcggcacactccaggaatccagtagggcccggcccctggcccagcccctggacacacctgcattctgcaggctgaggtccatttgctctgggagcactgggccactgggagaggggagggggcggctcagctcctcaccccagcccagcccagcccagcccagcccattgtctcttcttcaagggaactgaaataccgggccgggcatcaggcggatgagcccagcttccagatccgagactatgtagagtcccagaagaagcgctccagctgctgctccttcatgtgaatcccagggggcagagaggaggctctggaggcacacaggatgcagccttccccctcccaggcctggcttattccaagaggctgagccaatggggagaaagatggaggactcactgcacagccgcttcctagcagggagctatactccaactcctacttgagttcctgcggtctccccgcatccacagggagggtaaaacacttagcttttattttaatagtacataatttaataccaaaaaaggcgcctggatccccaaaaaaccgaggctgggagctagtggcccttttgctttctaggacttggggggccggccctccctcctaagcataacaaaggtggtgttgctccagctcagccccaggggacacagatgcactttgggggtgagggcaggtaatgactccatcgcaccctcagttcagctggacagaggctcaggtgaccccagccttcactgtctcccgctctccaggagcttatcttcgccccatctcccaaataagtgggcccttgtgctgtgaggaagaccaaagcctcagggaagataagagatatggagatgggagggggaggacaaggggcagagagtagggtctagctggctatctctggccttactaacacccccctggaggcatgccccttttctccagcacacaagcacattggggcacctggaaatattggttccaggctcctgttctctggacttcagatcctgggggagcccctcccccccctgaatccctggcttagctaccttcctgcctgtgcacctaaaaacctcaggtcagaactaggaaaagagttttgtttttatttttttgaaatggagtctcgttctgtcgcccaggctgaggtgcagtagtgcaatctccgctcactacaacctccactccctggggctcaagcgatcctcccacctcagccgccgaagtagctgggactataggtgtgtaccatcacacctggctaatttttgtattttttgtagacacagggtttcgccatgttgcccaggctggtcttgaattcctgagctcaagcaacctgccggcctcggcctcccaaagtactgggattacacgcagaaggcaccatgcccaggctagatgtgtcttatcccaatcctttggcaggcatgcagctccacaggcgatttcttcaagcagctgaagtgtttagccctcctgggttaagagccagataaggagaaatccctttcctaggtttggaatgtgttgtgaaaaaaaagagaaatccctggctcctggagctggtgggagacaagattaagcaaacctcccctgacatgtatccctttgaccccaagctctgcctcctccctgaccacccatgccctttcctttaacttctcaaacagataccagggcctaaactgctttacctcccctcctactgagtcaggttaggtggtgggaggtcacccatttccgagttaaaccaatgcaatatgagtaaaacaaagtcatgtgggtatgtctggggtagagagaggggtagcaagttcatgtgtcctccttggtcacatatctcccaaagctccgatccctgccatgggaagtggacaggaaacatgaggtcatgacctgcaggcatctttactgcagctctgccggcctggagggggagagggggaggaagaagtatgcgctgcacatttctgaggctactgcatttgctttcaaggcagaaatcttgctctgagcagtcagcggctccagtttgggcccgataaggaagttctccgtggcctccctcaggcagagcagggaggaggctgacattgccagtctcttctggggcccaaggcaggttgcaggagatccaatcccatagacagctctgggcctcttgcatttgagtttttcagaattaaactgcagtattttggaaagc

SEQ ID NO: 17281 - DNA, 1560 bp, Homo sapiens
  source 1..1560: mol_type = unassigned DNA
gttcgctcgggatcaggaacggtgagctcctgggaccgcaatgccctgagaacgcagccgggtgctgagcctccggagtccggtagctgaatgaaatacgcagggatcaccagccggacccaaatcttgcgtccctgccagcatcctggagtcctaagaggcagggattggagcggacaggatctcagaactctggtcccgggcgcacaacggcggagtcgctgttcctggtgctgaaacgctcagtcctggaagaacgtggccgcctgcccgcctggtaccgcgccgcggccgctgcggggaactgtccagtgctgaaaacggatgcggcccggcccgcagagctcagacccaagcctgccgcacccagcggagctcgaaccgagctcctggaagcgctgacgcagagcgcagggagagccggagcggcgagctccaagcctggcatggacctgcagagacccgattcctaccagggaggagctggccctgacttcaacgaccacgtcctgcataagaccatcctggtgggtgacagtggtgtgggaaagacgtctctgctggttcagttcgatcagggcaagttcatccccggctccttctcggccactgtgggcatcggattcacgaacaaggtggtgactgtggatggcgtgagagtgaagctgcagatctgggacaccgctgggcaggaacggttccgaagcgtcacccatgcttattacagagatgctcaggccttgcttctgctgtatgacatcaccaacaaatcttctttcgacaacatcagggcctggctcactgagattcatgagtatgcccagagggacgtggtgatcatgctgctaggcaacaaggcggatatgagcagcgaaagagtgatccgttccgaagacggagagaccttggccagggagtacggtgttcccttcctggagaccagcgccaagactggcatgaatgtggagttagcctttctggccatcgccaaggaactgaaataccgggccgggcatcaggcggatgagcccagcttccagatccgagactatgtagagtcccagaagaagcgctccagctgctgctccttcatgtgaatcccagggggcagagaggaggctctggaggcacacaggatgcagccttccccctcccaggcctggcttattccaagaggctgagccaatggggagaaagatggaggactcactgcacagccgcttcctagcagggagctatactccaactcctacttgagttcctgcggtctccccgcatccacagggagggtaaaacacttagcttttattttaatagtacataatttaataccaaaaaaggcgcctggatccccaaaaaaccgaggctgggagctagtggcccttttgctttctaggacttggggggccggccctccctcctaagcataacaaaggtggtgttgctccagctcagccccaggggacacagatgcactttgggggtgagggcaggtaatgactccatcgcaccctcagttcagctggacagaggctcaggtgaccccagccttcactgtct

SEQ ID NO: 17282 - DNA, 3780 bp, Homo sapiens
  source 1..3780: mol_type = unassigned DNA
aatgccctgagaacgcagccgggtgctgagcctccggagtccggtagctgaatgaaatacgcagggatcaccagccggacccaaatcttgcgtccctgccagcatcctggagtcctaagaggcagggattggagcggacaggatctcagaactctggtcccgggcgcacaacggcggagtcgctgttcctggtgctgaaacgctcagtcctggaagaacgtggccgcctgcccgcctggtaccgcgccgcggccgctgcggggaactgtccagtgctgaaaacggatgcggcccggcccgcagagctcagacccaagcctgccgcacccagcggagctcgaaccgagctcctggaagcgctgacgcagagcgcagggagagccggagcggcgagctccaagcctggcatggacctgcagagacccgattcctaccagggaggagctggccctgacttcaacgaccacgtcctgcataagaccatcctggtgggtgacagtggtgtgggaaagacgtctctgctggttcagttcgatcagggcaagttcatccccggctccttctcggccactgtgggcatcggattcacgaacaaggtggtgactgtggatggcgtgagagtgaagctgcagatctgggacaccgctgggcaggaacggttccgaagcgtcacccatgcttattacagagatgctcaggccttgcttctgctgtatgacatcaccaacaaatcttctttcgacaacatcagggcctggctcactgagattcatgagtatgcccagagggacgtggtgatcatgctgctaggcaacaaggtgagtggctccggggcagggtcagcccagccctgcacttcctcagccctagccggccccataaccacccaagaacagttatctaggcatccttcctgaaaaggactctgcagcctccagctcaggggtcagacatatctggaggcttctgcccatcccatctgccccttccagggaaagtccaagttgttgcctgagaaatcaaggggtgcccagttctcagcccccattagagcagagtgaacagggtcccaggtcaggggctaagagtgcaaagggttagccccaactgctgtcctattccaagaccctttaccaaaggtgagatcccagagctgggagctacactgggcagaaaccctggccccaggccaatcacacctgcctgcagtcccttgggccaccagcagagggcaggcaacgcctgcttctggggcaaaatatgggcccgctggggcggaggcctccttccccagagtgacccatttgggcttgacaggcggatatgagcagcgaaagagtgatccgttccgaagacggagagaccttggccagggtaagtgattgtctgtgggacagggtgaagggtgggggcaacccgacgctggccctgaggacactctctcccgggcaggagtacggtgttcccttcctggagaccagcgccaagactggcatgaatgtggagttagcctttctggccatcgccaagtgagagctgggcagggaagggaagtgtgcggggcagggcggcacactccaggaatccagtagggcccggcccctggcccagcccctggacacacctgcattctgcaggctgaggtccatttgctctgggagcactgggccactgggagaggggagggggcggctcagctcctcaccccagcccagcccagcccagcccagcccattgtctcttcttcaagggaactgaaataccgggccgggcatcaggcggatgagcccagcttccagatccgagactatgtagagtcccagaagaagcgctccagctgctgctccttcatgtgaatcccagggggcagagaggaggctctggaggcacacaggatgcagccttccccctcccaggcctggcttattccaagaggctgagccaatggggagaaagatggaggactcactgcacagccgcttcctagcagggagctatactccaactcctacttgagttcctgcggtctccccgcatccacagggagggtaaaacacttagcttttattttaatagtacataatttaataccaaaaaaggcgcctggatccccaaaaaaccgaggctgggagctagtggcccttttgctttctaggacttggggggccggccctccctcctaagcataacaaaggtggtgttgctccagctcagccccaggggacacagatgcactttgggggtgagggcaggtaatgactccatcgcaccctcagttcagctggacagaggctcaggtgaccccagccttcactgtctcccgctctccaggagcttatcttcgccccatctcccaaataagtgggcccttgtgctgtgaggaagaccaaagcctcagggaagataagagatatggagatgggagggggaggacaaggggcagagagtagggtctagctggctatctctggccttactaacacccccctggaggcatgccccttttctccagcacacaagcacattggggcacctggaaatattggttccaggctcctgttctctggacttcagatcctgggggagcccctcccccccctgaatccctggcttagctaccttcctgcctgtgcacctaaaaacctcaggtcagaactaggaaaagagttttgtttttatttttttgaaatggagtctcgttctgtcgcccaggctgaggtgcagtagtgcaatctccgctcactacaacctccactccctggggctcaagcgatcctcccacctcagccgccgaagtagctgggactataggtgtgtaccatcacacctggctaatttttgtattttttgtagacacagggtttcgccatgttgcccaggctggtcttgaattcctgagctcaagcaacctgccggcctcggcctcccaaagtactgggattacacgcagaaggcaccatgcccaggctagatgtgtcttatcccaatcctttggcaggcatgcagctccacaggcgatttcttcaagcagctgaagtgtttagccctcctgggttaagagccagataaggagaaatccctttcctaggtttggaatgtgttgtgaaaaaaaagagaaatccctggctcctggagctggtgggagacaagattaagcaaacctcccctgacatgtatccctttgaccccaagctctgcctcctccctgaccacccatgccctttcctttaacttctcaaacagataccagggcctaaactgctttacctcccctcctactgagtcaggttaggtggtgggaggtcacccatttccgagttaaaccaatgcaatatgagtaaaacaaagtcatgtgggtatgtctggggtagagagaggggtagcaagttcatgtgtcctccttggtcacatatctcccaaagctccgatccctgccatgggaagtggacaggaaacatgaggtcatgacctgcaggcatctttactgcagctctgccggcctggagggggagagggggaggaagaagtatgcgctgcacatttctgaggctactgcatttgctttcaaggcagaaatcttgctctgagcagtcagcggctccagtttgggcccgataaggaagttctccgtggcctccctcaggcagagcagggaggaggctgacattgccagtctcttctggggcccaaggcaggttgcaggagatccaatcccatagacagctctgggcctcttgcatttgagtttttcagaattaaactgcagtattttggaaagca

SEQ ID NO: 17283 - DNA, 1494 bp, Homo sapiens
  source 1..1494: mol_type = unassigned DNA
aaagctctcccctggtgggacattctgggcacaaccaacaggccgggggaaatgagaggtgatccatactaaagggtcaaagtccccgcaccaggcagaggccccaaaacaccgcagcgtacatgtgctgcaaggtgatgcttctgggagacacaggcgtcggcaaaacatgtttcctgatccaattcaaagacggggccttcctgtccggaaccttcatagccaccgtcggcatagacttcaggaacaaggtggtgactgtggatggcgtgagagtgaagctgcagatctgggacaccgctgggcaggaacggttccgaagcgtcacccatgcttattacagagatgctcaggccttgcttctgctgtatgacatcaccaacaaatcttctttcgacaacatcagggcctggctcactgagattcatgagtatgcccagagggacgtggtgatcatgctgctaggcaacaaggcggatatgagcagcgaaagagtgatccgttccgaagacggagagaccttggccagggagtacggtgttcccttcctggagaccagcgccaagactggcatgaatgtggagttagcctttctggccatcgccaaggaactgaaataccgggccgggcatcaggcggatgagcccagcttccagatccgagactatgtagagtcccagaagaagcgctccagctgctgctccttcatgtgaatcccagggggcagagaggaggctctggaggcacacaggatgcagccttccccctcccaggcctggcttattccaagaggctgagccaatggggagaaagatggaggactcactgcacagccgcttcctagcagggagctatactccaactcctacttgagttcctgcggtctccccgcatccacagggagggtaaaacacttagcttttattttaatagtacataatttaataccaaaaaaggcgcctggatccccaaaaaaccgaggctgggagctagtggcccttttgctttctaggacttggggggccggccctccctcctaagcataacaaaggtggtgttgctccagctcagccccaggggacacagatgcactttgggggtgagggcaggtaatgactccatcgcaccctcagttcagctggacagaggctcaggtgaccccagccttcactgtctcccgctctccaggagcttatcttcgccccatctcccaaataagtgggcccttgtgctgtgaggaagaccaaagcctcagggaagataagagatatggagatgggagggggaggacaaggggcagagagtagggtctagctggctatctctggccttactaacacccccctggaggcatgccccttttctccagcacacaagcacattggggcacctggaaatattggttccaggctcctgttctctggacttcagatcctgggggagcccctcccccccctgaatccctggcttagctaccttcctgcctgtgcacct

SEQ ID NO: 17284 - DNA, 2655 bp, Homo sapiens
  source 1..2655: mol_type = unassigned DNA
ggaggcgcagcccaggggtccccagctccccgcctcgccacctggggacagcccacggcccggggctcgggcgccgcctgctgtcgcggtgcgcagcgactacgggaactcttccgcagcagacggggtccccgcggcccgctcccccaggggcaagcaagcgaccacaggggaccggtcccggggctggatgtggctcatgtccgaagcgcacggagccgagccggtgttgctcagggaggctgcccgccccttcacgcagaccctgcggctctgcgtgccctcagggaacagcaagaacaaggtggtgactgtggatggcgtgagagtgaagctgcagatctgggacaccgctgggcaggaacggttccgaagcgtcacccatgcttattacagagatgctcaggccttgcttctgctgtatgacatcaccaacaaatcttctttcgacaacatcagggcctggctcactgagattcatgagtatgcccagagggacgtggtgatcatgctgctaggcaacaaggcggatatgagcagcgaaagagtgatccgttccgaagacggagagaccttggccagggagtacggtgttcccttcctggagaccagcgccaagactggcatgaatgtggagttagcctttctggccatcgccaaggaactgaaataccgggccgggcatcaggcggatgagcccagcttccagatccgagactatgtagagtcccagaagaagcgctccagctgctgctccttcatgtgaatcccagggggcagagaggaggctctggaggcacacaggatgcagccttccccctcccaggcctggcttattccaagaggctgagccaatggggagaaagatggaggactcactgcacagccgcttcctagcagggagctatactccaactcctacttgagttcctgcggtctccccgcatccacagggagggtaaaacacttagcttttattttaatagtacataatttaataccaaaaaaggcgcctggatccccaaaaaaccgaggctgggagctagtggcccttttgctttctaggacttggggggccggccctccctcctaagcataacaaaggtggtgttgctccagctcagccccaggggacacagatgcactttgggggtgagggcaggtaatgactccatcgcaccctcagttcagctggacagaggctcaggtgaccccagccttcactgtctcccgctctccaggagcttatcttcgccccatctcccaaataagtgggcccttgtgctgtgaggaagaccaaagcctcagggaagataagagatatggagatgggagggggaggacaaggggcagagagtagggtctagctggctatctctggccttactaacacccccctggaggcatgccccttttctccagcacacaagcacattggggcacctggaaatattggttccaggctcctgttctctggacttcagatcctgggggagcccctcccccccctgaatccctggcttagctaccttcctgcctgtgcacctaaaaacctcaggtcagaactaggaaaagagttttgtttttatttttttgaaatggagtctcgttctgtcgcccaggctgaggtgcagtagtgcaatctccgctcactacaacctccactccctggggctcaagcgatcctcccacctcagccgccgaagtagctgggactataggtgtgtaccatcacacctggctaatttttgtattttttgtagacacagggtttcgccatgttgcccaggctggtcttgaattcctgagctcaagcaacctgccggcctcggcctcccaaagtactgggattacacgcagaaggcaccatgcccaggctagatgtgtcttatcccaatcctttggcaggcatgcagctccacaggcgatttcttcaagcagctgaagtgtttagccctcctgggttaagagccagataaggagaaatccctttcctaggtttggaatgtgttgtgaaaaaaaagagaaatccctggctcctggagctggtgggagacaagattaagcaaacctcccctgacatgtatccctttgaccccaagctctgcctcctccctgaccacccatgccctttcctttaacttctcaaacagataccagggcctaaactgctttacctcccctcctactgagtcaggttaggtggtgggaggtcacccatttccgagttaaaccaatgcaatatgagtaaaacaaagtcatgtgggtatgtctggggtagagagaggggtagcaagttcatgtgtcctccttggtcacatatctcccaaagctccgatccctgccatgggaagtggacaggaaacatgaggtcatgacctgcaggcatctttactgcagctctgccggcctggagggggagagggggaggaagaagtatgcgctgcacatttctgaggctactgcatttgctttcaaggcagaaatcttgctctgagcagtcagcggctccagtttgggcccgataaggaagttctccgtggcctccctcaggcagagcagggaggaggctgacattgccagtctcttctggggcccaaggcaggttgcaggagatccaatcccatagacagctctgggcctcttgcatttgag

SEQ ID NO: 17285 - DNA, 2704 bp, Homo sapiens
  source 1..2704: mol_type = unassigned DNA
gactacgggaactcttccgcagcagacggggtccccgcggcccgctcccccaggggcaagcaagcgaccacaggggaccggtcccggggctggatgtggctcatgtccgaagcgcacggagccgagccggtgttgctcagggaggctgcccgccccttcacgcagaccctgcggctctgcgtgccctcagggaacagcaaggtgatgcttctgggagacacaggcgtcggcaaaacatgtttcctgatccaattcaaagacggggccttcctgtccggaaccttcatagccaccgtcggcatagacttcaggaacaaggtggtgactgtggatggcgtgagagtgaagctgcagatctgggacaccgctgggcaggaacggttccgaagcgtcacccatgcttattacagagatgctcaggccttgcttctgctgtatgacatcaccaacaaatcttctttcgacaacatcagggcctggctcactgagattcatgagtatgcccagagggacgtggtgatcatgctgctaggcaacaaggcggatatgagcagcgaaagagtgatccgttccgaagacggagagaccttggccagggagtacggtgttcccttcctggagaccagcgccaagactggcatgaatgtggagttagcctttctggccatcgccaaggaactgaaataccgggccgggcatcaggcggatgagcccagcttccagatccgagactatgtagagtcccagaagaagcgctccagctgctgctccttcatgtgaatcccagggggcagagaggaggctctggaggcacacaggatgcagccttccccctcccaggcctggcttattccaagaggctgagccaatggggagaaagatggaggactcactgcacagccgcttcctagcagggagctatactccaactcctacttgagttcctgcggtctccccgcatccacagggagggtaaaacacttagcttttattttaatagtacataatttaataccaaaaaaggcgcctggatccccaaaaaaccgaggctgggagctagtggcccttttgctttctaggacttggggggccggccctccctcctaagcataacaaaggtggtgttgctccagctcagccccaggggacacagatgcactttgggggtgagggcaggtaatgactccatcgcaccctcagttcagctggacagaggctcaggtgaccccagccttcactgtctcccgctctccaggagcttatcttcgccccatctcccaaataagtgggcccttgtgctgtgaggaagaccaaagcctcagggaagataagagatatggagatgggagggggaggacaaggggcagagagtagggtctagctggctatctctggccttactaacacccccctggaggcatgccccttttctccagcacacaagcacattggggcacctggaaatattggttccaggctcctgttctctggacttcagatcctgggggagcccctcccccccctgaatccctggcttagctaccttcctgcctgtgcacctaaaaacctcaggtcagaactaggaaaagagttttgtttttatttttttgaaatggagtctcgttctgtcgcccaggctgaggtgcagtagtgcaatctccgctcactacaacctccactccctggggctcaagcgatcctcccacctcagccgccgaagtagctgggactataggtgtgtaccatcacacctggctaatttttgtattttttgtagacacagggtttcgccatgttgcccaggctggtcttgaattcctgagctcaagcaacctgccggcctcggcctcccaaagtactgggattacacgcagaaggcaccatgcccaggctagatgtgtcttatcccaatcctttggcaggcatgcagctccacaggcgatttcttcaagcagctgaagtgtttagccctcctgggttaagagccagataaggagaaatccctttcctaggtttggaatgtgttgtgaaaaaaaagagaaatccctggctcctggagctggtgggagacaagattaagcaaacctcccctgacatgtatccctttgaccccaagctctgcctcctccctgaccacccatgccctttcctttaacttctcaaacagataccagggcctaaactgctttacctcccctcctactgagtcaggttaggtggtgggaggtcacccatttccgagttaaaccaatgcaatatgagtaaaacaaagtcatgtgggtatgtctggggtagagagaggggtagcaagttcatgtgtcctccttggtcacatatctcccaaagctccgatccctgccatgggaagtggacaggaaacatgaggtcatgacctgcaggcatctttactgcagctctgccggcctggagggggagagggggaggaagaagtatgcgctgcacatttctgaggctactgcatttgctttcaaggcagaaatcttgctctgagcagtcagcggctccagtttgggcccgataaggaagttctccgtggcctccctcaggcagagcagggaggaggctgacattgccagtctcttctggggcccaaggcaggttgcaggagatccaatcccatagacagctctgggcctcttgcatttgagtttttcagaattaaactgcagtattttggaaagca

SEQ ID NO: 17286 - DNA, 2617 bp, Homo sapiens
  source 1..2617: mol_type = unassigned DNA
gttcctgcgctctccttcgcctgcgggccggcactgctcacctctcgtccagggacatgacgggcacgccaggcgccgttgccacccgggatggcgaggcccccgagcgctccccgccctgcagtccgagctacgacctcacgggcaaggtgatgcttctgggagacacaggcgtcggcaaaacatgtttcctgatccaattcaaagacggggccttcctgtccggaaccttcatagccaccgtcggcatagacttcaggaacaaggtggtgactgtggatggcgtgagagtgaagctgcagatctgggacaccgctgggcaggaacggttccgaagcgtcacccatgcttattacagagatgctcaggccttgcttctgctgtatgacatcaccaacaaatcttctttcgacaacatcagggcctggctcactgagattcatgagtatgcccagagggacgtggtgatcatgctgctaggcaacaaggcggatatgagcagcgaaagagtgatccgttccgaagacggagagaccttggccagggagtacggtgttcccttcctggagaccagcgccaagactggcatgaatgtggagttagcctttctggccatcgccaaggaactgaaataccgggccgggcatcaggcggatgagcccagcttccagatccgagactatgtagagtcccagaagaagcgctccagctgctgctccttcatgtgaatcccagggggcagagaggaggctctggaggcacacaggatgcagccttccccctcccaggcctggcttattccaagaggctgagccaatggggagaaagatggaggactcactgcacagccgcttcctagcagggagctatactccaactcctacttgagttcctgcggtctccccgcatccacagggagggtaaaacacttagcttttattttaatagtacataatttaataccaaaaaaggcgcctggatccccaaaaaaccgaggctgggagctagtggcccttttgctttctaggacttggggggccggccctccctcctaagcataacaaaggtggtgttgctccagctcagccccaggggacacagatgcactttgggggtgagggcaggtaatgactccatcgcaccctcagttcagctggacagaggctcaggtgaccccagccttcactgtctcccgctctccaggagcttatcttcgccccatctcccaaataagtgggcccttgtgctgtgaggaagaccaaagcctcagggaagataagagatatggagatgggagggggaggacaaggggcagagagtagggtctagctggctatctctggccttactaacacccccctggaggcatgccccttttctccagcacacaagcacattggggcacctggaaatattggttccaggctcctgttctctggacttcagatcctgggggagcccctcccccccctgaatccctggcttagctaccttcctgcctgtgcacctaaaaacctcaggtcagaactaggaaaagagttttgtttttatttttttgaaatggagtctcgttctgtcgcccaggctgaggtgcagtagtgcaatctccgctcactacaacctccactccctggggctcaagcgatcctcccacctcagccgccgaagtagctgggactataggtgtgtaccatcacacctggctaatttttgtattttttgtagacacagggtttcgccatgttgcccaggctggtcttgaattcctgagctcaagcaacctgccggcctcggcctcccaaagtactgggattacacgcagaaggcaccatgcccaggctagatgtgtcttatcccaatcctttggcaggcatgcagctccacaggcgatttcttcaagcagctgaagtgtttagccctcctgggttaagagccagataaggagaaatccctttcctaggtttggaatgtgttgtgaaaaaaaagagaaatccctggctcctggagctggtgggagacaagattaagcaaacctcccctgacatgtatccctttgaccccaagctctgcctcctccctgaccacccatgccctttcctttaacttctcaaacagataccagggcctaaactgctttacctcccctcctactgagtcaggttaggtggtgggaggtcacccatttccgagttaaaccaatgcaatatgagtaaaacaaagtcatgtgggtatgtctggggtagagagaggggtagcaagttcatgtgtcctccttggtcacatatctcccaaagctccgatccctgccatgggaagtggacaggaaacatgaggtcatgacctgcaggcatctttactgcagctctgccggcctggagggggagagggggaggaagaagtatgcgctgcacatttctgaggctactgcatttgctttcaaggcagaaatcttgctctgagcagtcagcggctccagtttgggcccgataaggaagttctccgtggcctccctcaggcagagcagggaggaggctgacattgccagtctcttctggggcccaaggcaggttgcaggagatccaatcccatagacagctctgggcctcttgcatttgag

SEQ ID NO: 17287 - DNA, 578 bp, Homo sapiens
  source 1..578: mol_type = unassigned DNA
tcctgcgctctccttcgcctgcgggccggcactgctcacctctcgtccagggacatgacgggcacgccaggcgccgttgccacccgggatggcgaggcccccgagcgctccccgccctgcagtccgagctacgacctcacgggcaaggtgatgcttctgggagacacaggcgtcggcaaaacatgtttcctgatccaattcaaagacggggccttcctgtccggaaccttcatagccaccgtcggcatagacttcaggaacaaggtggtgactgtggatggcgtgagagtgaagctgcagatctgggacaccgctgggcaggaacggttccgaagcgtcacccatgcttattacagagatgctcaggccttgcttctgctgtatgacatcaccaacaaatcttctttcgacaacatcagggcctggctcactgagattcatgagtatgcccagagggacgtggtgatcatgctgctaggcaacaaggtgagtggctccggggcagggtcagcccagccctgcacttcctcagccctagccggccccataaccacccaagaacagttatctaggcatcc

SEQ ID NO: 17288 - DNA, 559 bp, Homo sapiens
  source 1..559: mol_type = unassigned DNA
ctgcgctctccttcgcctgcgggccggcactgctcacctctcgtccagggacatgacgggcacgccaggcgccgttgccacccgggatggcgaggcccccgagcgctccccgccctgcagtccgagctacgacctcacgggcaagaacaaggtggtgactgtggatggcgtgagagtgaagctgcagatctgggacaccgctgggcaggaacggttccgaagcgtcacccatgcttattacagagatgctcaggccttgcttctgctgtatgacatcaccaacaaatcttctttcgacaacatcagggcctggctcactgagattcatgagtatgcccagagggacgtggtgatcatgctgctaggcaacaaggtgagtggctccggggcagggtcagcccagccctgcacttcctcagccctagccggccccataaccacccaagaacagttatctaggcatccttcctgaaaaggactctgcagcctccagctcaggggtcagacatatctggaggcttctgcccatcccatctgccccttccagggaaagtccaag

SEQ ID NO: 17289 - DNA, 950 bp, Homo sapiens
  source 1..950: mol_type = unassigned DNA
ctgcgctctccttcgcctgcgggccggcactgctcacctctcgtccagggacatgacgggcacgccaggcgccgttgccacccgggatggcgaggcccccgagcgctccccgccctgcagtccgagctacgacctcacgggcaagaacaaggtggtgactgtggatggcgtgagagtgaagctgcagatctgggacaccgctgggcaggaacggttccgaagcgtcacccatgcttattacagagatgctcaggccttgcttctgctgtatgacatcaccaacaaatcttctttcgacaacatcagggcctggctcactgagattcatgagtatgcccagagggacgtggtgatcatgctgctaggcaacaaggtgagtggctccggggcagggtcagcccagccctgcacttcctcagccctagccggccccataaccacccaagaacagttatctaggcatccttcctgaaaaggactctgcagcctccagctcaggggtcagacatatctggaggcttctgcccatcccatctgccccttccagggaaagtccaagttgttgcctgagaaatcaaggggtgcccagttctcagcccccattagagcagagtgaacagggtcccaggtcaggggctaagagtgcaaagggttagccccaactgctgtcctattccaagaccctttaccaaaggtgagatcccagagctgggagctacactgggcagaaaccctggccccaggccaatcacacctgcctgcagtcccttgggccaccagcagagggcaggcaacgcctgcttctggggcaaaatatgggcccgctggggcggaggcctccttccccagagtgacccatttgggcttgacaggcggatatgagcagcgaaagagtgatccgttccgaagacggagagaccttggccagggagtacggtgttcccttcctg

SEQ ID NO: 17290 - DNA, 2528 bp, Homo sapiens
  source 1..2528: mol_type = unassigned DNA
ccttcgcctgcgggccggcactgctcacctctcgtccagggacatgacgggcacgccaggcgccgttgccacccgggatggcgaggcccccgagcgctccccgccctgcagtccgagctacgacctcacgggcaagaacaaggtggtgactgtggatggcgtgagagtgaagctgcagatctgggacaccgctgggcaggaacggttccgaagcgtcacccatgcttattacagagatgctcaggccttgcttctgctgtatgacatcaccaacaaatcttctttcgacaacatcagggcctggctcactgagattcatgagtatgcccagagggacgtggtgatcatgctgctaggcaacaaggcggatatgagcagcgaaagagtgatccgttccgaagacggagagaccttggccagggagtacggtgttcccttcctggagaccagcgccaagactggcatgaatgtggagttagcctttctggccatcgccaaggaactgaaataccgggccgggcatcaggcggatgagcccagcttccagatccgagactatgtagagtcccagaagaagcgctccagctgctgctccttcatgtgaatcccagggggcagagaggaggctctggaggcacacaggatgcagccttccccctcccaggcctggcttattccaagaggctgagccaatggggagaaagatggaggactcactgcacagccgcttcctagcagggagctatactccaactcctacttgagttcctgcggtctccccgcatccacagggagggtaaaacacttagcttttattttaatagtacataatttaataccaaaaaaggcgcctggatccccaaaaaaccgaggctgggagctagtggcccttttgctttctaggacttggggggccggccctccctcctaagcataacaaaggtggtgttgctccagctcagccccaggggacacagatgcactttgggggtgagggcaggtaatgactccatcgcaccctcagttcagctggacagaggctcaggtgaccccagccttcactgtctcccgctctccaggagcttatcttcgccccatctcccaaataagtgggcccttgtgctgtgaggaagaccaaagcctcagggaagataagagatatggagatgggagggggaggacaaggggcagagagtagggtctagctggctatctctggccttactaacacccccctggaggcatgccccttttctccagcacacaagcacattggggcacctggaaatattggttccaggctcctgttctctggacttcagatcctgggggagcccctcccccccctgaatccctggcttagctaccttcctgcctgtgcacctaaaaacctcaggtcagaactaggaaaagagttttgtttttatttttttgaaatggagtctcgttctgtcgcccaggctgaggtgcagtagtgcaatctccgctcactacaacctccactccctggggctcaagcgatcctcccacctcagccgccgaagtagctgggactataggtgtgtaccatcacacctggctaatttttgtattttttgtagacacagggtttcgccatgttgcccaggctggtcttgaattcctgagctcaagcaacctgccggcctcggcctcccaaagtactgggattacacgcagaaggcaccatgcccaggctagatgtgtcttatcccaatcctttggcaggcatgcagctccacaggcgatttcttcaagcagctgaagtgtttagccctcctgggttaagagccagataaggagaaatccctttcctaggtttggaatgtgttgtgaaaaaaaagagaaatccctggctcctggagctggtgggagacaagattaagcaaacctcccctgacatgtatccctttgaccccaagctctgcctcctccctgaccacccatgccctttcctttaacttctcaaacagataccagggcctaaactgctttacctcccctcctactgagtcaggttaggtggtgggaggtcacccatttccgagttaaaccaatgcaatatgagtaaaacaaagtcatgtgggtatgtctggggtagagagaggggtagcaagttcatgtgtcctccttggtcacatatctcccaaagctccgatccctgccatgggaagtggacaggaaacatgaggtcatgacctgcaggcatctttactgcagctctgccggcctggagggggagagggggaggaagaagtatgcgctgcacatttctgaggctactgcatttgctttcaaggcagaaatcttgctctgagcagtcagcggctccagtttgggcccgataaggaagttctccgtggcctccctcaggcagagcagggaggaggctgacattgccagtctcttctggggcccaaggcaggttgcaggagatccaatcccatagacagctctgggcctcttgcatttgagtttttcagaattaaactgcagtattttggaaagca

SEQ ID NO: 17291 - DNA, 2858 bp, Homo sapiens
  source 1..2858: mol_type = unassigned DNA
ttcgcctgcgggccggcactgctcacctctcgtccagggacatgacgggcacgccaggcgccgttgccacccgggatggcgaggcccccgagcgctccccgccctgcagtccgagctacgacctcacgggcaaggtgatgcttctgggagacacaggcgtcggcaaaacatgtttcctgatccaattcaaagacggggccttcctgtccggaaccttcatagccaccgtcggcatagacttcaggaacaaggtggtgactgtggatggcgtgagagtgaagctgcagatctgggacaccgctgggcaggaacggttccgaagcgtcacccatgcttattacagagatgctcaggccttgcttctgctgtatgacatcaccaacaaatcttctttcgacaacatcagggcctggctcactgagattcatgagtatgcccagagggacgtggtgatcatgctgctaggcaacaaggcggatatgagcagcgaaagagtgatccgttccgaagacggagagaccttggccagggagtacggtgttcccttcctggagaccagcgccaagactggcatgaatgtggagttagcctttctggccatcgccaagtgagagctgggcagggaagggaagtgtgcggggcagggcggcacactccaggaatccagtagggcccggcccctggcccagcccctggacacacctgcattctgcaggctgaggtccatttgctctgggagcactgggccactgggagaggggagggggcggctcagctcctcaccccagcccagcccagcccagcccagcccattgtctcttcttcaagggaactgaaataccgggccgggcatcaggcggatgagcccagcttccagatccgagactatgtagagtcccagaagaagcgctccagctgctgctccttcatgtgaatcccagggggcagagaggaggctctggaggcacacaggatgcagccttccccctcccaggcctggcttattccaagaggctgagccaatggggagaaagatggaggactcactgcacagccgcttcctagcagggagctatactccaactcctacttgagttcctgcggtctccccgcatccacagggagggtaaaacacttagcttttattttaatagtacataatttaataccaaaaaaggcgcctggatccccaaaaaaccgaggctgggagctagtggcccttttgctttctaggacttggggggccggccctccctcctaagcataacaaaggtggtgttgctccagctcagccccaggggacacagatgcactttgggggtgagggcaggtaatgactccatcgcaccctcagttcagctggacagaggctcaggtgaccccagccttcactgtctcccgctctccaggagcttatcttcgccccatctcccaaataagtgggcccttgtgctgtgaggaagaccaaagcctcagggaagataagagatatggagatgggagggggaggacaaggggcagagagtagggtctagctggctatctctggccttactaacacccccctggaggcatgccccttttctccagcacacaagcacattggggcacctggaaatattggttccaggctcctgttctctggacttcagatcctgggggagcccctcccccccctgaatccctggcttagctaccttcctgcctgtgcacctaaaaacctcaggtcagaactaggaaaagagttttgtttttatttttttgaaatggagtctcgttctgtcgcccaggctgaggtgcagtagtgcaatctccgctcactacaacctccactccctggggctcaagcgatcctcccacctcagccgccgaagtagctgggactataggtgtgtaccatcacacctggctaatttttgtattttttgtagacacagggtttcgccatgttgcccaggctggtcttgaattcctgagctcaagcaacctgccggcctcggcctcccaaagtactgggattacacgcagaaggcaccatgcccaggctagatgtgtcttatcccaatcctttggcaggcatgcagctccacaggcgatttcttcaagcagctgaagtgtttagccctcctgggttaagagccagataaggagaaatccctttcctaggtttggaatgtgttgtgaaaaaaaagagaaatccctggctcctggagctggtgggagacaagattaagcaaacctcccctgacatgtatccctttgaccccaagctctgcctcctccctgaccacccatgccctttcctttaacttctcaaacagataccagggcctaaactgctttacctcccctcctactgagtcaggttaggtggtgggaggtcacccatttccgagttaaaccaatgcaatatgagtaaaacaaagtcatgtgggtatgtctggggtagagagaggggtagcaagttcatgtgtcctccttggtcacatatctcccaaagctccgatccctgccatgggaagtggacaggaaacatgaggtcatgacctgcaggcatctttactgcagctctgccggcctggagggggagagggggaggaagaagtatgcgctgcacatttctgaggctactgcatttgctttcaaggcagaaatcttgctctgagcagtcagcggctccagtttgggcccgataaggaagttctccgtggcctccctcaggcagagcagggaggaggctgacattgccagtctcttctggggcccaaggcaggttgcaggagatccaatcccatagacagctctgggcctcttgcatttgagtttttcagaattaaactgcagtattttggaaagca

SEQ ID NO: 17292 - DNA, 1654 bp, Homo sapiens
  source 1..1654: mol_type = unassigned DNA
acatgacgggcacgccaggcgccgttgccacccgggatggcgaggcccccgagcgctccccgccctgcagtccgagctacgacctcacgggcaaggtgatgcttctgggagacacaggcgtcggcaaaacatgtttcctgatccaattcaaagacggggccttcctgtccggaaccttcatagccaccgtcggcatagacttcaggaacaaggtggtgactgtggatggcgtgagagtgaagctgcagatctgggacaccgctgggcaggaacggttccgaagcgtcacccatgcttattacagagatgctcaggccttgcttctgctgtatgacatcaccaacaaatcttctttcgacaacatcagggcctggctcactgagattcatgagtatgcccagagggacgtggtgatcatgctgctaggcaacaaggcggatatgagcagcgaaagagtgatccgttccgaagacggagagaccttggccagggagtacggtgttcccttcctggagaccagcgccaagactggcatgaatgtggagttagcctttctggccatcgccaaggaactgaaataccgggccgggcatcaggcggatgagcccagcttccagatccgagactatgtagagtcccagaagaagcgctccagctgctgctccttcatgtgaatcccagggggcagagaggaggctctggaggcacacaggatgcagccttccccctcccaggcctggcttattccaagaggctggtcttgaattcctgagctcaagcaacctgccggcctcggcctcccaaagtactgggattacacgcagaaggcaccatgcccaggctagatgtgtcttatcccaatcctttggcaggcatgcagctccacaggcgatttcttcaagcagctgaagtgtttagccctcctgggttaagagccagataaggagaaatccctttcctaggtttggaatgtgttgtgaaaaaaaagagaaatccctggctcctggagctggtgggagacaagattaagcaaacctcccctgacatgtatccctttgaccccaagctctgcctcctccctgaccacccatgccctttcctttaacttctcaaacagataccagggcctaaactgctttacctcccctcctactgagtcaggttaggtggtgggaggtcacccatttccgagttaaaccaatgcaatatgagtaaaacaaagtcatgtgggtatgtctggggtagagagaggggtagcaagttcatgtgtcctccttggtcacatatctcccaaagctccgatccctgccatgggaagtggacaggaaacatgaggtcatgacctgcaggcatctttactgcagctctgccggcctggagggggagagggggaggaagaagtatgcgctgcacatttctgaggctactgcatttgctttcaaggcagaaatcttgctctgagcagtcagcggctccagtttgggcccgataaggaagttctccgtggcctccctcaggcagagcagggaggaggctgacattgccagtctcttctggggcccaaggcaggttgcaggagatccaatcccatagacagctctgggcctcttgcatttgagtttttcagaattaaactgcagtattttggaaagca

SEQ ID NO: 17293 - DNA, 2195 bp, Homo sapiens
  source 1..2195: mol_type = unassigned DNA
cttccccagagtgacccatttgggcttgacaggcggatatgagcagcgaaagagtgatccgttccgaagacggagagaccttggccagggagtacggtgttcccttcctggagaccagcgccaagactggcatgaatgtggagttagcctttctggccatcgccaaggaactgaaataccgggccgggcatcaggcggatgagcccagcttccagatccgagactatgtagagtcccagaagaagcgctccagctgctgctccttcatgtgaatcccagggggcagagaggaggctctggaggcacacaggatgcagccttccccctcccaggcctggcttattccaagaggctgagccaatggggagaaagatggaggactcactgcacagccgcttcctagcagggagctatactccaactcctacttgagttcctgcggtctccccgcatccacagggagggtaaaacacttagcttttattttaatagtacataatttaataccaaaaaaggcgcctggatccccaaaaaaccgaggctgggagctagtggcccttttgctttctaggacttggggggccggccctccctcctaagcataacaaaggtggtgttgctccagctcagccccaggggacacagatgcactttgggggtgagggcaggtaatgactccatcgcaccctcagttcagctggacagaggctcaggtgaccccagccttcactgtctcccgctctccaggagcttatcttcgccccatctcccaaataagtgggcccttgtgctgtgaggaagaccaaagcctcagggaagataagagatatggagatgggagggggaggacaaggggcagagagtagggtctagctggctatctctggccttactaacacccccctggaggcatgccccttttctccagcacacaagcacattggggcacctggaaatattggttccaggctcctgttctctggacttcagatcctgggggagcccctcccccccctgaatccctggcttagctaccttcctgcctgtgcacctaaaaacctcaggtcagaactaggaaaagagttttgtttttatttttttgaaatggagtctcgttctgtcgcccaggctgaggtgcagtagtgcaatctccgctcactacaacctccactccctggggctcaagcgatcctcccacctcagccgccgaagtagctgggactataggtgtgtaccatcacacctggctaatttttgtattttttgtagacacagggtttcgccatgttgcccaggctggtcttgaattcctgagctcaagcaacctgccggcctcggcctcccaaagtactgggattacacgcagaaggcaccatgcccaggctagatgtgtcttatcccaatcctttggcaggcatgcagctccacaggcgatttcttcaagcagctgaagtgtttagccctcctgggttaagagccagataaggagaaatccctttcctaggtttggaatgtgttgtgaaaaaaaagagaaatccctggctcctggagctggtgggagacaagattaagcaaacctcccctgacatgtatccctttgaccccaagctctgcctcctccctgaccacccatgccctttcctttaacttctcaaacagataccagggcctaaactgctttacctcccctcctactgagtcaggttaggtggtgggaggtcacccatttccgagttaaaccaatgcaatatgagtaaaacaaagtcatgtgggtatgtctggggtagagagaggggtagcaagttcatgtgtcctccttggtcacatatctcccaaagctccgatccctgccatgggaagtggacaggaaacatgaggtcatgacctgcaggcatctttactgcagctctgccggcctggagggggagagggggaggaagaagtatgcgctgcacatttctgaggctactgcatttgctttcaaggcagaaatcttgctctgagcagtcagcggctccagtttgggcccgataaggaagttctccgtggcctccctcaggcagagcagggaggaggctgacattgccagtctcttctggggcccaaggcaggttgcaggagatccaatcccatagacagctctgggcctcttgcatttgagtttttcagaattaaactgcagtattttggaaagc

SEQ ID NO: 17294 - DNA, 561 bp, Homo sapiens
  source 1..561: mol_type = unassigned DNA
atttgggcttgacaggcggatatgagcagcgaaagagtgatccgttccgaagacggagagaccttggccaggggaactgaaataccgggccgggcatcaggcggatgagcccagcttccagatccgagactatgtagagtcccagaagaagcgctccagctgctgctccttcatgtgaatcccagggggcagagaggaggctctggaggcacacaggatgcagccttccccctcccaggcctggcttattccaagaggctgagccaatggggagaaagatggaggactcactgcacagccgcttcctagcagggagctatactccaactcctacttgagttcctgcggtctccccgcatccacagggagggtaaaacacttagcttttattttaatagtacataatttaataccaaaaaaggcgcctggatccccaaaaaaccgaggctgggagctagtggcccttttgctttctaggacttggggggccggccctccctcctaagcataacaaaggtggtgttgctccagctcagccccaggggacacagatgcactttg

SEQ ID NO: 17295 - DNA, 1653 bp, Homo sapiens
  source 1..1653: mol_type = unassigned DNA
acatgacgggcacgccaggcgccgttgccacccgggatggcgaggcccccgagcgctccccgccctgcagtccgagctacgacctcacgggcaaggtgatgcttctgggagacacaggcgtcggcaaaacatgtttcctgatccaattcaaagacggggccttcctgtccggaaccttcatagccaccgtcggcatagacttcaggaacaaggtggtgactgtggatggcgtgagagtgaagctgcagatctgggacaccgctgggcaggaacggttccgaagcgtcacccatgcttattacagagatgctcaggccttgcttctgctgtatgacatcaccaacaaatcttctttcgacaacatcagggcctggctcactgagattcatgagtatgcccagagggacgtggtgatcatgctgctaggcaacaaggcggatatgagcagcgaaagagtgatccgttccgaagacggagagaccttggccagggagtacggtgttcccttcctggagaccagcgccaagactggcatgaatgtggagttagcctttctggccatcgccaaggaactgaaataccgggccgggcatcaggcggatgagcccagcttccagatccgagactatgtagagtcccagaagaagcgctccagctgctgctccttcatgtgaatcccagggggcagagaggaggctctggaggcacacaggatgcagccttccccctcccaggcctggcttattccaagaggctggtcttgaattcctgagctcaagcaacctgccggcctcggcctcccaaagtactgggattacacgcagaaggcaccatgcccaggctagatgtgtcttatcccaatcctttggcaggcatgcagctccacaggcgatttcttcaagcagctgaagtgtttagccctcctgggttaagagccagataaggagaaatccctttcctaggtttggaatgtgttgtgaaaaaaaagagaaatccctggctcctggagctggtgggagacaagattaagcaaacctcccctgacatgtatccctttgaccccaagctctgcctcctccctgaccacccatgccctttcctttaacttctcaaacagataccagggcctaaactgctttacctcccctcctactgagtcaggttaggtggtgggaggtcacccatttccgagttaaaccaatgcaatatgagtaaaacaaagtcatgtgggtatgtctggggtagagagaggggtagcaagttcatgtgtcctccttggtcacatatctcccaaagctccgatccctgccatgggaagtggacaggaaacatgaggtcatgacctgcaggcatctttactgcagctctgccggcctggagggggagagggggaggaagaagtatgcgctgcacatttctgaggctactgcatttgctttcaaggcagaaatcttgctctgagcagtcagcggctccagtttgggcccgataaggaagttctccgtggcctccctcaggcagagcagggaggaggctgacattgccagtctcttctggggcccaaggcaggttgcaggagatccaatcccatagacagctctgggcctcttgcatttgagtttttcagaattaaactgcagtattttggaaagc

SEQ ID NO: 17296 - DNA, 1528 bp, Homo sapiens
  source 1..1528: mol_type = unassigned DNA
ttatctacatgtgaggctccgcccctccctttgcaggacgtcacggaggactgcaggggcctgagccgctgctgccgccgccgccgcgcagccccacatcaacgcaccggggtcctgtcaccgccaccgccaaaaaagtcaccgccgctagggtcgccgttgcatcggtgcagggcaagatggcatccgccacagactcgcgctatgggcagaaggagtcctcggatcagaacttcgactacatgttcaagattctcatcatcggcaacagcagcgtgggcaagacgtccttcctcttccgctatgctgacgactcgttcacgcctgccttcgtcagcaccgtgggcatcgacttcaaggtcaagaccatctatcgcaacgacaagaggatcaagctgcagatctgggacacagcagggcaagagcggtaccggaccatcaccaccgcatactaccggggcgctatgggcttcatcctcatgtatgacatcaccaacgaggaatccttcaatgcagtgcaggactggtccacccagatcaagacctactcatgggacaatgcccaggtgctgctggtaggaaacaagtgtgacatggaggatgagcgggtggtgtcatcagaacgtggccggcagctagctgaccaccttgggttcgagttctttgaggcaagcgccaaggacaacattaacgtcaagcagacctttgagcgcctggtggatgtcatctgcgagaagatgtccgagtcgttggacacggcggaccctgcggtcacaggcgccaagcagggcccacagctcagtgaccagcaggtgccaccgcaccaggactgcgcctgctgagagccatcccactccctttcccctcttccctgtcttccccaccttcccccaactacccgggcctgacccggcccctaccagccacgggcacaagacccctgctcctgacttagcccgtcacccttatttattattgtagctatttatttatttattgaagatgtcccccaggggcccaggctcccctgcccgccccaagccctgcccctcctgtacatatagccctttccccactcagctgtggtgtctcgtggccccgtgaactcaccgctcaccctcctgaaccccccccccccgcctttttttaaaattcacccccatccacagttgtcagttgtgaagaggggccagatgacaccctaaagcaggctgatcgggcaatgggaggtggccaggcctgccagcccctcggctctgccgcggtgggccgaggccgctgttgggggtttccctgtgtggaccatggggatcagagtctggcctgccaggctcctctccccgttttctcttttggtgggggggtgtgctgtgggtattcaccaccctgggaccccccccccccccgcccaccagacctgttctgacctcatgagtgtcaaacgtgccccccagttccttaggagatgtcatgacaacactacacgcacccaataaagcgaatggaccatccatgtgtgtccctgtga

SEQ ID NO: 17297 - DNA, 1253 bp, Homo sapiens
  source 1..1253: mol_type = unassigned DNA
gcaggacgtcacggaggactgcaggggcctgagccgctgctgccgccgccgccgcgcagccccacatcaacgcaccggggtcctgtcaccgccaccgccaaaaaagtcaccgccgctagggtcgccgttgcatcggtgcagggcaaggacacagcagggcaagagcggtaccggaccatcaccaccgcatactaccggggcgctatgggcttcatcctcatgtatgacatcaccaacgaggaatccttcaatgcagtgcaggactggtccacccagatcaagacctactcatgggacaatgcccaggtgctgctggtaggaaacaagtgtgacatggaggatgagcgggtggtgtcatcagaacgtggccggcagctagctgaccaccttgggttcgagttctttgaggcaagcgccaaggacaacattaacgtcaagcagacctttgagcgcctggtggatgtcatctgcgagaagatgtccgagtcgttggacacggcggaccctgcggtcacaggcgccaagcagggcccacagctcagtgaccagcaggtgccaccgcaccaggactgcgcctgctgagagccatcccactccctttcccctcttccctgtcttccccaccttcccccaactacccgggcctgacccggcccctaccagccacgggcacaagacccctgctcctgacttagcccgtcacccttatttattattgtagctatttatttatttattgaagatgtcccccaggggcccaggctcccctgcccgccccaagccctgcccctcctgtacatatagccctttccccactcagctgtggtgtctcgtggccccgtgaactcaccgctcaccctcctgaaccccccccccccgcctttttttaaaattcacccccatccacagttgtcagttgtgaagaggggccagatgacaccctaaagcaggctgatcgggcaatgggaggtggccaggcctgccagcccctcggctctgccgcggtgggccgaggccgctgttgggggtttccctgtgtggaccatggggatcagagtctggcctgccaggctcctctccccgttttctcttttggtgggggggtgtgctgtgggtattcaccaccctgggaccccccccccccccgcccaccagacctgttctgacctcatgagtgtcaaacgtgccccccagttccttaggagatgtcatgacaacactacacgcacccaataaagcgaatggaccatcca

SEQ ID NO: 17298 - DNA, 579 bp, Homo sapiens
  source 1..579: mol_type = unassigned DNA
gagccgctgctgccgccgccgccgcgcagccccacatcaacgcaccggggtcctgtcaccgccaccgccaaaaaagtcaccgccgctagggtcgccgttgcatcggtgcagggcaagggtgtcctccatacaccggccgttttctggagcccttgccatcttctgcctgggcttgggcacatgaggatggagagagcccccctcacggctctgctacacccggtatccccagatggcatccgccacagactcgcgctatgggcagaaggagtcctcggatcagaacttcgactacatgttcaagattctcatcatcggcaacagcagcgtgggcaagacgtccttcctcttccgctatgctgacgactcgttcacgcctgccttcgtcagcaccgtgggcatcgacttcaaggtcaagaccatctatcgcaacgacaagaggatcaagctgcagatctgggacacagcagggcaagagcggtaccggaccatcaccaccgcatactaccggggcgctatgggcttcatcctcatgtatgacatcaccaacgaggaatccttcaatgcagtgcaggactg

SEQ ID NO: 17299 - DNA, 543 bp, Homo sapiens
  source 1..543: mol_type = unassigned DNA
gtcacggaggactgcaggggcctgagccgctgctgccgccgccgccgcgcagccccacatcaacgcaccggggtcctgtcaccgccaccgccaaaaaagtcaccgccgctagggtcgccgttgcatcggtgcagggcaagatggcatccgccacagactcgcgctatgggcagaaggagtcctcggatcagaacttcgactacatgttcaagattctcatcatcggcaacagcagcgtgggcaagacgtccttcctcttccgctatgctgacgactcgttcacgcctgccttcgtcagcaccgtgggcatcgacttcaaggtcaagaccatctatcgcaacgacaagaggatcaagctgcagatctgggtgggtcccagctggagggctcccgcccggctcggttggattcccgtacttggaaaagcagccccaacctcgtctatctctttcctgactggagtcattcacttacacactgggcatttatcagtaaggtgcccactgtgtaccggggcagaaacagcacctgtgttctcccata

SEQ ID NO: 17300 - DNA, 12844 bp, Homo sapiens
  source 1..12844: mol_type = unassigned DNA
agactccgcccttgggcggggcctggatgcggccggagcggagcagtgctggagcgggagcctcagccctcaggcgccactgtgaggacctgaccggaccagaccatcccgcagcgccccgccccggccccctccgcgccctcccgacgccaggtcctgccgtcccgccgaccgtccgggagcgaacccgtcgtcccgcactcggagtccgcgatggcttcagtgacagatggtaaaactggagtcaaagatgcctctgaccagaattttgactacatgtttaaactgcttatcattggcaacagcagtgttggcaagacctccttcctcttccgctatgctgatgacacgttcaccccagccttcgttagcaccgtgggcatcgacttcaaggtgaagacagtctaccgtcacgagaagcgggtgaaactgcagatctgggacacagctgggcaggagcggtaccggaccatcacaacagcctattaccgtggggccatgggcttcattctgatgtatgacatcaccaatgaagagtccttcaatgctgtccaagactgggctactcagatcaagacctactcctgggacaatgcacaagttattctggtggggaacaagtgtgacatggaggaagagagggttgttcccactgagaagggccagctccttgcagagcagcttgggtttgatttctttgaagccagtgcaaaggagaacatcagtgtaaggcaggcctttgagcgcctggtggatgccatttgtgacaagatgtctgattcgctggacacagacccgtcgatgctgggctcctccaagaacacgcgtctctcggacaccccaccgctgctgcagcagaactgctcatgctaggcaaggcccaccttcctgacctcccctcattgtggccccacacccagtctgcttctccctgttacacactgtccgctctcagcccactctccctgttacacactgcccacactcagagcaagatgagttgctgctattctttgcctgcccctggggttctctgcagatggtcccagtaatagatactcagcactagactaacataacaggtcactacacgggtgcagaatcactttacaaaagaagactctgttttacgaaggggattcactacagggacttagagaacagtctcttttctgcctttaaaatgagagttcctccatttaccaaaatttgacacgcacacattcttcaggggcatgccaattgcgtaaagtgaggctcgcctgcatagctaatcctgttaaagacaacttctcaaagcacaacgtgcttgtttcctatcgggctccctgcggggctttctctcactacaagtcaagcttgggctctcaaagccctgcgcctgttaccacggatgcccacagggcctgggcagttgctgtggcgacaggaagagctaatcttcagagagctcagactctctaatgatgctgaaggagcaaaggctgagtcagaaacacacttaagagaaaaggattggccgggcgcggtggctcacgcctgtaatcccagcactttgggaggccgaggcgggtggatcatgaggtcaggagatcgagaccatcctggctaacaaggtgaaaccccgtctctactaaaaatacaaaaaattagccgggcgcggtggcgggcgcctgtagtcccagctactcgggaggctgaggcaggagaatggcgtgaacccgggaagcggagcttgcagtgagccgagattgcgccactgcagtccgcagtccggcctgggcgacagagcgagactccgtctcaaaaaaaaaaaaaaaaaaaaaaagagaaaaggattatcccctacaaaatgtcagaggttcctgctatatgaaagagcaagtaggtatgctcaagaaagacaaacagagaaaaagagaaacaggcaagatcaagaaacagatcatgagtttctgattttgctgctttccagttggttcttaactgtgggaacttagtgaaattggttattagttcttagactcctagaacctgaggattttagatttgacgggatgcccaaatttacctagtctgactagtcagttctaaccttcctttttctgacaagtgactgtcaagcctaacaatcaaatctctttcttttaaagcacaccttctaggcagggacaggagctcattttccacaccatctttgtcaactctcatagaaagttttccttgtatcgagctcaaatctgcctcctggaaattcttcttcttcttccctccctgttggtaccagctctgctgtcagagacttcacagtctgtgctccctctgccctgtgacgtcttcagactatttgagaacaggaatcatgactcctgggacttgccttttctctaggtcaaatacctctataattccatctgctgttcttcatagggtcttctccctatcctgcccttttcctccaatccatcttttaactgctcttgagcagtctaactgagaagtatgattcaaagcaaaataaatcttaaggtggcatgactctgaaaaaattgagaaaattgaactcagagatcccgatcccaacccctttctcctgggagtgaaaccttagtttctaccagagagtgtgggaaaccacttctggtggaagccccttaattaaatacctgaggaaaaaaataaaagaaactcagagaccagaataaattagctcattattctagcttgcttggccacagggacatattttgttttggctgaaataatgacatggaactggcagtgattccagaaaacctttcttctctatcatggcctgaatcctcagccacctcaaaagtcagcgggcaggaggagtctctcgccagttttcttttcatttcaaatgaggctcattgtcctagaaaagtaattaactagcaaccagtccaatgactaaataaaaggaccatccagctgtggctcacacctgtaatcccagcactttggaaagccaaggcaggaggaacacttgaggccaggagtttgagaccagcctgggcaatgtggtcaaattctatccctacaaaaaaaaaaattagccagatgtgatggtgcatgcctgtagtcccagctacttgggaggctgaggcaggaggattgcttgagcccaagaatttgaggttgcagtgagctgtaattatgccactgcattccagtctgggtgacagagtaagaataagaccctgtctctctgtctctctttctctctttttttttttaaaggagtcagctctacaaagatgttgctttctttgatgcaatgcagagagcagagctttggacttggaatcaggagacccggactctgtcattaaatcaactgtgactctgggccagttactttccacttttgagtcttgatttcctacttataaaatgagggagcttatttggatgatctttaaggtctcttttggcactaataactcggtgtctcttttttttcaccttcaccatttcagttgatccaccaaacaaacctgagagatcaggattggcatccaagagttgtctcggccaactctgatgtcatgcttactctgtactagacattgttccaagcattttacgtgcattaactcatttatcttcccaacatcttgtgagggaggcactatagtgagcctcatttgaagatgaggaaacaaaggtacaaagaggttctagctggacctctaaagtcacataataagtaagtggtagagctggagttcacatccaggcagtaggctccaaggtctgtgctcttaaccacattctgggctgcatcttttatagacaaactatgatccagagagattacgagacttggatcacataccaagagagtgttaaagccacattaggattcaattccagggccatcagattccaagtccactggagaaaagatgtatatctctaatctgttaacaaattgctcaactactcagactaatcccaggtgatggatgtctaatgctcaggaaaggcgagtcagtctctgaggcaacagatcccatgggcctgggtagaaaatgcccagtgcttcccagtcccaagtgctggctttccctgtatctgcctctgccaggcaacacttatcaggctcccaatcagcaggagcctccatgctccactttgaacagcctctatgctccagcaatggggcatttgtgaagagtgacttgattaacttttctgaccatgggtataatacagttgcttcagagggcagtggttctgggtgtgatttttacactgtaacattgtatacagtgtcatggataattactatttttttctggtcattaacactcacctactctagtactaggatttcagaccaaggtcctcatgacgcctggatattttagtatctatatccaataatcttttctctcctactgaatatccaggcaaagatgaaatcgttttctttaaaactgtcaaattctgtaaaactcaggagccagttcaagggaacaagcatcttcacaatagatggaatcaagagttaaatgttatagtggcaagcttgtctactgggcaacagacaaccagacctgcttgtgagatggcagctccccagccctgctctgtgacctcatttctgtcaaatgaaaggcagcagcttccagctgattgcagcatagtgttcatcaatcacagtaatagcgcaattagccaccaaggttcaagctgtgtaatatgtgttagtggcaacttgtcctggatttaatcttcctcaacaatccaaataaaatatttaaaaactcttgacttctggctgggcgcagcagctcatgcctgtaatcccagcactttgggaggccgaggtgggcagatcacctgaggtcaggagttcaagaccagcctgggcaacatggtgaaacccccatctctactaaaaatacaaaaattagccaggcgtggtggtgggcacctgaaatccctactcaggaggctgaggcagagaatcgcttgaacctgggaggcagaggttgcagtgagccgagatcgtgccactgcacttcagcctgggtgacagagcgagactccatctcaaaacaaaacaagcaaacaaacaacaacaacaaaaaacacctcttgacttctaaagacgcaaaagtggccaaaagtgcaatacagtattgtgtttatttacatctattttaaatgcatgtgtatctgtaaatacaaagtgattcgtgactcattgtctcctcagtctatagcattattaacttctaggagcagcagtggagtagagtgtactgaatggtcacagactcatcgattatcagatctggaaaggagcttagagaagatctgttccaggctcctattttatagaagggaaggttgacatccaaagaatggaaggaaatctcctaattattctgagagtatcacagtgatggagccaggactaggtcctggatcacctctaagaagacacttagctatttgactatcgactagggcctagcattattaagcactagataaatacagatgaaaaaaaaaatgatccctgcctgcaaggtcctatgatctaatggagatgctgtttctaaaatattattatcccaatttggcagtcaaggaaacagccctggaaaagttaacatgctcaagtcacccactagcatcatttgaaccctcctctgtctgactcatgctctttcaaatttttttcttcagattgtcttagcagaagggtagatgggatataccctctggtagtaccaggctcccaaggattcttagagttaaataacctcagttaattaaatagccacaattgcttggtgaccgaagccttataacatccacagaataagaccattctccagacctgactccccaactcatatcacctgctcctgccggccactaagctccttgcttggatatcgagttttctggagtatcctgaggaatgtttgtttgactttgtttgccaacagtttaggggaaggggaaagaactacaataaccagtgtcctgggatctcattgatttcagattccctgccccaagcctacacccaattacctgccatagttggggaatcaagtagcatcctgtggctggaagtaaatgcaaaacactagtccgtgagatataaatactgttaaatgatggttttttaaggtcctgatccattatatgaagtagacaaaattcaaatttatttattcatttattttctcaacaaatgaatatatattatgtgccaggatacaagtagtggcaaattagacacagttcttgctttcatgaaacgtatagcttcatgatttagtatagacattgtcaaatcatcacccaaatataattacaaagtactctaaaggaaaggcacgtgatgctgtgagaacactcaactgggaaaccggaatcacctttgagaaactgtttcaggggctcttggaagagtctactgctcccaaatatctctgctacccactggccattgctttacattcctcaactaagctttcaccttttagtactaacctttgatgactgatcaaatacaaatgccccaagaagactgaggataggagaaagaatatctctacctgtgaaacattgttagactgcctggctaggagttcattgttgttttctgaaggacgtaaccaaccactccaaaacttacaggcttaaaacaacaaacatgtatcatttcttatgattctgtgggttggctgggtggttcttctggctgaggcaggatggtctaggatagctacatccacatgtctggggtcccagctgagatgactggggctgttgaggcctttctccctgtggtgtcatcctccagaaggctgcccagatttgtccatatggtagcaggagtttcctcgaagcaagagagggcaagatccaacacagaagcacttttcaagctctgtttccatcacatttgccaatgtctcactgatgaacacaagttccatggccaagtccagttttaagaaatggagaaatagggcttggctcagtggctcatgtctgtaatcccagcactttgggaggccaaggcatgcggatcatttgaggtcaggagttccagaccagcctggccaacatggtgaaaacccatctctactaaaaatacaaaaattagctgggtgtggtggcgggcatctgtaatcccagctatttgggaggctgaagcacaagaattgcttgaacccaggaggaggaggttgcaatgagcctaaatcgcaccactgcacttcagcctgggcgatagagccagactcagtctcaaaaaaaaaaaaggggagggggaaatagatgccatctctttatgggaggagctacaaaatatggtgaccaatttttcaatctaccacaggaagcaccctcagtcctctgaaactaagtctggtagatgtcctggggtcttaaaacatggctccgatgatatcaccaaagacaagtggcaaaactgtatagggcagggcagtcttatcatttgtttaatagtgatccaaaggatttactttggaggaatcaagacactcgagatgaagaagttttgatgcttgttaaacagtccatttggatacctcttagctatccccgagggatgaatctgacttctcatttcacaggattcaccgtagataatggttgtaattcctaccggaagttcctggccagaagcccagcagaaagattcagtatatatagaaaagatggctccaagaacagttgggccttctgttctaactgtacttccttctttgatgtactcgtctagtcccgaggctttagatgccaagtctttgataataacgtgtatctaagtgcctactggacattttcatgtctcaaacttaacatgtccaaattgaaactcttgattctgcccccaaacttgtttgaaccccagtcttcacagaaaactcatccttaattctttgatttttctctttttctcagcctccttgtctaatctagcagcagatcctagggttttacttctaaatatatctcaaatctgatcatttttctccattttcattggcatgaccttggtccaggccaccattgttttctgccctagagagctaccacagagttcctaacatttccctacttacgtaattactccactctagtccattctgtctcacaggagtaacattttttatatatatatatatatatatatatatatatatatatatatatatatttttttttttttaatagagacggtcttgctatgttgcccaagctggtttcaaattctggcctcaagcgatcctcttgccttggcctcctgagtcactaggattgtacgtatgagccaccgcatccagcctcaatggcaatctcttaaaaatctaaataaatgaacggctcagtaacactgaggtttacttcacacaaaaacaatccaaaccttggcaagacggtgaaaccctgtctctacaaaaaatacaaaaaattaactgggcaaagtagcctgcacctatagtcccagctacttgggaggctgaggtgggaggatcgattgagccctggaggtcaagaatacagtgagccatagccatgattgtacactgtgccactccagcctgggtgacagagcaagaccctgtccccctctcaaaaaaaaaaaaaaaagaaagaaagaaagaaaaaaaagaagaaaaggaaagaaatgaagagaattcagagacttccattattattaatacctattttattgattctgtttctagccctgagtccgctcctaacttgctataggatctctggtaaatcatttcctgtaataagcagctgtcacctctctccttgtttcttccagaaatagtaatctcttctttagtagtactactactccctaacccaaaccaggtgattctagtgaagactgtcaataaacggagcatgtgatcaagcagggcccatcagaatccttccctaagatttttataaaaagctggacctattctttttccatttgagtggcaaatatttgaagatatgaggtctaaagctgtgatggcttattctccatccctgtgtaaattctggtctatagtaagcgaaaacaaggccattaggcagagggcagcagagacataaggtgagaaagagtgtggtctctggttttctagaccctgattctggtttggaggcttggctgatcacctcttcctttgattctgatagaaagctcaatgtatctttctaataaaacccccctttgctttgcttgttggagttaggttcttatcccttgcaaccaaaaatatattgtctcttcttttgttctcagttttctcatttatatatccttctagctccaaagcacagaaattctaaaacaaacaaacaaacaaacaaaaacaaacaaaaaaaacctgggtcattcagaaaatcccactgatatagactttctgatccagaatgtataatctgaaaagaagcctaccctcgtctccatcctctcttcttgtacctgaaggaacgaagaagagggatttctcaaggtgagaagcagttctccatggacactgatgacagcacaggcaaagtttcctatgactagggatcactgtccacacagagtctggcttcccaggtatccagcaggtagacaaaacagctaactccactgccactcctttctccacatccgttcctatttctcagccatctcagtgacatccgccatcttgagagtcaactactgactggactgagttgtgtggtatatgcttctgtttacttctcttctgtcttttttaagtggccaaatagcaaacgcttaaataggaaatctctgggagacttgaataaaagactttgcttggtagaaaatcatgtcacagaaaggctaatagacagcaaagtaaatcagcaagtccctgagcagtaggattaggattcctgtctcctttcagattcaaatgcatctgtttctggggttaacagtggactgttaagaggctgtgcagcttgggttaagtcattcttatctctgggcttcaggagcttagaccagatagtttctacaggctctcttggtgctgatgccttgggattctgtggctgttttctgtaagatctgcaagggggaaacaggattttggcagcaatcctttcattactaaagcttcctttcttttcgggtacagtgaaaagagccaaggctgtgtgaccccctcatcacttagccaggcgtatggtcctggtttctgaggctgccagaaagcatcttagcaatttgtgtttggatggtccatgcctgactattctaggctggaggttcctaaagagtaacaagaggaagagaaacaagaatctctgacacttgttgagaatagagcacagtcccatttgtttgaaaagagacaccaggcagccatgtttatgtgccagaaatgcattccacctcaaggaggacttaatttatggacccgtgtgtgccaggctgagctgggcaagatctttctcaggacaaactctgccatgcagctaaaagcctggaaactaaaggatttcatgtagtaaactatcttccaacccctgtagacatcagaccacaggatgaggtttcagaaggtcataaggcagaatagttaagcctacagggcttacagtctgacagacctgggttcagttcttgggtcttcatcactagttttgtgacttcgggaagatgactcccggagcctcagtgagcctcagttacttcatatgtaaatgaagtaatactatctacttcacaaggctgttgaaaggattaaatggagaatgggtgtaaaacccttagtgcagtgccgtgcacacacagtagatgccgaacgtgtgatgttggcactacacaatgtgtaatcccaatcaggcagagctaggcaggcaaatctaatccaggatctttgtaaggggactgagaaccagagactggagaaagccagtgtaaacaccatgagcaaaggagcaagagaaggggcattgtgtaagtaggagatggagcttgaacttactaagtggatcagggtagaagaatccagtcaggaccaagggaggagagtccaggaaaatgccatgagcagctctgtagcatgaccttgttgggctgggttaaagtagggtctgccaccagtcatgtgacagaaaggtacctcatgcacttcctccttcccccagaaatcagcctccaggagtgaggaatgagcccagaatgagagtttagagtgctccagagcctttgttagaggtgccctccgacattcagaaaaccaggattccagagacctgggtttgagtcctgactttgcagcatactaactgtgtgatcttgaaccaacatattttcacctaatgaggctgacaatcttccctacttcacaaaatagttatgagagtcaaataaaagtacattttagaaagtgaaatgctgtggacatttaaggtggagccactgtgagagtctagggggatagatggtattcgtctcagaatgaaacgaatacacccctctcagagccctttccaaggatcccctccttctttcagctccttccctccacctcaatacacactcctgtcccaggaacctaacctcatctagaaataccagggccagcatgccttacacctagaggtttggttggcttcagagaaacttctggaggctaaaagcagccaagaagaatcagccactacatgctgggcctggatgaacagagcagtgagctgtgatggggctggggctggggcccaggaggagcaggcaggagagtttgtatgcaccgtgattcaaatattataacaaaaatcatcgatcatgtgttaggcactttacagttcccaaagcactttcccatccatgccctgatgatctttgacacaacactgtgatgtgggttttattatttccagtacagatgaggaagactgaggcctgcatcagtgaagcaacctatccaagactacatagagaaggcagtaaatggcagggttagtctcagaacaggggagggtctgttccccccgcagtgggcagtcctaattctgaacttcacctatctgggggtgatagaggggaacaagaggaagcctgctgaagagaaaacctaaacatctgttttgtctacgtatgacttcctctgcttgtgggagagaaggaaggaaaggaacacattgttgtcagccccacaaccccaacagaattaaaccctggagcaggttgaacagcagaggcttccctcagatcaaggagccaggagcagatgatctatctctgtggccacacagagagatgtcaccttatgcaatttgcatatcatattcaattcccccaactgctctttctaatttattcaactggggaccaggctggtctcatgccaacctaggagatgtaccatagcagtatgagcagaattcctcaggaggaacaattagcaaaaactgcagttgcctctcgataggcctgagcagagagaggaacaatagctctcacgtctctcctcatcagattctaactaagcagatgttctcatgcttttttcttcttcctatgttctgtatactgacacctcttctcagtggcatatgaaatatgaaatgtcatgtgttgtgagtttgtataaatataaaggaatatatatacacagtagcaaaagagaagatctcatttacaaatatctatggtgtttccttgttctgtgttgatctgttttattgatacaaactgaattttcttaatgtatcttctatctctattatagtggcaatgatggtatatgcattaaagttcttctgaattgtg

SEQ ID NO: 17301 - DNA, 423 bp, Homo sapiens
  source 1..423: mol_type = unassigned DNA
gaagccctccatctaaatcagctgtcttctccacatccctcctttttctctccgccagacgccacccctaccccttctattgtgttgtgccttttcattttagccccgcttcctacgtagagccctaacctcctttgtagcgagggcacttgagaatttctgaacctcgagttgtaatggagctgtatggaaagatggcctctgcccaagatgccaggtacggccagaaagactcctctgatcagaactttgactacatgttcaaattactcatcatcggcaatagcagtgtggggaaaacatcttttctattccgttatgcagatgactcctttacatctgcattcgtcagcacagttgggatcgatttcaaagtaaaaactgtattcaaaaatgaaaagagaatcaagcttcagatttggg

SEQ ID NO: 17302 - DNA, 8896 bp, Homo sapiens
  source 1..8896: mol_type = unassigned DNA
agtacgcgtgtgcggcgccaggagaggacagctccagtgctgatgttggagccggttagcgaaccccaagagtgcagagtgtggagcgtggagcgccgggactgtgcacgcttgaccggaagcccagaccagtgcggtcctagccagagagaaaggacatttgccaacaatgagacacgaagcgcccatgcagatggcctctgcccaagatgccaggtacggccagaaagactcctctgatcagaactttgactacatgttcaaattactcatcatcggcaatagcagtgtggggaaaacatcttttctattccgttatgcagatgactcctttacatctgcattcgtcagcacagttgggatcgatttcaaagtaaaaactgtattcaaaaatgaaaagagaatcaagcttcagatttgggacacagcaggccaggaaagatacaggactatcaccacagcctattatcgtggagccatgggctttattttaatgtatgacattacaaatgaagaatccttcaatgcagtacaagattggtcaactcaaatcaaaacatactcttgggacaatgcccaagttattctggttgggaacaagtgtgacatggaagacgagcgggtcatctcaactgagcgaggtcaacatttaggagaacagcttgggtttgagttttttgaaacaagtgccaaggacaacattaatgtcaagcagacatttgagcgccttgtggatatcatctgcgacaaaatgtcagagagtttggagactgatcctgccatcactgctgcaaagcagaacacgagactcaaggaaactcctcctccaccgcagcccaactgtgcctgctagtgtccccgtgcacacaggcagctccagggggctctggttgccaacaaacagcatttgtaaatggtctattagccttcatttatactgcctaacaattatttgaaggaataaattgatgtcaatggctcgtacgcattcaattcttgggagctttcctgtttaatatgtggcaaatatgtgatcttaaatttataaggactatccatctataaacatctggtacctgcatgtgacttgttatttatttgtctgctaggctctttttgtttcaaatttgttctcagactacttctgggacatcagactataatctcactacaactggcttttgtcccattgattcaaattatgctattcacttgtaggaatgatgaccaaggaattgcttgtgtgtgtgtgtgtgtgtgtgtgtgtgcacgcatgcccgcatgcgtgcagaggaagaagtcacaagacttcatttgctttactcttagttgaaaatcaaatggaagtttttctcatgattagggacgctgtcacgagtctggtcagtttactgttgggaactgtgtctttatttcactgttattaataactgagatcattggcctataaagaaattgaaatgttgtttttaaggtccttgcaattttcctaagtcattaatattacctgactggggctatttaacaataatcttcgtttacacatttaaataagcaagtatctacccaggactgctttttccactgatccttcccaattctgtgaatattcaacatcattgaacagattgagacatatctactgaatgccagttatgcaacaagcattttaaccaagaagggtatgagtagctatggaattccaaggtccaagcccccttatttttcaatgacttgccttccccaacccccataatgcacaccaccaccaccatcactttctggaaccatcaccaactcttggactagagcttatgttgaagcttgttagggctcctctttccgtaggatgtagacttgcctccccaaacacggccatcttctcaaacctcagctaagttcttttacctgtttagatgctatttaaatcagatttcaaagggtccccagttgagaaaaaggaaaattttaatctttaatcatctttttaagtccagatgttcataaattctaaagcatattcctattacgtgaatgcttaagttacacaggaaacattctataactgtagtatttcaatttcagaaatatttaggatccatagcaatttaaaagagggaggaaaccactggagcattctaattttgtatcacaaacttcctaaaggacctatatgaataaagagaaaacaacaaatcctaccagctgtacagagagcaacagggaaatttggcctctgtatcactgtccagcattatttaaagctaggatttaggaaggaagcaggaattatttggcagatttggaaggatagtttcgttaagtgaactttctacttttttggtggttatgtcaaagaatttttttcctcttctcaaaaatagagaggcttcccatgaaagtattggatgcaaatgaaacaggcatacatctaaagatatctttggagaataaatccttacaagtcacagaactaggtcacacacattagtaagtcaaaagttggaaattaggggagagagcatttggaatgctttaagcatttccatgttatttctcaccttcctagttgaagatccactaatcagtagtacatttctactttggtgccctacaaagcaaaccttagcatagtaaagacaagaaaacattaatgttttattagtttttaatggggcaaccaacttcaaaatcacaggaattacagtgacgggagagaaagaagcaggaggcataaaaacagatttgtttgtagcagtagtctgtttgtacaatgttataatatttctgtaacttgggccagaatgtggccatgttaaatgatatagctattaagctcacttttacaatctaaaaggaactaataaagccaggaaacccttctcatcctccttcacagccctcatcccacacatagatgtaaaaagcttagaaagaatattctgatggctttttcagaaggaaggaccttgatgtgtgtattgtggtaaaatgaaaagcaaaatgagacagtatttaaaagtgaaagagcagagttttgctctgctgaaaaccccttccctgaagaactgattgctgttgaagttaattggcccttagatgggaagccctaagccaagctcccacttacacagtgtcaaacatcccgaagtggaaacattttatgccagtcaggggagagacaggcaacaatagcccaaatgtcattgccaagaaacatctgatactttctaatttctaaaccccaatggaagtgaggcctttttcattgattctcagttctgaaactcccaccctgttaggatttccattccaaataattcaatgagaggtttccagagaaacagtcacagagctcaagagaaagaacacttaaatgctcctgctgtaattgcatcaaaaaatccgggttttaacatcaaatttggcaaatggtgggaccaacccaaggttaactaagtgggctttcattggcattgagctatgttacttataaattataacactatagttccaaggtttttcagccttttggccaacacacacacacacacacacacacacacacacacacactataccatcatctatcaatagtctaaatacataaataaatgcaggtcatttttatcaatggcctaactaaatttatatttaaaagaacaagacttttaaaaagtacatactcctgttggtttgtaagttatacacatttatctcttgtctttgatttaattaaattagtgttttaagtatgaatttattttcctttgctactcattacctgaccactttcactcctctagatacccttaggaataaacctgaactgttccaaatcgattcttccaagagctttggtgttggtaccttcctttcttttcctaatgcaactgaaaaattagactgaaaattatttgacttaaatagccatcctcagagtgaatcagcatttcagtttttggagatggggatggaagtagaaggtgcacaaagcgtcctaagatggcagtttgaatgttagcatcgcatctacatgctcataagaggaattgcttcaggacaatgaatcagttcattgttgctgcccccagtgaacagctccaactgccttgatgaacttctaatgactgtgaaagctaggaggttcttctagttcctccttagggtcacttgaagttcagtatttttttgctgcctggtaactaagtgctaagatttttacttggaaagaaaactatgacaatgccttcagttgtagcagaaagttgtggcattgtgataataaacaaaatctacaaagttacaacccaaattatacaagacatcaaaacactcagtaaacaaatatatatatttcacctacttaaatcttattcatattaattataggccttttgtttagtacactggttattttttaaggaaccaatttaaactttcaattttaaatacatctatgctgacgatagactttcgggtatatacaaccttcttcttctcttttaaaagttaaatacattccactattaactgaacttccatgaagcaacattaattttagagcatggtagtccataatcagtggttcattgtgatgtgctttatccaacatgtatcttagtgcatggttgaggatgtactatgtgatattttagttaacagtgtggcatttgtgggactatattaaaagcatatccaaactaccaagctataccaagctgaggtaggtaacacctgcatgtgaaaaactgtgatatgaatcttatttataaaaaagtcataactaaaacccttctagaccaaaaagttactgtgtgtttgttaataatcttcatagtactactggaatgctcaatcagttatttttggtgtggcatacttcagagctggcctgtccgtctgaagaaccctttctctcacaattacagtttgcatgactagaacccggaactctgttcctttgcgtgtatagtcacttagtgtgctgtccgggtgccacatgagcaactacacccatgtggcctttctgtcactccctggaaaatgcaacctctacagctctgctcagctctgcctgtgtgcattgattaccttcgctttagtagtttgcctgtaaaatggtgaagtctttctgatatgctgaacctttgagccagcttttgggagttcttcatattttaggtgaatttttgaccaaagtcaattaaagacataaacctgttttatatcatggaatttactgggccaaattaagtaaaagatgaagtttatgaccagaataaaaaagcctttacccctgcacagcactgtatctaaagggctctaggttgtagaaatatagtaccccctaacagggaaaaaccaagttgggggatttatctaaaatgtatctacctattgttactggtatttcacaaataatttttttcttaaaaatatttacagaaatgcttgacactccggtcaaataatatttccctttgatagattgaaatatttgcttttagattacacatacagtgctgcccttctcaacagtcactcacacgctcactcgcctgtacaaaggtatcaggcaaacactgatacttttttttaagaaggcaaaattccatctatggtgctttctcagtgctagggaaaagggagcttttactatgttccagctataactcacatcttacttataaggtccataaaatcggttcttcacactgatttcgtttgattagtctgtgcatgtaattaatttcctccaaacagagagagtggaggggaaataaattttgcaagcattctagataacagaaatgagtcattttaaaacctcactcagagctcgagtgttaagatcagaccatctagctagtggacaaattgaactttctatttgcagttctcttttactttctgactttcttttaaattactgcagtttttcaaaacactatcctcatggaatgacaggaccaagaatagaaaatgagactcaaatttcaccatttacttcccatcagcaaccattactggtggagtttcaaacagtcattacttgctgaaatgaggtttgaggttacctgtgtatttcattcacctgtgttaatatttccttcatcgtggacaagtgagagttggctgtggctttatttcttgaggcaaattattttgcattcatgttatttggggctaggtattgcttaggttcgtgaatgctgttcttacagacacagatggtacctgagcccctcagacacctgccctttcagggacgtgagcatgacttacatctgtcaagtggttccatacttcttgtaaaagtaaagtttgggtattgtttgctgtatcaatatgatggctttccatgcattgtctcattatccctaggatacgtgctaaaggaaaactgtcctgtaattcctgttaatatattgttaatgtcagacgtgatgtgataccgttagactgtccaaatgtacaacaatttaatggtgtttgtagaactgatatgtcttaaatgttgcatgaaatatgttataaaaatagatttgttttctattttcaacacctcagaattgagggttcatgggccaataagtgcaatatttaatgactcactcagtgtatataaactagtatgaaagagtgaattataatgaatgtgtgagatgctttgatagctgtgtgacttattcaaatgattttcttgtagctgtatttgtctagtggtgcaatttatacagtaaatatcttattggtgtcatgtaaaacccctctgtgcctacttcaaaatacttttttcttataaaaccaaacatttagtatctggaaatatgtgtcaattttatctcttagaattgtggattttattgtcaagacagaatggctgttcatttattttataaaagcatctccttctataactcaaaattttctttaagtgtcatataaaagtgtacattttacttttaagcaactaatttagatacctaagaaaaactatgtgcattaggaaaagtcatgtttttcttctcagaaaggttgatcacatgacatgtctactaagaattttcacctctgtacttgtatgtatattttattgttactcaatcttgtattttatttacaaattcaacactgtcaaccctgggaattctaaaataccaatgtatttttaggttgtagctaatgttgtattcactttcaattctcagttgtccacactggtgatataagaggaacaaatcagaatcattaaatactttgtaatgccatcataaactcatatattcatcctcaaactcccttgtttaatgctaattggtggcctggaacttcactgagatgcaaaatcaagaactgaagcctagttgctagataacgaaaagctataaatgtttatgtatgtgaattttaaattagaataaccgtcttaaactcctacttgccatttctaaggcaaagcattcattttaatattgtactttgccttttcattcagttagtggagtaagtcatgaaacccttaggaagaaaaacaagttatgacttattcactaaaattgatgcaagacagttggttctagatgaccatggccatgtgttcatcatataaaaccttcagttctctctatggtgcttggctggagattgacatgtgaggatgtgccaatcatattaaatggatttggtctatgtgggtgatatgtggcctgaatgtaactgtgatagactgaaatttgttcttagctctcaaaatccactgaagaagtcaagtgaaggtgggtaaaatagggagattagtgacaactttgtgccaaattttttaaaaaatggaagcaggtagccaatattagaatgataatttaagggtgtggttgaattttagttagttgtcacatagttattgaacctcatatgctcagtgctgtgggaatcaaacatggaagaggtatggctcctgcccctaatgagaacaagggggaaaaatccagatataatctaaatgctaggttatgtcagggtataggaacacagagaatgggggacctgtaagaactggaagagtcagagagggctccattgaagaggtcaaacataattccggaaagaattaggtagtgaggagattgtgccaggaaaataagtgggaaaggccacagttatgtttcctttgaatggaagagagacaaagctatcagctatagatcattgttttcttaagacagccaaactggccctttgaaaccattcaaattaccccagtttagctccctaccttttagtctccgtgaggaagacaagctgttgcattatcatattcctctgtgctgagcagctcaagactcagccacaatatgcaaattgctttaatgccatattacggcagttgatttagacatttgccagtgcaccaaaccatgagagattgtccgacctaatgccacctggcagatgtgtacccagagatttttctgtagctccatgtttcccataaagggcattggaaatgcacagatgaagatcttcctttggaaccaggcacatttggccccttctcagtgactgcactgtggaactcttcttaagaaaatattgaaaacagcttaatgctttcatatagtgaccgacatttagttgaaaactactgctgcatagcaaatattgtgactcttcatgtgtccacaggagctcttgtgtgggtttaaagctatgaagtgtattcacattgtgaagttttaattatctttattgaaattaattgtgtaaaaatggtatgtgctctattaggtattcagtttgtatgtgaattctataaagaaagtggtttttgttctttgagtttgttttatttcttgaagattacaataaatatctaagagactatattcctgaa

SEQ ID NO: 17303 - DNA, 590 bp, Homo sapiens
  source 1..590: mol_type = unassigned DNA
gataccaacttttcagagtgctgagaggatttgatggcataatttgtgtaagatgcctagccccgtgcctgcatgatctatactttggctgacagtccgtgccttcaggcagcctcacaagaatatctgagaacagacagtattgcgttgcatccaggatttggtatggacaacttatcctgctccctggtgccaacacaatatttcacaacagacaataaaactaaaggacacagcaggccaggaaagatacaggactatcaccacagcctattatcgtggagccatgggctttattttaatgtatgacattacaaatgaagaatccttcaatgcagtacaagattgacagaatttacaatttaaaagaaaacagaggaagaaaagtagaaaaaaagctggcatgacacaaaacaaaacacagaagcttgtgggaaccatgataacttactgatttttctggctgcaagattgtatgaaacaaaaaatagcaatatataacacttccagtttccccccgaagcaggcatgaccaagctcgttgtggtccagattgtctaaccagttatgctttaaaaaaaaaaaacatt

SEQ ID NO: 17304 - DNA, 583 bp, Homo sapiens
  source 1..583: mol_type = unassigned DNA
aaaaacagccaaagatggctttgtgtttaatgcacttgctgtaggctgaaagccccagctgcactgccaccaccttgccccctactcctgccaggtcaactcaaatcaaaacatactcttgggacaatgcccaagttattctggttgggaacaagtgtgacatggaagacgagcgggtcatctcaactgagcgaggtcaacatttaggagaacagcttgggtttgagttttttgaaacaagtgccaaggacaacattaatgtcaagcagacatttgagcgccttgtggatatcatctgcgacaaaatgtcagagagtttggagactgatcctgccatcactgctgcaaagcagaacacgagactcaaggaaactcctcctccaccgcagcccaactgtgcctgctagtgtccccgtgcacacaggcagctccagggggctctggttgccaacaaacagcatttgtaaatggtctattagccttcatttatactgcctaacaattatttgaaggaataaattgatgtcaatggctcgtacgcattcaattcttgggagctttcctgtttaatatgtggcaaata

SEQ ID NO: 17305 - DNA, 5526 bp, Homo sapiens
  source 1..5526: mol_type = unassigned DNA
ctcctccgccccgcgcgccgtccctgcgccccgctccgcccgcgcctctctcccagcgccgcgcctcgggcgtaaagagcgcgcccctcgcaccgcagccagtgccgaccgcagcagcccagccccagccttcctccgcctccgcctctctctcctcctcctcctccgccgccggacacgcagccgcaggccgggaccgggacgcagctggggagtcagggacgcgcgcagccagcccttccccctccggctcccgcaccgccggccgcctcccctcgccctcctactctcccctccctgctccttcgctttttcctcctcctcctctcccggccccggctgccagcaccatgtccgcagggggagattttgggaatccactgagaaaattcaagttggtgttcttgggggagcagagcgtcgggaagacgtctctgattacgaggttcatgtacgacagcttcgacaacacataccaggcaaccattgggattgacttcttgtcaaaaaccatgtacttggaggaccgcacggtgcgactgcagctctgggacacagctggtcaggagaggttccgcagcctgatccccagctacatccgggactccacggtggctgtggtggtgtacgacatcacaaatctcaactccttccaacagacctctaagtggatcgacgacgtcaggacagagaggggcagtgatgttatcatcatgctggtgggcaacaagacggacctggctgataagaggcagataaccatcgaggagggggagcagcgcgccaaagaactgagcgtcatgttcattgagaccagtgcgaagactggctacaacgtgaagcagctttttcgacgtgtggcgtcggctctacccggaatggagaatgtccaggagaaaagcaaagaagggatgatcgacatcaagctggacaaaccccaggagcccccggccagcgagggcggctgctcctgctaatgcagagccgacctgtggcttcccatgacactccttgcttgttgtgttgcttcctattggctagcttcctaaggggggagggaaccgagttatcaagatgggaggatttttcttttctctctgtctttaggagtagggtgggatggggagggaggctgggcatcagggatcacatcactcttaacggctgttacttaaacaactattttttggtttggttgtaatatattgtactttattaagattgccaaaaactgttaaaatttaaaaaaaatttaaatcatgtgtatacaattttttgccagataaaaatgtagtcatttttatttgaaagatgtgctttttgtttttgtatatttgtaaacttatagagaaccttttccacacacctcctccttcctgttctctttgaaccattcatcacctctgccttcctcctatccccagcccaataaattaaaacaattaactgagcaaattaattaggcttcagtctggggccatctggccccactctctaggccctactccagttaaatcaaacattggttgaacacatcagcctctgaaaaggtagctctgactcttgtctttccatggccagagtgggtcgtcaacctcgtgtggagctgagaccaaggtctgtgggctctaggcagcccggcagcagcccccagaggaactgctcccacctctccttctctttccctgaaaagccttgaagggggttgagggtacaggcaaccttgtgttctctgtgccctcagggactggcagagcaagaggccatcagaaggacgaggtgctgttggcaattgcagctgcgtggtgcgtggtttatagactggggtgccatgtgtacttctgaaaatattttaaccagcccacccagcagtcagtacacatgcctgggccaagtctaagaaactcagtgtgtgatgttgggcagtgtgccatcctgaagccttcctcctggatgtcagggaagctggaccacctggagttgatcctctgtgatggggaggcgggggggggggggggtgttgtctgcagaaccaccaccttgaaagatccatgttcttagagcctcagctgctaatattgttgagtgctttctggaaaagctgatttgttgctatgttttcaccccagtggcatggcgcagttgaagtctttgtggacatatctttgtggctactgtggctgcgctgtggtcacctgaggatgtggttcaggtggggtctccagaaggctgcttgcccccagagagccatctcttccatttttgattcattcctgagaatggcttagtcctgagaatctgcaaagtctctgaagagaactctctcttcccactaagtgatataacctacttggccagcattccaaatagactcagactcactgccctgagcctgcacagagccaggtgcaatgggcagtgagtctggccaaaatgtaaaccccaccctccctgctgtcattggctctccctccaggctgctgctgggcatgtcatagatgggatgaatgaccatctggggtatggtgggctgaactccacaaggtcgttggaatgaattttgaaacttctcagaaattaatctgaaatggcaggcagtaagtgcagcagaatctggcaggactgatatttgtgcagtgggcctgccacacaccctctgcctaggaggctgtatgccagagctcatctctagcaaggaatttatcttcaggtgaagaagagaggaagcaggatcccactgagcacctcttgcagaaggcaaggaccaatgtttgaacgtgtttcagatgtcatgtgtttagtttttatatgtgtgtacataattatatatagagatagacttgtgtatacaccttccacaaacacatcctcacggagatacatgtgctcaatgtatattcttgtttctcctgctctcaagttggaacttgcattgtgataagttttggaaattcaaaagtactgcaacgtgttgaaataagaaatacttaatattgtcaaataacttgtgattgtcttgccatcaataaaataatgcatagttgtgttaaactacaggcaaacatagcccacgggaatatctccaccatttctctatgtactttatatgcacgggtgtgcatgcctgtgtgggccagtgtccccccaccatgggcacacccccaagtggtgcttgttggaagagtgcttacttacctcgagagaatttacaggagtccacatgacagtgtcctgcctggttggcagcgggggccatcacctgtggcctctgagaccgccccatttacaggaatctgcactgggtctcagtgaatgaacgtatggtagatttttattttcttggcactaaagattagcttttttaaaaaaacatcccataaaacagtagaaactcagttcccttctcaggggcacacacatccaaggcaccgtggactgtgtttccatcctggcctagaggagcagtaaaagatagcatttggtttgacatggccttagtgagtcctgcctttcctagcatgcacacaacatcctctctttgagtttgggttctccccagccccttggcctctgaggctgagggtggcttcctcccatcctcccatctcagtggttccatggcgctcccttcggcacgtgcggtttccgcccctcccttcctggggtgtggaaaggcagccagacctctttttcagaagttgttggttccctgatttttgtcttgagcaggcaccatccctgtccccttgcttgcaggtagaattggcacagagttaaggttccataataaactgttaggtgctcttgaagaagatgtcatggcattgcctcagcaccccagcaagagcattgcatctttgctgaatccagatgggttagcagagggcaaattggaggattcctttgaggaaatgttctcaattgagcaattcagtccctctccccaaagactagacgtgacctggcagattagcaggatcctcttggccttcttttttggggatggtgggagtgaagggggtgaatcttaaaagcttatcaacaaagctcctgttctgcaggcatcaggaaagttgagtgtaagatggaaaaagcaaacagcctatttacaagtggaaacacattggttctgatcactcctaacttgctgggtgatcatacatacatcaacatgaaggtgtgacatcagaatcatgagcaccatggctgcagttgtgtgatccaaggctagttggcttggtagctgttggcagcagtttcccttggtcagaggcctccttgctatctatcgctgctctcttcttgtcatccttaaacattcagtcatgttcccaggtctgaggggagcaatggccagaccagtttcagtatctctggcaacagaaacaaggattgaaatggtggtagttaagagtgcagacacatctggggtgcaacgtctgcatcatcctggtggctagccagtgcggggaggccctgccctgggataccagttgtgacaataaagggatggccctcctggcttcagcatcctgcaggtagagcagcctcattccttcacaagatggaaggcaggtgaggatgtcaggatgagatgggaccaggtagccgaggacagtgaggcatgtctgagccacttgaggggcagctgaacagaaggatgtctgtgtgcatcaaccgagcagattgtgcgcacactcgtttccgaactgcctctccccaaagaatgtgaggcattgtcaccttgttacagctatgtgaagcagagctgtcacaacttttcctgtctacaggcaggaaaaccaggatggagaagggcaacttgcttattaagatcacccagcaagttaggagtgatcagaaccagtgaagtttccatttttcatccattgctgccctgtgtgtgaacaaatgtgactccatatttattacacagcaaggactgctgtgtgtgggtgtgttcctcagaccatctctactctttttggttaggacactaggttcttcccagcatatgagtgagaatattggtggtattttgggctcctctactgcacaagggccagtccccaagtctactctgattgattgtcatgggcacccacacagatcaggacaccctttgaatttttgtttgacatgaactatttaggtgttccaaaaccttgggatctcaatgtgcaaactccttggactccagacccctgtctggttggcactcccagcagtgtgtggtttcatcaggaaatccttgcagcaggggtttagatggttccttcaggaggtgggaagcctccatagcattgaaggccagcctgcatctcgcggtgtgtgtccacttctcccctcactttcccctcacccatccctttaaagtgattggctgtgaggagcacagagggtggcaattccatctgttatgggctcagaagacatagccgccatgttgatttcacattaaactgtgtaaaatgtggaaaagactcagcatgttggtcaaacaataaactgtcctaattctcaaaa

SEQ ID NO: 17306 - DNA, 500 bp, Homo sapiens
  source 1..500: mol_type = unassigned DNA
ccgcaggccgggaccgggacgcagctggggagtcagggacgcgcgcagccagcccttccccctccggctcccgcaccgccggccgcctcccctcgccctcctactctcccctccctgctccttcgctttttcctcctcctcctctcccggccccggctgccagcaccatgtccgcagggggagattttgggaatccactgagaaaattcaagttggtgttcttgggggagcagagcgtcgggaagacgtctctgattacgaggtgctgttggcaattgcagctgcgtggtgcgtggtttatagactggggtgccatgtgtacttctgaaaatattttaaccagcccacccagcagtcagtacacatgcctgggccaagtctaagaaactcagtgtgtgatgttgggcagtgtgccatcctgaagccttcctcctggatgtcagggaagctggaccacctggagttgatcctctgtgatggggaggcgggggggggggggg

SEQ ID NO: 17307 - DNA, 880 bp, Homo sapiens
  source 1..880: mol_type = unassigned DNA
gagattttgggaatccactgagaaaattcaagttggtgttcttgggggagcagagcgtgccctgggttccctgactgctctggccttccatgggtgttctgcgggactgctggcagcccttccggactcctccctctctgctacctgctcaggttggatgtggcatatgaccagaaactggccattggtcgggaagacgtctctgattacgaggttcatgtacgacagcttcgacaacacataccaggcaaccattgggattgacttcttgtcaaaaaccatgtacttggaggaccgcacggtgcgactgcagctctgggacacagctggtcaggagaggttccgcagcctgatccccagctacatccgggactccacggtggctgtggtggtgtacgacatcacaaatctcaactccttccaacagacctctaagtggatcgacgacgtcaggacagagaggggcagtgatgttatcatcatgctggtgggcaacaagacggacctggctgataagaggcagataaccatcgaggagggggagcagcgcgccaaagaactgagcgtcatgttcattgagaccagtgcgaagactggctacaacgtgaagcagctttttcgacgtgtggcgtcggctctacccggaatggagaatgtccaggagaaaagcaaagaagggatgatcgacatcaagctggacaaaccccaggagcccccggccagcgagggcggctgctcctgctaatgcagagccgacctgtggcttcccatgacactccttgcttgttgtgttgcttcctattggctagcttcctaaggggggagggaaccgagttatcaagatgggaggatttttcttttctctctgtctttaggagta

SEQ ID NO: 17308 - DNA, 586 bp, Homo sapiens
  source 1..586: mol_type = unassigned DNA
cggccccggctgccagcaccatgtccgcagggggagattttgggaatccactgagaaaattcaagttggtgttcttgggggagcagagcgtgccctgggttccctgactgctctggccttccatgggtgttctgcgggactgctggcagcccttccggactcctccctctctgctacctgctcagtcgggaagacgtctctgattacgaggttcatgtacgacagcttcgacaacacataccaggcaaccattgggattgacttcttgtcaaaaaccatgtacttggaggaccgcacggtgcgactgcagctctgggacacagctggtcaggagaggttccgcagcctgatccccagctacatccgggactccacggtggctgtggtggtgtacgacatcacaaatctcaactccttccaacagacctctaagtggatcgacgacgtcaggacagagaggggcagtgatgttatcatcatgctggtgggcaacaagacggacctggctgataagaggcagataaccatcgaggagggggagcagcgcgccaaagaactgagcgtcatgttcattgagaccagtgcg

SEQ ID NO: 17309 - DNA, 723 bp, Homo sapiens
  source 1..723: mol_type = unassigned DNA
tggcgcggctctggagagcgctcctccgccccgcgcgccgtccctgcgccccgctccgcccgcgcctctctcccagcgccgcgcctcgggcgtaaagagcgcgcccctcgcaccgcagccagtgccgaccgcagcagcccagccccagccttcctccgcctccgcctctctctcctcctcctcctccgccgccggacacgcagccgcaggccgggaccgggacgcagctggggagtcagggacgcgcgcagccagcccttccccctccggctcccgcaccgccggccgcctcccctcgccctcctactctcccctccctgctccttcgctttttcctcctcctcctctcccggccccggctgccagcaccatgtccgcagggggagattttgggaatccactgagaaaattcaagttggtgttcttgggggagcagagcggcaaccattgggattgacttcttgtcaaaaaccatgtacttggaggaccgcacggtgcgactgcagctctgggacacagctggtcaggagaggttccgcagcctgatccccagctacatccgggactccacggtggctgtggtggtgtacgacatcacaaatctcaactccttccaacagacctctaagtggatcgacgacgtcaggacagagaggggcagtgatgttatcatcatgctggtgggcaacaagacggacctggctgataagaggcagataacca

SEQ ID NO: 17310 - DNA, 506 bp, Homo sapiens
  source 1..506: mol_type = unassigned DNA
gttagtctccttgctgcccagggatctgggcaattgcagtgagggctaccccaactcgaggcgatttggggaatgatacaggggcacctcacaccgagaggctgtgaagtctggctctgggcagagaaaggcccaggcgacacgccctgcctagcttcccagcactcctccagagagcatcggtggattcttcccacccccacctcccagctcaccgcccttcttgggggaggggaggtcaccctggcagtcggccagagctgggggagggggagactgcttctccgctgcccggctccctccccaggaaaacatctctgaaaaccagtcgggaagacgtctctgattacgaggttcatgtacgacagcttcgacaacacataccaggcaaccattgggattgacttcttgtcaaaaaccatgtacttggaggaccgcacggtgcgactgcagctctgggacacagctggtcaggagaggttccgcagcctgatccccagctacat

SEQ ID NO: 17311 - DNA, 5219 bp, Homo sapiens
  source 1..5219: mol_type = unassigned DNA
acgcgcgcagccagcccttccccctccggctcccgcaccgccggccgcctcccctcgccctcctactctcccctccctgctccttcgctttttcctcctcctcctctcccggccccggctgccagcaccatgtccgcagggggagattttgggaatccactgagaaaattcaagttggtgttcttgggggagcagagcgtcgggaagacgtctctgattacgaggttcatgtacgacagcttcgacaacacataccaggcaaccattgggattgacttcttgtcaaaaaccatgtacttggaggaccgcacggtgcgactgcagctctgggacacagctggtcaggagaggttccgcagcctgatccccagctacatccgggactccacggtggctgtggtggtgtacgacatcacaaatctcaactccttccaacagacctctaagtggatcgacgacgtcaggacagagaggggcagtgatgttatcatcatgctggtgggcaacaagacggacctggctgataagaggcagataaccatcgaggagggggagcagcgcgccaaagaactgagcgtcatgttcattgagaccagtgcgaagactggctacaacgtgaagcagctttttcgacgtgtggcgtcggctctacccggaatggagaatgtccaggagaaaagcaaagaagggatgatcgacatcaagctggacaaaccccaggagcccccggccagcgagggcggctgctcctgctaatgcagagccgacctgtggcttcccatgacactccttgcttgttgtgttgcttcctattggctagcttcctaaggggggagggaaccgagttatcaagatgggaggatttttcttttctctctgtctttaggagtagggtgggatggggagggaggctgggcatcagggatcacatcactcttaacggctgttacttaaacaactattttttggtttggttgtaatatattgtactttattaagattgccaaaaactgttaaaatttaaaaaaaatttaaatcatgtgtatacaattttttgccagataaaaatgtagtcatttttatttgaaagatgtgctttttgtttttgtatatttgtaaacttatagagaaccttttccacacacctcctccttcctgttctctttgaaccattcatcacctctgccttcctcctatccccagcccaataaattaaaacaattaactgagcaaattaattaggcttcagtctggggccatctggccccactctctaggccctactccagttaaatcaaacattggttgaacacatcagcctctgaaaaggtagctctgactcttgtctttccatggccagagtgggtcgtcaacctcgtgtggagctgagaccaaggtctgtgggctctaggcagcccggcagcagcccccagaggaactgctcccacctctccttctctttccctgaaaagccttgaagggggttgagggtacaggcaaccttgtgttctctgtgccctcagggactggcagagcaagaggccatcagaaggacgaggtgctgttggcaattgcagctgcgtggtgcgtggtttatagactggggtgccatgtgtacttctgaaaatattttaaccagcccacccagcagtcagtacacatgcctgggccaagtctaagaaactcagtgtgtgatgttgggcagtgtgccatcctgaagccttcctcctggatgtcagggaagctggaccacctggagttgatcctctgtgatggggaggcgggggggggggggggtgttgtctgcagaaccaccaccttgaaagatccatgttcttagagcctcagctgctaatattgttgagtgctttctggaaaagctgatttgttgctatgttttcaccccagtggcatggcgcagttgaagtctttgtggacatatctttgtggctactgtggctgcgctgtggtcacctgaggatgtggttcaggtggggtctccagaaggctgcttgcccccagagagccatctcttccatttttgattcattcctgagaatggcttagtcctgagaatctgcaaagtctctgaagagaactctctcttcccactaagtgagtctggccaaaatgtaaaccccaccctccctgctgtcattggctctccctccaggctgctgctgggcatgtcatagatgggatgaatgaccatctggggtatggtgggctgaactccacaaggtcgttggaatgaattttgaaacttctcagaaattaatctgaaatggcaggcagtaagtgcagcagaatctggcaggactgatatttgtgcagtgggcctgccacacaccctctgcctaggaggctgtatgccagagctcatctctagcaaggaatttatcttcaggtgaagaagagaggaagcaggatcccactgagcacctcttgcagaaggcaaggaccaatgtttgaacgtgtttcagatgtcatgtgtttagtttttatatgtgtgtacataattatatatagagatagacttgtgtatacaccttccacaaacacatcctcacggagatacatgtgctcaatgtatattcttgtttctcctgctctcaagttggaacttgcattgtgataagttttggaaattcaaaagtactgcaacgtgttgaaataagaaatacttaatattgtcaaataacttgtgattgtcttgccatcaataaaataatgcatagttgtgttaaactacaggcaaacatagcccacgggaatatctccaccatttctctatgtactttatatgcacgggtgtgcatgcctgtgtgggccagtgtccccccaccatgggcacacccccaagtggtgcttgttggaagagtgcttacttacctcgagagaatttacaggagtccacatgacagtgtcctgcctggttggcagcgggggccatcacctgtggcctctgagaccgccccatttacaggaatctgcactgggtctcagtgaatgaacgtatggtagatttttattttcttggcactaaagattagcttttttaaaaaaacatcccataaaacagtagaaactcagttcccttctcaggggcacacacatccaaggcaccgtggactgtgtttccatcctggcctagaggagcagtaaaagatagcatttggtttgacatggccttagtgagtcctgcctttcctagcatgcacacaacatcctctctttgagtttgggttctccccagccccttggcctctgaggctgagggtggcttcctcccatcctcccatctcagtggttccatggcgctcccttcggcacgtgcggtttccgcccctcccttcctggggtgtggaaaggcagccagacctctttttcagaagttgttggttccctgatttttgtcttgagcaggcaccatccctgtccccttgcttgcaggtagaattggcacagagttaaggttccataataaactgttaggtgctcttgaagaagatgtcatggcattgcctcagcaccccagcaagagcattgcatctttgctgaatccagatgggttagcagagggcaaattggaggattcctttgaggaaatgttctcaattgagcaattcagtccctctccccaaagactagacgtgacctggcagattagcaggatcctcttggccttcttttttggggatggtgggagtgaagggggtgaatcttaaaagcttatcaacaaagctcctgttctgcaggcatcaggaaagttgagtgtaagatggaaaaagcaaacagcctatttacaagtggaaacacattggttctgatcactcctaacttgctgggtgatcatacatacatcaacatgaaggtgtgacatcagaatcatgagcaccatggctgcagttgtgtgatccaaggctagttggcttggtagctgttggcagcagtttcccttggtcagaggcctccttgctatctatcgctgctctcttcttgtcatccttaaacattcagtcatgttcccaggtctgaggggagcaatggccagaccagtttcagtatctctggcaacagaaacaaggattgaaatggtggtagttaagagtgcagacacatctggggtgcaacgtctgcatcatcctggtggctagccagtgcggggaggccctgccctgggataccagttgtgacaataaagggatggccctcctggcttcagcatcctgcaggtagagcagcctcattccttcacaagatggaaggcaggtgaggatgtcaggatgagatgggaccaggtagccgaggacagtgaggcatgtctgagccacttgaggggcagctgaacagaaggatgtctgtgtgcatcaaccgagcagattgtgcgcacactcgtttccgaactgcctctccccaaagaatgtgaggcattgtcaccttgttacagctatgtgaagcagagctgtcacaacttttcctgtctacaggcaggaaaaccaggatggagaagggcaacttgcttattaagatcacccagcaagttaggagtgatcagaaccagtgaagtttccatttttcatccattgctgccctgtgtgtgaacaaatgtgactccatatttattacacagcaaggactgctgtgtgtgggtgtgttcctcagaccatctctactctttttggttaggacactaggttcttcccagcatatgagtgagaatattggtggtattttgggctcctctactgcacaagggccagtccccaagtctactctgattgattgtcatgggcacccacacagatcaggacaccctttgaatttttgtttgacatgaactatttaggtgttccaaaaccttgggatctcaatgtgcaaactccttggactccagacccctgtctggttggcactcccagcagtgtgtggtttcatcaggaaatccttgcagcaggggtttagatggttccttcaggaggtgggaagcctccatagcattgaaggccagcctgcatctcgcggtgtgtgtccacttctcccctcactttcccctcacccatccctttaaagtgattggctgtgaggagcacagagggtggcaattccatctgttatgggctcagaagacatagccgccatgttgatttcacattaaactgtgtaaaatgtggaaaagactcagcatgttggtcaaacaataaactgtcctaattctc

SEQ ID NO: 17312 - DNA, 2037 bp, Homo sapiens
  source 1..2037: mol_type = unassigned DNA
acacactcgccaggacacaggcgcacacacgctcacgcacaaccagcagcggcggcggcgacagcgactcggtgacagcggcgacggcggctcccaccgcggcgcacccccttcaggcggccggcggcgaggccagaccggagagttccagcacactcgaccaccccgcggcttcctggaggcggcggccgcgattgcgaggccaagtggcatcagagctgagtgatggacgacctgcagtcccagaacctctccatggacatgactgactcccctcctgccttggctaataacagactggagaatggcatggctcagctgatcaccaccgaggcctggaacatcaactccactgacctggtggagggaagctccgcaccagagctcaatccgaatggcaatgccacctacgtcatgaccacccagggccccgtgcaactgcccgtggtgctggagcagcacgtctttcagcacctcaactcccctctggtcctgccgcaggaggccccatgctcctccagtaccatccacaacaacctcttccagggagcggaggaccccgaggcccagccccagctcctggacctgaggatccccagccagccgcaggagcccactttgccatttgaagctgtgctccagaatttgtttccctcccagggcactctcgggcccccaccctgtcagcctcctcctggctatgcccctgtgcccccacagccttttagctcccccttgtcccccctggtcccaccagccaccctcttggtgccgtatcctgtaatcgtccccttgcctgtgccagtccctattcccatccccatcccgatgcctcagagttctgaatccaagttcagctccagtttccccaagccaccatcttccttcggcctgcacccctttaaaggcacccagacccctctggaaaaagatgaactgaagccctttgacatcctccagcctaaggagtacttccagctcagccgccacacggtcattaagatgggaagtgagaacgaggccctggatctctccatgaagtcagtgccctggctcaaggctggtgaagtcagtcccccaatcttccaggaagatgcagccctagacctgtcagtggcagcccaccggaaatccgagcctccccctgagacactgtatgacagtggtgcatcagtggacagctcaggtcacacagtgatggagaaacttcccagtggcatggaaatttcttttgcccctgccacgtcccatgaggccccagccatgatggatagtcacatcagcagcagtgatgctgctaccgagatgctcagccagcccaaccaccccagcggcgaagtcaaggctgaaaataacattgagatggtgggcgagtcccaggcggccaaggtcattgtctctgtcgaagatgctgtgcctaccatattctgtggcaagatcaaaggcctctcaggggtgtccaccaaaaacttctccttcaaaagagaagactccgtgcttcagggctatgacatcaacagccaaggggaagagtccatgggaaatgcagagccccttaggaaacccatcaaaaaccggagcataaagttaaagaaagtgaactcccaggaaatacacatgctcccaatcaaaaaacaacggctggccaccttttttccaagaaagtaaataacggctttttaaaatttgtatgattataatatggggaaaggtgcattggttttataaaaaggcatttaaaacaaattatctttgttaattattttggggagtagttgggaaatggaaaggtgaattggctctagaggccctgtatgctagtatcattttcttttttaatttttgacttttcacaaatgagtaaataagagcaacctatttttcaagcagattgcacattttttgcagctttaatggaatattgggtgaattagaggggtaaaaaaagctattttcattgccacaaagtgctttgatgatgtaatacctaataaagggtaggatgaatatttcacaataaatgtttgtttgcactaa

SEQ ID NO: 17313 - DNA, 2377 bp, Homo sapiens
  source 1..2377: mol_type = unassigned DNA
ggcaccgcaccgggcagtctccggatctgccgttctgccccggcccggaaaacccggcgccttccaggcccttcgaaagatggattctgttgacgtatctggcggccctggcgagcctggtggaaagttgggttttgccagattgcgccgggctcctctttgtgacgcgcggccagccccgcatcccccccggagccgggcttcccaggaagaatgaagcagtcaacttgcataaggcctgtcttgacttctctcctttgggggaagaggatcacattaagaagggtggcaggcttgcctggacacagaattccactaccaaacagacatcatttctgagaacttcagagtttatgatccaggtttcccagtgattaaattactccttggaaggccaagtggcatcagagctgagtgatggacgacctgcagtcccagaacctctccatggacatgactgactcccctcctgccttggctaataacagactggagaatggcatggctcagctgatcaccaccgaggcctggaacatcaactccactgacctggtaaagaaggccctggtgaccgtgccagccccatccattctgaacccccctgccgagtctcagagtggcatggctctgaaggtggcggccactgtgttgcagcccctgtgcctcggggagagcccagtggtgatgcccattcacatgcaggtggagggaagctccgcaccagagctcaatccgaatggcaatgccacctacgtcatgaccacccagggccccgtgcaactgcccgtggtgctggagcagcacgtctttcagcacctcaactcccctctggtcctgccgcaggaggccccatgctcctccagtaccatccacaacaacctcttccagggagcggaggaccccgaggcccagccccagctcctggacctgaggatccccagccagccgcaggagcccactttgccatttgaagctgtgctccagaatttgtttccctcccagggcactctcgggcccccaccctgtcagcctcctcctggctatgcccctgtgcccccacagccttttagctcccccttgtcccccctggtcccaccagccaccctcttggtgccgtatcctgtaatcgtccccttgcctgtgccagtccctattcccatccccatcccgatgcctcagagttctgaatccaagttcagctccagtttccccaagccaccatcttccttcggcctgcacccctttaaaggcacccagacccctctggaaaaagatgaactgaagccctttgacatcctccagcctaaggagtacttccagctcagccgccacacggtcattaagatgggaagtgagaacgaggccctggatctctccatgaagtcagtgccctggctcaaggctggtgaagtcagtcccccaatcttccaggaagatgcagccctagacctgtcagtggcagcccaccggaaatccgagcctccccctgagacactgtatgacagtggtgcatcagtggacagctcaggtcacacagtgatggagaaacttcccagtggcatggaaatttcttttgcccctgccacgtcccatgaggccccagccatgatggatagtcacatcagcagcagtgatgctgctaccgagatgctcagccagcccaaccaccccagcggcgaagtcaaggctgaaaataacattgagatggtgggcgagtcccaggcggccaaggtcattgtctctgtcgaagatgctgtgcctaccatattctgtggcaagatcaaaggcctctcaggggtgtccaccaaaaacttctccttcaaaagagaagactccgtgcttcagggctatgacatcaacagccaaggggaagagtccatgggaaatgcagagccccttaggaaacccatcaaaaaccggagcataaagttaaagaaagtgaactcccaggaaatacacatgctcccaatcaaaaaacaacggctggccaccttttttccaagaaagtaaataacggctttttaaaatttgtatgattataatatggggaaaggtgcattggttttataaaaaggcatttaaaacaaattatctttgttaattattttggggagtagttgggaaatggaaaggtgaattggctctagaggccctgtatgctagtatcattttcttttttaatttttgacttttcacaaatgagtaaataagagcaacctatttttcaagcagattgcacattttttgcagctttaatggaatattgggtgaattagaggggtaaaaaaagctattttcattgccacaaagtgctttgatgatgtaatacctaataaagggtaggatgaatatttcacaataaatgtttgtttgcact

SEQ ID NO: 17314 - DNA, 2317 bp, Homo sapiens
  source 1..2317: mol_type = unassigned DNA
agcgactcggtgacagcggcgacggcggctcccaccgcggcgcacccccttcaggcggccggcggcgaggccagaccggagagttccagcacactcgaccaccccgcggcttcctggaggcggcggccgcgattgcgaggcttcccaggaagaatgaagcagtcaacttgcataaggcctgtcttgacttctctcctttgggggaagaggatcacattaagaagggtggcaggcttgcctggacacagaattccactaccaaacagacatcatttctgagaacttcagagtttatgatccaggtttcccagtgattaaattactccttggaaggccaagtggcatcagagctgagtgatggacgacctgcagtcccagaacctctccatggacatgactgactcccctcctgccttggctaataacagactggagaatggcatggctcagctgatcaccaccgaggcctggaacatcaactccactgacctggtaaagaaggccctggtgaccgtgccagccccatccattctgaacccccctgccgagtctcagagtggcatggctctgaaggtggcggccactgtgttgcagcccctgtgcctcggggagagcccagtggtgatgcccattcacatgcaggtggagggaagctccgcaccagagctcaatccgaatggcaatgccacctacgtcatgaccacccagggccccgtgcaactgcccgtggtgctggagcagcacgtctttcagcacctcaactcccctctggtcctgccgcaggaggccccatgctcctccagtaccatccacaacaacctcttccagggagcggaggaccccgaggcccagccccagctcctggacctgaggatccccagccagccgcaggagcccactttgccatttgaagctgtgctccagaatttgtttccctcccagggcactctcgggcccccaccctgtcagcctcctcctggctatgcccctgtgcccccacagccttttagctcccccttgtcccccctggtcccaccagccaccctcttggtgccgtatcctgtaatcgtccccttgcctgtgccagtccctattcccatccccatcccgatgcctcagagttctgaatccaagttcagctccagtttccccaagccaccatcttccttcggcctgcacccctttaaaggcacccagacccctctggaaaaagatgaactgaagccctttgacatcctccagcctaaggagtacttccagctcagccgccacacggtcattaagatgggaagtgagaacgaggccctggatctctccatgaagtcagtgccctggctcaaggctggtgaagtcagtcccccaatcttccaggaagatgcagccctagacctgtcagtggcagcccaccggaaatccgagcctccccctgagacactgtatgacagtggtgcatcagtggacagctcaggtcacacagtgatggagaaacttcccagtggcatggaaatttcttttgcccctgccacgtcccatgaggccccagccatgatggatagtcacatcagcagcagtgatgctgctaccgagatgctcagccagcccaaccaccccagcggcgaagtcaaggctgaaaataacattgagatggtgggcgagtcccaggcggccaaggtcattgtctctgtcgaagatgctgtgcctaccatattctgtggcaagatcaaaggcctctcaggggtgtccaccaaaaacttctccttcaaaagagaagactccgtgcttcagggctatgacatcaacagccaaggggaagagtccatgggaaatgcagagccccttaggaaacccatcaaaaaccggagcataaagttaaagaaagtgaactcccaggaaatacacatgctcccaatcaaaaaacaacggctggccaccttttttccaagaaagtaaataacggctttttaaaatttgtatgattataatatggggaaaggtgcattggttttataaaaaggcatttaaaacaaattatctttgttaattattttggggagtagttgggaaatggaaaggtgaattggctctagaggccctgtatgctagtatcattttcttttttaatttttgacttttcacaaatgagtaaataagagcaacctatttttcaagcagattgcacattttttgcagctttaatggaatattgggtgaattagaggggtaaaaaaagctattttcattgccacaaagtgctttgatgatgtaatacctaataaagggtaggatgaatatttcacaataaatgtttgtttgcact

SEQ ID NO: 17315 - DNA, 463 bp, Homo sapiens
  source 1..463: mol_type = unassigned DNA
gcttcccaggaagaatgaagcagtcaacttgcataaggcctgtcttgacttctctcctttgggggaagaggatcacattaagaagggtggcaggcttgcctggacacagaattccactaccaaacagacatcatttctgagaacttcagagtttatgatccaggtttcccagtgattaaattactccttggaaggccaagtggcatcagagctgagtgatggacgacctgcagtcccagaacctctccatggacatgactgactcccctcctgccttggctaataacagactggagaatggcatggctcagctgatcaccaccgaggcctggaacatcaactccactgacctgcccctgtgcctcggggagagcccagtggtgatgcccattcacatgcaggtggagggaagctccgcaccagagctcaatccgaatggcaatgccacctacgtcatgaccac

SEQ ID NO: 17316 - DNA, 2224 bp, Homo sapiens
  source 1..2224: mol_type = unassigned DNA
cttggtgtatatagtaaaggccgggcgccgcacgcagacacacactcgccaggacacaggcgcacacacgctcacgcacaaccagcagcggcggcggcgacagcgactcggtgacagcggcgacggcggctcccaccgcggcgcacccccttcaggcggccggcggcgaggccagaccggagagttccagcacactcgaccaccccgcggcttcctggaggcggcggccgcgattgcgaggccaagtggcatcagagctgagtgatggacgacctgcagtcccagaacctctccatggacatgactgactcccctcctgccttggctaataacagactggagaatggcatggctcagctgatcaccaccgaggcctggaacatcaactccactgacctggtaaagaaggccctggtgaccgtgccagccccatccattctgaacccccctgccgagtctcagagtggcatggctctgaaggtggcggccactgtgttgcagcccctgtgcctcggggagagcccagtggtgatgcccattcacatgcaggtggagggaagctccgcaccagagctcaatccgaatggcaatgccacctacgtcatgaccacccagggccccgtgcaactgcccgtggtgctggagcagcacgtctttcagcacctcaactcccctctggtcctgccgcaggaggccccatgctcctccagtaccatccacaacaacctcttccagggagcggaggaccccgaggcccagccccagctcctggacctgaggatccccagccagccgcaggagcccactttgccatttgaagctgtgctccagaatttgtttccctcccagggcactctcgggcccccaccctgtcagcctcctcctggctatgcccctgtgcccccacagccttttagctcccccttgtcccccctggtcccaccagccaccctcttggtgccgtatcctgtaatcgtccccttgcctgtgccagtccctattcccatccccatcccgatgcctcagagttctgaatccaagttcagctccagtttccccaagccaccatcttccttcggcctgcacccctttaaaggcacccagacccctctggaaaaagatgaactgaagccctttgacatcctccagcctaaggagtacttccagctcagccgccacacggtcattaagatgggaagtgagaacgaggccctggatctctccatgaagtcagtgccctggctcaaggctggtgaagtcagtcccccaatcttccaggaagatgcagccctagacctgtcagtggcagcccaccggaaatccgagcctccccctgagacactgtatgacagtggtgcatcagtggacagctcaggtcacacagtgatggagaaacttcccagtggcatggaaatttcttttgcccctgccacgtcccatgaggccccagccatgatggatagtcacatcagcagcagtgatgctgctaccgagatgctcagccagcccaaccaccccagcggcgaagtcaaggctgaaaataacattgagatggtgggcgagtcccaggcggccaaggtcattgtctctgtcgaagatgctgtgcctaccatattctgtggcaagatcaaaggcctctcaggggtgtccaccaaaaacttctccttcaaaagagaagactccgtgcttcagggctatgacatcaacagccaaggggaagagtccatgggaaatgcagagccccttaggaaacccatcaaaaaccggagcataaagttaaagaaagtgaactcccaggaaatacacatgctcccaatcaaaaaacaacggctggccaccttttttccaagaaagtaaataacggctttttaaaatttgtatgattataatatggggaaaggtgcattggttttataaaaaggcatttaaaacaaattatctttgttaattattttggggagtagttgggaaatggaaaggtgaattggctctagaggccctgtatgctagtatcattttcttttttaatttttgacttttcacaaatgagtaaataagagcaacctatttttcaagcagattgcacattttttgcagctttaatggaatattgggtgaattagaggggtaaaaaaagctattttcattgccacaaagtgctttgatgatgtaatacctaataaagggtaggatgaatatttcacaataaatgtttgtttgcact

SEQ ID NO: 17317 - DNA, 2421 bp, Homo sapiens
  source 1..2421: mol_type = unassigned DNA
cttggtgtatatagtaaaggccgggcgccgcacgcagacacacactcgccaggacacaggcgcacacacgctcacgcacaaccagcagcggcggcggcgacagcgactcggtgacagcggcgacggcggctcccaccgcggcgcacccccttcaggcggccggcggcgaggccagaccggagagttccagcacactcgaccaccccgcggcttcctggaggcggcggccgcgattgcgagcaggcttcccaggaagaatgaagcagtcaacttgcataaggcctgtcttgacttctctcctttgggggaagaggatcacattaagaagggtggcaggcttgcctggacacagaattccactaccaaacagacatcatttctgagaacttcagagtttatgatccaggtttcccagtgattaaattactccttggaaggccaagtggcatcagagctgagtgatggacgacctgcagtcccagaacctctccatggacatgactgactcccctcctgccttggctaataacagactggagaatggcatggctcagctgatcaccaccgaggcctggaacatcaactccactgacctggtaaagaaggccctggtgaccgtgccagccccatccattctgaacccccctgccgagtctcagagtggcatggctctgaaggtggcggccactgtgttgcagcccctgtgcctcggggagagcccagtggtgatgcccattcacatgcaggtggagggaagctccgcaccagagctcaatccgaatggcaatgccacctacgtcatgaccacccagggccccgtgcaactgcccgtggtgctggagcagcacgtctttcagcacctcaactcccctctggtcctgccgcaggaggccccatgctcctccagtaccatccacaacaacctcttccagggagcggaggaccccgaggcccagccccagctcctggacctgaggatccccagccagccgcaggagcccactttgccatttgaagctgtgctccagaatttgtttccctcccagggcactctcgggcccccaccctgtcagcctcctcctggctatgcccctgtgcccccacagccttttagctcccccttgtcccccctggtcccaccagccaccctcttggtgccgtatcctgtaatcgtccccttgcctgtgccagtccctattcccatccccatcccgatgcctcagagttctgaatccaagttcagctccagtttccccaagccaccatcttccttcggcctgcacccctttaaaggcacccagacccctctggaaaaagatgaactgaagccctttgacatcctccagcctaaggagtacttccagctcagccgccacacggtcattaagatgggaagtgagaacgaggccctggatctctccatgaagtcagtgccctggctcaaggctggtgaagtcagtcccccaatcttccaggaagatgcagccctagacctgtcagtggcagcccaccggaaatccgagcctccccctgagacactgtatgacagtggtgcatcagtggacagctcaggtcacacagtgatggagaaacttcccagtggcatggaaatttcttttgcccctgccacgtcccatgaggccccagccatgatggatagtcacatcagcagcagtgatgctgctaccgagatgctcagccagcccaaccaccccagcggcgaagtcaaggctgaaaataacattgagatggtgggcgagtcccaggcggccaaggtcattgtctctgtcgaagatgctgtgcctaccatattctgtggcaagatcaaaggcctctcaggggtgtccaccaaaaacttctccttcaaaagagaagactccgtgcttcagggctatgacatcaacagccaaggggaagagtccatgggaaatgcagagccccttaggaaacccatcaaaaaccggagcataaagttaaagaaagtgaactcccaggaaatacacatgctcccaatcaaaaaacaacggctggccaccttttttccaagaaagtaaataacggctttttaaaatttgtatgattataatatggggaaaggtgcattggttttataaaaaggcatttaaaacaaattatctttgttaattattttggggagtagttgggaaatggaaaggtgaattggctctagaggccctgtatgctagtatcattttcttttttaatttttgacttttcacaaatgagtaaataagagcaacctatttttcaagcagattgcacattttttgcagctttaatggaatattgggtgaattagaggggtaaaaaaagctattttcattgccacaaagtgctttgatgatgtaatacctaataaagggtaggatgaatatttcacaataaatgtttgtttgcact

SEQ ID NO: 17318 - DNA, 1970 bp, Homo sapiens
  source 1..1970: mol_type = unassigned DNA
gccccgcccgcttggcgcgcgcccccgccaggtccgctctcgtcccccacccctggcgcggacggggtggttccagctcactctcctcccccgagcggcagcggcggcggcggcggcggctgctgcgggcgctgaatgagagacggtgactgttcgggtcgacgagtgctactctaggcggcggcggccgtggcggtgaagcgtgaggccggcatcgtctttccgtcctctgaggcgacggccgcggctgcacaggaataatgtatttgtggccttggacatgaggcagtcagtcctctgttgctgttaacataaggtcagggactgatgaggaaagcatggacctaatgaacgggcaggcaagcagtgtcaatattgcagctactgcttctgagaaaagtagcagctctgaatccttaagtgacaaaggctctgaattgaagaaaagctttgatgctgtggtattcgatgttcttaaggttacaccagaagaatatgcgggtcagataacattaatggatgttccagtatttaaagctattcaaccagatgagctttcaagttgtggatggaataaaaaagaaaaatatagttctgcaccaaatgcagttgccttcacaagaagattcaatcatgtaagcttttgggttgttagagagattcttcatgctcaaacattaaaaattagagcagaagttttgagccactatattaaaactgctaagaaactgtatgagctgaataaccttcatgcacttatggcagtggtttctggcctacagagtgccccaattttcaggttgactaaaacatgggcgttattaagtcgaaaagacaaaactacctttgaaaaattagaatatgtaatgagtaaagaagataactacaaaagactcagagactatataagtagcttaaagatgacaccttgcattccctatttaggtatctatttgtcagatttaacatacatcgattcagcatacccatcaactggcagcattctagaaaatgagcaaagatcaaatttaatgaataatatccttcgaataatttctgatttacagcagtcttgtgaatatgatattcccatgttgcctcatgtccaaaaatatctcaactctgttcagtatatagaagaactacaaaaatttgtggaagacgataattacaagtaggttggatcttcaaaagtggtttgtataactttgtcctgtcctccacctttctatccctatgtatttaaacatctaaatcctacatggtatcatacaaaggactaatccagtggtttacagcagtaaaggtactaacatgtattacttcttaatcacttgttatgattgagccaatatacaaatacctcatctgttctttttaatattttatctctgtttgtagagagctaacgtttgatagttctaatttaaatttcttcctttcccccatattcaatcattgaatccttatagaatttgtcttttaatagacagaaaaattaatgaaactttttaaaatagaaaaattactcttctttaatgctaagtattgacacatcgttgtttgtttttcattgtttttgcggattgagagacttggtccatcttgtctcaggagaagaaacctttctccaatgtagcagaattatcctcttccctgtattatagcaagttctttattaaagatttttgaggccgggcacagtgactcacgcctgtaaccccagcactttgggaggccgaggcgggtggatcacttgaggtcaggagttcaagaccagcctgaccaatatagtgaaacactgtctgtactaaaaatacagaattagccgggcatggtgcatgcctgtaatcccagctgcttgggaggctgaggcaggagaatcacttgaacacaggaggcagaggttgcagtgagccgagagtgcaccattgcactccagcctgggcaaaaagagcaaaactccgtct

SEQ ID NO: 17319 - DNA, 5834 bp, Homo sapiens
  source 1..5834: mol_type = unassigned DNA
gccccgcccgcttggcgcgcgcccccgccaggtccgctctcgtcccccacccctggcgcggacggggtggttccagctcactctcctcccccgagcggcagcggcggcggcggcggcggctgctgcgggcgctgaatgagagacggtgactgttcgggtcgacgagtgctactctaggcggcggcggccgtggcggtgaagcgtgaggccggcatcgtctttccgtcctctgaggcgacggccgcggctgcacaggaataatgtatttgtggccttggacatgaggcagtcagtcctctgttgctgttaacataaggtcagggactgatgaggaaagcatggacctaatgaacgggcaggcaagcagtgtcaatattgcagctactgcttctgagaaaagtagcagctctgaatccttaagtgacaaaggctctgaattgaagaaaagctttgatgctgtggtattcgatgttcttaaggttacaccagaagaatatgcgggtcagataacattaatggatgttccagtatttaaagctattcaaccagatgagctttcaagttgtggatggaataaaaaagaaaaatatagttctgcaccaaatgcagttgccttcacaagaagattcaatcatgtaagcttttgggttgttagagagattcttcatgctcaaacattaaaaattagagcagaagttttgagccactatattaaaactgctaagaaactgtatgagctgaataaccttcatgcacttatggcagtggtttctggcctacagagtgccccaattttcaggttgactaaaacatgggcgttattaagtcgaaaagacaaaactacctttgaaaaattagaatatgtaatgagtaaagaagataactacaaaagactcagagactatataagtagcttaaagatgacaccttgcattccctatttaggtatctatttgtcagatttaacatacatcgattcagcatacccatcaactggcagcattctagaaaatgagcaaagatcaaatttaatgaataatatccttcgaataatttctgatttacagcagtcttgtgaatatgatattcccatgttgcctcatgtccaaaaatatctcaactctgttcagtatatagaagaactacaaaaatttgtggaagacgataattacaagctttcattaaagatagaaccagggacaagcaccccacgttctgctgcttccagagaagatttagtaggtcctgaagtaggagcgtctccacagagtggacgaaaaagtgtggcagctgaaggagccttgctcccacagacaccgccatcccctcggaatctgattccacatggacataggaagtgccatagtttgggttataatttcattcataaaatgaacacagcagaatttaagagtgcaacgtttccaaatgcaggaccaagacatctgttagatgatagcgtcatggagccccatgcgccatctcgaggccaagctgaaagttctactctttctagtggaatatcaataggtagcagcgatggttctgaactaagtgaagagacctcatggcctgcttttgaaaggaacagattataccattctctcggcccggtgacaagagtggcacgaaatggctatcgaagtcacatgaaggccagcagttctgcagaatcagaagatttggcagtacatttatatccaggagctgttactattcaaggtgttctcaggagaaaaactttgttaaaagaaggcaaaaagcctacagtagcatcttggacaaaatattgggcagctttgtgtgggacacagcttttttactatgctgccaaatctctaaaggctaccgaaagaaaacatttcaaatcaacatccaataagaacgtatctgtgataggatggatggtgatgatggctgatgaccctgaacatcctgatctcttcctgctgactgactctgagaaaggaaattcgtacaagtttcaagctggcaatagaatgaatgcaatgttatggtttaagcatttgagtgcagcctgccaaagtaacaaacaacaggttcctacaaacttgatgacttttgagtagaagcctgagaaaaaaagagaggtgaactgttgcttctacgtgagcatgaggacctgataaaagagcgccagctataaaccatcctgtgccaggaagagcccagaggctctgtctcagtcgttggagttctcaaccaaaaaagcactaatttcagggaatgatttgagatattcccagagaacaaattggagttgcaaaacaaactgccatgaaccatgcttcttatctcagaactgacctgtggaaaccactgccttaaaagaatgaaaggaaaaccaacatgaaacaccaaatagtgtgtgtgaatcttctggcggtgctgtgcttggaatagatcgtagctaatttgcatttcttttaactttgtaataattttagaggggggaattgccttttttagatatgctttaaaaaggaaaaacatactcttgtggattccatcaggagctggttttgaaccgaggtgaagagacttagcagggattgtaccagcagcccacctgcaaggtttgttctccctctagtagtctgcaacctcactggctttctcacagcaagagtgtaggaatgagaaatgttagtcatgtgagttcttgggtttgtttgggattgggtgggggtgtttgttttgttttggatgaggggagaatttttttaaacactaaacttctgaaatgtagtactgtaaggggaacattatttcctgcaggaggtacaaaggctgtgtgttcatttgccagacgctttttttttaaataggttccagaaaacatggttgtttctaactagggttaaagtttagctttctatatgaattcattgttggaccacagatctgcttaagtaaagagctataatcccaacctaaacttttctgagattttacaataattagatctttttccaagttaattgggttttcccttctcccagtcataggtggtttttatcatcaagacagactgatattttgtcaggatattttcttttacagtgtttgatgtgcataatgccagagttatttttttattattcattttctctctttttgttcaatatgagattcaggatcatatttgtttaaaaggtaacacatagagatgtatgtatatattttgttataagacatacaaaataattttaagagggataaaggtgaaaatatcagattctggaaattttaagtatctaaactttatacttgtatgatttaccataaacataccaaaacatttttctgaaaatttactgtcggtctctgacatgaaaccgtattttgtcagtagttgaccaagcagttttatgagaactcttctatgcaatgatgcatttaatttctaaagtaaatgttgaattattaaaaaaaaagtttgaaggtaagatgccttagaattttaatgaaaaatgacactcaaacaaaggctatatgtcgaatgttataaactcttgagacataatgaattttagcagtggcctagagtaaggtaatgctttgtgactgatatctactaatagacttctgttactttgggcctcacataaaatttctcacattcgtattcttagagaattttatacttttttattataagtattttgcccttgagtccatgaaacttcaatagaaaatattgcttatacaataattagcttaaaatccatccaaaggaaaagagaagagctttttttgagtgttaagttttttaatttagtattctgtttggaaaagatgttaagagttcaaatatgcttcttatgtaacagaaataccattatttctggggtttagtgacacaggctggagaggacaaaagtttcctgtcctgaatgatttttcaattaatgctctaagcttaacccatgttgggtaatagaaagacatagccagcagtattactacgtagaccttgcacatcttacttttgttttgcatttttaaaaatttcttaatttgtttatttctcttcagaaatagcgtttttaacagtgtatgtgcttttttaaaaagtattgtgaatgagaaccctgtggattttttttatttcatttgtttgtcataataagctaacgtagaaatgttgtaggttaaccatatctgtggaaatatgcagttggaagtcagagcctgacatcacatagttttgccaaagggagagagctaagctggaagatgtttttgatactttcggctctaaacattaatggatgtttgcgtagagtaagatagcgttcaaatttggttaatagtttatagatagacttgtggcctctgactgactaaatttcttaacagcacagaagtcgttgtttttctgtctttaaaatttattcattcagaaaattagtcattgctttttaagattattttagcatttgaagcaaattgaaaacagaaaagtgacttaaaatagtgtaggtgaattttttatctataatttaccaaataatacctgataataattcaaagaaaatatgttaccaaaatatattaaatatataggtagttcattcgtgggaagatgaatcttcttattaagcctgccctcaattgtaaataagtgactcaaaaactcaaaatgttcatcagcattcaggtcatttgtttcacccttagccaagaagaactcattagaaattcagttataatttcaatttaagcctgtttatgataagcataatgattggcatgttatatagcctgttgaaaataactacagaatgaccttccagagcactgtttttggcctcgtgcccgctctgttcaggctctgcttgtttttcagaatatgatttttacctccagacagtaagaattgaacaagaactgatcaaacacaccttcctattttgttttcttcactatgtaaatattatttgggcaaacattacaaaaagggatccaaacaatttgagtttcagtatttttttctccctaggcatgtgcttcaatttcaaatatttttttctgtgtggaaaatgccatgtaactattgcactaccttctgtgtggactgtgttggtattggttctttctgtatatcaaaagtcagggtgtttataactgcaaagtttgtataagtggctttattcctcttctagaagatttatgaggagcctaggaagcactattggtacaggaggaaaaaagaatggaaaacatgtttacagactctagctttccttattagcttaaactggggccctcaaagagcagcctgttgatcttttggccaaatgacttgagcataagtcttttatttctttttaaggttaaatcgtaaactgtatacctttactactgaaaacaaaactatagggcatcatactaattgaaaatcaatagtaatgggttccatccattagctttttaaatgaatagatctggtattgatttccttcctgtttttttgaggcacattcctttacaaccagtgtttaaaccaccacgtaatcatcttctgcaaacaaggggtgccagtgttgcctaacagaagataatctttaataaagcaaatcctctgcttcaaaggtttttgaaataattggatccctttttgaaaaggaagatgagtttaactgtgtccaggtggagtaatagtactgctgttgcatgaatagatgatacaaagcaagtgatgaggttggtatgacttctttagtgaccttttagggtttgcttttattttcctctcttttttgtattatttctttcaaacatagtaaatatatgattttacagccaaa

SEQ ID NO: 17320 - DNA, 906 bp, Homo sapiens
  source 1..906: mol_type = unassigned DNA
gaggcgacggccgcggctgcacaggaataatgtatttgtggccttggacatgaggcagtcagtcctctgttgctgttaacataaggtcagggactgatgaggaaagcatggacctaatgaacgggcaggcaagcagtgtcaatattgcagctactgcttctgagggtcagataacattaatggatgttccagtatttaaagctattcaaccagatgagctttcaagttgtggatggaataaaaaagaaaaatatagttctgcaccaaatgcagttgccttcacaagaagattcaatcatgtaagcttttgggttgttagagagattcttcatgctcaaacattaaaaattagagcagaagttttgagccactatattaaaactgctaagaaactgtatgagctgaataaccttcatgcacttatggcagtggtttctggcctacagagtgccccaattttcaggttgactaaaacatgggcgttattaagtcgaaaagacaaaactacctttgaaaaattagaatatgtaatgagtaaagaagataactacaaaagactcagagactatataagtagcttaaagatgacaccttgcattccctatttaggtatctatttgtcagatttaacatacatcgattcagcatacccatcaactggcagcattctagaaaatgagcaaagatcaaatttaatgaataatatccttcgaataatttctgatttacagcagtcttgtgaatatgatattcccatgttgcctcatgtccaaaaatatctcaactctgttcagtatatagaagaactacaaaaatttgtggaagacgataattacaagctttcattaaagatagaaccagggacaagcaccccacgttctgctgcttccagagaagatttagtag

SEQ ID NO: 17321 - DNA, 671 bp, Homo sapiens
  source 1..671: mol_type = unassigned DNA
catcaactggcagcattctagaaaatgagcaaagatcaaatttaatgaataatatccttcgaataatttctgatttacagcagtcttgtgaatatgatattcccatgttgcctcatgtccaaaaatatctcaactctgttcagtatatagaagaactacaaaaatttgtggaagacgataattacaagctttcattaaagatagaaccagggacaagcaccccacgttctgctgcttccagagaagatttagtaggtcctgaagtaggagcgtctccacagagtggacgaaaaagtgtggcagctgaaggagccttgctcccacagacaccgccatcccctcggaatctgattccacatggacataggaagtgccatagtttgggttataatttcattcataaaatgaacacagcagaatttaagagtgcaacgtttccaaatgcaggaccaagacatctgttagatgatagcgtcatggagccccatgcgccatctcgaggccaagctgaaagttctactctttctagtggaatatcaataggtagcagcgatggttctgaactaagtgaagagacctcatggcctgcttttgaaagttctgcagaatcagaagatttggcagtacatttatatccaggagctgttactattcaaggtgttctcaggaga

SEQ ID NO: 17322 - DNA, 662 bp, Homo sapiens
  source 1..662: mol_type = unassigned DNA
tcagtatatagaagaactacaaaaatttgtggaagacgataattacaagctttcattaaagatagaaccagggacaagcaccccacgttctgctgcttccagagaagatttagtaggtcctgaagtaggagcgtctccacagagtggacgaaaaagtgtggcagctgaaggagccttgctcccacagacaccgccatcccctcggaatctgattccacatggacataggaagtgccatagtttgggttataagtcagcatttttaattttatctttcaaatttttaagtcttttgtaattggatttattgtcgatttattagttcagtagaaaatggtatccttgaatagttttcttttttcttaatagctgttttctgattcagtaaaatgccttgtttgcctaaaagcttttatttcttactttacctgaatttggaaatgggattttgtcaacaatgcatttatatttggggacgataaatgaacattacagagggccatcataaataaaatcaggatagcaatatacctttttaaaagagttacaacctttatatcaagacagtcattgtttgtcttaaccaaaataagtcaaaaataacagctataaaaattattttctttattcctaaatataaagaaaactgactttttgtttaa

SEQ ID NO: 17323 - DNA, 684 bp, Homo sapiens
  source 1..684: mol_type = unassigned DNA
ataaaatgaacacagcagaatttaagagtgcaacgtttccaaatgcaggaccaagacatctgttagatgatagcgtcatggagccccatgcgccatctcgaggccaagctgaaagttctactctttctagtggaatatcaataggtagcagcgatggttctgaactaagtgaagagacctcatggcctgcttttgaaaggaacagattataccattctctcggcccggtgacaagagtggcacgaaatggctatcgaagtcacatgaaggccagcagttctgcagaatcagaagatttggcagtacatttatatccaggagctgttactattcaaggtgttctcaggagaaaaactttgttaaaagaaggcaaaaagcctacagtaagatttcatcatattatattttaatacacctctaaaaatatgcaaatttataagactctgtaaaagtactaaaacaattaaaataaaacctgattatagtagacttgaaataatattaaataaggtcctcccctcttatccttgggtcatccattccaagatcccccggggatgactgaaacctcagatagtaccaaaccaaattaccatcatttggaacatgtttctgttcatgtcttccattcacaaatataataccttttctatcttaactaagcacttaagcccacacagtaac

SEQ ID NO: 17324 - DNA, 438 bp, Homo sapiens
  source 1..438: mol_type = unassigned DNA
gccaagctgaaagttctactctttctagtggaatatcaataggtagcagcgatggttctgaactaagtgaagagacctcatggcctgcttttgaaagttctgcagaatcagaagatttggcagtacatttatatccaggagctgttactattcaaggtgttctcaggagaaaaactttgttaaaagaaggcaaaaagcctacagtagcatcttggacaaaatattgggcagctttgtgtgggacacagcttttttactatgctgccaaatctctaaaggctaccgaaagaaaacatttcaaatcaacatccaataagaacgtatctgtgataggatggatggtgatgatggctgatgaccctgaacatcctgatctcttcctgctgactgactctgagaaaggaaattcgtacaagtttcaagctggcaatagaatga

SEQ ID NO: 17325 - DNA, 524 bp, Homo sapiens
  source 1..524: mol_type = unassigned DNA
ataattacattttatttaagtacctacttgatgactattgtagacaaaagctcttatgtgttcttttcttcgttattatagttctgcagaatcagaagatttggcagtacatttatatccaggagctgttactattcaaggtgttctcaggagaaaaactttgttaaaagaaggcaaaaagcctacagtagcatcttggacaaaatattgggcagctttgtgtgggacacagcttttttactatgctgccaaatctctaaaggctaccgaaagaaaacatttcaaatcaacatccaataagaacgtatctgtgataggatggatggtgatgatggctgatgaccctgaacatcctgatctcttcctgctgactgactctgagaaaggaaattcgtacaagtttcaagctggcaatagaatgaatgcaatgttatggtttaagcatttgagtgcagcctgccaaagtaacaaacaacaggttcctacaaacttgatgacttttgagtagaagcctgagaaaaaaa

SEQ ID NO: 17326 - DNA, 7512 bp, Homo sapiens
  source 1..7512: mol_type = unassigned DNA
gcgcgcgcgcgcggctccgccccgcccgcttggcgcgcgcccccgccaggtccgctctcgtcccccacccctggcgcggacggggtggttccagctcactctcctcccccgagcggcagcggcggcggcggcggcggctgctgcgggcgctgaatgagagacggtgactgttcgggtcgacgagtgctactctaggcggcggcggccgtggcggtgaagcgtgaggccggcatcgtctttccgtcctctgaggcgacggccgcggctgcacaggaataatgtatttgtggccttggacatgaggcagtcagtcctctgttgctgttaacataaggtcagggactgatgaggaaagcatggacctaatgaacgggcaggcaagcagtgtcaatattgcagctactgcttctgagaaaagtagcagctctgaatccttaagtgacaaaggctctgaattgaagaaaagctttgatgctgtggtattcgatgttcttaaggttacaccagaagaatatgcgggtcagataacattaatggatgttccagtatttaaagctattcaaccagatgagctttcaagttgtggatggaataaaaaagaaaaatatagttctgcaccaaatgcagttgccttcacaagaagattcaatcatgtaagcttttgggttgttagagagattcttcatgctcaaacattaaaaattagagcagaagttttgagccactatattaaaactgctaagaaactgtatgagctgaataaccttcatgcacttatggcagtggtttctggcctacagagtgccccaattttcaggttgactaaaacatgggcgttattaagtcgaaaagacaaaactacctttgaaaaattagaatatgtaatgagtaaagaagataactacaaaagactcagagactatataagtagcttaaagatgacaccttgcattccctatttaggtatctatttgtcagatttaacatacatcgattcagcatacccatcaactggcagcattctagaaaatgagcaaagatcaaatttaatgaataatatccttcgaataatttctgatttacagcagtcttgtgaatatgatattcccatgttgcctcatgtccaaaaatatctcaactctgttcagtatatagaagaactacaaaaatttgtggaagacgataattacaagctttcattaaagatagaaccagggacaagcaccccacgttctgctgcttccagagaagatttagtaggtcctgaagtaggagcgtctccacagagtggacgaaaaagtgtggcagctgaaggagccttgctcccacagacaccgccatcccctcggaatctgattccacatggacataggaagtgccatagtttgggttataatttcattcataaaatgaacacagcagaatttaagagtgcaacgtttccaaatgcaggaccaagacatctgttagatgatagcgtcatggagccccatgcgccatctcgaggccaagctgaaagttctactctttctagtggaatatcaataggtagcagcgatggttctgaactaagtgaagagacctcatggcctgcttttgaaagttctgcagaatcagaagatttggcagtacatttatatccaggagctgttactattcaaggtgttctcaggagaaaaactttgttaaaagaaggcaaaaagcctacagtagcatcttggacaaaatattgggcagctttgtgtgggacacagcttttttactatgctgccaaatctctaaaggctaccgaaagaaaacatttcaaatcaacatccaataagaacgtatctgtgataggatggatggtgatgatggctgatgaccctgaacatcctgatctcttcctgctgactgactctgagaaaggaaattcgtacaagtttcaagctggcaatagaatgaatgcaatgttatggtttaagcatttgagtgcagcctgccaaagtaacaaacaacaggttcctacaaacttgatgacttttgagtagaagcctgagaaaaaaagagaggtgaactgttgcttctacgtgagcatgaggacctgataaaagagcgccagctataaaccatcctgtgccaggaagagcccagaggctctgtctcagtcgttggagttctcaaccaaaaaagcactaatttcagggaatgatttgagatattcccagagaacaaattggagttgcaaaacaaactgccatgaaccatgcttcttatctcagaactgacctgtggaaaccactgccttaaaagaatgaaaggaaaaccaacatgaaacaccaaatagtgtgtgtgaatcttctggcggtgctgtgcttggaatagatcgtagctaatttgcatttcttttaactttgtaataattttagaggggggaattgccttttttagatatgctttaaaaaggaaaaacatactcttgtggattccatcaggagctggttttgaaccgaggtgaagagacttagcagggattgtaccagcagcccacctgcaaggtttgttctccctctagtagtctgcaacctcactggctttctcacagcaagagtgtaggaatgagaaatgttagtcatgtgagttcttgggtttgtttgggattgggtgggggtgtttgttttgttttggatgaggggagaatttttttaaacactaaacttctgaaatgtagtactgtaaggggaacattatttcctgcaggaggtacaaaggctgtgtgttcatttgccagacgctttttttttaaataggttccagaaaacatggttgtttctaactagggttaaagtttagctttctatatgaattcattgttggaccacagatctgcttaagtaaagagctataatcccaacctaaacttttctgagattttacaataattagatctttttccaagttaattgggttttcccttctcccagtcataggtggtttttatcatcaagacagactgatattttgtcaggatattttcttttacagtgtttgatgtgcataatgccagagttatttttttattattcattttctctctttttgttcaatatgagattcaggatcatatttgtttaaaaggtaacacatagagatgtatgtatatattttgttataagacatacaaaataattttaagagggataaaggtgaaaatatcagattctggaaattttaagtatctaaactttatacttgtatgatttaccataaacataccaaaacatttttctgaaaatttactgtcggtctctgacatgaaaccgtattttgtcagtagttgaccaagcagttttatgagaactcttctatgcaatgatgcatttaatttctaaagtaaatgttgaattattaaaaaaaaagtttgaaggtaagatgccttagaattttaatgaaaaatgacactcaaacaaaggctatatgtcgaatgttataaactcttgagacataatgaattttagcagtggcctagagtaaggtaatgctttgtgactgatatctactaatagacttctgttactttgggcctcacataaaatttctcacattcgtattcttagagaattttatacttttttattataagtattttgcccttgagtccatgaaacttcaatagaaaatattgcttatacaataattagcttaaaatccatccaaaggaaaagagaagagctttttttgagtgttaagttttttaatttagtattctgtttggaaaagatgttaagagttcaaatatgcttcttatgtaacagaaataccattatttctggggtttagtgacacaggctggagaggacaaaagtttcctgtcctgaatgatttttcaattaatgctctaagcttaacccatgttgggtaatagaaagacatagccagcagtattactacgtagaccttgcacatcttacttttgttttgcatttttaaaaatttcttaatttgtttatttctcttcagaaatagcgtttttaacagtgtatgtgcttttttaaaaagtattgtgaatgagaaccctgtggattttttttatttcatttgtttgtcataataagctaacgtagaaatgttgtaggttaaccatatctgtggaaatatgcagttggaagtcagagcctgacatcacatagttttgccaaagggagagagctaagctggaagatgtttttgatactttcggctctaaacattaatggatgtttgcgtagagtaagatagcgttcaaatttggttaatagtttatagatagacttgtggcctctgactgactaaatttcttaacagcacagaagtcgttgtttttctgtctttaaaatttattcattcagaaaattagtcattgctttttaagattattttagcatttgaagcaaattgaaaacagaaaagtgacttaaaatagtgtaggtgaattttttatctataatttaccaaataatacctgataataattcaaagaaaatatgttaccaaaatatattaaatatataggtagttcattcgtgggaagatgaatcttcttattaagcctgccctcaattgtaaataagtgactcaaaaactcaaaatgttcatcagcattcaggtcatttgtttcacccttagccaagaagaactcattagaaattcagttataatttcaatttaagcctgtttatgataagcataatgattggcatgttatatagcctgttgaaaataactacagaatgaccttccagagcactgtttttggcctcgtgcccgctctgttcaggctctgcttgtttttcagaatatgatttttacctccagacagtaagaattgaacaagaactgatcaaacacaccttcctattttgttttcttcactatgtaaatattatttgggcaaacattacaaaaagggatccaaacaatttgagtttcagtatttttttctccctaggcatgtgcttcaatttcaaatatttttttctgtgtggaaaatgccatgtaactattgcactaccttctgtgtggactgtgttggtattggttctttctgtatatcaaaagtcagggtgtttataactgcaaagtttgtataagtggctttattcctcttctagaagatttatgaggagcctaggaagcactattggtacaggaggaaaaaagaatggaaaacatgtttacagactctagctttccttattagcttaaactggggccctcaaagagcagcctgttgatcttttggccaaatgacttgagcataagtcttttatttctttttaaggttaaatcgtaaactgtatacctttactactgaaaacaaaactatagggcatcatactaattgaaaatcaatagtaatgggttccatccattagctttttaaatgaatagatctggtattgatttccttcctgtttttttgaggcacattcctttacaaccagtgtttaaaccaccacgtaatcatcttctgcaaacaaggggtgccagtgttgcctaacagaagataatctttaataaagcaaatcctctgcttcaaaggtttttgaaataattggatccctttttgaaaaggaagatgagtttaactgtgtccaggtggagtaatagtactgctgttgcatgaatagatgatacaaagcaagtgatgaggttggtatgacttctttagtgaccttttagggtttgcttttattttcctctcttttttgtattatttctttcaaacatagtaaatatatgattttacagccaaagtggtattctgttttttctaagctttgagatacaaatattgctatttaatcacattgatgatgaattactttccatgtgaaccttctcaaaatgatttaagtacctttgattttgctcccctaaaaatggcttgtgtctaaagtgacatttttttccctatttggagggttctaatgaaagagatccaggcataaaaactcttttgcttattgaaagcaatttgattacacctatgtttcaggttatagtggggagaaaatttggtcagtgccttattatttgaagagcaattttagggcatcaagtatgacaataatcatgtgccctcttgctcctcttatttcaggagtgtgtgctatccctctctccaccagcttaatctttctcaccccaagtctaacaaagtctttacagaaacctctgtaggtgattgttgcagtcttccttggtttttgagtctttttaaacaagctcctaccctgcttctatccttttagagtaggagattaaaaataaacccaccccagtcaacctttagataagcactcttaaaaacaaatttgaagagcactcttcagccaagttcatttttattttgttgttgatgttttgagcatacatttaattgtaaggccttttggaaaagccctaaaagaataagatacaaccagaaatatttgagttttgttaaatgtactgaaatcttgtaatgaaaatccctttggccagaaatgagatttatttccatttatttttacatttaagtaacactcaaaacaaacaagtagtcacttaacctgccagttattattttcttgaaaatatacaagaaagtaaaaatatctctaatatataagttaaaggaaagttaagagactaagctagttttttcagtgaaagcaaagttggaaatattttgcttctctcagattattggaagacctagagctactggatgttaacctgaatcaagatgttcttttcacatttttttaaagggctagtatgttccagagtaggcaagtagtcattcaagccaaatgaaagagttaactggtccttgaggagtgttagcaaaatttaaattttgaccctggccatttgtactacagaagtgattatgggattaaaagaatacataattacagtgttttgggattgggctcttttttttcttaatagaaaagcagaaacttcataaataatagctgtgctttagataccagataacaaatattgtttcccctgaagatatgacctactagaactactcacatatatagtccaataattactgacttaataggtatggtaaaatagctgataataagtcagactctcaagagtttctgtaccttgattattgacaaattcattgttttacatcctactaaagaacatgtgtgtggggagggggtggggaactggttcacaacataatctgaaggagatcaaacatctgtaaggacaggtacccagtgatgataatatatctgaaaacacaagccatttttattctttatcccaattaacttgaggtactctaatgatgaagcactcgattgcactatgacctccttgagtgatgtgcagcttggttcctctctcactttttgtttctttttaatatgcaaatgtgagtgtgcgatcttcagtgtgtctgcataagctaacttaagatgaatttaagtacagttttctgaaatatttctattgaaataaattacttaaaattat

SEQ ID NO: 17327 - DNA, 595 bp, Homo sapiens
  source 1..595: mol_type = unassigned DNA
agatctagggaggagggaacagcagaggcaaaggcagcttgggagggatgggaaatggaaaatcagggaaacaaacaaacaaacaaacaaaatgaatgagtgaatgtgggcttgaatagtaaaacttccagagagaagacgatgggatctctccccaggtaactacctgtagatgaaaaatagatgaaatacacaaggaagtggcaagcaacaactttgagtggaaggtttttctggaaaaaaaaaaatgaagtgcggtttggtttccttgtcaacggaggatgaagtgaacagctgagcagctcgcagagagcaggattaaagcaaggagagccaatcatgactggcaaaacacagaccagcaacgtcaccaataagaatgaccccaagtccatcaactcccgtgttttcatcggcaatctaaatacggcaattgtcaagaaagttgacattgaagccattttttcaaagtatggaaaaatagttggatgttccgttcacaaaggttatgcatttgtacagtacatgagtgagcgacatgcaagagctgcagtggctggagaaaatgccagagtcatcgccggccaaccacttg

SEQ ID NO: 17328 - DNA, 2168 bp, Homo sapiens
  source 1..2168: mol_type = unassigned DNA
tgggctcacagcgaaggcagcctcgccgcgagctgccgctgccgctgctgccgccactggtgttgccgctctcaggcgccaggctccccgtcgccgccgccgccgcctcgccagccagagttgggctccgtgggcttcccccctcgcagcctcggtccttccccgctgcctgcaagtcagcctggctccgagtcacgtgtcagtgcctgaggcagagactgcgagaaaaaaacgcgcttcattccttcttccaccgccatactgtattttatactaaatctcatttttattccaacattttactcccgctcgatatagcccttggcgaggtgcctggctccatagattaaagcaaggagagccaatcatgactggcaaaacacagaccagcaacgtcaccaataagaatgaccccaagtccatcaactcccgtgttttcatcggcaatctaaatacggcaattgtcaagaaagttgacattgaagccattttttcaaagtatggaaaaatagttggatgttccgttcacaaaggttatgcatttgtacagtacatgagtgagcgacatgcaagagctgcagtggctggagaaaatgccagagtcatcgccggccaaccacttgatatcaacatggcaggagagcccaaaccatacagaccaaaacctggaaacaagaggcccctttctgcactttacagacttgaatcaaaggaacctttcctgtctgttggcggttatgtctttgactatgattactacagagatgatttctacaatcggttatttgattaccacgggcgtgtgcctccacctccccgtgcagtaattccgctgaagcgtcccagagtggcagtcacaacgactcgcagggggaaaggagtcttttccatgaaaggtggatcgagatctactgccagtgggtcaacaggttctaaattgaaatcagatgagttacagaccatcaagaaagaattaacccagatcaaaactaaaattgactccttgctagggcgcctggagaagattgagaaacagcagaaggcggaggcagaagctcagaagaagcaattggaagagagtctagtgctgatccaagaggaatgtgtgtcagagattgcagatcactctacagaggagcctgctgaaggagggccagatgccgatggagaagagatgacagatgggatagaggaggacttcgatgaagatgggggtcatgagctgtttctacagataaagtgatctgaaataacgcatgatgccacaaagcagaaaagagaaactgtgacaacccccagaaatgtgaaaggaggtttcttactggacagcagcatctttggttcaatttatataaaaacccaaataaataaaatggacagtattgctcagttttagaaattccatttcttctatgttttaagctgtacaattgtcaggtttttatggtttaaattgtaaatgtgttttcccctttgctaattatgttttttttttcagtcttaaaatgtgaaaggcatttatgaatggtaagggaaacactatatacaaatgtatatttgtaaaagctatttttatgattagcatgtttcactgttgatcatatataaagtcaggtgatattgcaattctgtatttaaagcttatttccaacaatgtcatgtaagaaaagatgcatcttatgctagtttttataatttatttataatttatagtttaaagtacttcagatcataatgataaaatacttgaaaaagttatatttctgccctgtataagcaccctttttattaataaagaatgcagatatttcagatgtgatataatagttaaagaactgttggtttgatctgtgattaagttgagcatgctccgctctactgaactaaatgatccaattattacttcagtctgggtatgagattccatggacaagtaaggactagattgccaaggaaaagactgtcttgcccttggatccaaaagtttaaattagtgcatacatcatgtcatttcacctcctgttcctaggaactctccattcccaagcattgccagtgttttccagataatcttagctgttgtcttgtgctgtggaaatggaagaaaccatcttcacagaccgtaggagaattcaacatataatttcttaataaatactgtttctttt

SEQ ID NO: 17329 - DNA, 1924 bp, Homo sapiens
  source 1..1924: mol_type = unassigned DNA
acagcgaaggcagcctcgccgcgagctgccgctgccgctgctgccgccactggtgttgccgctctcaggcgccaggctccccgtcgccgccgccgccgcctcgccagccagagttgggctccgtgggcttcccccctcgcagcctcggtccttccccgctgcctgcaagtcagcctggctccgagtcacgtgtcagtgcctgaggcagagactgcgagaaaaaaacgcgcttcattccttcttccaccgccatactgtattttatactaaatctcatttttattccaacattttactcccgctcggattaaagcaaggagagccaatcatgactggcaaaacacagaccagcaacgtcaccaataagaatgaccccaagtccatcaactcccgtgttttcatcggcaatctaaatacggcaattgtcaagaaagttgacattgaagccattttttcaaagtatggaaaaatagttggatgttccgttcacaaaggttatgcatttgtacagtacatgagtgagcgacatgcaagagctgcagtggctggagaaaatgccagagtcatcgccggccaaccacttgatatcaacatggcaggagagcccaaaccatacagaccaaaacctggaaacaagaggcccctttctgcactttacagacttgaatcaaaggaacctttcctgtctgttggcggttatgtctttgactatgattactacagagatgatttctacaatcggttatttgattaccacgggcgtgtgcctccacctccccgtgcagtaattccgctgaagcgtcccagagtggcagtcacaacgactcgcagggggaaaggagtcttttccatgaaaggtggatcgagatctactgccagtgggtcaacaggttctaaattgaaatcagatgagttacagaccatcaagaaagaattaacccagatcaaaactaaaattgactccttgctagggcgcctggagaagattgagaaacagcagaaggcggaggcagaagctcagaagaagcaattggaagagagtctagtgctgatccaagaggaatgtgtgtcagagattgcagatcactctacagaggagcctgctgaaggagggccagatgccgatggagaagagatgacagatgggatagaggaggacttcgatgaagatgggggtcatgagctgtttctacagataaagtgatctgaaataacgcatgatgccacaaagcagaaaagagaaactgtgacaacccccagaaatgtgaaaggaggtttcttactggacagcagcatctttggttcaatttatataaaaacccaaataaataaaatggacagtattgctcagttttagaaattccatttcttctatgttttaagctgtacaattgtcaggtttttatggtttaaattgtaaatgtgttttcccctttgctaattatgttttttttttcagtcttaaaatgtgaaaggcatttatgaatggtaagggaaacactatatacaaatgtatatttgtaaaagctatttttatgattagcatgtttcactgttgatcatatataaagtcaggtgatattgcaattctgtatttaaagcttatttccaacaatgtcatgtaagaaaagatgcatcttatgctagtttttataatttatttataatttatagtttaaagtacttcagatcataatgataaaatacttgaaaaagttatatttctgccctgtataagcaccctttttattaataaagaatgcagatatttcagatgtgatataatagttaaagaactgttggtttgatctgtgattaagttgagcatgctccgctctactgaactaaatgatccaattattacttcagtctgggtatgagattccatggacaagtaaggactagattgccaaggaaaagactg

SEQ ID NO: 17330 - DNA, 2701 bp, Homo sapiens
  source 1..2701: mol_type = unassigned DNA
cgccaggctccccgtcgccgccgccgccgcctcgccagccagagttgggctccgtgggcttcccccctcgcagcctcggtccttccccgctgcctgcaagtcagcctggctccgagtcacgtgtcagtgcctgaggcagagactgcgagaaaaaaacgcgcttcattccttcttccaccgccatactgtattttatactaaatctcatttttattccaacattttactcccgctcggtgagtaccttctcagtggcattcttgtcctattcttttttttgtccttttttttggttttttgttttttttgtttttgttttttttctttttttccacttctttgattattgtttatatttgggaaagctggaggagcatggttttgagccttttcctgaatccaagtttttctagcatgcgatcgttctgtagacaaggcgctgtgtctcggagtccgcggcgaccgtgcccgctgggagcgtctcccaagtccagcaaaatgtgcaactggttttatggaaaaagcgatgtgaagtatggtgcctatttttttcctttgtaaaaataaaaagcatgtttctaactctttttttgcatactctttttctgataacatttttgtataggtgggattttacggcagtgtttacaagtttgtggtcttgcaatactggtgcaaaccactgagcaaagacattaattttatattttttgtgccctttttggaagccggtgaaaacaaattcgttttttttccctcctgtttttgatacccattgataacatgaaacttttcttacagctggtgattgggatcatttttaagcaaaatacttttttcctcctttaaattaactatgacttttgcacatttgacttttttaaaaaaccgagataattttatgatagatatcctgatatctatatctatattgtcccttatttctcccccttccctccccgtaaatcaattttcaaatgatggcagtggaaggtttttctggaaaaaaaaaaatgaagtgcggtttggtttccttgtcaacggaggatgaagtgaacagctgagcagctcgcagagagcaggattaaagcaaggagagccaatcatgactggcaaaacacagaccagcaacgtcaccaataagaatgaccccaagtccatcaactcccgtgttttcatcggcaatctaaatacggcaattgtcaagaaagttgacattgaagccattttttcaaagtatggaaaaatagttggatgttccgttcacaaaggttatgcatttgtacagtacatgagtgagcgacatgcaagagctgcagtggctggagaaaatgccagagtcatcgccggccaaccacttgatatcaacatggcaggagagcccaaaccatacagaccaaaacctggaaacaagaggcccctttctgcactttacagacttgaatcaaaggaacctttcctgtctgttggcggttatgtctttgactatgattactacagagatgatttctacaatcggttatttgattaccacgggcgtgtgcctccacctccccgtgcagtaattccgctgaagcgtcccagagtggcagtcacaacgactcgcagggggaaaggagtcttttccatgaaaggtggatcgagatctactgccagtgggtcaacaggttctaaattgaaatcagatgagttacagaccatcaagaaagaattaacccagatcaaaactaaaattgactccttgctagggcgcctggagaagattgagaaacagcagaaggcggaggcagaagctcagaagaagcaattggaagagagtctagtgctgatccaagaggaatgtgtgtcagagattgcagatcactctacagaggagcctgctgaaggagggccagatgccgatggagaagagatgacagatgggatagaggaggacttcgatgaagatgggggtcatgagctgtttctacagataaagtgatctgaaataacgcatgatgccacaaagcagaaaagagaaactgtgacaacccccagaaatgtgaaaggaggtttcttactggacagcagcatctttggttcaatttatataaaaacccaaataaataaaatggacagtattgctcagttttagaaattccatttcttctatgttttaagctgtacaattgtcaggtttttatggtttaaattgtaaatgtgttttcccctttgctaattatgttttttttttcagtcttaaaatgtgaaaggcatttatgaatggtaagggaaacactatatacaaatgtatatttgtaaaagctatttttatgattagcatgtttcactgttgatcatatataaagtcaggtgatattgcaattctgtatttaaagcttatttccaacaatgtcatgtaagaaaagatgcatcttatgctagtttttataatttatttataatttatagtttaaagtacttcagatcataatgataaaatacttgaaaaagttatatttctgccctgtataagcaccctttttattaataaagaatgcagatatttcagatgtgatataatagttaaagaactgttggtttgatctgtgattaagttgagcatgctccgctctactgaactaaatgatccaattattacttcagtctgggtatgagattccatggacaagtaaggactagattgccaaggaaaagactg

SEQ ID NO: 17331 - DNA, 2682 bp, Homo sapiens
  source 1..2682: mol_type = unassigned DNA
tttatactaaatctcatttttattccaacattttactcccgctcggtgagtaccttctcagtggcattcttgtcctattcttttttttgtccttttttttggttttttgttttttttgtttttgttttttttctttttttccacttctttgattattgtttatatttgggaaagctggaggagcatggttttgagccttttcctgaatccaagtttttctagcatgcgatcgttctgtagacaaggcgctgtgtctcggagtccgcggcgaccgtgcccgctgggagcgtctcccaagtccagcaaaatgtgcaactggttttatggaaaaagcgatgtgaagtatggtgcctatttttttcctttgtaaaaataaaaagcatgtttctaactctttttttgcatactctttttctgataacatttttgtataggtgggattttacggcagtgtttacaagtttgtggtcttgcaatactggtgcaaaccactgagcaaagacattaattttatattttttgtgccctttttggaagccggtgaaaacaaattcgttttttttccctcctgtttttgatacccattgataacatgaaacttttcttacagctggtgattgggatcatttttaagcaaaatacttttttcctcctttaaattaactatgacttttgcacatttgacttttttaaaaaaccgagataattttatgatagatatcctgatatctatatctatattgtcccttatttctcccccttccctccccgtaaatcaattttcaaatgatggcagtggaaggtttttctggaaaaaaaaaaatgaagtgcggtttggtttccttgtcaacggaggatgaagtgaacagctgagcagctcgcagagagcaggattaaagcaaggagagccaatcatgactggcaaaacacagaccagcaacgtcaccaataagaatgaccccaagtccatcaactcccgtgttttcatcggcaatctaaatacggcaattgtcaagaaagttgacattgaagccattttttcaaagtatggaaaaatagttggatgttccgttcacaaaggttatgcatttgtacagtacatgagtgagcgacatgcaagagctgcagtggctggagaaaatgccagagtcatcgccggccaaccacttgatatcaacatggcaggagagcccaaaccatacagaccaaaacctggaaacaagaggcccctttctgcactttacagcggttatgtctttgactatgattactacagagatgatttctacaatcggttatttgattaccacgggcgtgtgcctccacctccccgtgcagtaattccgctgaagcgtcccagagtggcagtcacaacgactcgcagggggaaaggagtcttttccatgaaaggtggatcgagatctactgccagtgggtcaacaggttctaaattgaaatcagatgagttacagaccatcaagaaagaattaacccagatcaaaactaaaattgactccttgctagggcgcctggagaagattgagaaacagcagaaggcggaggcagaagctcagaagaagcaattggaagagagtctagtgctgatccaagaggaatgtgtgtcagagattgcagatcactctacagaggagcctgctgaaggagggccagatgccgatggagaagagatgacagatgggatagaggaggacttcgatgaagatgggggtcatgagctgtttctacagataaagtgatctgaaataacgcatgatgccacaaagcagaaaagagaaactgtgacaacccccagaaatgtgaaaggaggtttcttactggacagcagcatctttggttcaatttatataaaaacccaaataaataaaatggacagtattgctcagttttagaaattccatttcttctatgttttaagctgtacaattgtcaggtttttatggtttaaattgtaaatgtgttttcccctttgctaattatgttttttttttcagtcttaaaatgtgaaaggcatttatgaatggtaagggaaacactatatacaaatgtatatttgtaaaagctatttttatgattagcatgtttcactgttgatcatatataaagtcaggtgatattgcaattctgtatttaaagcttatttccaacaatgtcatgtaagaaaagatgcatcttatgctagtttttataatttatttataatttatagtttaaagtacttcagatcataatgataaaatacttgaaaaagttatatttctgccctgtataagcaccctttttattaataaagaatgcagatatttcagatgtgatataatagttaaagaactgttggtttgatctgtgattaagttgagcatgctccgctctactgaactaaatgatccaattattacttcagtctgggtatgagattccatggacaagtaaggactagattgccaaggaaaagactgtcttgcccttggatccaaaagtttaaattagtgcatacatcatgtcatttcacctcctgttcctaggaactctccattcccaagcattgccagtgttttccagataatcttagctgttgtcttgtgctgtggaaatggaagaaaccatcttcacagaccgtaggagaattcaacatataatttcttaataaatactgtttctttt

SEQ ID NO: 17332 - DNA, 571 bp, Homo sapiens
  source 1..571: mol_type = unassigned DNA
aaaaaaccgagataattttatgatagatatcctgatatctatatctatattgtcccttatttctcccccttccctccccgtaaatcaattttcaaatgatggcagtggaaggtttttctggaaaaaaaaaaatgaagtgcggtttggtttccttgtcaacggaggatgaagtgaacagctgagcagctcgcagagagcagatatagcccttggcgaggtgcctggctccatagattaaagcaaggagagccaatcatgactggcaaaacacagaccagcaacgtcaccaataagaatgaccccaagtccatcaactcccgtgttttcatcggcaatctaaatacggcaattgtcaagaaagttgacattgaagccattttttcaaagtatggaaaaatagttggatgttccgttcacaaaggttatgcatttgtacagtacatgagtgagcgacatgcaagagctgcagtggctggagaaaatgccagagtcatcgccggccaaccacttgatatcaacatggcaggagagcccaaaccatacagaccaaaacctggaaacaagaggcccc

SEQ ID NO: 17333 - DNA, 1972 bp, Homo sapiens
  source 1..1972: mol_type = unassigned DNA
ggcagagaccgcatattccggaggggctggctccaggccacgcgagccggagctggagacatttccagagccttgaggatggcaccggccctcgcacgctcaactcctgctcctcctcttcgcaatgagtaaacgacgcagattaaagcaaggagagccaatcatgactggcaaaacacagaccagcaacgtcaccaataagaatgaccccaagtccatcaactcccgtgttttcatcggcaatctaaatacggcaattgtcaagaaagttgacattgaagccattttttcaaagtatggaaaaatagttggatgttccgttcacaaaggttatgcatttgtacagtacatgagtgagcgacatgcaagagctgcagtggctggagaaaatgccagagtcatcgccggccaaccacttgatatcaacatggcaggagagcccaaaccatacagaccaaaacctggaaacaagaggcccctttctgcactttacagacttgaatcaaaggaacctttcctgtctgttggcggttatgtctttgactatgattactacagagatgatttctacaatcggttatttgattaccacgggcgtgtgcctccacctccccgtgcagtaattccgctgaagcgtcccagagtggcagtcacaacgactcgcagggggaaaggagtcttttccatgaaaggtggatcgagatctactgccagtgggtcaacaggttctaaattgaaatcagatgagttacagaccatcaagaaagaattaacccagatcaaaactaaaattgactccttgctagggcgcctggagaagattgagaaacagcagaaggcggaggcagaagctcagaagaagcaattggaagagagtctagtgctgatccaagaggaatgtgtgtcagagattgcagatcactctacagaggagcctgctgaaggagggccagatgccgatggagaagagatgacagatgggatagaggaggacttcgatgaagatgggggtcatgagctgtttctacagataaagtgatctgaaataacgcatgatgccacaaagcagaaaagagaaactgtgacaacccccagaaatgtgaaaggaggtttcttactggacagcagcatctttggttcaatttatataaaaacccaaataaataaaatggacagtattgctcagttttagaaattccatttcttctatgttttaagctgtacaattgtcaggtttttatggtttaaattgtaaatgtgttttcccctttgctaattatgttttttttttcagtcttaaaatgtgaaaggcatttatgaatggtaagggaaacactatatacaaatgtatatttgtaaaagctatttttatgattagcatgtttcactgttgatcatatataaagtcaggtgatattgcaattctgtatttaaagcttatttccaacaatgtcatgtaagaaaagatgcatcttatgctagtttttataatttatttataatttatagtttaaagtacttcagatcataatgataaaatacttgaaaaagttatatttctgccctgtataagcaccctttttattaataaagaatgcagatatttcagatgtgatataatagttaaagaactgttggtttgatctgtgattaagttgagcatgctccgctctactgaactaaatgatccaattattacttcagtctgggtatgagattccatggacaagtaaggactagattgccaaggaaaagactgtcttgcccttggatccaaaagtttaaattagtgcatacatcatgtcatttcacctcctgttcctaggaactctccattcccaagcattgccagtgttttccagataatcttagctgttgtcttgtgctgtggaaatggaagaaaccatcttcacagaccgtaggagaattcaacatataatttcttaataaatactgtttcttttaaaacaaa

SEQ ID NO: 17334 - DNA, 459 bp, Homo sapiens
  source 1..459: mol_type = unassigned DNA
agagccttgaggatggcaccggccctcgcacgctcaactcctgctcctcctcttcgcaatgagtaaacgacgcagtaggtcctacccagcctattttgctttaccaaagggctttgctttcttagggatgctgtctttggatcttttttttccctgttgtgttgcgttggttttaagtgcctgctggtgtcgtcttccaggggatggggaaatagtttcttataagatgatcacttgggtttaatgttgaggacgacgctgttagtttgcagtaatgaccctacacctctaaggattaaagcaaggagagccaatcatgactggcaaaacacagaccagcaacgtcaccaataagaatgaccccaagtccatcaactcccgtgttttcatcggcaatctaaatacggcaattgtcaagaaagttgacattgaagccattttttcaaagtatggaaaaat

SEQ ID NO: 17335 - DNA, 1684 bp, Homo sapiens
  source 1..1684: mol_type = unassigned DNA
agtgagcaacagtcttactgcaaagcaggagcacaacccgtctctttgtctccgtggtcaaatcaattacttcttagaaagtctaatttttttcaaaatgaccatgtacaagagcaaacgcagacatcagagatatatcaacatggcaggagagcccaaaccatacagaccaaaacctggaaacaagaggcccctttctgcactttacagacttgaatcaaaggaacctttcctgtctgttggcggttatgtctttgactatgattactacagagatgatttctacaatcggttatttgattaccacgggcgtgtgcctccacctccccgtgcagtaattccgctgaagcgtcccagagtggcagtcacaacgactcgcagggggaaaggagtcttttccatgaaaggtggatcgagatctactgccagtgggtcaacaggttctaaattgaaatcagatgagttacagaccatcaagaaagaattaacccagatcaaaactaaaattgactccttgctagggcgcctggagaagattgagaaacagcagaaggcggaggcagaagctcagaagaagcaattggaagagagtctagtgctgatccaagaggaatgtgtgtcagagattgcagatcactctacagaggagcctgctgaaggagggccagatgccgatggagaagagatgacagatgggatagaggaggacttcgatgaagatgggggtcatgagctgtttctacagataaagtgatctgaaataacgcatgatgccacaaagcagaaaagagaaactgtgacaacccccagaaatgtgaaaggaggtttcttactggacagcagcatctttggttcaatttatataaaaacccaaataaataaaatggacagtattgctcagttttagaaattccatttcttctatgttttaagctgtacaattgtcaggtttttatggtttaaattgtaaatgtgttttcccctttgctaattatgttttttttttcagtcttaaaatgtgaaaggcatttatgaatggtaagggaaacactatatacaaatgtatatttgtaaaagctatttttatgattagcatgtttcactgttgatcatatataaagtcaggtgatattgcaattctgtatttaaagcttatttccaacaatgtcatgtaagaaaagatgcatcttatgctagtttttataatttatttataatttatagtttaaagtacttcagatcataatgataaaatacttgaaaaagttatatttctgccctgtataagcaccctttttattaataaagaatgcagatatttcagatgtgatataatagttaaagaactgttggtttgatctgtgattaagttgagcatgctccgctctactgaactaaatgatccaattattacttcagtctgggtatgagattccatggacaagtaaggactagattgccaaggaaaagactgtcttgcccttggatccaaaagtttaaattagtgcatacatcatgtcatttcacctcctgttcctaggaactctccattcccaagcattgccagtgttttccagataatcttagctgttgtcttgtgctgtggaaatggaagaaaccatcttcacagaccgtaggagaattcaacatataatttcttaataaatactgtttcttttaaaac

SEQ ID NO: 17336 - DNA, 1457 bp, Homo sapiens
  source 1..1457: mol_type = unassigned DNA
cagtcttactgcaaagcaggagcacaacccgtctctttgtctccgtggtcaaatcaattacttcttagaaagtctaatttttttcaaaatgaccatgtacaagagcaaacgcagacatcagagatatatcaacatggcaggagagcccaaaccatacagaccaaaacctggaaacaagaggcccctttctgcactttacagacttgaatcaaaggaacctttcctgtctgttgggttatttgattaccacgggcgtgtgcctccacctccccgtgcagtaattccgctgaagcgtcccagagtggcagtcacaacgactcgcagggggaaaggagtcttttccatgaaaggtggatcgagatctactgccagtgggtcaacaggttctaaattgaaatcagatgagttacagaccatcaagaaagaattaacccagatcaaaactaaaattgactccttgctagggcgcctggagaagattgagaaacagcagaaggcggaggcagtttctacagataaagtgatctgaaataacgcatgatgccacaaagcagaaaagagaaactgtgacaacccccagaaatgtgaaaggaggtttcttactggacagcagcatctttggttcaatttatataaaaacccaaataaataaaatggacagtattgctcagttttagaaattccatttcttctatgttttaagctgtacaattgtcaggtttttatggtttaaattgtaaatgtgttttcccctttgctaattatgttttttttttcagtcttaaaatgtgaaaggcatttatgaatggtaagggaaacactatatacaaatgtatatttgtaaaagctatttttatgattagcatgtttcactgttgatcatatataaagtcaggtgatattgcaattctgtatttaaagcttatttccaacaatgtcatgtaagaaaagatgcatcttatgctagtttttataatttatttataatttatagtttaaagtacttcagatcataatgataaaatacttgaaaaagttatatttctgccctgtataagcaccctttttattaataaagaatgcagatatttcagatgtgatataatagttaaagaactgttggtttgatctgtgattaagttgagcatgctccgctctactgaactaaatgatccaattattacttcagtctgggtatgagattccatggacaagtaaggactagattgccaaggaaaagactgtcttgcccttggatccaaaagtttaaattagtgcatacatcatgtcatttcacctcctgttcctaggaactctccattcccaagcattgccagtgttttccagataatcttagctgttgtcttgtgctgtggaaatggaagaaaccatcttcacagaccgtaggagaattcaacatataatttcttaataaatactgtttcttttaaaacaaa

SEQ ID NO: 17337 - DNA, 1505 bp, Homo sapiens
  source 1..1505: mol_type = unassigned DNA
tttttcccttataaaataattactgtagtcaatagtaggctatttattgttgtttttaacatccatacttggcaaaatgaaaaattgtcatcttatgttagtccccagttgttttctttgaaactgtactaaactctaaaaatctagaatgggaactactactattgaaattatcagtgagaacttctgtgattttcctttccatcaagcccagggcttagagggaggcatgtacaactcactgccttagttttatttaggaaaactgaagcttcatagcagctttgagtgagctggaaagagttttctcacatctaagacattttctttaaaggataaattgtatatcctggtttccatcaatcttcaaggagctggattaaaatatcattgactgctgaaatacatattacaacatagttcctcaaagtagtatctggcatgatttaattattgcttcatctgaatccctctcacattgaagatttactctattttgtaaaatttagcatcattgggttattttaaaaaatatttcttaattccgttatccatttccataaccttcagtcaaaagatttaggattaaacgctcatgtcactgagaatccgtatttgtaattggcaaaatcatccagtattccaggatcactagaagtaatgtgaagttgataaaattgaaaaatgtcctatgtgatttgacacagacttgagaaaatacggggtccctgtgagttcggtcctaggtgagttatggtgcatttgatgctctgttgttttcttccttctttctactttccagtgaaatcagatgagttacagaccatcaagaaagaattaacccagatcaaaactaaaattgactccttgctagggcgcctggagaagattgagaaacagcagaaggcggaggcagtttctacagataaagtgatctgaaataacgcatgatgccacaaagcagaaaagagaaactgtgacaacccccagaaatgtgaaaggaggtttcttactggacagcagcatctttggttcaatttatataaaaacccaaataaataaaatggacagtattgctcagttttagaaattccatttcttctatgttttaagctgtacaattgtcaggtttttatggtttaaattgtaaatgtgttttcccctttgctaattatgttttttttttcagtcttaaaatgtgaaaggcatttatgaatggtaagggaaacactatatacaaatgtatatttgtaaaagctatttttatgattagcatgtttcactgttgatcatatataaagtcaggtgatattgcaattctgtatttaaagcttatttccaacaatgtcatgtaagaaaagatgcatcttatgctagtttttataatttatttataatttatagtttaaagtacttcagatcataatgataaaatacttgaaaaagttatatttctgccctgtataagcaccctttttattaataaagaatgcagatatttcaga

SEQ ID NO: 17338 - DNA, 857 bp, Homo sapiens
  source 1..857: mol_type = unassigned DNA
gcagctgccagagtgccaccaaagcaaacctcatctcaagactctgtggccaggccctcacaacctcctgccaggctctcgctacctacccatcaacagcaagactcccaggccatctcaatccccccaaagagccctgttcctccagccccacggcttctgttcacctgccgtgctgtccccgcctctgcccacccactcatcctgcagatctggagcagcattccagggcctgcccatcacctcttcatgaccactgcctgccaggaggctaactacggtgccctcctccgggagctctgcctcacccagttccaggtagacatggaggccgtcggggagacgctgtggtgtgactggggcaggaccatcaggagctacagggagctggccgactgcacctggcacatggcggagaagctgggctgcttctggcccaatgcagaggtggacaggttcttcctggcagtgcatggccgctacttcaggagctgccccatctcaggcagggccgtgcgggacccgcccggcagcatcctctaccccttcatcgtggtccccatcacggtgaccctgctggtgacggcactggtggtctggcagagcaagcgcactgagggcattgtgtaggcggggcccaggctgcccgcgggtgcacccaggctgcagggtgaggccaggcaggcctgggtaggggcagcttctggagccttgggacagagcaggcccacaatgccccccttcttccagccaagaagagctcacaggagtccagagtagccgaggctctggtattaacctggaagcccccctggctggaggccaccgccaccctaggaagggggcagggacgtgac

SEQ ID NO: 17339 - DNA, 910 bp, Homo sapiens
  source 1..910: mol_type = unassigned DNA
gcggccgccgcctcccaccgctcccgcgcccgctcccgcccccggcgcgtctcctccgggcccgcgccgcggcgggctcagtcctcagcggggcgcgtggcgagcggactcgactcggcaccgctgtgcaccatggcccgggccctgtgccgcctcccgcggcgcggcctctggctgctcctggcccatcacctcttcatgaccactgcctgccaggaggctaactacggtgccctcctccgggagctctgcctcacccagttccaggtagacatggaggccgtcggggagacgctgtggtgtgactggggcaggaccatcaggagctacagggagctggccgactgcacctggcacatggcggagaagctgggctgcttctggcccaatgcagaggtggacaggttcttcctggcagtgcatggccgctacttcaggagctgccccatctcaggcagggccgtgcgggacccgcccggcagcatcctctaccccttcatcgtggtccccatcacggtgaccctgctggtgacggcactggtggtctggcagagcaagcgcactgagggcattgtgtaggcggggcccaggctgcccgcgggtgcacccaggctgcagggtgaggccaggcaggcctgggtaggggcagcttctggagccttgggacagagcaggcccacaatgccccccttcttccagccaagaagagctcacaggagtccagagtagccgaggctctggtattaacctggaagcccccctggctggaggccaccgccaccctaggaagggggcagggacgtgaccttgacttacctctggaaagggtcccagcctagactgcttaccccatagccacatttgtggatgagtggtttgtgattaaaagggatgttcttgaacttggaaa

SEQ ID NO: 17340 - DNA, 734 bp, Homo sapiens
  source 1..734: mol_type = unassigned DNA
agtcctcagcggggcgcgtggcgagcggactcgactcggcaccgctgtgcaccatggcccgggccctgtgccgcctcccgcggcgcggcctctggctgctcctgggcaggatagcctgaggcacgcttgcttcactcccaggcagaatggccactgagaaatccggcccatcacctcttcatgaccactgcctgccaggaggctaactacggtgccctcctccgggagctctgcctcacccagttccaggtagacatggaggccgtcggggagacgctgtggtgtgactggggcaggaccatcaggagctacagggagctggccgactgcacctggcacatggcggagaagctgggctgcttctggcccaatgcagaggtggacaggttcttcctggcagtgcatggccgctacttcaggagctgccccatctcaggcagggccgtgcgggacccgcccggcagcatcctctaccccttcatcgtggtccccatcacggtgaccctgctggtgacggcactggtggtctggcagagcaagcgcactgagggcattgtgtaggcggggcccaggctgcccgcgggtgcacccaggctgcagggtgaggccaggcaggcctgggtaggggcagcttctggagccttgggacagagcaggcccacaatgccccccttcttccagccaagaagagctcacaggagtccagagtagccgaggctctggtattaacctgg

SEQ ID NO: 17341 - DNA, 650 bp, Homo sapiens
  source 1..650: mol_type = unassigned DNA
ggagagcgggcattctggaaagcgtgggcccatcacctcttcatgaccactgcctgccaggaggctaactacggtgccctcctccgggagctctgcctcacccagttccaggtagacatggaggccgtcggggagacgctgtggtgtgactggggcaggaccatcaggagctacagggagctggccgactgcacctggcacatggcggagaagctgggctgcttctggcccaatgcagaggtggacaggttcttcctggcagtgcatggccgctacttcaggagctgccccatctcaggcagggccgtgcgggacccgcccggcagcatcctctaccccttcatcgtggtccccatcacggtgaccctgctggtgacggcactggtggtctggcagagcaagcgcactgagggcattgtgtaggcggggcccaggctgcccgcgggtgcacccaggctgcagggtgaggccaggcaggcctgggtaggggcagcttctggagccttgggacagagcaggcccacaatgccccccttcttccagccaagaagagctcacaggagtccagagtagccgaggctctggtattaacctggaagcccccctggctggaggccaccgccaccctaggaagggggcagggacgtgac

SEQ ID NO: 17342 - DNA, 113 bp, Homo sapiens
  source 1..113: mol_type = unassigned DNA
atcatcagatcgtgggactatctcctatggctacatggaaaagaaagctgtcctgaatccccacgaggccctggctcagcctcttcccaccacaggcacaccagggtcagaag

SEQ ID NO: 17343 - DNA, 858 bp, Homo sapiens
  source 1..858: mol_type = unassigned DNA
cccaggacagccccttagaagcagcggcgtcgagaggccgctggagctcccagccccctccctcttctccacgtctgggagagcagcttgccgacccctccagacccgaaagagagagggggcgactcgaattcggggagcgatcctgggagaccctggagagtcctgggcgccacgcagccgagcccccgaaatagatcccggttccggggttccgggagctgtccagcctcgcgggctgtcctgaatccccacgaggccctggctcagcctcttcccaccacaggcacaccagggtcagaaggggggacggtgaagaactatgagacagctgtccaattttgctggaatcattataaggatcaaatggatcctatcgaaaaggattggtgcgactgggccatgattagcaggccttatagcaccctgcgagattgcctggagcactttgcagagttgtttgacctgggcttccccaatcccttggcagagaggatcatctttgagactcaccagatccactttgccaactgctccctggtgcagcccaccttctctgaccccccagaggatgtactcctggccatgatcatagcccccatctgcctcatccccttcctcatcactcttgtagtatggaggagtaaagacagtgaggcccaggcctagggggccacgagcttctcaacaaccatgttactccacttccccacccccaccaggcctccctcctcccctcctactcccttttctcactctcatccccaccacagatccctggattgctgggaatggaagccaggtggggtcatggcacaagttctgtaatcttcaaaataaaactttttttttgtacaa

SEQ ID NO: 17344 - DNA, 548 bp, Homo sapiens
  source 1..548: mol_type = unassigned DNA
cgagaggccgctggagctcccagccccctccctcttctccacgtctgggagagcagcttgccgacccctccagacccgaaagagagagggggcgactcgaattcggggagcgatcctgggagaccctggagagtcctgggcgccacgcagccgagcccccgaaatagatcccggttccggggttccgggagctgtccagcctcgcggggtgagctacgagagggtgggccaacgccggcgaggcggagggagccgcgggcgccaggcgcggctgtcctgaatccccacgaggccctggctcagcctcttcccaccacaggcacaccagggtcagaaggggggacggtgaagaactatgagacagctgtccaattttgctggaatcattataaggatcaaatggatcctatcgaaaaggattggtgcgactgggccatgattagcaggccttatagcaccctgcgagattgcctggagcactttgcagagttgtttgacctgggcttccccaatcccttggcagagaggatcatctttgagactcacca

SEQ ID NO: 17345 - DNA, 780 bp, Homo sapiens
  source 1..780: mol_type = unassigned DNA
ggatataggcgcccccacacccgggcccggctcagcgccgccgccgctcctcgcctccttgctgcacgatggcctcgctccgggtggagcgcgccggcggcccgcgtctccctaggacccgagtcgggcggccggcagcgctccgcctcctcctcctgctgggcgctgtcctgaatccccacgaggccctggctcagcctcttcccaccacaggcacaccagggtcagaaggggggacggtgaagaactatgagacagctgtccaattttgctggaatcattataaggatcaaatggatcctatcgaaaaggattggtgcgactgggccatgattagcaggccttatagcaccctgcgagattgcctggagcactttgcagagttgtttgacctgggcttccccaatcccttggcagagaggatcatctttgagactcaccagatccactttgccaactgctccctggtgcagcccaccttctctgaccccccagaggatgtactcctggccatgatcatagcccccatctgcctcatccccttcctcatcactcttgtagtatggaggagtaaagacagtgaggcccaggcctagggggccacgagcttctcaacaaccatgttactccacttccccacccccaccaggcctccctcctcccctcctactcccttttctcactctcatccccaccacagatccctggattgctgggaatggaagccaggtggggtcatggcacaagttctgtaatcttcaaaataaaactttttttttg

SEQ ID NO: 17346 - DNA, 549 bp, Homo sapiens
  source 1..549: mol_type = unassigned DNA
cacgatggcctcgctccgggtggagcgcgccggcggcccgcgtctccctaggacccgagtcgggcggccggcagcgctccgcctcctcctcctgctgggcgctgtcctgaatccccacgaggccctggctcagcctcttcccaccacaggcacaccagggtcagaagcatctgtacctacaggggggacggtgaagaactatgagacagctgtccaattttgctggaatcattataaggatcaaatggatcctatcgaaaaggattggtgcgactgggccatgattagcaggccttatagcaccctgcgagattgcctggagcactttgcagagttgtttgacctgggcttccccaatcccttggcagagaggatcatctttgagactcaccagatccactttgccaactgctccctggtgcagcccaccttctctgaccccccagaggatgtactcctggccatgatcatagcccccatctgcctcatccccttcctcatcactcttgtagtatggaggagtaaagacagtgaggcccaggcctaggg

SEQ ID NO: 17347 - DNA, 573 bp, Homo sapiens
  source 1..573: mol_type = unassigned DNA
cacgatggcctcgctccgggtggagcgcgccggcggcccgcgtctccctaggacccgagtcgggcggccggcagcgctccgcctcctcctcctgctgggcgctgtcctgaatccccacgaggccctggctcagcctcttcccaccacaggcacaccagggtcagaaggccttatagcaccctgcgagattgcctggagcactttgcagagttgtttgacctgggcttccccaatcccttggcagagaggatcatctttgagactcaccagatccactttgccaactgctccctggtgcagcccaccttctctgaccccccagaggatgtactcctggccatgatcatagcccccatctgcctcatccccttcctcatcactcttgtagtatggaggagtaaagacagtgaggcccaggcctagggggccacgagcttctcaacaaccatgttactccacttccccacccccaccaggcctccctcctcccctcctactcccttttctcactctcatccccaccacagatccctggattgctgggaatggaagccaggtggggtcatggcacaa

SEQ ID NO: 17348 - DNA, 11711 bp, Homo sapiens
  source 1..11711: mol_type = unassigned DNA
cacagtggtcctccgccggctacggcgctgcgtcactggtttgcaggcgctttcctcttggaagtggcgactgctgcgggcctgagcgctggtctcacgcgcctcgggagccaggttggcggcgcgatgaggcgcagcaaggctgacgtggagcggtacatcgcctcggtgcagggctccaccccgtcgcctcgacagaagtcaatgaaaggattctattttgcaaagctgtattatgaagctaaagaatatgatcttgctaaaaaatacatatgtacttacattaatgtgcaagagagggatcccaaagctcacagatttctgggtcttctttatgaattggaagaaaacacagacaaagccgttgaatgttacaggcgttcagtggaattaaacccaacacaaaaagatcttgtgttgaagattgcagaattgctttgtaaaaatgatgttactgatggaagagcaaaatactggcttgaaagagcagccaaacttttcccaggaagtcctgcaatttataaactaaaggaacagcttctagattgtgaaggtgaagatggatggaataaactttttgacttgattcagtcagaactttatgtaagacctgatgacgtccatgtgaacatccggctagtggaggtgtatcgctcaactaaaagattgaaggatgctgtggcccactgccatgaggcagagaggaacatagctttgcgttcaagtttagaatggaattcgtgtgttgtacagacccttaaggaatatctggagtctttacagtgtttggagtctgataaaagtgactggcgagcaaccaatacagacttactgctggcctatgctaatcttatgcttcttacgctttccactagagatgtgcaggaaagtagagaattactgcaaagttttgatagtgctcttcagtctgtgaaatctttgggtggaaatgatgaactgtcagctactttcttagaaatgaaaggacatttctacatgcatgctggttctctgcttttgaagatgggtcagcatagtagtaatgttcaatggcgagctctttctgagctggctgcattgtgctatctcatagcatttcaggttccaagaccaaagattaaattaataaaaggtgaagctggacaaaatctgctggaaatgatggcctgtgaccgactgagccaatcagggcacatgttgctaaacttaagtcgtggcaagcaagattttttaaaagagattgttgaaacttttgccaacaaaagcgggcagtctgcattatatgatgctctgttttctagtcagtcacctaaggatacatcttttcttggtagcgatgatattggaaacattgatgtacgagaaccagagcttgaagatttgactagatacgatgttggtgctattcgagcacataatggtagtcttcagcaccttacttggcttggcttacagtggaattcattgcctgctttacctggaatccgaaaatggctaaaacagcttttccatcatttgccccatgaaacctcaaggcttgaaacaaatgcacctgaatcaatatgtattttagatcttgaagtatttctccttggagtagtatataccagccacttacaattaaaggagaaatgtaattctcaccacagctcctatcagccgttatgcctgccccttcctgtgtgtaaacagctttgtacagaaagacaaaaatcttggtgggatgcggtttgtactctgattcacagaaaagcagtacctggaaacgtagcaaaattgagacttctagttcagcatgaaataaacactctaagagcccaggaaaaacatggccttcaacctgctctgcttgtacattgggcagaatgccttcagaaaacgggcagcggtcttaattctttttatgatcaacgagaatacatagggagaagtgttcattattggaagaaagttttgccattgttgaagataataaaaaagaagaacagtattcctgaacctattgatcctctgtttaaacattttcatagtgtagacattcaggcatcagaaattgttgaatatgaagaagacgcacacataacttttgctatattggatgcagtaaatggaaatatagaagatgctgtgactgcttttgaatctataaaaagtgttgtttcttattggaatcttgcactgatttttcacaggaaggcagaagacattgaaaatgatgccctttctcctgaagaacaagaagaatgcaaaaattatctgagaaagaccagggactacctaataaagattatagatgacagtgattcaaatctttcagtggtcaagaaattgcctgtgcccctggagtctgtaaaagagatgcttaattcagtcatgcaggaactcgaagactatagtgaaggaggtcctctctataaaaatggttctttgcgaaatgcagattcagaaataaaacattctacaccgtctcctaccagatattcactatcaccaagtaaaagttacaagtattctcccaaaacaccacctcgatgggcagaagatcagaattctttactgaaaatgatttgccaacaagtagaggccattaagaaagaaatgcaggagttgaaactaaatagcagtaactcagcatcccctcatcgttggcccacagagaattatggaccagactcagtgcctgatggatatcaggggtcacagacatttcatggggctccactaacagttgcaactactggcccttcagtatattatagtcagtcaccagcatataattcccagtatcttctcagaccagcagctaatgttactcccacaaagggcccagtctatggcatgaataggcttccaccccaacagcatatttatgcctatccgcaacagatgcacacaccgccagtgcaaagctcatctgcttgtatgttctctcaggagatgtatggtcctcctgcattgcgttttgagtctcctgcaacgggaattctatcgcccaggggtgatgattactttaattacaatgttcaacagacaagcacaaatccacctttgccagaaccaggatatttcacaaaacctccgattgcagctcatgcttcaagatctgcagaatctaagactatagaatttgggaaaactaattttgttcagcccatgccgggtgaaggattaaggccatctttgccaacacaagcacacacaacacagccaactccttttaaatttaactcaaatttcaaatcaaatgatggtgacttcacgttttcctcaccacaggttgtgacacagccccctcctgcagcttacagtaacagtgaaagccttttaggtctcctgacttcagataaacccttgcaaggagatggctatagtggagccaaaccaattcctggtggtcaaaccattgggcctcgaaatacattcaattttggaagcaaaaatgtgtctggaatttcatttacagaaaacatggggtcgagtcagcaaaagaattctggttttcggcgaagtgatgatatgtttactttccatggtccagggaaatcagtatttggaacacccactttagagacagcaaacaagaatcatgagacagatggaggaagtgcccatggggatgatgatgatgacggtcctcactttgagcctgtagtacctcttcctgataagattgaagtaaaaactggtgaggaagatgaagaagaattcttttgcaaccgcgcgaaattgtttcgtttcgatgtagaatccaaagaatggaaagaacgtgggattggcaatgtaaaaatactgaggcataaaacatctggtaaaattcgccttctaatgagacgagagcaagtattgaaaatctgtgcaaatcattacatcagtccagatatgaaattgacaccaaatgctggatcagacagatcttttgtatggcatgcccttgattatgcagatgagttgccaaaaccagaacaacttgctattaggttcaaaactcctgaggaagcagcactttttaaatgcaagtttgaagaagcccagagcattttaaaagccccaggaacaaatgtagccatggcgtcaaatcaggctgtcagaattgtaaaagaacccacaagtcatgataacaaggatatttgcaaatctgatgctggaaacctgaattttgaatttcaggttgcaaagaaagaagggtcttggtggcattgtaacagctgctcattaaagaatgcttcaactgctaagaaatgtgtatcatgccaaaatctaaacccaagcaataaagagctcgttggcccaccattagctgaaactgtttttactcctaaaaccagcccagagaatgttcaagatcgatttgcattggtgactccaaagaaagaaggtcactgggattgtagtatttgtttagtaagaaatgaacctactgtatctaggtgcattgcgtgtcagaatacaaaatctgctaacaaaagtggatcttcatttgttcatcaagcttcatttaaatttggccagggagatcttcctaaacctattaacagtgatttcagatctgttttttctacaaaggaaggacagtgggattgcagtgcatgtttggtacaaaatgaggggagctctacaaaatgtgctgcttgtcagaatccgagaaaacagagtctacctgctacttctattccaacacctgcctcttttaagtttggtacttcagagacaagtaaaactctaaaaagtggatttgaagacatgtttgctaagaaggaaggacagtgggattgcagttcatgcttagtgcgaaatgaagcaaatgctacaagatgtgttgcttgtcagaatccggataaaccaagtccatctacttctgttccagctcctgcctcttttaagtttggtacttcagagacaagcaaggctccaaagagcggatttgagggaatgttcactaagaaggagggacagtgggattgcagtgtgtgcttagtaagaaatgaagccagtgctaccaaatgtattgcttgtcagaatccaggtaaacaaaatcaaactacttctgcagtttcaacacctgcctcttcagagacaagcaaggctccaaagagcggatttgagggaatgttcactaagaaggagggacagtgggattgcagtgtgtgcttagtaagaaatgaagccagtgctaccaaatgtattgcttgtcagaatccaggtaaacaaaatcaaactacttctgcagtttcaacacctgcctcttcagagacaagcaaggctccaaagagcggatttgagggaatgttcactaagaaggaaggacagtgggattgcagtgtgtgcttagtaagaaatgaagccagtgctaccaaatgtattgcttgtcagtgtccaagtaaacaaaatcaaacaactgcaatttcaacacctgcctcttcggagataagcaaggctccaaagagtggatttgaaggaatgttcatcaggaaaggacagtgggattgtagtgtttgctgtgtacaaaatgagagttcttccttaaaatgtgtggcttgtgatgcctctaaaccaactcataaacctattgcagaagctccttcagctttcacactgggctcagaaatgaagttgcatgactcttctggaagtcaggtgggaacaggatttaaaagtaatttctcagaaaaagcttctaagtttggcaatacagagcaaggattcaaatttgggcatgtggatcaagaaaattcaccttcatttatgtttcagggttcttctaatacagaatttaagtcaaccaaagaaggattttccatccctgtgtctgctgatggatttaaatttggcatttcggaaccaggaaatcaagaaaagaaaagtgaaaagcctcttgaaaatggtactggcttccaggctcaggatattagtggccagaagaatggccgtggtgtgatttttggccaaacaagtagcacttttacatttgcagatcttgcaaaatcaacttcaggagaaggatttcagtttggcaaaaaagaccccaatttcaagggattttcaggtgctggagaaaaattattctcatcacaatacggtaaaatggccaataaagcaaacacttccggtgactttgagaaagatgatgatgcctataagactgaggacagcgatgacatccattttgaaccagtagttcaaatgcccgaaaaagtagaacttgtaacaggagaagaagatgaaaaagttctgtattcacagcgggtaaaactatttagatttgatgctgaggtaagtcagtggaaagaaaggggcttggggaacttaaaaattctcaaaaacgaggtcaatggcaaactaagaatgctgatgcgaagagaacaagtactaaaagtgtgtgctaatcattggataacgactacgatgaacctgaagcctctctctggatcagatagagcatggatgtggttagccagtgatttctctgatggtgatgccaaactagagcagttggcagcaaaatttaaaacaccagagctggctgaagaattcaagcagaaatttgaggaatgccagcggcttctgttagacataccacttcaaactccccataaacttgtagatactggcagagctgccaagttaatacagagagctgaagaaatgaagagtggactgaaagatttcaaaacatttttgacaaatgatcaaacaaaagtcactgaggaagaaaataagggttcaggtacaggtgcggccggtgcctcagacacaacaataaaacccaatcctgaaaacactgggcccacattagaatgggataactatgatttaagggaagatgctttggatgatagtgtcagtagtagctcagtacatgcttctccattggcaagtagccctgtgagaaaaaatcttttccgttttggtgagtcaacaacaggatttaacttcagttttaaatctgctttgagtccatctaagtctcctgccaagttgaatcagagtgggacttcagttggcactgatgaagaatctgatgttactcaagaagaagagagagatggacagtactttgaacctgttgttcctttacctgatctagttgaagtatccagtggtgaggaaaatgaacaagttgtttttagtcacagggcaaaactctacagatatgataaagatgttggtcaatggaaagaaaggggcattggtgatataaagattttacagaattatgataataagcaagttcgtatagtgatgagaagggaccaagtattaaaactttgtgccaatcacagaataactccagacatgactttgcaaaatatgaaagggacagaaagagtatggttgtggactgcatgtgattttgcagatggagaaagaaaagtagagcatttagctgttcgttttaaactacaggatgttgcagactcgtttaagaaaatttttgatgaagcaaaaacagcccaggaaaaagattctttgataacacctcatgtttctcggtcaagcactcccagagagtcaccatgtggcaaaattgctgtagctgtattagaagaaaccacaagagagaggacagatgttattcagggtgatgatgtagcagatgcaacttcagaagttgaagtgtctagcacatctgaaacaacaccaaaagcagtggtttctcctccaaagtttgtatttggttcagagtctgttaaaagcatttttagtagtgaaaaatcaaaaccatttgcattcggcaacagttcagccactgggtctttgtttggatttagttttaatgcacctttgaaaagtaacaatagtgaaactagttcagtagcccagagtggatctgaaagcaaagtggaacctaaaaaatgtgaactgtcaaagaactctgatatcgaacagtcttcagatagcaaagtcaaaaatctctttgcttcctttccaacggaagaatcttcaatcaactacacatttaaaacaccagaaaaggcaaaagagaagaaaaaacctgaagattctccctcagatgatgatgttctcattgtatatgaactaactccaaccgctgagcagaaagcccttgcaaccaaacttaaacttcctccaactttcttctgctacaagaatagaccagattatgttagtgaagaagaggaggatgatgaagatttcgaaacagctgtcaagaaacttaatggaaaactatatttggatggctcagaaaaatgtagacccttggaagaaaatacagcagataatgagaaagaatgtattattgtttgggaaaagaaaccaacagttgaagagaaggcaaaagcagatacgttaaaacttccacctacatttttttgtggagtctgtagtgatactgatgaagacaatggaaatggggaggactttcaatcagagcttcaaaaagttcaggaagctcaaaaatctcagacagaagaaataactagcacaactgacagtgtatatacaggtgggactgaagtgatggtaccttctttctgtaaatctgaagaacctgattctattaccaaatccattagttcaccatctgtttcctctgaaactatggacaaacctgtagatttgtcaactagaaaggaaattgatacagattctacaagccaaggggaaagcaagatagtttcatttggatttggaagtagcacagggctctcatttgcagacttggcttccagtaattctggagattttgcttttggttctaaagataaaaatttccaatgggcaaatactggagcagctgtgtttggaacacagtcagtcggaacccagtcagccggtaaagttggtgaagatgaagatggtagtgatgaagaagtagttcataatgaagatatccattttgaaccaatagtgtcactaccagaggtagaagtaaaatctggagaagaagatgaagaaattttgtttaaagagagagccaaactttatagatgggatcgggatgtcagtcagtggaaggagcgcggtgttggagatataaagattctttggcatacaatgaagaattattaccggatcctaatgagaagagaccaggtttttaaagtgtgtgcaaaccacgttattactaaaacaatggaattaaagcccttaaatgtttcaaataatgctttagtttggactgcctcagattatgctgatggagaagcaaaagtagaacagcttgcagtgagatttaaaactaaagaagtagctgattgtttcaagaaaacatttgaagaatgtcagcagaatttaatgaaactccagaaaggacatgtatcactggcagcagaattatcaaaggagaccaatcctgtggtgttttttgatgtttgtgcggacggtgaacctctagggcggataactatggaattattttcaaacattgttcctcggactgctgagaacttcagagcactatgcactggagagaaaggctttggtttcaagaattccatttttcacagagtaattccagattttgtttgccaaggaggagatatcaccaaacatgatggaacaggcggacagtccatttatggagacaaatttgaagatgaaaattttgatgtgaaacatactggtcctggtttactatccatggccaatcaaggccagaataccaataattctcaatttgttataacactgaagaaagcagaacatttggactttaagcatgtagtatttgggtttgttaaggatggcatggatactgtgaaaaagattgaatcatttggttctcccaaagggtctgtttgtcgaagaataactatcacagaatgtggacagatataaaatcattgttgttcatagaaaatttcatctgtataagcagttggattgaagcttagctattacaatttgatagttatgttcagcttttgaaaatggacgtttccgatttacaaatgtaaaattgcagcttatagctgttgtcactttttaatgtgttataattgaccttgcatggtgtgaaataaaagtttaaacactggtgtatttcaggtgtacttgtgtttatgtactcctgacgtattaaaatggaataatactaatcttgttaaaagcaatagacctcaaactattgaaggaatatgatatatgcaatttaattttaattccttttaagatatttggacttcctgcatggatatacttaccatttgaataaagggaccacaacttggataatttaattttaggtttgaaatatatttggtaatcttaactattggtgtactcatttatgcatagagactcgtttatgaatgggtagagccacagaacgtatagagttaaccaaagtgctcttctctagaatctttacacctcctgtgtggttacaagttaactttgtaagtagcgtaccttccttccttaaaatatctagcttcctgtgccctttcatagatattcgattaatttttacattttaaacaagttgactatttcctttaggggttttgtttcaaacttttctgtcatctgtctctactacctcagaaactgcagcttggttctgatgatagaaattgaatttttccttgtagttattgtgataaagtatgaatatttttagaaagtctataccatgttctttcgttaaagatttgctttatacaagattgttgcagtacctttttctggtaaattttgtagcagaaataaaatgacaattcctaagagccactgacatccaaaaaattcattacttacgcttcgggttcattctaaagtaaggaagacaatttaaaggcagtaaattcaaactgctgcataatttccagagctcctagtttctcaagtttgatacacaccaaaaacgtatttggaaatggcttgtatcaaatgttaggcaaattgctaaagaaaagaggatgttcttattggcctactcaatatggaactacaaagaatccaggtagaacacaaaattttgtatattgcaattatgaatattgactgtcttccacccatctgtgttctttcgggtgaaattacctcattttatttagtgaggaaagacaggtttattccctgttacatggggatttggaaattgggtatcctaaagcaagtaactgttcaaccaccagtcaaaagaggggagggatgttgtgcgagtaatgagtgatggtataccatcaccattccactcggccacaaagccagatacttgaaataaacctactccaaatgtatcagttcagtcttgaaccatggattacatatgtttacactaaatatttcaaattggcttatttggaaatctatgtaatataaactgatgtaaagtgtgttgtaacttttcagctgagacagttgatgccttcgtcatgattttagaataaattcttaagttaatgcaagtgctttttaagagactttttacagatttgtatgctttcctaaagcactaaagttacaaattaaaaagctttaaaaactttgaccaaaaatttgacaaaatgacatgtaaactgacttttcccgtattagtattccaaagatgcttaaaagtggcttgtggcatttatgagaaagtctttgtgtcacatttcaggaaaggactttgatttctctttgttatttaatcactgatgtggtctaaacccacgataatatgtatctttccttttaaactggattttatgttgtctcattaaaatctgcttaaagatagaataaaattcattatttgtaca

SEQ ID NO: 17349 - DNA, 367 bp, Homo sapiens
  source 1..367: mol_type = unassigned DNA
gctgcgggcctgagcgctggtctcacgcgcctcgggagccaggttggcggcgcgatgaggcgcagcaaggctgacgtggagcggtacatcgcctcggtgcagggctccaccccgtcgcctcgacagaagtcaatgaaaggattctattttgcaaagctgtattatgaagctaaagaatatgatcttgctaaaaacgttcagtggaattaaacccaacacaaaaagatcttgtgttgaagattgcagaattgctttgtaaaaatgatgttactgatggaagagcaaaatactggcttgaaagagcagccaaacttttcccaggaagtcctgcaatttataaactaaaggaacagcttctagattgtga

SEQ ID NO: 17350 - DNA, 646 bp, Homo sapiens
  source 1..646: mol_type = unassigned DNA
gctcacagatttctgggtcttctttatgaattggaagaaaacacagacaaagccgttgaatgttacaggcgttcagtggaattaaacccaacacaaaaagatcttgtgttgaagattgcagaattgctttgtaaaaatgatgttactgatggaagagcaaaatactggcttgaaagagcagccaaacttttcccaggaagtcctgcaatttataaactaaaggtaaacaaacaaaacataaagggagaaaacttaagacataaccatttctaatatttggaatttaaattacttttcaatagcaaaccttaagcccaggtgttagtgtttcctttaaaaattttcttttaaaaagtgtgttaaaacctttctgagcatctactgtcttattaggcattgttatactttataagtgacatctcatttacctttctggaataattaatattttagggattttacagtttagtagctgtaaactaagtagagctaagatttacattaagttccgtctggtatacaatttttgcttcattaagtgaaaattacctacaggatgacaatttagggatattttaaagaagtgttttctaataactattgtctgaaagtagaagggattgcattttgagatagtaaggttttc

SEQ ID NO: 17351 - DNA, 544 bp, Homo sapiens
  source 1..544: mol_type = unassigned DNA
taccagccacttacaattaaaggagaaatgtaattctcaccacagctcctatcagccgttatgcctgccccttcctgtgtgtaaacagctttgtacagaaagacaaaaatcttggtgggatgcggtttgtactctgattcacagaaaagcagtgtaagtagtaaaacaaaaatattgctttcacttagtgcgtaggttttaccggggatttaatcctcatgtgaagatttaatttgtcatgtgacccattaacatatatgtatgtaagccctgaactgtgtatttagaaagcaattttagtaaattgaactattttttagacctggaaacgtagcaaaattgagacttctagttcagcatgaaataaacactctaagagcccaggaaaaacatggccttcaacctgctctgcttgtacattgggcagaatgccttcagaaaacgggcagcggtcttaattctttttatgatcaacgagaatacatagggagaagtgttcattattggaagaaagttttgccattgttgaagataataaaaaaga

SEQ ID NO: 17352 - DNA, 156 bp, Homo sapiens
  source 1..156: mol_type = unassigned DNA
atgaggcgcagcaaggctgacgtggagcggtacatcgcctcggtgcagggctccaccccgtcgcctcgacagaagtcaatgaaaggattctattttgcaaagctgtattatgaagctaaagaatatgatcttgctaaaaacgttcagtggaattaa

SEQ ID NO: 17353 - DNA, 3104 bp, Homo sapiens
  source 1..3104: mol_type = unassigned DNA
acagagggtaactcagatcaggcttagaaatcacttgacttaactcagcagcactttttcttttctttgtgtctgtattattttagcagccttctctaaatactggaggcattggatttcatgtcgccaaaaggaatttaaaaatgacaaaagtgtaatctgttagaaatagttaatttgtagaattttactctataaggaggtttagtttcaatttgttttgaaatgaaggaattaagttgtgtttttaaccaaatgaattggcatctttatatttaggagaagtaacattggtgattatttatttcaagaatcatgactggaaaaagcttggaagtttagtagaggagtatatgttgtacatgcaaagacaagatctgcatgaatctatgtatttctgggtgtctggtgaaggccactttaggtgactggccagagaaggaggtgccctagtgatccttgagtcacagccatactgctaggaccatgactaccataccaagaaaaggcagcagccacctgcctggcagtttgcacacctgtaaactgaagctgcaggaggaccggcgacagcaagaaaaatctgtcattgctcaacccatatttgtttttgaaaagggagaacaaacttttaagagacctgcagaagacaccctgtatgaagcagcagaaccagaatgtaatggttttccaacaaagcgtgtacggtcttcatcttttacttttcatattacagattctcagtcccagggagtgaggaaaaacaatgtttttatgacatcagctcttgtgcaaagtagtgttgatataaagagtgctgaacaaggtcctgtgaaacattctaaacatgttattagacctgctattttgcagctacctcaagctcgaagttgtgcaaaagtaagaaaaacatttggacacaaggcactggaatcttgcaagactaaagaaaaaacaaataataagatttctgagggaaattcctatttgttaagtgaaaatttatcaagggctagaatttcagtccagctgtctactaaccaggactttttaggtgcaacatcagtaggatgtcaaccaaatgaagataaatgttcttttaaaagctgcagttccaattttgtttttggagaaaacatggtagaaagagttttgggtactcaaaaactcacccagcctcaacttgaaaatgattcatatgccaaggaaaaaccattcaaatccattccgaaatttcctgtcaactttttaagttcaagaacagactctattaaaaatacttccctaattgaatcagctgctgcattctcttcccaaccatcacgaaaatgcttgctggagaaaattgatgttataacaggggaggaaacagaacataatgtgttaaagataaactgcaagcttttcatattcaacaaaacaacacaatcctggattgaaaggggcagaggaacgttgagactgaatgacacagcaagcactgactgtggaacattacagtcaagactaattatgcgcaatcaaggcagtctaaggctgatcctcaacagcaaactctgggcccaaatgaagattcaaagagcaaaccacaaaaatgtacgaataacagctactgatttagaagactatagcatcaaaatatttttaattcaggccagtgcccaagatacagcatatttgtatgcagcaatacatcatcgtcttgttgcacttcaaagcttcaataagcagagagatgtcaatcaagctgaaagcctgtcagaaacagcccaacaattgaactgcgaaagctgtgatgagaatgaggatgatttcatccaagtcactaaaaatggatcagatccttctagttggactcacagacagtcggttgcctgttcatgaatactacctactataaacatgacatctacaaaaagaggggtcaccctactgaaaatactaaaccaccctaactaatgagaagattctattcattccttgaagagtttttatagaaaagtttaagaaatgtaatttgttgcaattaacatttttatgttttacattttacattttgattattgtgcagaaactgacagaatttaaaaaaatggacttcagaagttcaaaatttatcatttttgaagaagtttatttagaataggattttataactaatttggactcttcatcacattgatggatataatacttagaattataaattgctagatttgataaatacctaacaaaatgtttatttttttcagtcatacttgaccacaaaacaaatattttactaaatttccagagtcatttctctgaaaaatagtataatggcatgataacatttcactaaatcctatttatcttctgggaaatattttaatttagcttttggatttcctaatatgataagcttatatattcatggtatgaattcctttaaaaagagcatctgctcttggacttgtatctgttgcatcttgtcaatgtttgactcatggtcagcatccaatagttgttaaatgaataaataaaatataatacattacctatgtatcaaaaagcatgtgtaagaaagccaaatatgttaactgttctactttatttatgtaattatattttcattagtattttagtagatggggctgtatagaaaaacaaatgtatcatatgtagccaaatgaatctttttcttaaatgatattattatagtaggctacagtaatttcaacaattttacaatagagttttgatcctcttctttgcgatttgtttcagagacacctcatgaatcacacaagaaaattagtctcagtacttatagccctatttcatttttcaattcagttttatcacaccatggcttcgaagtgactttgattgtgacccctaagcaattatctgattaggggataaaaattcataattccaagatgtttctgaaaatgttctgaacaatgacaacatatttggaatgagggcgtaatttcactaagtgatgcttcgaagaacaatattcatttggatatgcaaacacacattttcaaaagttatattactgtgttaccatacctgttataaaataataaaaatatataagtatttattaagtcaaa

SEQ ID NO: 17354 - DNA, 2278 bp, Homo sapiens
  source 1..2278: mol_type = unassigned DNA
agagggtaactcagatcaggcttagaaatcacttgacttaactcagcagcactttttcttttctttgtgtctgtattattttagcagccttctctaaatactggaggcattggatttcatgtcgccaaaaggaatttaaaaatgacaaaagtgtaatctgttagaaatagttaatttgtagaattttactctataaggaggtttagtttcaatttgttttgaaatgaaggaattaagttgtgtttttaaccaaatgaattggcatctttatatttaggagaagtaacattggtgattatttatttcaagaatcatgactggaaaaagcttggaagtttagtagaggagtatatgttgtacatgcaaagacaagatctgcatgaatctatgtatttctgggtgtctggtgaaggccactttaggtgactggccagagaaggaggtgccctagtgatccttgagtcacagccatactgctaggaccatgactaccataccaagaaaaggcagcagccacctgcctggcagtttgcacacctgtaaactgaagctgcaggaggaccggcgacagcaagaaaaatctgtcattgctcaacccatatttgtttttgaaaagggagaacaaacttttaagagacctgcagaagacaccctgtatgaagcagcagaaccagaatgtaatggttttccaacaaagcgtgtacggtcttcatcttttacttttcatattacagattctcagtcccagggagtgtcaaccttgtctcagaagcaaatgagatgttcatccgtcactaacctcccaaccttcccccattctgggccagtgaggaaaaacaatgtttttatgacatcagctcttgtgcaaagtagtgttgatataaagagtgctgaacaaggtcctgtgaaacattctaaacatgttattagacctgctattttgcagctacctcaagctcgaagttgtgcaaaagtaagaaaaacatttggacacaaggcactggaatcttgcaagactaaagaaaaaacaaataataagatttctgagggaaattcctatttgttaagtgaaaatttatcaagggctagaatttcagtccagctgtctactaaccaggactttttaggtgcaacatcagtaggatgtcaaccaaatgaagataaatgttcttttaaaagctgcagttccaattttgtttttggagaaaacatggtagaaagagttttgggtactcaaaaactcacccagcctcaacttgaaaatgattcatatgccaaggaaaaaccattcaaatccattccgaaatttcctgtcaactttttaagttcaagaacagactctattaaaaatacttccctaattgaatcagctgctgcattctcttcccaaccatcacgaaaatgcttgctggagaaaattgatgttataacaggggaggaaacagaacataatgtgttaaagataaactgcaagcttttcatattcaacaaaacaacacaatcctggattgaaaggggcagaggaacgttgagactgaatgacacagcaagcactgactgtggaacattacagtcaagactaattatgcgcaatcaaggcagtctaaggctgatcctcaacagcaaactctgggcccaaatgaagattcaaagagcaaaccacaaaaatgtacgaataacagctactgatttagaagactatagcatcaaaatatttttaattcaggccagtgcccaagatacagcatatttgtatgcagcaatacatcatcgtcttgttgcacttcaaagcttcaataagcagagagatgtcaatcaagctgaaagcctgtcagaaacagcccaacaattgaactgcgaaagctgtgatgagaatgaggatgatttcatccaagtcactaaaaatggatcagatccttctagttggactcacagacagtcggttgcctgttcatgaatactacctactataaacatgacatctacaaaaagaggggtcaccctactgaaaatactaaaccaccctaactaatgagaagattctattcattccttgaagagtttttatagaaaagtttaagaaatgtaatttgttgcaattaacatttttatgttttacattttacattttgattattgtgcagaaactgacagaatttaaaaaaatggacttcagaagttcaaaatttatcatttttgaagaagtttatttagaataggattttataactaatttggactcttcatcacattgatggatataatacttagaattata

SEQ ID NO: 17355 - DNA, 1532 bp, Homo sapiens
  source 1..1532: mol_type = unassigned DNA
agagggtaactcagatcaggcttagaaatcacttgacttaactcagcagcactttttcttttctttgtgtctgtattattttagcagccttctctaaatactggaggcattggatttcatgtcgccaaaaggaatttaaaaatgacaaaagtgtaatctgttagaaatagttaatttgtagaattttactctataaggaggtttagtttcaatttgttttgaaatgaaggaattaagttgtgtttttaaccaaatgaattggcatctttatatttaggagaagtaacattggtgattatttatttcaagaatcatgactggaaaaagcttggaagtttagtagaggagtatatgttgtacatgcaaagacaagatctgcatgaatctatgtatttctgggtgtctggtgaaggccactttaggtgactggccagagaaggaggtgccctagtgatccttgagtcacagccatactgctaggaccatgactaccataccaagaaaaggcagcagccacctgcctggcagtttgcacacctgtaaactgaagctgcaggaggaccggcgacagcaagaaaaatctgtcattgctcaacccatatttgtttttgaaaagggagaacaaacttttaagagacctgcagaagacaccctgtatgaagcagcagaaccagaatgtaatggttttccaacaaagcgtgtacggtcttcatcttttacttttcatattacagattctcagtcccagggagtgaggaaaaacaatgtttttatgacatcagctcttgtgcaaagtagtgttgatataaagagtgctgaacaaggtcctgtgaaacattctaaacatgttattagacctgctattttgcagctacctcaagctcgaagttgtgcaaaagtaagaaaaacatttggacacaaggcactggaatcttgcaagactaaagaaaaaacaaataataagatttctgagggaaattcctatttgttaagtgaaaatttatcaagggctagaatttcagtccagctgtctactaaccaggactttttaggtgcaacatcagtaggatgtcaaccaaatgaagataaatgttcttttaaaagctgcagttccaattttgtttttggagaaaacatggtagaaagagttttgggtactcaaaaactcacccagcctcaacttgaaaatgattcatatgccaaggaaaaaccattcaaatccattccgaaatttcctgtcaactttttaagttcaagaacagactctattaaaaatacttccctaattgaatcagctgctgcattctcttcccaaccatcacgaaaatgcttgctggagaaaattgatgttataacaggggaggaaacagaacataatgtgttaaaggtctgtatatcatgttttactctttctggtagcatttacatacttggaataaagttaacatgagaagaggcatctttaaaaatacagacagaagtatagttttcatggagactaagttgcttaaataaaaatgttggatgctctc

SEQ ID NO: 17356 - DNA, 572 bp, Homo sapiens
  source 1..572: mol_type = unassigned DNA
agcttgcattttaattacaaacaaagtagcagaaatcaggagaagtaacattggtgattatttatttcaagaatcatgactggaaaaagcttggaagtttagtagaggagtatatgttgtacatgcaaagacaagatctgcatgaatctatgtatttctgggtgtctggtgaaggccactttaggtgactggccagagaaggaggtgccctagtgatccttgagtcacagccatactgctaggaccatgactaccataccaagaaaaggcagcagccacctgcctggcagtttgcacacctgtaaactgaagctgcaggaggaccggcgacagcaagaaaaatctgtcattgctcaacccatatttgtttttgaaaagggagaacaaacttttaagagacctgcagaagacaccctgtatgaagcagcagaaccagaatgtaatggttttccaacaaagcgtgtacggtcttcatcttttacttttcatattacagattctcagtcccagggagtgaggaaaaacaatgtttttatgacatcagctcttgtgcaaagtagtgttgatataaa

SEQ ID NO: 17357 - DNA, 6061 bp, Homo sapiens
  source 1..6061: mol_type = unassigned DNA
ggatccccttatcaaagctgatgggggtcgctggggaccccccagccttttgctagagcctgcacggctgtgcgagcttgaaaagaaacatgaaggtgggctggccaggtgagagctgctggcaggtgggcctggctgtggaggatagcccagctctgggagcaccgcgggtgggagccctccctgacgtggtgccggaggggacactactcaacatggtgttgagaaggatgcaccggccccgaagctgctcctaccagctgctgctggagcaccagcgtccgagctgcatccaggggctgcgctggacaccactcaccaacagcgaggagtccctggatttcagcgagagcctggagcaggcctccacagagcgggtgctcagggctgggaggcagctgcatcggcatctgctggccacctgcccaaacctcatccgagaccggaagtaccaccttaggctctatcggcagtgctgctctggccgggagctggtggatgggatcttggccctgggacttggggtccattcccggagccaagttgtgggaatctgccaggtgctgctggatgaaggtgccctctgccatgtgaaacacgactgggccttccaggaccgagatgcccaattctaccggttccccgggcccgagcccgagcccgtgagaactcatgagatggaggaggagttggccgaagctgtggccctgctctcccagcgggggcctgacgccctgctcactgtggcacttcgaaagcccccaggtcagcgcacggatgaagagctggacctcatctttgaggagctgctgcacatcaaggctgtggcccacctctccaactcggtgaagcgagaattagcggctgttctgctctttgaaccacacagcaaggcagggaccgtgttgttcagccagggggacaagggcacttcgtggtacattatctggaagggatctgtcaacgtggtgacccatggcaaggggctggtgaccaccctgcatgagggagatgattttggacagctggctctggtgaatgatgcaccccgggcagccaccatcatcctgcgagaagacaactgtcatttcctgcgtgtggacaagcaggacttcaaccgtatcatcaaggatgtggaggcaaagaccatgcggctggaagaacatggcaaagtggtgctggtgctggagagagcctctcagggcgccggcccttcccgacccccaaccccaggcaggaaccggtatacagtgatgtctggcaccccagagaagatcctagagcttctgttggaggccatgggaccagattccagtgctcatgacccaacagagacattcctcagcgacttcctcctgacccacagggtcttcatgcccagcgcccaactctgcgctgcccttctgcaccacttccatgtggagcctgcgggtggcagcgagcaggagcgcagcacctacgtctgcaacaagaggcagcagatcttgcggctggtcagccagtgggtggccctgtatggctccatgctccacactgaccctgtggccaccagcttcctccagaaactctcagacctggtgggcagggacacccgactcagcaacctgctgagggagcagtggccagagaggcggcgatgccacaggttggagaatggctgtgggaatgcatctcctcagatgaaggcccggaacttgcctgtttggctccccaaccaggacgagccccttcctggcagcagctgtgccatccaagttggggataaagtcccctatgacatctgccggccagaccactcagtgttgaccctgcagctgcctgtgacagcctccgtgagagaggtgatggcagcgttggcccaggaggatggctggaccaaggggcaggtgctggtgaaggtcaattctgcaggtgatgccattggcctgcagccagatgcccgtggtgtggccacatctctggggctcaatgagcgtctctttgttgtcaacccacaggaagtgcatgagctgatcccacaccctgaccagctggggcccactgtgggctctgctgaggggctggacctggtgagtgccaaggacctggcaggccagctgacggaccacgactggagcctcttcaacagtatccaccaggtggagctgatccactatgtgctgggcccccagcatctgcgggatgtcaccaccgccaacctggagcgcttcatgcgccgcttcaatgagctgcagtactgggtggccaccgagctgtgtctctgccccgtgcccggcccccgggcccagctgctcaggaagttcattaagctggcggcccacctcaaggagcagaagaatctcaattccttctttgccgtcatgtttggcctcagcaactcggccatcagccgcctagcccacacctgggagcggctgcctcacaaagtccggaagctgtactccgccctcgagaggctgctggatccctcatggaaccaccgggtataccgactggccctcgccaagctctcccctcctgtcatccccttcatgccccttcttctcaaagacatgaccttcattcatgagggaaaccacacactagtggagaatctcatcaactttgagaagatgagaatgatggccagagccgcgcggatgctgcaccactgccgaagccacaaccctgtgcctctctcaccactcagaagccgagtttcccacctccacgaggacagccaggtggcgaggatttccacatgctcggagcagtccctgagcacccggagtccagccagcacctgggcttatgtccagcagctgaaggtcattgacaaccagcgggaactctcccgcctctcccgagagctggagccatgaggaggggctgggactggagctggagcaggcacttgcagccgggaaagccagggtgtgccgggccaagatactcacaggctggccacagctgggcaaggctctccgtggagtggactcgagtccctggagcaggcagtgtggaggcagccatcccctgtgatgactggcagctaaggaggacctcggagtggacccgagccaggaataacgaatgacccaaggccaaggaagggaggacagagaggccccaggagtgggtggagagtggagtgcgctgggacgttgtgtgcaatagagaggtctccacaccagatgtcttccagattctgtgcctctggctttgttgtccagccaggcctgcagtttattttcacagtggacagagagagagagagaggctgcatgtgtgtaccgtgtgtggcaagggcagggccttggcctggggcaggggccccctgctttctttccacagctttcttccaacagcaggcagtggggctgcgggcctgtgcggtggtccctgaggagctttattgttactgtcaacatagtagtatgttccaggccagcccagagtgggcgtggcagggaggctgaggccccgccctctgggaaggagctgtggaggagaagcagccccatgctgggcacgggccagactgggtccaagatcctgatgccacccagatgtgcctccagggctctggccaaagggcgggctggagcctggagcccctgtcagcagccagccagggtgaccatcagctccccgtggtggtccaataggactttacagtccagatgcaactgacagcttcttcccaactgcaatccccgcttttccacacttgagctcgtcctggcctgttgggccaggcttctggggtcttctgggggtggcttgtgatagaaacaatgctgaagcttccgcggagagcccgtcgcttgttgaggcccaacagacttccaggaaatcagggtttatcatcagtgttgagaatggtcccagcaagctctggtcatacgaagtcctctcttccctgccccttcagcacttcccctaggaaccagctactgccaggacgcctcttgcgaggcagagctcacccaggaagctccagggactccaccctcttgccttgctattgccctgagtcctggcagcaggaggcacttgtctggccagagagagaactcatggcccctggcatgactcctgagtaggtattgaggctgcagggccttgggcgtccagaggcagctggtatggcccctctgcacttcagccccatggatgtggatacacaggcctgctgcttccagaaagggtcagagcctttagcagggaggcagcacagctgggcttagacctcaggtcactaagtgaatctgagcaagtcagtgaacagttctcttccttcatttctccacctgtaagccaggtatgataaacgccatacagcgcttagtgacaaacacataaaactgtagctcctgcctctgtagcagaggtgacagccaagggcagtcctgtgctatccaggcctggtaggggggcagcctcgcctcagttgagggctgagggagagactgaggtgcagcagatggcagtggtaaccaaaccagttcccttgccgtgggtggggacacaggagaagcacggaagcatctggaactgagcaatcaggacaggaggctcaagcctgggtgagtcaggagtccgggggctttcttttcatccaacccattgtctgctggtgtctcggcaaaagccagccagccagccgtggcccttcaccgttcttcagactctagggtgagcccagcccagcgacacaacagaaaccaagtgccacgggggccggtgtcctccaccagcatttctcctctggtcacatctacgtcctgatgggacttctccctcctccttggaccatcagctttacagtccagaccaccctgcagccacccggtggtctcccagctgccccagtctcgggcaggatggcttttgagcctgttgggagagaccttgccaggagaatggtgcccagggcaggcaagaggacacagactctgggagctagaagagttgcggcccagggggccaggccactcccagaggacaggaggcccaaaagcggggaaaggctccatgttacggtggccccatgctgggagtttgtgctgccttctgtctccctgactgcccaagcgtggggtggtgtggggcaggaggcatcctctggtgttccctagcagcccaggctgtgtgcaggggctcccattttgtgtctcagctgcaagaaggccacaaagggaggaggggctcatgggactgctgagaagaaggtgtgcagaaagggagtgtggccctagatcagtcctttaaaaagcctctgttacctgaaaggaggtcaagcagagaggaatggctgcgtgtgtgtcctaccgggcaggacaggacagagggaggtcattgttacacacacatcccccctcctttcctccttcccctccacttccctgtgaaggcctgaggcaggctgtggccaggctcaggccctgactgtggggtacacaccagggagggccacgcctccccacagacggggtggagtggtcagtggagccagcaccctctgctgcttcagcatctccgcctggagccagctgtcccctctctctcaggctccatccgaacaaaaggaaggcagagcctgagatccggcaccccatccccctccactcagcactgagttagagctgggtgggggcatgtctgccttcacacgctgccttatggcttctgtgtctccaacagccctcagcctctggctgctctccttcccaatagtcacaagatttaccatgataataataggttaagacttgaatggtgttttcatcttctttcatcttcaccctgtctcacgttacgttatttttatcctgatgacagaataggtactacaggtatttttactctggttttacagtcaaagaaactgaggcacaggcaggtttgcccaaggtcacataactgcttaatagcagggtagacaggtgaagtaactggatgtgtatcagccatgccctttccccatgcccccggcactccccatgacagctctctgaatcccaacattttattcttttgcaggattagacccaagcatataaattcctttttccctctc

SEQ ID NO: 17358 - DNA, 2659 bp, Homo sapiens
  source 1..2659: mol_type = unassigned DNA
gagcttgaaaagaaacatgaaggtgggctggccaggtgagagctgctggcaggtgggcctggctgtggaggatagcccagctctgggagcaccgcgggtgggagccctccctgacgtggtgccggaggggacactactcaacatggtgttgagaaggatgcaccggccccgaagctgctcctaccagctgctgctggagcaccagcgtccgagctgcatccaggggctgcgctggcccaggtcagcgcacggatgaagagctggacctcatctttgaggagctgctgcacatcaaggctgtggcccacctctccaactcggtgaagcgagaattagcggctgttctgctctttgaaccacacagcaaggcagggaccgtgttgttcagccagggggacaagggcacttcgtggtacattatctggaagggatctgtcaacgtggtgacccatggcaaggggctggtgaccaccctgcatgagggagatgattttggacagctggctctggtgaatgatgcaccccgggcagccaccatcatcctgcgagaagacaactgtcatttcctgcgtgtggacaagcaggacttcaaccgtatcatcaaggatgtggaggcaaagaccatgcggctggaagaacatggcaaagtggtgctggtgctggagagagcctctcagggcgccggcccttcccgacccccaaccccaggcaggaaccggtatacagtgatgtctggcaccccagagaagatcctagagcttctgttggaggccatgggaccagattccagtgctcatgacccaacagagacattcctcagcgacttcctcctgacccacagggtcttcatgcccagcgcccaactctgcgctgcccttctgcaccacttccatgtggagcctgcgggtggcagcgagcaggagcgcagcacctacgtctgcaacaagaggcagcagatcttgcggctggtcagccagtgggtggccctgtatggctccatgctccacactgaccctgtggccaccagcttcctccagaaactctcagacctggtgggcagggacacccgactcagcaacctgctgagggagcagtggccagagaggcggcgatgccacaggttggagaatggctgtgggaatgcatctcctcagatgaaggcccggaacttgcctgtttggctccccaaccaggacgagccccttcctggcagcagctgtgccatccaagttggggataaagtcccctatgacatctgccggccagaccactcagtgttgaccctgcagctgcctgtgacagcctccgtgagagaggtgatggcagcgttggcccaggaggatggctggaccaaggggcaggtgctggtgaaggtcaattctgcaggtgatgccattggcctgcagccagatgcccgtggtgtggccacatctctggggctcaatgagcgtctctttgttgtcaacccacaggaagtgcatgagctgatcccacaccctgaccagctggggcccactgtgggctctgctgaggggctggacctggtgagtgccaaggacctggcaggccagctgacggaccacgactggagcctcttcaacagtatccaccaggtggagctgatccactatgtgctgggcccccagcatctgcgggatgtcaccaccgccaacctggagcgcttcatgcgccgcttcaatgagctgcagtactgggtggccaccgagctgtgtctctgccccgtgcccggcccccgggcccagctgctcaggaagttcattaagctggcggcccacctcaaggagcagaagaatctcaattccttctttgccgtcatgtttggcctcagcaactcggccatcagccgcctagcccacacctgggagcggctgcctcacaaagtccggaagctgtactccgccctcgagaggctgctggatccctcatggaaccaccgggtataccgactggccctcgccaagctctcccctcctgtcatccccttcatgccccttcttctcaaagacatgaccttcattcatgagggaaaccacacactagtggagaatctcatcaactttgagaagatgagaatgatggccagagccgcgcggatgctgcaccactgccgaagccacaaccctgtgcctctctcaccactcagaagccgagtttcccacctccacgaggacagccaggtggcgaggatttccacatgctcggagcagtccctgagcacccggagtccagccagcacctgggcttatgtccagcagctgaaggtcattgacaaccagcgggaactctcccgcctctcccgagagctggagccatgaggaggggctgggactggagctggagcaggcacttgcagccgggaaagccagggtgtgccgggccaagatactcacaggctggccacagctgggcaaggctctccgtggagtggactcgagtccctggagcaggcagtgtggaggcagccatcccctgtgatgactggcagctaaggaggacctcggagtggacccgagccaggaataacgaatgacccaaggccaaggaagggaggacagagaggccccaggagtgggtggagagtggagtgcgctgggacgttgtgtgcaatagagaggtctccacaccagatgtcttccag

SEQ ID NO: 17359 - DNA, 3265 bp, Homo sapiens
  source 1..3265: mol_type = unassigned DNA
aggagctgccggtggagagtgagtgctggtcctgtggaggagggagcaagccccgtggtccggagtgcatttccatggatggcttcagagctggccaggatggacagtactccaggcagtgggaaccgcacgtgtgatggcgcagagggaagaaataaagcggccgctttgggaaactgtgggctggccaggtgagagctgctggcaggtgggcctggctgtggaggatagcccagctctgggagcaccgcgggtgggagccctccctgacgtggtgccggaggggacactactcaacatggtgttgagaaggatgcaccggccccgaagctgctcctaccagctgctgctggagcaccagcgtccgagctgcatccaggggctgcgctggacaccactcaccaacagcgaggagtccctggatttcagcgagagcctggagcaggcctccacagagcgggtgctcagggctgggaggcagctgcatcggcatctgctggccacctgcccaaacctcatccgagaccggaagtaccaccttaggctctatcggcagtgctgctctggccgggagctggtggatgggatcttggccctgggacttggggtccattcccggagccaagttgtgggaatctgccaggtgctgctggatgaaggtgccctctgccatgtgaaacacgactgggccttccaggaccgagatgcccaattctaccggttccccgggcccgagcccgagcccgtgagaactcatgagatggaggaggagttggccgaagctgtggccctgctctcccagcgggggcctgacgccctgctcactgtggcacttcgaaagcccccaggtcagcgcacggatgaagagctggacctcatctttgaggagctgctgcacatcaaggctgtggcccacctctccaactcggtgaagcgagaattagcggctgttctgctctttgaaccacacagcaaggcagggaccgtgttgttcagccagggggacaagggcacttcgtggtacattatctggaagggatctgtcaacgtggtgacccatggcaaggggctggtgaccaccctgcatgagggagatgattttggacagctggctctggtgaatgatgcaccccgggcagccaccatcatcctgcgagaagacaactgtcatttcctgcgtgtggacaagcaggacttcaaccgtatcatcaaggatgtggaggcaaagaccatgcggctggaagaacatggcaaagtggtgctggtgctggagagagcctctcagggcgccggcccttcccgacccccaaccccaggcaggaaccggtatacagtgatgtctggcaccccagagaagatcctagagcttctgttggaggccatgggaccagattccagtgctcatgacccaacagagacattcctcagcgacttcctcctgacccacagggtcttcatgcccagcgcccaactctgcgctgcccttctgcaccacttccatgtggagcctgcgggtggcagcgagcaggagcgcagcacctacgtctgcaacaagaggcagcagatcttgcggctggtcagccagtgggtggccctgtatggctccatgctccacactgaccctgtggccaccagcttcctccagaaactctcagacctggtgggcagggacacccgactcagcaacctgctgagggagcagtggccagagaggcggcgatgccacaggttggagaatggctgtgggaatgcatctcctcagatgaaggcccggaacttgcctgtttggctccccaaccaggacgagccccttcctggcagcagctgtgccatccaagttggggataaagtcccctatgacatctgccggccagaccactcagtgttgaccctgcagctgcctgtgacagcctccgtgagagaggtgatggcagcgttggcccaggaggatggctggaccaaggggcaggtgctggtgaaggtcaattctgcaggtgatgccattggcctgcagccagatgcccgtggtgtggccacatctctggggctcaatgagcgtctctttgttgtcaacccacaggaagtgcatgagctgatcccacaccctgaccagctggggcccactgtgggctctgctgaggggctggacctggtgagtgccaaggacctggcaggccagctgacggaccacgactggagcctcttcaacagtatccaccaggtggagctgatccactatgtgctgggcccccagcatctgcgggatgtcaccaccgccaacctggagcgcttcatgcgccgcttcaatgagctgcagtactgggtggccaccgagctgtgtctctgccccgtgcccggcccccgggcccagctgctcaggaagttcattaagctggcggcccacctcaaggagcagaagaatctcaattccttctttgccgtcatgtttggcctcagcaactcggccatcagccgcctagcccacacctgggagcggctgcctcacaaagtccggaagctgtactccgccctcgagaggctgctggatccctcatggaaccaccgggtataccgactggccctcgccaagctctcccctcctgtcatccccttcatgccccttcttctcaaagacatgaccttcattcatgagggaaaccacacactagtggagaatctcatcaactttgagaagatgagaatgatggccagagccgcgcggatgctgcaccactgccgaagccacaaccctgtgcctctctcaccactcagaagccgagtttcccacctccacgaggacagccaggtggcgaggatttccacatgctcggagcagtccctgagcacccggagtccagccagcacctgggcttatgtccagcagctgaaggtcattgacaaccagcgggaactctcccgcctctcccgagagctggagccatgaggaggggctgggactggagctggagcaggcacttgcagccgggaaagccagggtgtgccgggccaagatactcacaggctggccacagctgggcaaggctctccgtggagtggactcgagtccctggagcaggcagtgtggaggcagccatcccctgtgatgactggcagctaaggaggacctcggagtggacccgagccaggaataacgaatgacccaaggccaaggaagggaggacagagaggccccaggagtgggtggagagtggagtgcgctgggacgttgtgtgcaatagagaggtctccacaccagatgtcttcc

SEQ ID NO: 17360 - DNA, 2325 bp, Homo sapiens
  source 1..2325: mol_type = unassigned DNA
cactgctggtagttttgggaatcacccatgtgcaggcgacacatgaggcagtaaggaactctgcaggggtccctgagatttggaaatgtagggaagagcaatggattgaggtccgaacctggaggatctgctatacgcagagctgggaggagggacagagtcagtaccagagtcggaaaaaagcagggtgggaaggggaacctgagtcaggagacttgcctggcaggcgctgccctgccagcagaggcctgacagtggtttccatgaactgcatccctgctgtgggctgggacagggccactgacacagtatcggagcacagagggggaaaggagcaggagggattccaactctgccagttagcagctgtgtggctttgggcatgttacttaacctctctgagcctcatttatttcatccataaaatggaaataaaaataatacttttgtcaaaggcgcattgtgaatatttagatcctcagaataatgcctggcttgtagcaaatggtagctggaggaaaaggaagagaaaaccaaagtcagcagctgaaggattttcatattagaactgctctggacctatctggcagatgcagaagcacacacacacggaggggcatggatttgccccgcccttagacatgttgtgtcttctcctggatccttggtcccaggtgccttacctgagctcaggtgaatgtggcaagcagagccctctggtggtgtgaatgctgtgtggcgcccgtgctcctggtgacacagggacctcacaatccctccctccacggtctcctctcatgtcctcccagccttattttctcgttcctcttcctcccaggcccggaacttgcctgtttggctccccaaccaggacgagccccttcctggcagcagctgtgccatccaagttggggataaagtcccctatgacatctgccggccagaccactcagtgttgaccctgcagctgcctgtgacagcctccgtgagagaggtgatggcagcgttggcccaggaggatggctggaccaaggggcaggtgctggtgaaggtcaattctgcaggtgatgccattggcctgcagccagatgcccgtggtgtggccacatctctggggctcaatgagcgtctctttgttgtcaacccacaggaagtgcatgagctgatcccacaccctgaccagctggggcccactgtgggctctgctgaggggctggacctggtgagtgccaaggacctggcaggccagctgacggaccacgactggagcctcttcaacagtatccaccaggtggagctgatccactatgtgctgggcccccagcatctgcgggatgtcaccaccgccaacctggagcgcttcatgcgccgcttcaatgagctgcagtactgggtggccaccgagctgtgtctctgccccgtgcccggcccccgggcccagctgctcaggaagttcattaagctggcggcccacctcaaggagcagaagaatctcaattccttctttgccgtcatgtttggcctcagcaactcggccatcagccgcctagcccacacctgggagcggctgcctcacaaagtccggaagctgtactccgccctcgagaggctgctggatccctcatggaaccaccgggtataccgactggccctcgccaagctctcccctcctgtcatccccttcatgccccttcttctcaaagacatgaccttcattcatgagggaaaccacacactagtggagaatctcatcaactttgagaagatgagaatgatggccagagccgcgcggatgctgcaccactgccgaagccacaaccctgtgcctctctcaccactcagaagccgagtttcccacctccacgaggacagccaggtggcgaggatttccacatgctcggagcagtccctgagcacccggagtccagccagcacctgggcttatgtccagcagctgaaggtcattgacaaccagcgggaactctcccgcctctcccgagagctggagccatgaggaggggctgggactggagctggagcaggcacttgcagccgggaaagccagggtgtgccgggccaagatactcacaggctggccacagctgggcaaggctctccgtggagtggactcgagtccctggagcaggcagtgtggaggcagccatcccctgtgatgactggcagctaaggaggacctcggagtggacccgagccaggaataacgaatgacccaaggccaaggaagggaggacagagaggccccaggagtgggtggagagtggagtgcgctgggacgttgtgtgcaatagagaggtctccacacca

SEQ ID NO: 17361 - DNA, 3395 bp, Homo sapiens
  source 1..3395: mol_type = unassigned DNA
acgcccccacccctctactcacccaagaggagcctctccaccgagccctgcatcctgctgccctggcagccagtccagctaggcactggcccagttcactgtacctggacttacccactggcaccctccggatccccttatcaaagctgatgggggtcgctggggaccccccagccttttgctagagcctgcacggctgtgcgagcttgaaaagaaacatgaaggtgggctggccaggtgagagctgctggcaggtgggcctggctgtggaggatagcccagctctgggagcaccgcgggtgggagccctccctgacgtggtgccggaggggacactactcaacatggtgttgagaaggatgcaccggccccgaagctgctcctaccagctgctgctggagcaccagcgtccgagctgcatccaggggctgcgctggacaccactcaccaacagcgaggagtccctggatttcagcgagagcctggagcaggcctccacagagcgggtgctcagggctgggaggcagctgcatcggcatctgctggccacctgcccaaacctcatccgagaccggaagtaccaccttaggctctatcggcagtgctgctctggccgggagctggtggatgggatcttggccctgggacttggggtccattcccggagccaagttgtgggaatctgccaggtgctgctggatgaaggtgccctctgccatgtgaaacacgactgggccttccaggaccgagatgcccaattctaccggttccccgggcccgagcccgagcccgtgagaactcatgagatggaggaggagttggccgaagctgtggccctgctctcccagcgggggcctgacgccctgctcactgtggcacttcgaaagcccccaggtcagcgcacggatgaagagctggacctcatctttgaggagctgctgcacatcaaggctgtggcccacctctccaactcggtgaagcgagaattagcggctgttctgctctttgaaccacacagcaaggcagggaccgtgttgttcagccagggggacaagggcacttcgtggtacattatctggaagggatctgtcaacgtggtgacccatggcaaggggctggtgaccaccctgcatgagggagatgattttggacagctggctctggtgaatgatgcaccccgggcagccaccatcatcctgcgagaagacaactgtcatttcctgcgtgtggacaagcaggacttcaaccgtatcatcaaggatgtggaggcaaagaccatgcggctggaagaacatggcaaagtggtgctggtgctggagagagcctctcagggcgccggcccttcccgacccccaaccccaggcaggaaccggtaatacacctgccatgctccctctccacactgtccctcctttcatttcccaatctttgctcccttcccctgtgtcatatccctgccctctggccacttgtggatggagaggtattgagggaccaggatgtgcctgctgagccagtctcctccctgccctaaggtgggacagggctggctaatggagaaaaatgatgtaattgattattgatgtctgcccaggtgtgggagtggggagtagtggcaccagtgccaaagattggccatttctgctaggtatacagtgatgtctggcaccccagagaagatcctagagcttctgttggaggccatgggaccagattccagtgctcatgacccaacagagacattcctcagcgacttcctcctgacccacagggtcttcatgcccagcgcccaactctgcgctgcccttctgcaccacttccatgtggagcctgcgggtggcagcgagcaggagcgcagcacctacgtctgcaacaagaggcagcagatcttgcggctggtcagccagtgggtggccctgtatggctccatgctccacactgaccctgtggccaccagcttcctccagaaactctcagacctggtgggcagggacacccgactcagcaacctgctgagggagcagtggccagagaggcggcgatgccacaggttggagaatggctgtgggaatgcatctcctcagatgaaggcccggaacttgcctgtttggctccccaaccaggacgagccccttcctggcagcagctgtgccatccaagttggggataaagtcccctatgacatctgccggccagaccactcagtgttgaccctgcagctgcctgtgacagcctccgtgagagaggtgatggcagcgttggcccaggaggatggctggaccaaggggcaggtgctggtgaaggtcaattctgcaggtgatgccattggcctgcagccagatgcccgtggtgtggccacatctctggggctcaatgagcgtctctttgttgtcaacccacaggaagtgcatgagctgatcccacaccctgaccagctggggcccactgtgggctctgctgaggggctggacctggtgagtgccaaggacctggcaggccagctgacggaccacgactggagcctcttcaacagtatccaccagcctcaaggagcagaagaatctcaattccttctttgccgtcatgtttggcctcagcaactcggccatcagccgcctagcccacacctgggagcggctgcctcacaaagtccggaagctgtactccgccctcgagaggctgctggatccctcatggaaccaccgggtataccgactggccctcgccaagctctcccctcctgtcatccccttcatgccccttcttctcaaagacatgaccttcattcatgagggaaaccacacactagtggagaatctcatcaactttgagaagatgagaatgatggccagagccgcgcggatgctgcaccactgccgaagccacaaccctgtgcctctctcaccactcagaagccgagtttcccacctccacgaggacagccaggtggcgaggatttccacatgctcggagcagtccctgagcacccggagtccagccagcacctgggcttatgtccagcagctgaaggtcattgacaaccagcgggaactctcccgcctctcccgagagctggagccatgaggaggggctgggactggagctggagcaggcacttgcagccgggaaagccagggtgtgccgggccaagatactcacaggctggccacagctgggcaaggctctccgtggagtggactcgagtccctggagcaggcagtgtggaggcagccatcccctgtgatgactggcagctaaggaggacctcggagtggacccgagccaggaataacgaatgacccaaggccaaggaagggaggacagagaggccccaggagtgggtggagagtggagtgcgctgggacgttgtgtgcaatagagaggtctccacacca

SEQ ID NO: 17362 - DNA, 3917 bp, Homo sapiens
  source 1..3917: mol_type = unassigned DNA
gtctgagacgaaggcgcaggctcggggctccctgtcgccggtggctgggtggcgtccccccaccacgcccccacccctctactcacccaagaggagcctctccaccgagccctgcatcctgctgccctggcagccagtccagctaggcactggcccagttcactgtacctggacttacccactggcaccctccggatccccttatcaaagctgatgggggtcgctggggaccccccagccttttgctagagcctgcacggctgtgcgagcttgaaaagaaacatgaaggtgggctggccaggtgagagctgctggcaggtgggcctggctgtggaggatagcccagctctgggagcaccgcgggtgggagccctccctgacgtggtgccggaggggacactactcaacatggtgttgagaaggatgcaccggccccgaagctgctcctaccagctgctgctggagcaccagcgtccgagctgcatccaggggctgcgctggacaccactcaccaacagcgaggagtccctggatttcagcgagagcctggagcaggcctccacagagcgggtgctcagggctgggaggcagctgcatcggcatctgctggccacctgcccaaacctcatccgagaccggaagtaccaccttaggctctatcggcagtgctgctctggccgggagctggtggatgggatcttggccctgggacttggggtccattcccggagccaagttgtgggaatctgccaggtgctgctggatgaaggtgccctctgccatgtgaaacacgactgggccttccaggaccgagatgcccaattctaccggttccccgggcccgagcccgagcccgtgagaactcatgagatggaggaggagttggccgaagctgtggccctgctctcccagcgggggcctgacgccctgctcactgtggcacttcgaaagcccccaggtcagcgcacggatgaagagctggacctcatctttgaggagctgctgcacatcaaggctgtggcccacctctccaactcggtgaagcgagaattagcggctgttctgctctttgaaccacacagcaaggcagggaccgtgttgttcagccagggggacaagggcacttcgtggtacattatctggaagggatctgtcaacgtggtgacccatggcaaggggctggtgaccaccctgcatgagggagatgattttggacagctggctctggtgaatgatgcaccccgggcagccaccatcatcctgcgagaagacaactgtcatttcctgcgtgtggacaagcaggacttcaaccgtatcatcaaggtgctgctgctggggttggggagggcaggggccattcgtccagagaagtgatgtggagagaggagtagggaccagagcagagggcctgtaagaagcagggcaggtaagagatgctgggctatgacagctggcagtgggaccatagccctgggtgtgtgtgagaaggtgaagcccataaggcacagaaggagttcagtgagaccagtgacttcaggctcagtgtgggagaccaggggaaggatgggcatgcagggggcgggggactaggctgtgggggaggcaggatgcatggaaggtagggaaggctgaggaggtggagccaaagtcggaggtgggagaagggctgtgggtccctgtgggaccctcatggggctcaggggctggaatgaaggaggtagatgagagggtctaaagctggaacatcatgagttgagcatgggatgtggcctgttctccaggatgtggaggcaaagaccatgcggctggaagaacatggcaaagtggtgctggtgctggagagagcctctcagggcgccggcccttcccgacccccaaccccaggcaggaaccggtaatacacctgccatgctccctctccacactgtccctcctttcatttcccaatctttgctcccttcccctgtgtcatatccctgccctctggccacttgtggatggagaggtattgagggaccaggatgtgcctgctgagccagtctcctccctgccctaaggtgggacagggctggctaatggagaaaaatgatgtaattgattattgatgtctgcccaggtgtgggagtggggagtagtggcaccagtgccaaagattggccatttctgctaggtatacagtgatgtctggcaccccagagaagatcctagagcttctgttggaggccatgggaccagattccagtgctcatgacccaacagagacattcctcagcgacttcctcctgacccacagggtcttcatgcccagcgcccaactctgcgctgcccttctgcaccacttccatgtggagcctgcgggtggcagcgagcaggagcgcagcacctacgtctgcaacaagaggcagcagatcttgcggctggtcagccagtgggtggccctgtatggctccatgctccacactgaccctgtggccaccagcttcctccagaaactctcagacctggtgggcagggacacccgactcagcaacctgctgagggagcagtggccagagaggcggcgatgccacaggttggagaatggctgtgggaatgcatctcctcagatgaaggcccggaacttgcctgtttggctccccaaccaggacgagccccttcctggcagcagctgtgccatccaagttggggataaagtcccctatgacatctgccggccagaccactcagtgttgaccctgcagctgcctgtgacagcctccgtgagagaggtgatggcagcgttggcccaggaggatggctggaccaaggggcaggtgctggtgaaggtcaattctgcaggtgatgccattggcctgcagccagatgcccgtggtgtggccacatctctggggctcaatgagcgtctctttgttgtcaacccacaggaagtgcatgagctgatcccacaccctgaccagctggggcccactgtgggctctgctgaggggctggacctggtgagtgccaaggacctggcaggccagctgacggaccacgactggagcctcttcaacagtatccaccagcctcaaggagcagaagaatctcaattccttctttgccgtcatgtttggcctcagcaactcggccatcagccgcctagcccacacctgggagcggctgcctcacaaagtccggaagctgtactccgccctcgagaggctgctggatccctcatggaaccaccgggtataccgactggccctcgccaagctctcccctcctgtcatccccttcatgccccttcttctcaaagacatgaccttcattcatgagggaaaccacacactagtggagaatctcatcaactttgagaagatgagaatgatggccagagccgcgcggatgctgcaccactgccgaagccacaaccctgtgcctctctcaccactcagaagccgagtttcccacctccacgaggacagccaggtggcgaggatttccacatgctcggagcagtccctgagcacccggagtccagccagcacctgggcttatgtccagcagctgaaggtcattgacaaccagcgggaactctcccgcctctcccgagagctggagccatgaggaggggctgggactggagctggagcaggcacttgcagccgggaaagccagggtgtgccgggccaagatactcacaggctggccacagctgggcaaggctctccgtggagtggactcgagtccctggagcaggcagtgtggaggcagccatcccctgtgatgactggcagctaaggaggacctcggagtggacccgagccaggaataacgaatgacccaaggccaaggaagggaggacagagaggccccaggagtgggtggagagtggagtgcgctgggacgttgtgtgcaatagagaggtctccacacca

SEQ ID NO: 17363 - DNA, 1947 bp, Homo sapiens
  source 1..1947: mol_type = unassigned DNA
aataaccaacatttaattaaaacccacaccccactgtgtgaatatttgtttgtaagtaatacacatatattactacattaatatcataataaagatagataaaatagaaattgatggagtagaaatgcaaagcaggtagaaaaagtaaacgtaagtagaagagctcatattttccccaggcacatggatgatctgatgtaccttactttggaggccactgctctagggactggggactcaagcacagtcccagtccatgaggagctgatgaaaatcaacaccaaggcttatataagacacttcccaattttcaaagggcttttatacatagcatgtacttatagctactatttatatacattattttatttgacttatgaaatagttggggcaagtcttattgtctccattttaccagggaagaaagtgaggctgagggaggctcagaccctgcccaggttcttcctgactcactgagaatctttcctcatcctcttggatgtgcttccctgggctgcgtggctgcgtgggcacatgcacctgtgtattctgagcaccacccaggacttcaaccccgctactaggagaaacaacctctcagcctcccaaacagcacctccaccctggcatccagctggtccccggcctccctcccttcccccacccagtccgcctctgctgtctttgcagatgccattggcctgcagccagatgcccgtggtgtggccacatctctggggctcaatgagcgtctctttgttgtcaacccacaggaagtgcatgagctgatcccacaccctgaccagctggggcccactgtgggctctgctgaggggctggacctggtgagtgccaaggacctggcaggccagctgacggaccacgactggagcctcttcaacagtatccaccaggtggagctgatccactatgtgctgggcccccagcatctgcgggatgtcaccaccgccaacctggagcgcttcatgcgccgcttcaatgagctgcagtactgggtggccaccgagctgtgtctctgccccgtgcccggcccccgggcccagctgctcaggaagttcattaagctggcggcccacctcaaggagcagaagaatctcaattccttctttgccgtcatgtttggcctcagcaactcggccatcagccgcctagcccacacctgggagcggctgcctcacaaagtccggaagctgtactccgccctcgagaggctgctggatccctcatggaaccaccgggtataccgactggccctcgccaagctctcccctcctgtcatccccttcatgccccttcttctcaaagacatgaccttcattcatgagggaaaccacacactagtggagaatctcatcaactttgagaagatgagaatgatggccagagccgcgcggatgctgcaccactgccgaagccacaaccctgtgcctctctcaccactcagaagccgagtttcccacctccacgaggacagccaggtggcgaggatttccacatgctcggagcagtccctgagcacccggagtccagccagcacctgggcttatgtccagcagctgaaggtcattgacaaccagcgggaactctcccgcctctcccgagagctggagccatgaggaggggctgggactggagctggagcaggcacttgcagccgggaaagccagggtgtgccgggccaagatactcacaggctggccacagctgggcaaggctctccgtggagtggactcgagtccctggagcaggcagtgtggaggcagccatcccctgtgatgactggcagctaaggaggacctcggagtggacccgagccaggaataacgaatgacccaaggccaaggaagggaggacagagaggccccaggagtgggtggagagtggagtgcgctgggacgttgtgtgcaatagagaggtctccacacc

SEQ ID NO: 17364 - DNA, 3294 bp, Homo sapiens
  source 1..3294: mol_type = unassigned DNA
gtgccagctggctccttcgtctgagacgaaggcgcaggctcggggctccctgtcgccggtggctgggtggcgtccccccaccacgcccccacccctctactcacccaagaggagcctctccaccgagccctgcatcctgctgccctggcagccagtccagctaggcactggcccagttcactgtacctggacttacccactggaaaagaaacatgaaggtgggctggccaggtgagagctgctggcaggtgggcctggctgtggaggatagcccagctctgggagcaccgcgggtgggagccctccctgacgtggtgccggaggggacactactcaacatggtgttgagaaggatgcaccggccccgaagctgctcctaccagctgctgctggagcaccagcgtccgagctgcatccaggggctgcgctggacaccactcaccaacagcgaggagtccctggatttcagcgagagcctggagcaggcctccacagagcgggtgctcagggctgggaggcagctgcatcggcatctgctggccacctgcccaaacctcatccgagaccggaagtaccaccttaggctctatcggcagtgctgctctggccgggagctggtggatgggatcttggccctgggacttggggtccattcccggagccaagttgtgggaatctgccaggtgctgctggatgaaggtgccctctgccatgtgaaacacgactgggccttccaggaccgagatgcccaattctaccggttccccgggcccgagcccgagcccgtgagaactcatgagatggaggaggagttggccgaagctgtggccctgctctcccagcgggggcctgacgccctgctcactgtggcacttcgaaagcccccaggtcagcgcacggatgaagagctggacctcatctttgaggagctgctgcacatcaaggctgtggcccacctctccaactcggtgaagcgagaattagcggctgttctgctctttgaaccacacagcaaggcagggaccgtgttgttcagccagggggacaagggcacttcgtggtacattatctggaagggatctgtcaacgtggtgacccatggcaaggggctggtgaccaccctgcatgagggagatgattttggacagctggctctggtgaatgatgcaccccgggcagccaccatcatcctgcgagaagacaactgtcatttcctgcgtgtggacaagcaggacttcaaccgtatcatcaaggatgtggaggcaaagaccatgcggctggaagaacatggcaaagtggtgctggtgctggagagagcctctcagggcgccggcccttcccgacccccaaccccaggcaggaaccggtatacagtgatgtctggcaccccagagaagatcctagagcttctgttggaggccatgggaccagattccagtgctcatgacccaacagagacattcctcagcgacttcctcctgacccacagggtcttcatgcccagcgcccaactctgcgctgcccttctgcaccacttccatgtggagcctgcgggtggcagcgagcaggagcgcagcacctacgtctgcaacaagaggcagcagatcttgcggctggtcagccagtgggtggccctgtatggctccatgctccacactgaccctgtggccaccagcttcctccagaaactctcagacctggtgggcagggacacccgactcagcaacctgctgagggagcagtggccagagaggcggcgatgccacaggttggagaatggctgtgggaatgcatctcctcagatgaaggcccggaacttgcctgtttggctccccaaccaggacgagccccttcctggcagcagctgtgccatccaagttggggataaagtcccctatgacatctgccggccagaccactcagtgttgaccctgcagctgcctgtgacagcctccgtgagagaggtgatggcagcgttggcccaggaggatggctggaccaaggggcaggtgctggtgaaggtcaattctgcaggtgatgccattggcctgcagccagatgcccgtggtgtggccacatctctggggctcaatgagcgtctctttgttgtcaacccacaggaagtgcatgagctgatcccacaccctgaccagctggggcccactgtgggctctgctgaggggctggacctggtgagtgccaaggacctggcaggccagctgacggaccacgactggagcctcttcaacagtatccaccaggtggagctgatccactatgtgctgggcccccagcatctgcgggatgtcaccaccgccaacctggagcgcttcatgcgccgcttcaatgagctgcagtactgggtggccaccgagctgtgtctctgccccgtgcccggcccccgggcccagctgctcaggaagttcattaagctggcggcccacctcaaggagcagaagaatctcaattccttctttgccgtcatgtttggcctcagcaactcggccatcagccgcctagcccacacctgggagcggctgcctcacaaagtccggaagctgtactccgccctcgagaggctgctggatccctcatggaaccaccgggtataccgactggccctcgccaagctctcccctcctgtcatccccttcatgccccttcttctcaaagacatgaccttcattcatgagggaaaccacacactagtggagaatctcatcaactttgagaagatgagaatgatggccagagccgcgcggatgctgcaccactgccgaagccacaaccctgtgcctctctcaccactcagaagccgagtttcccacctccacgaggacagccaggtggcgaggatttccacatgctcggagcagtccctgagcacccggagtccagccagcacctgggcttatgtccagcagctgaaggtcattgacaaccagcgggaactctcccgcctctcccgagagctggagccatgaggaggggctgggactggagctggagcaggcacttgcagccgggaaagccagggtgtgccgggccaagatactcacaggctggccacagctgggcaaggctctccgtggagtggactcgagtccctggagcaggcagtgtggaggcagccatcccctgtgatgactggcagctaaggaggacctcggagtggacccgagccaggaataacgaatgacccaaggccaaggaagggaggacagagaggccccaggagtgggtggagagtggagtgcgctgggacgttgtgtgcaatagagaggtctccacacc

SEQ ID NO: 17365 - DNA, 2776 bp, Homo sapiens
  source 1..2776: mol_type = unassigned DNA
tcctttaggagctgccggtggagagtgagtgctggtcctgtggaggagggagcaagccccgtggtccggagtgcatttccatggatggcttcagagctggccaggatggacagtactccaggcagtgggaaccgcacgtgtgatggcgcagagggaagaaataaagcggccgctttgggaaactgtgggctggccaggtgagagctgctggcaggtgggcctggctgtggaggatagcccagctctgggagcaccgcgggtgggagccctccctgacgtggtgccggaggggacactactcaacatggtgttgagaaggatgcaccggccccgaagctgctcctaccagctgctgctggagcaccagcgtccgagctgcatccaggggctgcgctggacaccactcaccaacagcgaggagtccctggatttcagcgagagcctggagcaggcctccacagagcgggtgctcagggctgggaggcagctgcatcggcatctgctggccacctgcccaaacctcatccgagaccggaagtaccaccttaggctctatcggcagtgctgctctggccgggagctggtggatgggatcttggccctgggacttggggtccattcccggagccaagttgtgggaatctgccaggtgctgctggatgaaggtgccctctgccatgtgaaacacgactgggccttccaggaccgagatgcccaattctaccggttccccgggcccgagcccgagcccgtgagaactcatgagatggaggaggagttggccgaagctgtggccctgctctcccagcgggggcctgacgccctgctcactgtggcacttcgaaagcccccaggtcagcgcacggatgaagagctggacctcatctttgaggagctgctgcacatcaaggctgtggcccacctctccaactcggtgaagcgagaattagcggctgttctgctctttgaaccacacagcaaggcagggaccgtgttgttcagccagggggacaagggcacttcgtggtacattatctggaagggatctgtcaacgtggtgacccatggcaaggggctggtgaccaccctgcatgagggagatgattttggacagctggctctggtgaatgatgcaccccgggcagccaccatcatcctgcgagaagacaactgtcatttcctgcgtgtggacaagcaggacttcaaccgtatcatcaaggatgtggaggcaaagaccatgcggctggaagaacatggcaaagtggtgctggtgctggagagagcctctcagggcgccggcccttcccgacccccaaccccaggcaggaaccggtatacagtgatgtctggcaccccagagaagatcctagagcttctgttggaggccatgggaccagattccagtgctcatgacccaacagagacattcctcagcgacttcctcctgacccacagggtcttcatgcccagcgcccaactctgcgctgcccttctgcaccacttccatgtggagcctgcgggtggcagcgagcaggagcgcagcacctacgtctgcaacaagaggcagcagatcttgcggctggtcagccagtgggtggccctgtatggctccatgctccacactgaccctgtggccaccagcttcctccagaaactctcagacctggtgggcagggacacccgactcagcaacctgctgagggagcagtggccagagaggcggcgatgccacaggttggagaatggctgtgggaatgcatctcctcagatgaaggcccggaacttgcctgtttggctccccaaccaggacgagccccttcctggcagcagctgtgccatccaagttggggataaagatgccattggcctgcagccagatgcccgtggtgtggccacatctctggggctcaatgagcgtctctttgttgtcaacccacaggaagtgcatgagctgatcccacaccctgaccagctggggcccactgtgggctctgctgaggggctggacctggtgagtgccaaggacctggcaggccagctgacggaccacgactggagcctcttcaacagtatccaccaggtggagctgatccactatgtgctgggcccccagcatctgcgggatgtcaccaccgccaacctggagcgcttcatgcgccgcttcaatgagctgcagtactgggtggccaccgagctgtgtctctgccccgtgcccggcccccgggcccagctgctcaggaagttcattaagctggcggcccacaactcggccatcagccgcctagcccacacctgggagcggctgcctcacaaagtccggaagctgtactccgccctcgagaggctgctggatccctcatggaaccaccgggtataccgactggccctcgccaagctctcccctcctgtcatccccttcatgccccttcttctcaaagacatgaccttcattcatgagggaaaccacacactagtggagaatctcatcaactttgagaagatgagaatgatggccagagccgcgcggatgctgcaccactgccgaagccacaaccctgtgcctctctcaccactcagaagccgagtttcccacctccacgaggacagccaggtggcgaggatttccacatgctcggagcagtccctgagcacccggagtccagccagcacctgggcttatgtccagcagctgaaggtcattgacaaccagcgggaactctcccgcctctcccgagagctggagccatgaggaggggctgggactggagctggagca

SEQ ID NO: 17366 - DNA, 699 bp, Homo sapiens
  source 1..699: mol_type = unassigned DNA
ccagtagaagaggcgaggatagagttgggggtggaacctcccacctccaggaacttttgaggattttgagggttttgactattctggagagaagcagagaagaggtacttcatcagcatagcctgggagctcttgagagaaaatccacctcgtggggctcaagggattcaaaggagtttactctgcagagagagagagggagggacacagaaagagacagggatagaaagggacagagaggtgacagtgacagacttttccaagaaacctggggcccctgtgactaactgctgtgaattttctcagtgctaatgggaggttggaagccccgtgttcgcctgtgacagagcctgggtgagacctggggctgaggagaggctgagttggggcctctgcacctgctgtgggatgggcatgtggcccctccttggttgggtggggtctgtggtggcttatggtgtgtgcaaccccctcagtgtggcttcttcccctaggatccctcatggaaccaccgggtataccgactggccctcgccaagctctcccctcctgtcatccccttcatgccccttcttctcaaagacatgaccttcattcatgagggaaaccacacactagtggagaatctcatcaactttgagaagatgagaatgatggccagagccgcgcggatgctgcaccactgccgaagccacaacc

SEQ ID NO: 17367 - DNA, 695 bp, Homo sapiens
  source 1..695: mol_type = unassigned DNA
atgccattggcctgcagccagatgcccgtggtgtggccacatctctggggctcaatgagcgtctctttgttgtcaacccacaggaagtgcatgagctgatcccacaccctgaccagctggggcccactgtgggctctgctgaggggctggacctggtgagtgccaaggacctggcaggccagctgacggaccacgactggagcctcttcaacagtatccaccaggtggagctgatccactatgtgctgggcccccagcatctgcgggatgtcaccaccgccaacctggagcgcttcatgcgccgcttcaatgagctgcagtactgggtggccaccgagctgtgtctctgccccgtgcccggcccccgggcccagctgctcaggaagttcattaagctggcggcccacctcaaggagcagaagaatctcaattccttctttgccgtcatgtttggcctcagcaactcggccatcagccgcctagcccacacctgggagcggctgcctcacaaagtccggaagctgtactccgccctcgagaggctgctgtgctaatgggaggttggaagccccgtgttcgcctgtgacagagcctgggatccctcatggaaccaccgggtataccgactggccctcgccaagctctcccctcctgtcatccccttcatgccccttcttctcaaagacatgaccttc

SEQ ID NO: 17368 - DNA, 726 bp, Homo sapiens
  source 1..726: mol_type = unassigned DNA
gtcttattgtctccattttaccagggaagaaagtgaggctgagggaggctcagaccctgcccaggttcttcctgactcactgagaatctttcctcatcctcttggatgtgcttccctgggctgcgtggctgcgtgggcacatgcacctgtgtattctgagcaccacccaggacttcaaccccgctactaggagaaacaacctctcagcctcccaaacagcacctccaccctggcatccagctggtccccggcctccctcccttcccccacccagtccgcctctgctgtctttgcagatgccattggcctgcagccagatgcccgtggtgtggccacatctctggggctcaatgagcgtctctttgttgtcaacccacaggaagtgcatgagctgatcccacaccctgaccagctggggcccactgtgggctctgctgaggggctggacctggtgagtgccaaggacctggcaggccagctgacggaccacgactggagcctcttcaacagtatccaccagcctcaaggagcagaagaatctcaattccttctttgccgtcatgtttggcctcagcaactcggccatcagccgcctagcccacacctgggagcggctgcctcacaaagtccggaagctgtactccgccctcgagaggctgctggatccctcatggaaccaccgggtataccgactggccctcgccaagctctcccctcctgtcatcc

SEQ ID NO: 17369 - DNA, 824 bp, Homo sapiens
  source 1..824: mol_type = unassigned DNA
cctcaaggagcagaagaatctcaattccttctttgccgtcatgtttggcctcagcaactcggccatcagccgcctagcccacacctgggagcggctgcctcacaaagtccggaagctgtactccgccctcgagaggctgctggtgagtgctccaccctgcccggcctggctctgctaggatcagctgggctcggccctgccctccagacaccctcactcttggcttccctgcagcccctctactcgtcctttgtcactttcagggttcccaacctcggcccagggcctagctccagcctgtgagtttggggagctggctgaggaaggggtgttcagcactaggataggggttgcacggtgcatcctggccctcagtgtgtgcatgggggcaggagatcctgtgtgaagactgggctggagcatgtgggtgtccagtcctggggtctgaggtgccagggcagtgtcaggggctccagagcccaagggcctggcatggagcgcctgtgtgcaccagggcctgtctgcccctcaggaactccgaggggcttgcgggctagaccagtagaagaggcgaggatagagttgggggtggaacctcccacctccaggaacttttgaggattttgagggttttgactattctggagagaagcagagaagaggtacttcatcagcatagcctgggagctcttgagagaaaatccacctcgtggggctcaagggattcaaaggagtttactctgcagagagagagagggagggacacagaaagagacagggatagaaagggacagagaggtgacagtgacagacttttccaagaa

SEQ ID NO: 17370 - DNA, 4092 bp, Homo sapiens
  source 1..4092: mol_type = unassigned DNA
ggatccccttatcaaagctgatgggggtcgctggggaccccccagccttttgctagagcctgcacggctgtgcgagcttgaaaagaaacatgaaggtgggctggccaggtgagagctgctggcaggtgggcctggctgtggaggatagcccagctctgggagcaccgcgggtgggagccctccctgacgtggtgccggaggggacactactcaacatggtgttgagaaggatgcaccggccccgaagctgctcctaccagctgctgctggagcaccagcgtccgagctgcatccaggggctgcgctggacaccactcaccaacagcgaggagtccctggatttcagcgagagcctggagcaggcctccacagagcgggtgctcagggctgggaggcagctgcatcggcatctgctggccacctgcccaaacctcatccgagaccggaagtaccaccttaggctctatcggcagtgctgctctggccgggagctggtggatgggatcttggccctgggacttggggtccattcccggagccaagttgtgggaatctgccaggtgctgctggatgaaggtgccctctgccatgtgaaacacgactgggccttccaggaccgagatgcccaattctaccggttccccgggcccgagcccgagcccgtgagaactcatgagatggaggaggagttggccgaagctgtggccctgctctcccagcgggggcctgacgccctgctcactgtggcacttcgaaagcccccaggtcagcgcacggatgaagagctggacctcatctttgaggagctgctgcacatcaaggctgtggcccacctctccaactcggtgaagcgagaattagcggctgttctgctctttgaaccacacagcaaggcagggaccgtgttgttcagccagggggacaagggcacttcgtggtacattatctggaagggatctgtcaacgtggtgacccatggcaaggggctggtgaccaccctgcatgagggagatgattttggacagctggctctggtgaatgatgcaccccgggcagccaccatcatcctgcgagaagacaactgtcatttcctgcgtgtggacaagcaggacttcaaccgtatcatcaaggatgtggaggcaaagaccatgcggctggaagaacatggcaaagtggtgctggtgctggagagagcctctcagggcgccggcccttcccgacccccaaccccaggcaggaaccggtatacagtgatgtctggcaccccagagaagatcctagagcttctgttggaggccatgggaccagattccagtgctcatgacccaacagagacattcctcagcgacttcctcctgacccacagggtcttcatgcccagcgcccaactctgcgctgcccttctgcaccacttccatgtggagcctgcgggtggcagcgagcaggagcgcagcacctacgtctgcaacaagaggcagcagatcttgcggctggtcagccagtgggtggccctgtatggctccatgctccacactgaccctgtggccaccagcttcctccagaaactctcagacctggtgggcagggacacccgactcagcaacctgctgagggagcagtggccagagaggcggcgatgccacaggttggagaatggctgtgggaatgcatctcctcagatgaaggtgtctgcctggccccagtttctttcctctgctcctcctggactgcaggcccctccttcgccccctgaccctgaggggctctgtgggcgtgggaagctctcctcccacagacacacccttgggtctctgataggtgttcacggggcccttgctgcatgtggtgccctgggccaggccgtgccaggaggcgcagaggcctaaggtggcctccctcctcgcccactccctgactcaatgggccttttattccttttgggaggtaattcatgcccacaggtagagcctgggagatgaggaatggtggctggagttggcccctgaggcccacggggctcctggtggccagtgctgtgggagctcagaggaaggcgaggcccctccctggaaagtcagagggggccccaggccattctcagctggggcttaaagggaagcaaagaggggatgagaagatgtgactgcagccaggatttggttgaggaatggtgggagaaagaactggaaaggtagattaggttggtggtggggagggctgcactgggaataaaatccaggggcctcaccatccagcaggctccccatggtcccaccctactgtgtgtcccagcccctgcctgctggagactcttactggcttcttctcctccgcaggcgaagcccgttctcccctcagggcctttgcacttatcccttagcctggaagggtctttctctggctctgcctggcaggatccttctcgttctcatctcagccaaatgctgggttcccagacaggccccctcccgtctccctatccggagcaccctcccctttctcccaccacgctctgccttggtgtcctctgtgattttcttcaaagcactctcgccatgtggagttgttttctttgcctacttgctttctgtcctttggtatctctcccatcccactggagagttgacttccctcctgcgggcccccacctccgcttctccttgctcacatgctgcctggctcttggctgacgctcagaaactgatgtgggctcaccctcgcaggccgggcactgcgctaggtgctgatgctgcacctcattcaaccctggcctgtggggctgcagtcaggcaaggggcagagcagttcaacaacccgtgatgtgcagtgacacgggacactttccctgaatgtgcactggagtcggctcttccaactgtagtccgctcctgaaaacgggaggggaagagccaactccagtgcagattcagggaaagtgtcccgtgtaagcgactactggagttgagagctgcagggggcaagggtggaggaagaagaggattcctggtgggcaaacccaggaggaaagggaacccaggaggaggatccctggaggagcgagagtaagagtaggaccccagagcaggcaggaggtgggcagggccccctgggccaaggacaggggtctgatctttgtcctaagagcagtgcaaaccattaaaggggtttgagccaaggttggcaaagtctgatttgtgttttgaataggtcagctaaagagcctgggctttctccagcagacaatggacgccactgaagtcgagtgcgggagcttcacagggctctggtcaggcagattggaggaggagggctggaggcacctgggagggaggaggaggagcatagttgggccattggagtagataaggagtgaggcctcgtgggcaggtggaactggagttagcctgggcaggggaggagggggcacagaagacccacttcaaagaagaatcttcaaagcaagatgacaagctacggaagtgtggaggagcctggagctggggagaatggctggggaacagagtggtctgggaggcaggatgcaaggatccgatgggtatatggagtgtgaggtaatggatcattcatgtggaaggatgcagggggtttttgagaccagggtttggaagagagttcagcactgctggtagttttgggaatcacccatgtgcaggcgacacatgaggcagtaaggaactctgcaggggtccctgagatttggaaatgtagggaagagcaatggattgaggtccgaacctggaggatctgctatacgcagagctgggaggagggacagagtcagtaccagagtcggaaaaaagcagggtgggaaggggaacctgagtcaggagacttgcctggcaggcgctgccctgccagcagaggcctgacagtggtttccatgaactgcatccctgctgtgggctgggacagggccactgacacagtatcggagcacagagggggaaaggagcaggagggattccaactctgccagttagcagctgtgtggctttgggcatgttacttaacctctctgagcctcatttatttcatccataaaatggaaataaaaataatacttttgtcaaa

SEQ ID NO: 17371 - DNA, 783 bp, Homo sapiens
  source 1..783: mol_type = unassigned DNA
tgcggctggaagaacatggcaaagtggtgctggtgctggagagagcctctcagggcgccggcccttcccgacccccaaccccaggcaggaaccggtaatacacctgccatgctccctctccacactgtccctcctttcatttcccaatctttgctcccttcccctgtgtcatatccctgccctctggccacttgtggatggagaggtattgagggaccaggatgtgcctgctgagccagtctcctccctgccctaaggtgggacagggctggctaatggagaaaaatgatgtaattgattattgatgtctgcccaggtgtgggagtggggagtagtggcaccagtgccaaagattggccatttctgctaggtatacagtgatgtctggcaccccagagaagatcctagagcttctgttggaggccatgggaccagattccagtgctcatgacccaacaggtgggtggccctgcttggatgttgtggttcccttgactggtgcccaccttccatgtggagcctgcgggtggcagcgagcaggagcgcagcacctacgtctgcaacaagaggcagcagatcttgcggctggtcagccagtgggtggccctgtatggctccatgctccacactgaccctgtggccaccagcttcctccagaaactctcagacctggtgggcagggacacccgactcagcaacctgctgagggagcagtggccagagaggcggcgatgccacaggttggagaatggctgtgggaatgcatctcctcagatgaaggtg

SEQ ID NO: 17372 - DNA, 910 bp, Homo sapiens
  source 1..910: mol_type = unassigned DNA
ttccccgggcccgagcccgagcccgtgagaactcatgagatggaggaggagttggccgaagctgtggccctgctctcccagcgggggcctgacgccctgctcactgtggcacttcgaaagcccccaggtcagcgcacggatgaagagctggacctcatctttgaggagctgctgcacatcaaggctgtggcccacctctccaactcggtgaagcgagaattagcggctgttctgctctttgaaccacacagcaaggcagggaccgtgtccagggggacaagggcacttcgtggtacattatctggaagggatctgtcaacgtggtgacccatggcaaggggctggtgaccaccctgcatgagggagatgattttggacagctggctctggtgaatgatgcaccccgggcagccaccatcatcctgcgagaagacaactgtcatttcctgcgtgtggacaagcaggacttcaaccgtatcatcaaggatgtggaggcaaagaccatgcggctggaagaacatggcaaagtggtgctggtgctggagagagcctctcagggcgccggcccttcccgacccccaaccccaggcaggaaccggtatacagtgatgtctggcaccccagagaagatcctagagcttctgttggaggccatgggaccagattccagtgctcatgacccaacagagacattcctcagcgacttcctcctgacccacagggtcttcatgcccagcgcccaactctgcgctgcccttctgcaccacttccatgtggagcctgcgggtggcagcgagcaggagcgcagcacctacgtctgcaacaagaggcagcagatcttgcggctggtcagccagtgggtggccctgtatggctccatgctccacactgaccctgtggccaccagctt

SEQ ID NO: 17373 - DNA, 855 bp, Homo sapiens
  source 1..855: mol_type = unassigned DNA
ggagaagggtttaagccgaagctgcatttctgggagacctagtgaatctatagcttcatactgggaggtgggctggccaggtgagagctgctggcaggtgggcctggctgtggaggatagcccagctctgggagcaccgcgggtgggagccctccctgacgtggtgccggaggggacactactcaacatggtgttgagaaggatgcaccggccccgaagctgctcctaccagctgctgctggagcaccagcgtccgagctgcatccaggggctgcgctggacaccactcaccaacagcgaggagtccctggatttcagcgagagcctggagcaggcctccacagagcgggtgctcagggctgggaggcagctgcatcggcatctgctggccacctgcccaaacctcatccgagaccggaagtaccaccttaggctctatcggcagtgctgctctggccgggagctggtggatgggatcttggccctgggacttggggtccattcccggagccaagttgtgggaatctgccaggtgctgctggatgaaggtgccctctgccatgtgaaacacgactgggccttccaggaccgagatgcccaattctaccggttccccgggcccgagcccgagcccgtgagaactcatgagatggaggaggagttggccgaagctgtggccctgctctcccagcgggggcctgacgccctgctcactgtggcacttcgaaagcccccaggtcagcgcacggatgaagagctggacctcatctttgaggagctgctgcacatcaaggctgtggcccacctctccaactcggtgaagcgagaattagcggctgttctgctctttgaacc

SEQ ID NO: 17374 - DNA, 648 bp, Homo sapiens
  source 1..648: mol_type = unassigned DNA
agtccagaggactctaaggaagtagttctgcctggggcagttgtactgtggcccagccgccccagtcgtgtcccatggctgtccactttcctccccgtgtcacaggtgggctggccaggtgagagctgctggcaggtgggcctggctgtggaggatagcccagctctgggagcaccgcgggtgggagccctccctgacgtggtgccggaggggacactactcaacatggtgttgagaaggatgcaccggccccgaagctgctcctaccagctgctgctggagcaccagcgtccgagctgcatccaggggctgcgctggacaccactcaccaacagcgaggagtccctggatttcagcgagagcctggagcaggcctccacagagcgggtgctcagggctgggaggcagctgcatcggcatctgctggccacctgcccaaacctcatccgagaccggaagtaccaccttaggctctatcggcagtgctgctctggccgggagctggtggatgggatcttggccctgggacttggggtccattcccggagccaagttgtgggaatctgccaggtgctgctggatgaaggtgccctctgccatgtgaaacacgactgggccttccaggaccgagatgcccaattctaccgg

SEQ ID NO: 17375 - DNA, 573 bp, Homo sapiens
  source 1..573: mol_type = unassigned DNA
gaccagtccagaggactctaaggaagtagttctgcctggggcagttgtactgtggcccagccgccccagtcgtgtcccatggctgtccactttcctccccgtgtcacaggtgggctggccaggtgagagctgctggcaggtgggcctggctgtggaggatagcccagctctgggagcaccgcgggtgggagccctccctgacgtggtgccggaggggacactactcaacatggtgttgagaaggatgcaccggccccgaagctgctcctaccagctgctgctggagcaccagcgtccgagctgcatccaggggctgcgctggggcacaggctagcaacatctcagagaagaaagacgctttccagcaagcagccccaccctaatgcctcacagatgagtactagctaacatgtgcatacaactatatgccaggcaatgctttaaacattcgatgtgtagcaactcatttaattctcccaaaacctcatgagtcggtattattagtgctttgtagattttacagttcaggagactcaggtagggagggagaggttaaatcatttgtttcaggtc

SEQ ID NO: 17376 - DNA, 5751 bp, Homo sapiens
  source 1..5751: mol_type = unassigned DNA
gttagtcagggctgaggaggagaggagaagggtttaagccgaagctgcatttctgggagacctagtgaatctatagcttcatactgggaggtgggctggccaggtgagagctgctggcaggtgggcctggctgtggaggatagcccagctctgggagcaccgcgggtgggagccctccctgacgtggtgccggaggggacactactcaacatggtgttgagaaggatgcaccggccccgaagctgctcctaccagctgctgctggagcaccagcgtccgagctgcatccaggggctgcgctggacaccactcaccaacagcgaggagtccctggatttcagcgagagcctggagcaggcctccacagagcgggtgctcagggctgggaggcagctgcatcggcatctgctggccacctgcccaaacctcatccgagaccggaagtaccaccttaggctctatcggcagtgctgctctggccgggagctggtggatgggatcttggccctgggacttggggtccattcccggagccaagttgtgggaatctgccaggtgctgctggatgaaggtgccctctgccatgtgaaacacgactgggccttccaggaccgagatgcccaattctaccggttccccgggcccgagcccgagcccgtgagaactcatgagatggaggaggagttggccgaagctgtggccctgctctcccagcgggggcctgacgccctgctcactgtggcacttcgaaagcccccaggtcagcgcacggatgaagagctggacctcatctttgaggagctgctgcacatcaaggctgtggcccacctctccaactcggtgaagcgagaattagcggctgttctgctctttgaaccacacagcaaggcagggaccgtgttgttcagccagggggacaagggcacttcgtggtacattatctggaagggatctgtcaacgtggtgacccatggcaaggggctggtgaccaccctgcatgagggagatgattttggacagctggctctggtgaatgatgcaccccgggcagccaccatcatcctgcgagaagacaactgtcatttcctgcgtgtggacaagcaggacttcaaccgtatcatcaaggatgtggaggcaaagaccatgcggctggaagaacatggcaaagtggtgctggtgctggagagagcctctcagggcgccggcccttcccgacccccaaccccaggcaggaaccggtatacagtgatgtctggcaccccagagaagatcctagagcttctgttggaggccatgggaccagattccagtgctcatgacccaacagagacattcctcagcgacttcctcctgacccacagggtcttcatgcccagcgcccaactctgcgctgcccttctgcaccacttccatgtggagcctgcgggtggcagcgagcaggagcgcagcacctacgtctgcaacaagaggcagcagatcttgcggctggtcagccagtgggtggccctgtatggctccatgctccacactgaccctgtggccaccagcttcctccagaaactctcagacctggtgggcagggacacccgactcagcaacctgctgagggagcagtggccagagaggcggcgatgccacaggttggagaatggctgtgggaatgcatctcctcagatgaaggcccggaacttgcctgtttggctccccaaccaggacgagccccttcctggcagcagctgtgccatccaagttggggataaagtcccctatgacatctgccggccagaccactcagtgttgaccctgcagctgcctgtgacagcctccgtgagagaggtgatggcagcgttggcccaggaggatggctggaccaaggggcaggtgctggtgaaggtcaattctgcaggtgatgccattggcctgcagccagatgcccgtggtgtggccacatctctggggctcaatgagcgtctctttgttgtcaacccacaggaagtgcatgagctgatcccacaccctgaccagctggggcccactgtgggctctgctgaggggctggacctggtgagtgccaaggacctggcaggccagctgacggaccacgactggagcctcttcaacagtatccaccaggtggagctgatccactatgtgctgggcccccagcatctgcgggatgtcaccaccgccaacctggagcgcttcatgcgccgcttcaatgagctgcagtactgggtggccaccgagctgtgtctctgccccgtgcccggcccccgggcccagctgctcaggaagttcattaagctggcggcccacctcaaggagcagaagaatctcaattccttctttgccgtcatgtttggcctcagcaactcggccatcagccgcctagcccacacctgggagcggctgcctcacaaagtccggaagctgtactccgccctcgagaggctgctggatccctcatggaaccaccgggtataccgactggccctcgccaagctctcccctcctgtcatccccttcatgccccttcttctcaaagacatgaccttcattcatgagggaaaccacacactagtggagaatctcatcaactttgagaagatgagaatgatggccagagccgcgcggatgctgcaccactgccgaagccacaaccctgtgcctctctcaccactcagaagccgagtttcccacctccacgaggacagccaggtggcgaggatttccacatgctcggagcagtccctgagcacccggagtccagccagcacctgggcttatgtccagcagctgaaggtcattgacaaccagcgggaactctcccgcctctcccgagagctggagccatgaggaggggctgggactggagctggagcaggcacttgcagccgggaaagccagggtgtgccgggccaagatactcacaggctggccacagctgggcaaggctctccgtggagtggactcgagtccctggagcaggcagtgtggaggcagccatcccctgtgatgactggcagctaaggaggacctcggagtggacccgagccaggaataacgaatgacccaaggccaaggaagggaggacagagaggccccaggagtgggtggagagtggagtgcgctgggacgttgtgtgcaatagagaggtctccacaccagatgtcttccagattctgtgcctctggctttgttgtccagccaggcctgcagtttattttcacagtggacagagagagagagagaggctgcatgtgtgtaccgtgtgtggcaagggcagggccttggcctggggcaggggccccctgctttctttccacagctttcttccaacagcaggcagtggggctgcgggcctgtgcggtggtccctgaggagctttattgttactgtcaacatagtagtatgttccaggccagcccagagtgggcgtggcagggaggctgaggccccgccctctgggaaggagctgtggaggagaagcagccccatgctgggcacgggccagactgggtccaagatcctgatgccacccagatgtgcctccagggctctggccaaagggcgggctggagcctggagcccctgtcagcagccagccagggtgaccatcagctccccgtggtggtccaataggactttacagtccagatgcaactgacagcttcttcccaactgcaatccccgcttttccacacttgagctcgtcctggcctgttgggccaggcttctggggtcttctgggggtggcttgtgatagaaacaatgctgaagcttccgcggagagcccgtcgcttgttgaggcccaacagacttccaggaaatcagggtttatcatcagtgttgagaatggtcccagcaagctctggtcatacgaagtcctctcttccctgccccttcagcacttcccctaggaaccagctactgccaggacgcctcttgcgaggcagagctcacccaggaagctccagggactccaccctcttgccttgctattgccctgagtcctggcagcaggaggcacttgtctggccagagagagaactcatggcccctggcatgactcctgagtaggtattgaggctgcagggccttgggcgtccagaggcagctggtatggcccctctgcacttcagccccatggatgtggatacacaggcctgctgcttccagaaagggtcagagcctttagcagggaggcagcacagctgggcttagacctcaggtcactaagtgaatctgagcaagtcagtgaacagttctcttccttcatttctccacctgtaagccaggtatgataaacgccatacagcgcttagtgacaaacacataaaactgtagctcctgcctctgtagcagaggtgacagccaagggcagtcctgtgctatccaggcctggtaggggggcagcctcgcctcagttgagggctgagggagagactgaggtgcagcagatggcagtggtaaccaaaccagttcccttgccgtgggtggggacacaggagaagcacggaagcatctggaactgagcaatcaggacaggaggctcaagcctgggtgagtcaggagtccgggggctttcttttcatccaacccattgtctgctggtgtctcggcaaaagccagccagccagccgtggcccttcaccgttcttcagactctagggtgagcccagcccagcgacacaacagaaaccaagtgccacgggggccggtgtcctccaccagcatttctcctctggtcacatctacgtcctgatgggacttctccctcctccttggaccatcagctttacagtccagaccaccctgcagccacccggtggtctcccagctgccccagtctcgggcaggatggcttttgagcctgttgggagagaccttgccaggagaatggtgcccagggcaggcaagaggacacagactctgggagctagaagagttgcggcccagggggccaggccactcccagaggacaggaggcccaaaagcggggaaaggctccatgttacggtggccccatgctgggagtttgtgctgccttctgtctccctgactgcccaagcgtggggtggtgtggggcaggaggcatcctctggtgttccctagcagcccaggctgtgtgcaggggctcccattttgtgtctcagctgcaagaaggccacaaagggaggaggggctcatgggactgctgagaagaaggtgtgcagaaagggagtgtggccctagatcagtcctttaaaaagcctctgttacctgaaaggaggtcaagcagagaggaatggctgcgtgtgtgtcctaccgggcaggacaggacagagggaggtcattgttacacacacatcccccctcctttcctccttcccctccacttccctgtgaaggcctgaggcaggctgtggccaggctcaggccctgactgtggggtacacaccagggagggccacgcctccccacagacggggtggagtggtcagtggagccagcaccctctgctgcttcagcatctccgcctggagccagctgtcccctctctctcaggctccatccgaacaaaaggaaggcagagcctgagatccggcaccccatccccctccactcagcactgagttagagctgggtgggggcatgtctgccttcacacgctgccttatggcttctgtgtctccaacagccctcagcctctggctgctctccttcccaatagtcacaagatttaccatgataataataggttaagacttg

SEQ ID NO: 17377 - DNA, 547 bp, Homo sapiens
  source 1..547: mol_type = unassigned DNA
ttgcgcccagcccttcctcaccccgcaggagaagctggcctctcattcctcactgagagactcgacgggcgtccccacgccaagccttcctcgccctcccctccagccttttctgaaggggagacagcaaagaccactggagcgatccagcgaagatgtggatataatcttcactcgactgaaagaagttaaagcttttgagaaatttcacccaaatctccttcatcagatttgcttatgtggttattatgagaatctggaaaagggaataacattatttcgccagggtgatattggaacaaactggtatgctgtcctggcagggtctttggatgttaaagtatctgagaccagcagtcaccaggatgctgtgaccatctgtaccctgggaattgggacggcctttggagagtccattctggacaacacaccccgccatgcaaccatcgttaccagggagagcagtgaactgctccgcatcgagcagaaggacttcaaggcactatgggagaaatatcgacagtatatggcaggacttctggctcct

SEQ ID NO: 17378 - DNA, 4299 bp, Homo sapiens
  source 1..4299: mol_type = unassigned DNA
gggcgggcctgtcgcagccgcgctggtcgccaggcgtccgggaggagcggggtccgcgcggcggacgaggcgggggcggaggcgcaggcagagcgagcgcgggaggtcgccgcagccagggacaccgcgcgccgccgctcaacatggtcgctgcgcacgctgcccattcttcctcctctgccgagtggatcgcctgcctggataaaagaccactggagcgatccagcgaagatgtggatataatcttcactcgactgaaagaagttaaagcttttgagaaatttcacccaaatctccttcatcagatttgcttatgtggttattatgagaatctggaaaagggaataacattatttcgccagggtgatattggaacaaactggtatgctgtcctggcagggtctttggatgttaaagtatctgagaccagcagtcaccaggatgctgtgaccatctgtaccctgggaattgggacggcctttggagagtccattctggacaacacaccccgccatgcaaccatcgttaccagggagagcagtgaactgctccgcatcgagcagaaggacttcaaggcactatgggagaaatatcgacagtatatggcaggacttctggctcctccttatggtgttatggaaacgggctctaacaatgacaggattcctgacaaggagaacacacctctcattgaacctcacgttcctcttcgtcctgctaacaccattaccaaggtcccttcagagaagatcctcagagctggaaaaattttacgaaatgccattctctctcgagcacctcacatgataagagatagaaaataccacctaaagacatacagacaatgctgtgtgggaactgaactggtggactggatgatgcagcagacaccatgtgttcactcccggactcaagctgttggcatgtggcaagtcctgttagaagatggtgttctcaaccacgtggaccaggagcaccatttccaagacaaatatttattctatcgatttctggatgatgagcacgaggatgcccctttgcctactgaggaggagaagaaggagtgtgatgaggagctccaggacaccatgctgctgctgtcacagatgggccccgacgcccacatgaggatgatccttcgcaaaccacctggccagaggactgtggatgacctagagattatctatgaggagcttcttcatattaaagccttatcccatctttctaccacagtgaaacgagagttagcaggtgttctcatttttgagtctcacgccaaaggagggactgtgttgtttaaccagggggaagaaggtacctcctggtacattattctaaaaggatcagtgaatgtagtcatttacggcaagggtgtggtctgcaccctgcatgaaggagatgacttcggcaagttagcactagtgaatgatgccccacgagctgcctctatcgtcttacgagaagataactgccatttcttaagagtagacaaggaggatttcaaccggatcctaagggacgtggaggcgaatacagtcagacttaaagaacatgaccaagatgtcttggtgctggagaaggtcccagcagggaacagagcttctaatcaaggaaactcacagcctcagcaaaagtatactgtgatgtcaggaacacctgaaaaaattttagagcattttctagaaacaatacgccttgaggcaactttaaatgaagcaacagattctgttttaaatgactttattatgatgcactgtgtttttatgccaaatacccagctttgcccggcactggtggcccactaccacgcacagccttcacaaggtacagaacaggagaaaatggattatgccctcaacaataagaggcgagtcatccgcctggttctacagtgggctgccatgtatggagacctcctgcaagaggatgacgtgtctatggccttcctggaggagttttatgtatctgtatcagatgatgcccggatgattgctgccctcaaggagcaactgccagagttggagaagattgtcaagcaaatctcagaagatgcaaaggcaccacaaaagaagcacaaggttcttttgcaacagttcaatacgggcgatgagagagcccagaagcgccagcctatccgcggctctgatgaagttctgtttaaggtctattgcatggaccacacctacacaaccattcgggtgccagtggccacttcggtgaaggaagtcatcagtgcagttgccgacaagctgggctccggggagggcctgatcatagtcaagatgagttccggaggagaaaaggtggtgctcaaacctaatgatgtttcagtatttacgacgctcaccattaatggacgcctgtttgcttgcccgcgagagcaattcgattcactgactcccttaccagaacaggaaggcccaactgttggaacagtgggaacttttgaactgatgagctccaaagatttagcataccagatgacaatttatgattgggaactcttcaactgcgtgcatgagctggagctaatctatcacacatttggaaggcataattttaaaaagaccacagcaaacttggatttgttcctgaggagatttaatgaaattcagttttgggtcgtcactgagatctgcctttgttctcagctcagcaagcgtgttcagctattaaaaaaatttattaagatagcagcccactgtaaggagtataaaaatctgaattccttttttgccatcgtcatgggactaagtaacgttgctgtgagccgcttggcactaacgtgggagaaactgccaagcaagttcaagaagttctatgcggagtttgaaagtttaatggacccttcaaggaaccacagggcctacaggctgacagtagctaagctggaacctcctctcatccccttcatgcctttgctcattaaagatatgacatttactcatgaggggaacaagacgttcattgacaatctagtaaactttgaaaaaatgcgcatgattgcaaatacggccagaacagtgagatactacaggagccaacccttcaatcctgatgcagctcaagctaataagaaccatcaggatgtccggagttatgtacggcaattaaatgtgattgacaaccagagaactttatcacagatgtcacacagattagagcctcgtcgaccatagacatttcaaatgcccaaagcaacagtttgtctccagtccacaatctttcaaaaatgccatttatgctactactgactgtattgccactagagaattctacaaaacaagcaaaaacacatcctgagacacctcagggctgcattcagcttaccagctacctagcaagagaaggaattatttgacatgcctaaagcttacacactctagcttaggaatccccagtttgtggctaccctgtttcatttccacttgtgccatcttctttgctgaagtgttgaataaggcccacgtgaagagtttggtagaaatagccttgtcaagagaactagcaagcccctgacatttttttctaagagtgtttatgggatgagatgtgctacaaatgggatagatttggataaaattttaactcaacatcttgatttggagcctggggtttcgggaaggtgttgaggaatctatagaagtccaaattataggttgtattcttccatcttcattgtcttacctctgaaggaatagaacctgaccacattattatgaaacattatggctgtttatgtaatttagggaggactggtctgtaatttctgaatgtatatagaataatatttatgtttacaatgtaacttttcaaaatttacaaatcaggattatatacataagaattccactaagaaatgccaagattcttaaatttgccagcgttaaagtagaaaataacatttcagaagagcacaatatgcataaaacatttttcaaaattgaaatattttcctgggcattaaaaacctttactattggctacaaatttattgtacctgatgaaaacatattttctggacttaaatgttattacaaatatcttaattttcagtaattgttttgcactttcaaagattgtaaatagttcattcaatcaatggtatggagttatttatttgctacataatagatactgtgccaaataattactttttatttattttatttagtacgtaattttgaagtacattttttcctgttttcacaattagactacatttaatgtgtaggaattgtatgtatgtatatcttctgtaaataacatctagtatcttcactaaatataattgtcgac

SEQ ID NO: 17379 - DNA, 3975 bp, Homo sapiens
  source 1..3975: mol_type = unassigned DNA
gcgcgccgccgctcaacatggtcgctgcgcacgctgcccattcttcctcctctgccgagtggatcgcctgcctggataaaagaccactggagcgatccagcgaagatgtggatataatcttcactcgactgaaagaagttaaagcttttgagaaatttcacccaaatctccttcatcagatttgcttatgtggttattatgagaatctggaaaagggaataacattatttcgccagggtgatattggaacaaactggtatgctgtcctggcagggtctttggatgttaaagtatctgagaccagcagtcaccaggatgctgtgaccatctgtaccctgggaattgggacggcctttggagagtccattctggacaacacaccccgccatgcaaccatcgttaccagggagagcagtgaactgctccgcatcgagcagaaggacttcaaggcactatgggagaaatatcgacagtatatggcaggacttctggctcctccttatggtgttatggaaacgggctctaacaatgacaggattcctgacaaggagaacacacctctcattgaacctcacgttcctcttcgtcctgctaacaccattaccaaggtcccttcagagaagatcctcagagctggaaaaattttacgaaatgccattctctctcgagcacctcacatgataagagatagaaaataccacctaaagacatacagacaatgctgtgtgggaactgaactggtggactggatgatgcagcagacaccatgtgttcactcccggactcaagctgttggcatgtggcaagtcctgttagaagatggtgttctcaaccacgtggaccaggagcaccatttccaagacaaatatttattctatcgatttctggatgatgagcacgaggatgcccctttgcctactgaggaggagaagaaggagtgtgatgaggagctccaggacaccatgctgctgctgtcacagatgggccccgacgcccacatgaggatgatccttcgcaaaccacctggccagaggactgtggatgacctagagattatctatgaggagcttcttcatattaaagccttatcccatctttctaccacagtgaaacgagagttagcaggtgttctcatttttgagtctcacgccaaaggagggactgtgttgtttaaccagggggaagaaggtacctcctggtacattattctaaaaggatcagtgaatgtagtcatttacggcaagggtgtggtctgcaccctgcatgaaggagatgacttcggcaagttagcactagtgaatgatgccccacgagctgcctctatcgtcttacgagaagataactgccatttcttaagagtagacaaggaggatttcaaccggatcctaagggacgtggaggcgaatacagtcagacttaaagaacatgaccaagatgtcttggtgctggagaaggtcccagcagggaacagagcttctaatcaaggaaactcacagcctcagcaaaagtatactgtgatgtcaggaacacctgaaaaaattttagagcattttctagaaacaatacgccttgaggcaactttaaatgaagcaacagattctgttttaaatgactttattatgatgcactgtgtttttatgccaaatacccagctttgcccggcactggtggcccactaccacgcacagccttcacaaggtacagaacaggagaaaatggattatgccctcaacaataagaggcgagtcatccgcctggttctacagtgggctgccatgtatggagacctcctgcaagaggatgacgtgtctatggccttcctggaggagttttatgtatctgtatcagatgatgcccggatgattgctgccctcaaggagcaactgccagagttggagaagattgtcaagcaaatctcagaagatgcaaaggcaccacaaaagaagcacaaggttcttttgcaacagttcaatacgggcgatgagagagcccagaagcgccagcctatccgcggctctgatgaagttctgtttaaggtctattgcatggaccacacctacacaaccattcgggtgccagtggccacttcggtgaaggaagtcatcagtgcagttgccgacaagctgggctccggggagggcctgatcatagtcaagatgagttccggaggagaaaaggtggtgctcaaacctaatgatgtttcagtatttacgacgctcaccattaatggacgcctgtttgcttgcccgcgagagcaattcgattcactgactcccttaccagaacaggaaggcccaactgttggaacagtgggaacttttgaactgatgagctccaaagatttagcataccagatgacaatttatgattgggaactcttcaactgcgtgcatgagctggagctaatctatcacacatttggaaggcataattttaaaaagaccacagcaaacttggatttgttcctgaggagatttaatgaaattcagttttgggtcgtcactgagatctgcctttgttctcagctcagcaagcgtgttcagctattaaaaaaatttattaagatagcagcccactgtaaggagtataaaaatctgaattccttttttgccatcgtcatgggactaagtaacgttgctgtgagccgcttggcactaacgtgggagcgcatgattgcaaatacggccagaacagtgagatactacaggagccaacccttcaatcctgatgcagctcaagctaataagaaccatcaggatgtccggagttatgtacggcaattaaatgtgattgacaaccagagaactttatcacagatgtcacacagattagagcctcgtcgaccatagacatttcaaatgcccaaagcaacagtttgtctccagtccacaatctttcaaaaatgccatttatgctactactgactgtattgccactagagaattctacaaaacaagcaaaaacacatcctgagacacctcagggctgcattcagcttaccagctacctagcaagagaaggaattatttgacatgcctaaagcttacacactctagcttaggaatccccagtttgtggctaccctgtttcatttccacttgtgccatcttctttgctgaagtgttgaataaggcccacgtgaagagtttggtagaaatagccttgtcaagagaactagcaagcccctgacatttttttctaagagtgtttatgggatgagatgtgctacaaatgggatagatttggataaaattttaactcaacatcttgatttggagcctggggtttcgggaaggtgttgaggaatctatagaagtccaaattataggttgtattcttccatcttcattgtcttacctctgaaggaatagaacctgaccacattattatgaaacattatggctgtttatgtaatttagggaggactggtctgtaatttctgaatgtatatagaataatatttatgtttacaatgtaacttttcaaaatttacaaatcaggattatatacataagaattccactaagaaatgccaagattcttaaatttgccagcgttaaagtagaaaataacatttcagaagagcacaatatgcataaaacatttttcaaaattgaaatattttcctgggcattaaaaacctttactattggctacaaatttattgtacctgatgaaaacatattttctggacttaaatgttattacaaatatcttaattttcagtaattgttttgcactttcaaagattgtaaatagttcattcaatcaatggtatggagttatttatttgctacataatagatactgtgccaaataattactttttatttattttatttagtacgtaattttgaagtacattttttcctgttttcacaattagactacatttaatgtgtaggaattgtatgtatgtatatcttctgtaaataacatctagtatcttcactaaatataattgtcgacaagaaa

SEQ ID NO: 17380 - DNA, 980 bp, Homo sapiens
  source 1..980: mol_type = unassigned DNA
tttcctatgtccttttccacatctaaccagtcactaattgtcttgacttttattccacttttatttcagggccttagcatctggatctccccgttttctgtttccagtctggaaaacatgatatagtcaaatcagctttgtcttaggatcagccagacctggattcaaattctgtcacctctaccctctagctatgtgatcttggccaagttattaatctttttgaatctttgttttcacatcttcaaatgagattcccagtgcctacagtaatggctatgttgagaccactggagcgatccagcgaagatgtggatataatcttcactcgactgaaagaagttaaagcttttgagaaatttcacccaaatctccttcatcagatttgcttatgtggttattatgagaatctggaaaagggaataacattatttcgccagggtgatattggaacaaactggtatgctgtcctggcagggtctttggatgttaaagtatctgagaccagcagtcaccaggatgctgtgaccatctgtaccctgggaattgggacggcctttggagagtccattctggacaacacaccccgccatgcaaccatcgttaccagggagagcagtgaactgctccgcatcgagcagaaggacttcaaggcactatgggaggtgagccctaaggcttctttgtcaattaatgcagtttcagaaaagaaagggagctgccacatggataatggcattacagtcaagccttaatgtgttctgttctgagctggtagatggaatttaattttcaaaacttgtttttgaaatgagtgagtgaaaaagccattttgacacaagacatccttttttttgtttaatttagtgcttgctcaattttctgtagtttgacataccttataattatttcttgaatgaccatagagtgttttatgtattttctcccttcttttccacagatgtattcttaaccaggga

SEQ ID NO: 17381 - DNA, 4120 bp, Homo sapiens
  source 1..4120: mol_type = unassigned DNA
acagttctgattcttttaaaccaagcggaagcctgcttcgatgacttggacttatgtctgcaccagggtctcattcctgtgtcttcaagcttttccatggagtggcaaaatgattcaaatccagaaaggaagggagtgaagttattaggagctaactaaagttaaaaaaaaaaaaaaaaaaaaaaaaggaagtgttttcttattgccttagactgcctgagctttcctggagaaccatcagcaccagtttcctttctgtggactgagagccactcagtagtagacacgaacagggaatgaacggcaatgaaggtacattttgctgatcaaataaaggatagatgctcactggatgtctgagaactttgagagaccgaaaaagaaggacgtatgctctacaagaaatatcgacagtatatggcaggacttctggctcctccttatggtgttatggaaacgggctctaacaatgacaggattcctgacaaggagaacacacctctcattgaacctcacgttcctcttcgtcctgctaacaccattaccaaggtcccttcagagaagatcctcagagctggaaaaattttacgaaatgccattctctctcgagcacctcacatgataagagatagaaaataccacctaaagacatacagacaatgctgtgtgggaactgaactggtggactggatgatgcagcagacaccatgtgttcactcccggactcaagctgttggcatgtggcaagtcctgttagaagatggtgttctcaaccacgtggaccaggagcaccatttccaagacaaatatttattctatcgatttctggatgatgagcacgaggatgcccctttgcctactgaggaggagaagaaggagtgtgatgaggagctccaggacaccatgctgctgctgtcacagatgggccccgacgcccacatgaggatgatccttcgcaaaccacctggccagaggactgtggatgacctagagattatctatgaggagcttcttcatattaaagccttatcccatctttctaccacagtgaaacgagagttagcaggtgttctcatttttgagtctcacgccaaaggagggactgtgttgtttaaccagggggaagaaggtacctcctggtacattattctaaaaggatcagtgaatgtagtcatttacggcaagggtgtggtctgcaccctgcatgaaggagatgacttcggcaagttagcactagtgaatgatgccccacgagctgcctctatcgtcttacgagaagataactgccatttcttaagagtagacaaggaggatttcaaccggatcctaagggacgtggaggcgaatacagtcagacttaaagaacatgaccaagatgtcttggtgctggagaaggtcccagcagggaacagagcttctaatcaaggaaactcacagcctcagcaaaagtatactgtgatgtcaggaacacctgaaaaaattttagagcattttctagaaacaatacgccttgaggcaactttaaatgaagcaacagattctgttttaaatgactttattatgatgcactgtgtttttatgccaaatacccagctttgcccggcactggtggcccactaccacgcacagccttcacaaggtacagaacaggagaaaatggattatgccctcaacaataagaggcgagtcatccgcctggttctacagtgggctgccatgtatggagacctcctgcaagaggatgacgtgtctatggccttcctggaggagttttatgtatctgtatcagatgatgcccggatgattgctgccctcaaggagcaactgccagagttggagaagattgtcaagcaaatctcagaagatgcaaaggcaccacaaaagaagcacaaggttcttttgcaacagttcaatacgggcgatgagagagcccagaagcgccagcctatccgcggctctgatgaagttctgtttaaggtctattgcatggaccacacctacacaaccattcgggtgccagtggccacttcggtgaaggaagtcatcagtgcagttgccgacaagctgggctccggggagggcctgatcatagtcaagatgagttccggaggagaaaaggtggtgctcaaacctaatgatgtttcagtatttacgacgctcaccattaatggacgcctgtttgcttgcccgcgagagcaattcgattcactgactcccttaccagaacaggaaggcccaactgttggaacagtgggaacttttgaactgatgagctccaaagatttagcataccagatgacaatttatgattgggaactcttcaactgcgtgcatgagctggagctaatctatcacacatttggaaggcataattttaaaaagaccacagcaaacttggatttgttcctgaggagatttaatgaaattcagttttgggtcgtcactgagatctgcctttgttctcagctcagcaagcgtgttcagctattaaaaaaatttattaagatagcagcccactgtaaggagtataaaaatctgaattccttttttgccatcgtcatgggactaagtaacgttgctgtgagccgcttggcactaacgtgggagaaactgccaagcaagttcaagaagttctatgcggagtttgaaagtttaatggacccttcaaggaaccacagggcctacaggctgacagtagctaagctggaacctcctctcatccccttcatgcctttgctcattaaagatatgacatttactcatgaggggaacaagacgttcattgacaatctagtaaactttgaaaaaatgcgcatgattgcaaatacggccagaacagtgagatactacaggagccaacccttcaatcctgatgcagctcaagctaataagaaccatcaggatgtccggagttatgtacggcaattaaatgtgattgacaaccagagaactttatcacagatgtcacacagattagagcctcgtcgaccatagacatttcaaatgcccaaagcaacagtttgtctccagtccacaatctttcaaaaatgccatttatgctactactgactgtattgccactagagaattctacaaaacaagcaaaaacacatcctgagacacctcagggctgcattcagcttaccagctacctagcaagagaaggaattatttgacatgcctaaagcttacacactctagcttaggaatccccagtttgtggctaccctgtttcatttccacttgtgccatcttctttgctgaagtgttgaataaggcccacgtgaagagtttggtagaaatagccttgtcaagagaactagcaagcccctgacatttttttctaagagtgtttatgggatgagatgtgctacaaatgggatagatttggataaaattttaactcaacatcttgatttggagcctggggtttcgggaaggtgttgaggaatctatagaagtccaaattataggttgtattcttccatcttcattgtcttacctctgaaggaatagaacctgaccacattattatgaaacattatggctgtttatgtaatttagggaggactggtctgtaatttctgaatgtatatagaataatatttatgtttacaatgtaacttttcaaaatttacaaatcaggattatatacataagaattccactaagaaatgccaagattcttaaatttgccagcgttaaagtagaaaataacatttcagaagagcacaatatgcataaaacatttttcaaaattgaaatattttcctgggcattaaaaacctttactattggctacaaatttattgtacctgatgaaaacatattttctggacttaaatgttattacaaatatcttaattttcagtaattgttttgcactttcaaagattgtaaatagttcattcaatcaatggtatggagttatttatttgctacataatagatactgtgccaaataattactttttatttattttatttagtacgtaattttgaagtacattttttcctgttttcacaattagactacatttaatgtgtaggaattgtatgtatgtatatcttctgtaaataacatctagtatcttcactaaatataattgtcgacaagaaa

SEQ ID NO: 17382 - DNA, 593 bp, Homo sapiens
  source 1..593: mol_type = unassigned DNA
aatttagattaccaatgataaagccggggctacggctaaagaaaggtaggatgcatacgcagaaacattagtgctaatatgctgcagaaaagccaagataaatcagtccagctctcatacatcactaagggagaagctgattgcaacttgaccatgttgcctgagtagtcccatcagtgagaagaggagaacatggatttaaaaaaaactagaatgtacccctagggctcctgccgtggtggacctgggagaagtgtctggtaaatatcgacagtatatggcaggacttctggctcctccttatggtgttatggaaacgggctctaacaatgacaggattcctgacaaggagaacacacctctcattgaacctcacgttcctcttcgtcctgctaacaccattaccaaggtcccttcagagaagatcctcagagctggaaaaattttacgaaatgccattctctctcgagcacctcacatgataagagatagaaaataccacctaaagacatacagacaatgctgtgtgggaactgaactggtggactggatgatgcagcagacaccatgtgttcactcccggactcaagctg

SEQ ID NO: 17383 - DNA, 1075 bp, Homo sapiens
  source 1..1075: mol_type = unassigned DNA
aatgtcagtatttaaactcctggaccatatgtggcttctcttagcagattttgcaaaggaaacttactccagtatgcaagactaaatatcgacagtatatggcaggacttctggctcctccttatggtgttatggaaacgggctctaacaatgacaggattcctgacaaggagaacgtcccttcagagaagatcctcagagctggaaaaattttacgaaatgccattctctctcgagcacctcacatgataagagatagaaaataccacctaaagacatacagacaatgctgtgtgggaactgaactggtggactggatgatgcagcagacaccatgtgttcactcccggactcaagctgttggcatgtggcaagtcctgttagaagatggtgttctcaaccacgtggaccaggagcaccatttccaagacaaatatttattctatcgatttctggatgatgagcacgaggatgcccctttgcctactgaggaggagaagaaggagtgtgatgaggagctccaggacaccatgctgctgctgtcacagatgggccccgacgcccacatgaggatgatccttcgcaaaccacctggccagaggactgtggatgacctagagattatctatgaggagcttcttcatattaaagccttatcccatctttctaccacagtgaaacgagagttagcaggtgttctcatttttgagtctcacgccaaaggagggactgtgttgtttaaccagggggaagaaggtacctcctggtacattattctaaaaggatcagtgaatgtagtcatttacggcaagggtgtggtctgcaccctgcatgaaggagatgacttcggcaagttagcactagtgaatgatgccccacgagctgcctctatcgtcttacgagaagataactgccatttcttaagagtagacaaggaggatttcaaccggatcctaagggacgtggaggcgaatacagtcagacttaaagaacatgaccaagatgtcttggtgctggagaaggtcccagcagggaacagagcttctaatcaaggaaactcacagcctcagcaaaa

SEQ ID NO: 17384 - DNA, 493 bp, Homo sapiens
  source 1..493: mol_type = unassigned DNA
gtgacttcatgttgaaggtgccaagaacaacttcagctctccagtctctgaggaaatgtttgtttttgtacttacacctctcattgaacctcacgttcctcttcgtcctgctaacaccattaccaaggtcccttcagagaagatcctcagagctggaaaaattttacgaaatgccattctctctcgagcacctcacatgataagagatagaaaataccacctaaagacatacagacaatgctgtgtgggaactgaactggtggactggatgatgcagcagacaccatgtgttcactcccggactcaagctgttggcatgtggcaagtcctgttagaagatggtgttctcaaccacgtggaccaggagcaccatttccaagacaaatatttattctatcgatttctggatgatgagcacgaggatgcccctttgcctactgaggaggagaagaaggagtgtgatgaggagctccaggacaccatgctgctgctg

SEQ ID NO: 17385 - DNA, 599 bp, Homo sapiens
  source 1..599: mol_type = unassigned DNA
aaacattaactcattcggcacgagactcaggtggagagagtcagtatgtattttgctttgcctccatcttgcactgagattttctgggaccggctcactaggacagtttctgttcctctgattagcttgccagacaatctccccctctagcggccccctggtctcccctggtgctacaagttgtaatgctttcatttaaccagccttgctttaaagttctctcatgagctgagtggcttttttggcttgtattagcatttgagaacctgaagctaccgcgtgtggtgctttgtttgccatgagacctcttctggtaggagatcattaagccctttggtaggttttcctctcaaaagccatctcccatcctctatctgaaaaggggtgacttccccaccctttctgtctcacctctccttagacaatgctgtgtgggaactgaactggtggactggatgatgcagcagacaccatgtgttcactcccggactcaagctgttggcatgtggcaagtcctgttagaagatggtgttctcaaccacgtggaccaggagcaccatttccaagacaaatatttattctatcgatttctggatgat

SEQ ID NO: 17386 - DNA, 560 bp, Homo sapiens
  source 1..560: mol_type = unassigned DNA
acagtctgggcagggcagagtgagaagggcgaggaggctcccggctttgctgccacttggccctcctgcctgacactctgcatttgtttctagtaaacggagctgtgaggccgaggtgctgcagctgacacgtgcttccatgtttcccatagtggaccaggagcaccatttccaagacaaatatttattctatcgatttctggatgatgagcacgaggatgcccctttgcctactgaggaggagaagaaggagtgtgatgaggagctccaggacaccatgctgctgctgtcacagatgggccccgacgcccacatgaggatgatccttcgcaaaccacctggccagaggactgtggatgacctagagattatctatgaggagcttcttcatattaaagccttatcccatctttctaccacagtgaaacgagagttagcaggtgttctcatttttgagtctcacgccaaaggagggactgtgttgtttaaccagggggaagaaggtacctcctggtacattattctaaaaggatcagtgaatgtagtcatttacggcaagg

SEQ ID NO: 17387 - DNA, 649 bp, Homo sapiens
  source 1..649: mol_type = unassigned DNA
ctgatgagctccaaagatttagcataccagatgacaatttatgattgggaactcttcaactgcgtgcatgagctggagctaatctatcacacatttggaaggcataattttaaaaagaccacagcaaacttggatttgttcctgaggagatttaatgaaattcagttttgggtcgtcactgagatctgcctttgttctcagctcagcaagcgtgttcagctattaaaaaaatttattaagatagcagcccactgtaaggagtataaaaatctgaattccttttttgccatcgtcatgggactaagtaacgttgctgtgagccgcttggcactaacgtgggagaaactgccaagcaagttcaagaagttctatgcggagtttgaaagtttaatggacccttcaaggaaccacagggcctacaggctgacagtagctaagctggaacctcctctcatccccttcatgcctttgctcattaaagatatgacatttactcatgaggggaacaagacgttcattgacaatctagtaaactttgaaaaaatggtatgtgcagtattataaccttaaccacaatgtgtttttaaaataaaatttgcattttttctaataaaggaaataatttccatatatgctgccctgctaaaaa

SEQ ID NO: 17388 - DNA, 842 bp, Homo sapiens
  source 1..842: mol_type = unassigned DNA
caaaaatgtgaaggtagaatattttgacttgctgttcagccaataaaatctcatacctcattagtgagtcttatttactgtgaggaacttgataagctaacccttctccacatctaggatagttacagattctcttacaaattcatggcaacctcaagaaaggatggtgaaaaagcactaatgtacagtctcaggcatgatagatgttttttacatcatggggaatatgccaacaattatgagagttatgccattaatattccttacctgaaaatgccttgtatgtatgtgggtacccctttgaaataattaaacaagttatacatcagctagttgccttcagatagtcaacatctcagaacatgtcacttctcatggtaccaagtattgcagaaatggtttgttttcctttttggattgtactctacgcttacttgaatttctatctttcttttttctatattccttttagcgcatgattgcaaatacggccagaacagtgagatactacaggagccaacccttcaatcctgatgcagctcaagctaataagaaccatcaggatgtccggagttatgtacggcaattaaatgtgattgacaaccagagaactttatcacagatgtcacacagattagagcctcgtcgaccatagacatttcaaatgcccaaagcaacagtttgtctccagtccacaatctttcaaaaatgccatttatgctactactgactgtattgccactagagaattctacaaaacaagcaaaaacacatcctgagacacctcagggctgcattcagcttaccagctacctagcaagagaaggaattatttgacatgc

SEQ ID NO: 17389 - DNA, 3707 bp, Homo sapiens
  source 1..3707: mol_type = unassigned DNA
aaatgtttgtttttgtacttgtgagttatgcattttatggggcagactgtcgttgctgaatttctttctgctttttattccatctgttcctcaactcttacaaaagctagccataccatctctctctctagcttctgaagtggtcccttcagagaagatcctcagagctggaaaaattttacgaaatgccattctctctcgagcacctcacatgataagagatagaaaataccacctaaagacatacagacaatgctgtgtgggaactgaactggtggactggatgatgcagcagacaccatgtgttcactcccggactcaagctgttggcatgtggcaagtcctgttagaagatggtgttctcaaccacgtggaccaggagcaccatttccaagacaaatatttattctatcgatttctggatgatgagcacgaggatgcccctttgcctactgaggaggagaagaaggagtgtgatgaggagctccaggacaccatgctgctgctgtcacagatgggccccgacgcccacatgaggatgatccttcgcaaaccacctggccagaggactgtggatgacctagagattatctatgaggagcttcttcatattaaagccttatcccatctttctaccacagtgaaacgagagttagcaggtgttctcatttttgagtctcacgccaaaggagggactgtgttgtttaaccagggggaagaaggtacctcctggtacattattctaaaaggatcagtgaatgtagtcatttacggcaagggtgtggtctgcaccctgcatgaaggagatgacttcggcaagttagcactagtgaatgatgccccacgagctgcctctatcgtcttacgagaagataactgccatttcttaagagtagacaaggaggatttcaaccggatcctaagggacgtggaggcgaatacagtcagacttaaagaacatgaccaagatgtcttggtgctggagaaggtcccagcagggaacagagcttctaatcaaggaaactcacagcctcagcaaaagtatactgtgatgtcaggaacacctgaaaaaattttagagcattttctagaaacaatacgccttgaggcaactttaaatgaagcaacagattctgttttaaatgactttattatgatgcactgtgtttttatgccaaatacccagctttgcccggcactggtggcccactaccacgcacagccttcacaaggtacagaacaggagaaaatggattatgccctcaacaataagaggcgagtcatccgcctggttctacagtgggctgccatgtatggagacctcctgcaagaggatgacgtgtctatggccttcctggaggagttttatgtatctgtatcagatgatgcccggatgattgctgccctcaaggagcaactgccagagttggagaagattgtcaagcaaatctcagaagatgcaaaggcaccacaaaagaagcacaaggttcttttgcaacagttcaatacgggcgatgagagagcccagaagcgccagcctatccgcggctctgatgaagttctgtttaaggtctattgcatggaccacacctacacaaccattcgggtgccagtggccacttcggtgaaggaagtcatcagtgcagttgccgacaagctgggctccggggagggcctgatcatagtcaagatgagttccggaggagaaaaggtggtgctcaaacctaatgatgtttcagtatttacgacgctcaccattaatggacgcctgtttgcttgcccgcgagagcaattcgattcactgactcccttaccagaacaggaaggcccaactgttggaacagtgggaacttttgaactgatgagctccaaagatttagcataccagatgacaatttatgattgggaactcttcaactgcgtgcatgagctggagctaatctatcacacatttggaaggcataattttaaaaagaccacagcaaacttggatttgttcctgaggagatttaatgaaattcagttttgggtcgtcactgagatctgcctttgttctcagctcagcaagcgtgttcagctattaaaaaaatttattaagatagcagcccactgtaaggagtataaaaatctgaattccttttttgccatcgtcatgggactaagtaacgttgctgtgagccgcttggcactaacgtgggagaaactgccaagcaagttcaagaagttctatgcggagtttgaaagtttaatggacccttcaaggaaccacagggcctacaggctgacagtagctaagctggaacctcctctcatccccttcatgcctttgctcattaaagatatgacatttactcatgaggggaacaagacgttcattgacaatctagtaaactttgaaaaaatgcgcatgattgcaaatacggccagaacagtgagatactacaggagccaacccttcaatcctgatgcagctcaagctaataagaaccatcaggatgtccggagttatgtacggcaattaaatgtgattgacaaccagagaactttatcacagatgtcacacagattagagcctcgtcgaccatagacatttcaaatgcccaaagcaacagtttgtctccagtccacaatctttcaaaaatgccatttatgctactactgactgtattgccactagagaattctacaaaacaagcaaaaacacatcctgagacacctcagggctgcattcagcttaccagctacctagcaagagaaggaattatttgacatgcctaaagcttacacactctagcttaggaatccccagtttgtggctaccctgtttcatttccacttgtgccatcttctttgctgaagtgttgaataaggcccacgtgaagagtttggtagaaatagccttgtcaagagaactagcaagcccctgacatttttttctaagagtgtttatgggatgagatgtgctacaaatgggatagatttggataaaattttaactcaacatcttgatttggagcctggggtttcgggaaggtgttgaggaatctatagaagtccaaattataggttgtattcttccatcttcattgtcttacctctgaaggaatagaacctgaccacattattatgaaacattatggctgtttatgtaatttagggaggactggtctgtaatttctgaatgtatatagaataatatttatgtttacaatgtaacttttcaaaatttacaaatcaggattatatacataagaattccactaagaaatgccaagattcttaaatttgccagcgttaaagtagaaaataacatttcagaagagcacaatatgcataaaacatttttcaaaattgaaatattttcctgggcattaaaaacctttactattggctacaaatttattgtacctgatgaaaacatattttctggacttaaatgttattacaaatatcttaattttcagtaattgttttgcactttcaaagattgtaaatagttcattcaatcaatggtatggagttatttatttgctacataatagatactgtgccaaataattactttttatttattttatttagtacgtaattttgaagtacattttttcctgttttcacaattagactacatttaatgtgtaggaattgtatgtatgtatatcttctgtaaataacatctagtatcttcactaaatataattgtcgac

SEQ ID NO: 17390 - DNA, 3974 bp, Homo sapiens
  source 1..3974: mol_type = unassigned DNA
aatttagattaccaatgataaagccggggctacggctaaagaaaggtaggatgcatacgcagaaacattagtgctaatatgctgcagaaaagccaagataaatcagtccagctctcatacatcactaagggagaagctgattgcaacttgaccatgttgcctgagtagtcccatcagtgagaagaggagaacatggatttaaaaaaaactagaatgtacccctagggctcctgccgtggtggacctgggagaagtgtctggtaaatatcgacagtatatggcaggacttctggctcctccttatggtgttatggaaacgggctctaacaatgacaggattcctgacaaggagaacacacctctcattgaacctcacgttcctcttcgtcctgctaacaccattaccaaggtcccttcagagaagatcctcagagctggaaaaattttacgaaatgccattctctctcgagcacctcacatgataagagatagaaaataccacctaaagacatacagacaatgctgtgtgggaactgaactggtggactggatgatgcagcagacaccatgtgttcactcccggactcaagctgttggcatgtggcaagtcctgttagaagatggtgttctcaaccacgtggaccaggagcaccatttccaagacaaatatttattctatcgatttctggatgatgagcacgaggatgcccctttgcctactgaggaggagaagaaggagtgtgatgaggagctccaggacaccatgctgctgctgtcacagatgggccccgacgcccacatgaggatgatccttcgcaaaccacctggccagaggactgtggatgacctagagattatctatgaggagcttcttcatattaaagccttatcccatctttctaccacagtgaaacgagagttagcaggtgttctcatttttgagtctcacgccaaaggagggactgtgttgtttaaccagggggaagaaggtacctcctggtacattattctaaaaggatcagtgaatgtagtcatttacggcaagggtgtggtctgcaccctgcatgaaggagatgacttcggcaagttagcactagtgaatgatgccccacgagctgcctctatcgtcttacgagaagataactgccatttcttaagagtagacaaggaggatttcaaccggatcctaagggacgtggaggcgaatacagtcagacttaaagaacatgaccaagatgtcttggtgctggagaaggtcccagcagggaacagagcttctaatcaaggaaactcacagcctcagcaaaagtatactgtgatgtcaggaacacctgaaaaaattttagagcattttctagaaacaatacgccttgaggcaactttaaatgaagcaacagattctgttttaaatgactttattatgatgcactgtgtttttatgccaaatacccagctttgcccggcactggtggcccactaccacgcacagccttcacaaggtacagaacaggagaaaatggattatgccctcaacaataagaggcgagtcatccgcctggttctacagtgggctgccatgtatggagacctcctgcaagaggatgacgtgtctatggccttcctggaggagttttatgtatctgtatcagatgatgcccggatgattgctgccctcaaggagcaactgccagagttggagaagattgtcaagcaaatctcagaagatgcaaaggcaccacaaaagaagcacaaggttcttttgcaacagttcaatacgggcgatgagagagcccagaagcgccagcctatccgcggctctgatgaagttctgtttaaggtctattgcatggaccacacctacacaaccattcgggtgccagtggccacttcggtgaaggaagtcatcagtgcagttgccgacaagctgggctccggggagggcctgatcatagtcaagatgagttccggaggagaaaaggtggtgctcaaacctaatgatgtttcagtatttacgacgctcaccattaatggacgcctgtttgcttgcccgcgagagcaattcgattcactgactcccttaccagaacaggaaggcccaactgttggaacagtgggaacttttgaactgatgagctccaaagatttagcataccagatgacaatttatgattgggaactcttcaactgcgtgcatgagctggagctaatctatcacacatttggaaggcataattttaaaaagaccacagcaaacttggatttgttcctgaggagatttaatgaaattcagttttgggtcgtcactgagatctgcctttgttctcagctcagcaagcgtgttcagctattaaaaaaatttattaagatagcagcccactgtaaggagtataaaaatctgaattccttttttgccatcgtcatgggactaagtaacgttgctgtgagccgcttggcactaacgtgggagaaactgccaagcaagttcaagaagttctatgcggagtttgaaagtttaatggacccttcaaggaaccacagggcctacaggctgacagtagctaagctggaacctcctctcatccccttcatgcctttgctcattaaagatatgacatttactcatgaggggaacaagacgttcattgacaatctagtaaactttgaaaaaatgcgcatgattgcaaatacggccagaacagtgagatactacaggagccaacccttcaatcctgatgcagctcaagctaataagaaccatcaggatgtccggagttatgtacggcaattaaatgtgattgacaaccagagaactttatcacagatgtcacacagattagagcctcgtcgaccatagacatttcaaatgcccaaagcaacagtttgtctccagtccacaatctttcaaaaatgccatttatgctactactgactgtattgccactagagaattctacaaaacaagcaaaaacacatcctgagacacctcagggctgcattcagcttaccagctacctagcaagagaaggaattatttgacatgcctaaagcttacacactctagcttaggaatccccagtttgtggctaccctgtttcatttccacttgtgccatcttctttgctgaagtgttgaataaggcccacgtgaagagtttggtagaaatagccttgtcaagagaactagcaagcccctgacatttttttctaagagtgtttatgggatgagatgtgctacaaatgggatagatttggataaaattttaactcaacatcttgatttggagcctggggtttcgggaaggtgttgaggaatctatagaagtccaaattataggttgtattcttccatcttcattgtcttacctctgaaggaatagaacctgaccacattattatgaaacattatggctgtttatgtaatttagggaggactggtctgtaatttctgaatgtatatagaataatatttatgtttacaatgtaacttttcaaaatttacaaatcaggattatatacataagaattccactaagaaatgccaagattcttaaatttgccagcgttaaagtagaaaataacatttcagaagagcacaatatgcataaaacatttttcaaaattgaaatattttcctgggcattaaaaacctttactattggctacaaatttattgtacctgatgaaaacatattttctggacttaaatgttattacaaatatcttaattttcagtaattgttttgcactttcaaagattgtaaatagttcattcaatcaatggtatggagttatttatttgctacataatagatactgtgccaaataattactttttatttattttatttagtacgtaattttgaagtacattttttcctgttttcacaattagactacatttaatgtgtaggaattgtatgtatgtatatcttctgtaaataacatctagtatcttcactaaatataattgtcgac

SEQ ID NO: 17391 - DNA, 3920 bp, Homo sapiens
  source 1..3920: mol_type = unassigned DNA
aatttagattaccaatgataaagccggggctacggctaaagaaaggtaggatgcatacgcagaaacattagtgctaatatgctgcagaaaagccaagataaatcagtccagctctcatacatcactaagggagaagctgattgcaacttgaccatgttgcctgagtagtcccatcagtgagaagaggagaacatggatttaaaaaaaactagaatgtacccctagggctcctgccgtggtggacctgggagaagtgtctggtaaatatcgacagtatatggcaggacttctggctcctccttatggtgttatggaaacgggctctaacaatgacaggattcctgacaaggagaacgtcccttcagagaagatcctcagagctggaaaaattttacgaaatgccattctctctcgagcacctcacatgataagagatagaaaataccacctaaagacatacagacaatgctgtgtgggaactgaactggtggactggatgatgcagcagacaccatgtgttcactcccggactcaagctgttggcatgtggcaagtcctgttagaagatggtgttctcaaccacgtggaccaggagcaccatttccaagacaaatatttattctatcgatttctggatgatgagcacgaggatgcccctttgcctactgaggaggagaagaaggagtgtgatgaggagctccaggacaccatgctgctgctgtcacagatgggccccgacgcccacatgaggatgatccttcgcaaaccacctggccagaggactgtggatgacctagagattatctatgaggagcttcttcatattaaagccttatcccatctttctaccacagtgaaacgagagttagcaggtgttctcatttttgagtctcacgccaaaggagggactgtgttgtttaaccagggggaagaaggtacctcctggtacattattctaaaaggatcagtgaatgtagtcatttacggcaagggtgtggtctgcaccctgcatgaaggagatgacttcggcaagttagcactagtgaatgatgccccacgagctgcctctatcgtcttacgagaagataactgccatttcttaagagtagacaaggaggatttcaaccggatcctaagggacgtggaggcgaatacagtcagacttaaagaacatgaccaagatgtcttggtgctggagaaggtcccagcagggaacagagcttctaatcaaggaaactcacagcctcagcaaaagtatactgtgatgtcaggaacacctgaaaaaattttagagcattttctagaaacaatacgccttgaggcaactttaaatgaagcaacagattctgttttaaatgactttattatgatgcactgtgtttttatgccaaatacccagctttgcccggcactggtggcccactaccacgcacagccttcacaaggtacagaacaggagaaaatggattatgccctcaacaataagaggcgagtcatccgcctggttctacagtgggctgccatgtatggagacctcctgcaagaggatgacgtgtctatggccttcctggaggagttttatgtatctgtatcagatgatgcccggatgattgctgccctcaaggagcaactgccagagttggagaagattgtcaagcaaatctcagaagatgcaaaggcaccacaaaagaagcacaaggttcttttgcaacagttcaatacgggcgatgagagagcccagaagcgccagcctatccgcggctctgatgaagttctgtttaaggtctattgcatggaccacacctacacaaccattcgggtgccagtggccacttcggtgaaggaagtcatcagtgcagttgccgacaagctgggctccggggagggcctgatcatagtcaagatgagttccggaggagaaaaggtggtgctcaaacctaatgatgtttcagtatttacgacgctcaccattaatggacgcctgtttgcttgcccgcgagagcaattcgattcactgactcccttaccagaacaggaaggcccaactgttggaacagtgggaacttttgaactgatgagctccaaagatttagcataccagatgacaatttatgattgggaactcttcaactgcgtgcatgagctggagctaatctatcacacatttggaaggcataattttaaaaagaccacagcaaacttggatttgttcctgaggagatttaatgaaattcagttttgggtcgtcactgagatctgcctttgttctcagctcagcaagcgtgttcagctattaaaaaaatttattaagatagcagcccactgtaaggagtataaaaatctgaattccttttttgccatcgtcatgggactaagtaacgttgctgtgagccgcttggcactaacgtgggagaaactgccaagcaagttcaagaagttctatgcggagtttgaaagtttaatggacccttcaaggaaccacagggcctacaggctgacagtagctaagctggaacctcctctcatccccttcatgcctttgctcattaaagatatgacatttactcatgaggggaacaagacgttcattgacaatctagtaaactttgaaaaaatgcgcatgattgcaaatacggccagaacagtgagatactacaggagccaacccttcaatcctgatgcagctcaagctaataagaaccatcaggatgtccggagttatgtacggcaattaaatgtgattgacaaccagagaactttatcacagatgtcacacagattagagcctcgtcgaccatagacatttcaaatgcccaaagcaacagtttgtctccagtccacaatctttcaaaaatgccatttatgctactactgactgtattgccactagagaattctacaaaacaagcaaaaacacatcctgagacacctcagggctgcattcagcttaccagctacctagcaagagaaggaattatttgacatgcctaaagcttacacactctagcttaggaatccccagtttgtggctaccctgtttcatttccacttgtgccatcttctttgctgaagtgttgaataaggcccacgtgaagagtttggtagaaatagccttgtcaagagaactagcaagcccctgacatttttttctaagagtgtttatgggatgagatgtgctacaaatgggatagatttggataaaattttaactcaacatcttgatttggagcctggggtttcgggaaggtgttgaggaatctatagaagtccaaattataggttgtattcttccatcttcattgtcttacctctgaaggaatagaacctgaccacattattatgaaacattatggctgtttatgtaatttagggaggactggtctgtaatttctgaatgtatatagaataatatttatgtttacaatgtaacttttcaaaatttacaaatcaggattatatacataagaattccactaagaaatgccaagattcttaaatttgccagcgttaaagtagaaaataacatttcagaagagcacaatatgcataaaacatttttcaaaattgaaatattttcctgggcattaaaaacctttactattggctacaaatttattgtacctgatgaaaacatattttctggacttaaatgttattacaaatatcttaattttcagtaattgttttgcactttcaaagattgtaaatagttcattcaatcaatggtatggagttatttatttgctacataatagatactgtgccaaataattactttttatttattttatttagtacgtaattttgaagtacattttttcctgttttcacaattagactacatttaatgtgtaggaattgtatgtatgtatatcttctgtaaataacatctagtatcttcactaaatataattgtcgac

SEQ ID NO: 17392 - DNA, 1273 bp, Homo sapiens
  source 1..1273: mol_type = unassigned DNA
ttggtttaagacctggagtgatgtgttcctgctccagagcacctttctttctgtgaggcccgaaacatgaccaccagcggccacgcatgtccggtcccagcagtgaacggacacatgactcactatccagccacaccctacccgttactctttccacctgtcatcggaggactttccctgcctcccctccatggccttcatggacatccgcctccgagtggatgcagcaccccgtcgccggcaacaattgaaacacagagcaccagctctgaggaactcgtcccaagccccccatctccacttcctccccctcgagtgtacaaaccctgcttcgtctgccaggacaaatcatcagggtaccactatggggtcagcgcctgtgagggatgtaagggctttttccgcagaagtattcagaagaatatgatttacacttgtcaccgagataagaactgtgttattaataaagtcaccaggaatcgatgccaatactgtcgactccagaagtgctttgaagtgggaatgtccaaagaatctgtcaggaatgacaggaacaagaaaaagaaggagacttcgaagcaagaatgcacagagagctatgaaatgacagctgagttggacgatctcacagagaagatccgaaaagctcaccaggaaactttcccttcactctgccagctgggtaaatacaccacgaattccagtgctgaccatcgagtccgactggacctgggcctctgggacaaattcagtgaactggccaccaagtgcattattaagatcgtggagtttgctaaacgtctgcctggtttcactggcttgaccatcgcagaccaaattaccctgctgaaggccgcctgcctggacatcctgattcttagaatttgcaccaggtataccccagaacaagacaccatgactttctcagacggccttaccctaaatcgaactcagatgcacaatgctggatttggtcctctgactgaccttgtgttcacctttgccaaccagctcctgcctttggaaatggatgacacagaaacaggccttctcagtgccatctgcttaatctgtggagaccgccaggaccttgaggaaccgacaaaagtagataagctacaagaaccattgctggaagcactaaaaatttatatcagaaaaagacgacccagcaagcctcacatgtttccaaagatcttaatgaaaatcacagatctccgtagcatcagtgctaaaggtgcagagcgtgtaattaccttgaaaatggaaattc

SEQ ID NO: 17393 - DNA, 2775 bp, Homo sapiens
  source 1..2775: mol_type = unassigned DNA
gtgacagaagtagtaggaagtgagctgttcagaggcaggagggtctattctttgccaaaggggggaccagaattcccccatgcgagctgtttgaggactgggatgccgagaacgcgagcgatccgagcagggtttgtctgggcaccgtcggggtaggatccggaacgcattcggaaggctttttgcaagcatttacttggaaggagaacttgggatctttctgggaaccccccgccccggctggattggccgagcaagcctggaaaatgcaattgaaacacagagcaccagctctgaggaactcgtcccaagccccccatctccacttcctccccctcgagtgtacaaaccctgcttcgtctgccaggacaaatcatcagggtaccactatggggtcagcgcctgtgagggatgtaagggctttttccgcagaagtattcagaagaatatgatttacacttgtcaccgagataagaactgtgttattaataaagtcaccaggaatcgatgccaatactgtcgactccagaagtgctttgaagtgggaatgtccaaagaatctgtcaggaatgacaggaacaagaaaaagaaggagacttcgaagcaagaatgcacagagagctatgaaatgacagctgagttggacgatctcacagagaagatccgaaaagctcaccaggaaactttcccttcactctgccagctgggtaaatacaccacgaattccagtgctgaccatcgagtccgactggacctgggcctctgggacaaattcagtgaactggccaccaagtgcattattaagatcgtggagtttgctaaacgtctgcctggtttcactggcttgaccatcgcagaccaaattaccctgctgaaggccgcctgcctggacatcctgattcttagaatttgcaccaggtataccccagaacaagacaccatgactttctcagacggccttaccctaaatcgaactcagatgcacaatgctggatttggtcctctgactgaccttgtgttcacctttgccaaccagctcctgcctttggaaatggatgacacagaaacaggccttctcagtgccatctgcttaatctgtggagaccgccaggaccttgaggaaccgacaaaagtagataagctacaagaaccattgctggaagcactaaaaatttatatcagaaaaagacgacccagcaagcctcacatgtttccaaagatcttaatgaaaatcacagatctccgtagcatcagtgctaaaggtgcagagcgtgtaattaccttgaaaatggaaattcctggatcaatgccacctctcattcaagaaatgctggagaattctgaaggacatgaacccttgaccccaagttcaagtgggaacacagcagagcacagtcctagcatctcacccagctcagtggaaaacagtggggtcagtcagtcaccactcgtgcaataagacattttctagctacttcaaacattccccagtaccttcagttccaggatttaaaatgcaagaaaaaacatttttactgctgcttagtttttggactgaaaagatattaaaactcaagaaggaccaagaagttttcatatgtatcaatatatatactcctcactgtgtaacttacctagaaatacaaacttttccaattttaaaaaatcagccatttcatgcaaccagaaactagttaaaagcttctattttcctctttgaacactcaagattgcatggcaaagacccagtcaaaatgatttacccctggttaagtttctgaagactttgtacatacagaagtatggctctgttctttctatactgtatgtttggtgctttccttttgtcttgcatactcaaaataaccatgacaccaaggttatgaaatagactactgtacacgtctacctaggttcaaaaagataactgtcttgctttcatggaatagtcaagacatcaaggtaaggaaacaggactattgacaggactattgtacagtatgacaagataaggctgaagatattctactttagttagtatggaagcttgtctttgctctttctgatgctctcaaactgcatcttttatttcatgttgcccagtaaaagtatacaaattccctgcactagcagaagagaattctgtatcagtgtaactgccagttcagttaatcaaatgtcatttgttcaattgttaatgtcactttaaattaaaagtggtttattacttgtttaatgacataactacacagttagttaaaaaaaatttttttacagtaatgatagcctccaaggcagaaacacttttcagtgttaagtttttgtttacttgttcacaagccattagggaaatttcatgggataattagcaggctggtctaccacctggaccatgtaactctagtgtccttcctgattcatgcctgatattgggatttttttttccagccttcttgatgccaaggggctaattaatattaacaactcccaaagaaacaggcatagaatctgcctcctttgaccttgttcaatcactatgaagcagagtgaaagctgtggtagagtggttaacagatacaagtgtcagtttcttagttctcatttaagcactagtggaattttttttttttgatatattagcaagtctgtgatgtactttcactggctctgtttgtacattgagattgtttgtttaacaatgctttctatgttcatatactgtttacctttttccatggagtctcctggcaaagaataaaatatatttattttaaa

SEQ ID NO: 17394 - DNA, 3084 bp, Homo sapiens
  source 1..3084: mol_type = unassigned DNA
tctttgccaaaggggggaccagaattcccccatgcgagctgtttgaggactgggatgccgagaacgcgagcgatccgagcagggtttgtctgggcaccgtcggggtaggatccggaacgcattcggaaggctttttgcaagcatttacttggaaggagaacttgggatctttctgggaaccccccgccccggctggattggccgagcaagcctggaaaatggtaaatgatcatttggatcaattacaggcttttagctggcttgtctgtcataattcatgattcggggctgggaaaaagaccaacagcctacgtgccaaaaaaggggcagagtttgatggagttgggtggacttttctatgccatttgcctccacacctagaggataagcacttttgcagacattcagtgcaagggagatcatgtttgactgtatggatgttctgtcagtgagtcctgggcaaatcctggatttctacactgcgagtccgtcttcctgcatgctccaggagaaagctctcaaagcatgcttcagtggattgacccaaaccgaatggcagcatcggcacactgctcaatcaattgaaacacagagcaccagctctgaggaactcgtcccaagccccccatctccacttcctccccctcgagtgtacaaaccctgcttcgtctgccaggacaaatcatcagggtaccactatggggtcagcgcctgtgagggatgtaagggctttttccgcagaagtattcagaagaatatgatttacacttgtcaccgagataagaactgtgttattaataaagtcaccaggaatcgatgccaatactgtcgactccagaagtgctttgaagtgggaatgtccaaagaatctgtcaggaatgacaggaacaagaaaaagaaggagacttcgaagcaagaatgcacagagagctatgaaatgacagctgagttggacgatctcacagagaagatccgaaaagctcaccaggaaactttcccttcactctgccagctgggtaaatacaccacgaattccagtgctgaccatcgagtccgactggacctgggcctctgggacaaattcagtgaactggccaccaagtgcattattaagatcgtggagtttgctaaacgtctgcctggtttcactggcttgaccatcgcagaccaaattaccctgctgaaggccgcctgcctggacatcctgattcttagaatttgcaccaggtataccccagaacaagacaccatgactttctcagacggccttaccctaaatcgaactcagatgcacaatgctggatttggtcctctgactgaccttgtgttcacctttgccaaccagctcctgcctttggaaatggatgacacagaaacaggccttctcagtgccatctgcttaatctgtggagaccgccaggaccttgaggaaccgacaaaagtagataagctacaagaaccattgctggaagcactaaaaatttatatcagaaaaagacgacccagcaagcctcacatgtttccaaagatcttaatgaaaatcacagatctccgtagcatcagtgctaaaggtgcagagcgtgtaattaccttgaaaatggaaattcctggatcaatgccacctctcattcaagaaatgctggagaattctgaaggacatgaacccttgaccccaagttcaagtgggaacacagcagagcacagtcctagcatctcacccagctcagtggaaaacagtggggtcagtcagtcaccactcgtgcaataagacattttctagctacttcaaacattccccagtaccttcagttccaggatttaaaatgcaagaaaaaacatttttactgctgcttagtttttggactgaaaagatattaaaactcaagaaggaccaagaagttttcatatgtatcaatatatatactcctcactgtgtaacttacctagaaatacaaacttttccaattttaaaaaatcagccatttcatgcaaccagaaactagttaaaagcttctattttcctctttgaacactcaagattgcatggcaaagacccagtcaaaatgatttacccctggttaagtttctgaagactttgtacatacagaagtatggctctgttctttctatactgtatgtttggtgctttccttttgtcttgcatactcaaaataaccatgacaccaaggttatgaaatagactactgtacacgtctacctaggttcaaaaagataactgtcttgctttcatggaatagtcaagacatcaaggtaaggaaacaggactattgacaggactattgtacagtatgacaagataaggctgaagatattctactttagttagtatggaagcttgtctttgctctttctgatgctctcaaactgcatcttttatttcatgttgcccagtaaaagtatacaaattccctgcactagcagaagagaattctgtatcagtgtaactgccagttcagttaatcaaatgtcatttgttcaattgttaatgtcactttaaattaaaagtggtttattacttgtttaatgacataactacacagttagttaaaaaaaatttttttacagtaatgatagcctccaaggcagaaacacttttcagtgttaagtttttgtttacttgttcacaagccattagggaaatttcatgggataattagcaggctggtctaccacctggaccatgtaactctagtgtccttcctgattcatgcctgatattgggatttttttttccagccttcttgatgccaaggggctaattaatattaacaactcccaaagaaacaggcatagaatctgcctcctttgaccttgttcaatcactatgaagcagagtgaaagctgtggtagagtggttaacagatacaagtgtcagtttcttagttctcatttaagcactagtggaattttttttttttgatatattagcaagtctgtgatgtactttcactggctctgtttgtacattgagattgtttgtttaacaatgctttctatgttcatatactgtttacctttttccatggagtctcctggcaaagaataaaatatatttattttaaa

SEQ ID NO: 17395 - DNA, 574 bp, Homo sapiens
  source 1..574: mol_type = unassigned DNA
acttttgcagacattcagtgcaagggagatcatgtttgactgtatggatgttctgtcagtgagtcctgggcaaatcctggatttctacactgcgagtccgtcttcctgcatgctccaggagaaagctctcaaagcatgcttcagtggattgacccaaaccgaatggcagcatcggcacactgctcaatcaattgaaacacagagcaccagctctgaggaactcgtcccaagccccccatctccacttcctccccctcgagtgtacaaaccctgcttcgtctgccaggacaaatcatcagggtaccactatggggtcagcgcctgtgagggatgtaaggaaagaaaagaaacatgacttcaaaggcaaatacaactaactcatccataaaaaatttctcaaaggaactatggctgttttgaactagcccttccctagatatataacttctttaagtcctctctggatggttgtttacatctgttgtttatacatctaaattgcatgattcatttgtaattgttaacatgttggaataatgttacaggtactccatggcattttatatttggctta

SEQ ID NO: 17396 - DNA, 1191 bp, Homo sapiens
  source 1..1191: mol_type = unassigned DNA
cagtgcaagggagatcatgtttgactgtatggatgttctgtcagtgagtcctgggcaaatcctggatttctacactgcgagtccgtcttcctgcatgctccaggagaaagctctcaaagcatgcttcagtggattgacccaaaccgaatggcagcatcggcacactgctcaatcaattgaaacacagagcaccagctctgaggaactcgtcccaagccccccatctccacttcctccccctcgagtgtacaaaccctgcttcgtctgccaggacaaatcatcagggtaccactatggggtcagcgcctgtgagggatgtaagggctttttccgcagaagtattcagaagaatatgatttacacttgtcaccgagataagaactgtgttattaataaagtcaccaggaatcgatgccaatactgtcgactccagaagtgctttgaagtgggaatgtccaaagaatctgtcaggaatgacaggaacaagaaaaagaaggagacttcgaagcaagaatgcacagagagctatgaaatgacagctgagttggacgatctcacagagaagatccgaaaagctcaccaggaaactttcccttcactctgccagctgggtaaatacaccacgaattccagtgctgaccatcgagtccgactggacctgggcctctgggacaaattcagtgaactggccaccaagtgcattattaagatcgtggagtttgctaaacgtctgcctggtttcactggcttgaccatcgcagaccaaattaccctgctgaaggccgcctgcctggacatcctgaccgccaggaccttgaggaaccgacaaaagtagataagctacaagaaccattgctggaagcactaaaaatttatatcagaaaaagacgacccagcaagcctcacatgtttccaaagatcttaatgaaaatcacagatctccgtagcatcagtgctaaaggtgcagagcgtgtaattaccttgaaaatggaaattcctggatcaatgccacctctcattcaagaaatgctggagaattctgaaggacatgaacccttgaccccaagttcaagtgggaacacagcagagcacagtcctagcatctcacccagctcagtggaaaacagtggggtcagtcagtcaccactcgtgcaataagacattttctagctacttcaaacattccccagt

SEQ ID NO: 17397 - DNA, 1258 bp, Homo sapiens
  source 1..1258: mol_type = unassigned DNA
cagtgcaagggagatcatgtttgactgtatggatgttctgtcagtgagtcctgggcaaatcctggatttctacactgcgagtccgtcttcctgcatgctccaggagaaagctctcaaagcatgcttcagtggattgacccaaaccgaatggcagcatcggcacactgctcaatcaattgaaacacagagcaccagctctgaggaactcgtcccaagccccccatctccacttcctccccctcgagtgtacaaaccctgcttcgtctgccaggacaaatcatcagggtaccactatggggtcagcgcctgtgagggatgtaagggctttttccgcagaagtattcagaagaatatgatttacacttgtcaccgagataagaactgtgttattaataaagtcaccaggaatcgatgccaatactgtcgactccagaagtgctttgaagtgggaatgtccaaagaatctgtcaggaatgacaggaacaagaaaaagaaggagacttcgaagcaagaatgcacagagagctatgaaatgacagctgagttggacgatctcacagagaagatccgaaaagctcaccaggaaactttcccttcactctgccagctgggtaaatacaccacgaattccagtgctgaccatcgagtccgactggacctgggcctctgggacaaattcagtgaactggccaccaagtgcattattaagatcgtggagtttgctaaacgtctgcctggtttcactggcttgaccatcgcagaccaaattaccctgctgaaggccgcctgcctggacatcctgctcctgcctttggaaatggatgacacagaaacaggccttctcagtgccatctgcttaatctgtggagaccgccaggaccttgaggaaccgacaaaagtagataagctacaagaaccattgctggaagcactaaaaatttatatcagaaaaagacgacccagcaagcctcacatgtttccaaagatcttaatgaaaatcacagatctccgtagcatcagtgctaaaggtgcagagcgtgtaattaccttgaaaatggaaattcctggatcaatgccacctctcattcaagaaatgctggagaattctgaaggacatgaacccttgaccccaagttcaagtgggaacacagcagagcacagtcctagcatctcacccagctcagtggaaaacagtggggtcagtcagtcaccactcgtgcaataagacattttctagctacttcaaacattccccagt

SEQ ID NO: 17398 - DNA, 1235 bp, Homo sapiens
  source 1..1235: mol_type = unassigned DNA
cagtgcaagggagatcatgtttgactgtatggatgttctgtcagtgagtcctgggcaaatcctggatttctacactgcgagtccgtcttcctgcatgctccaggagaaagctctcaaagcatgcttcagtggattgacccaaaccgaatggcagcatcggcacactgctcaatcaattgaaacacagagcaccagctctgaggaactcgtcccaagccccccatctccacttcctccccctcgagtgtacaaaccctgcttcgtctgccaggacaaatcatcagggtaccactatggggtcagcgcctgtgagggatgtaagggctttttccgcagaagtattcagaagaatatgatttacacttgtcaccgagataagaactgtgttattaataaagtcaccaggaatcgatgccaatactgtcgactccagaagtgctttgaagtgggaatgtccaaagaataattccagtgctgaccatcgagtccgactggacctgggcctctgggacaaattcagtgaactggccaccaagtgcattattaagatcgtggagtttgctaaacgtctgcctggtttcactggcttgaccatcgcagaccaaattaccctgctgaaggccgcctgcctggacatcctgattcttagaatttgcaccaggtataccccagaacaagacaccatgactttctcagacggccttaccctaaatcgaactcagatgcacaatgctggatttggtcctctgactgaccttgtgttcacctttgccaaccagctcctgcctttggaaatggatgacacagaaacaggccttctcagtgccatctgcttaatctgtggagaccgccaggaccttgaggaaccgacaaaagtagataagctacaagaaccattgctggaagcactaaaaatttatatcagaaaaagacgacccagcaagcctcacatgtttccaaagatcttaatgaaaatcacagatctccgtagcatcagtgctaaaggtgcagagcgtgtaattaccttgaaaatggaaattcctggatcaatgccacctctcattcaagaaatgctggagaattctgaaggacatgaacccttgaccccaagttcaagtgggaacacagcagagcacagtcctagcatctcacccagctcagtggaaaacagtggggtcagtcagtcaccactcgtgcaataagacattttctagctacttcaaacattccccagt

SEQ ID NO: 17399 - DNA, 2590 bp, Homo sapiens
  source 1..2590: mol_type = unassigned DNA
agacaaacccaaaacatttatgtgcatagaaaaaaattctggaaggtcgtacacagtgaatttctctgagtgaaaagattgtggcaattgaaacacagagcaccagctctgaggaactcgtcccaagccccccatctccacttcctccccctcgagtgtacaaaccctgcttcgtctgccaggacaaatcatcagggtaccactatggggtcagcgcctgtgagggatgtaagggctttttccgcagaagtattcagaagaatatgatttacacttgtcaccgagataagaactgtgttattaataaagtcaccaggaatcgatgccaatactgtcgactccagaagtgctttgaagtgggaatgtccaaagaatctgtcaggaatgacaggaacaagaaaaagaaggagacttcgaagcaagaatgcacagagagctatgaaatgacagctgagttggacgatctcacagagaagatccgaaaagctcaccaggaaactttcccttcactctgccagctgggtaaatacaccacgaattccagtgctgaccatcgagtccgactggacctgggcctctgggacaaattcagtgaactggccaccaagtgcattattaagatcgtggagtttgctaaacgtctgcctggtttcactggcttgaccatcgcagaccaaattaccctgctgaaggccgcctgcctggacatcctgattcttagaatttgcaccaggtataccccagaacaagacaccatgactttctcagacggccttaccctaaatcgaactcagatgcacaatgctggatttggtcctctgactgaccttgtgttcacctttgccaaccagctcctgcctttggaaatggatgacacagaaacaggccttctcagtgccatctgcttaatctgtggagaccgccaggaccttgaggaaccgacaaaagtagataagctacaagaaccattgctggaagcactaaaaatttatatcagaaaaagacgacccagcaagcctcacatgtttccaaagatcttaatgaaaatcacagatctccgtagcatcagtgctaaaggtgcagagcgtgtaattaccttgaaaatggaaattcctggatcaatgccacctctcattcaagaaatgctggagaattctgaaggacatgaacccttgaccccaagttcaagtgggaacacagcagagcacagtcctagcatctcacccagctcagtggaaaacagtggggtcagtcagtcaccactcgtgcaataagacattttctagctacttcaaacattccccagtaccttcagttccaggatttaaaatgcaagaaaaaacatttttactgctgcttagtttttggactgaaaagatattaaaactcaagaaggaccaagaagttttcatatgtatcaatatatatactcctcactgtgtaacttacctagaaatacaaacttttccaattttaaaaaatcagccatttcatgcaaccagaaactagttaaaagcttctattttcctctttgaacactcaagattgcatggcaaagacccagtcaaaatgatttacccctggttaagtttctgaagactttgtacatacagaagtatggctctgttctttctatactgtatgtttggtgctttccttttgtcttgcatactcaaaataaccatgacaccaaggttatgaaatagactactgtacacgtctacctaggttcaaaaagataactgtcttgctttcatggaatagtcaagacatcaaggtaaggaaacaggactattgacaggactattgtacagtatgacaagataaggctgaagatattctactttagttagtatggaagcttgtctttgctctttctgatgctctcaaactgcatcttttatttcatgttgcccagtaaaagtatacaaattccctgcactagcagaagagaattctgtatcagtgtaactgccagttcagttaatcaaatgtcatttgttcaattgttaatgtcactttaaattaaaagtggtttattacttgtttaatgacataactacacagttagttaaaaaaaatttttttacagtaatgatagcctccaaggcagaaacacttttcagtgttaagtttttgtttacttgttcacaagccattagggaaatttcatgggataattagcaggctggtctaccacctggaccatgtaactctagtgtccttcctgattcatgcctgatattgggatttttttttccagccttcttgatgccaaggggctaattaatattaacaactcccaaagaaacaggcatagaatctgcctcctttgaccttgttcaatcactatgaagcagagtgaaagctgtggtagagtggttaacagatacaagtgtcagtttcttagttctcatttaagcactagtggaattttttttttttgatatattagcaagtctgtgatgtactttcactggctctgtttgtacattgagattgtttgtttaacaatgctttctatgttcatatactgtttacctttttccatggagtctcctggcaaagaataaaatatatttattttaaa

SEQ ID NO: 17400 - DNA, 3817 bp, Homo sapiens
  source 1..3817: mol_type = unassigned DNA
ctagaacgagatggaaggggatgttcaaggcccctcccttgactctgaacggacccccagggaacatgcgaccctctctctggcgacgcctcccacccaccactaatacttgctcctggaccggggggcgcggaggttggagagaggagctacccgggtctcggacaggcggcactgggaccacgaggcagggagccaggcttgaagcaggtgacatgtagacgtcccctggtccagcctcggaacctgagcgcccttctgcctggaaagtttgtggctaggcgccatggccaagagcagctccctgaatgttcgcgtggtggagggccgcgcgctgcctgccaaggacgtgtctgggagcagcgacccctactgcctagtgaaagtggacgacgaggtggtggccaggacagctactgtctggaggagcctgggccccttctggggggaggagtacacggtgcacctgcctctggatttccaccagctggccttctacgtgctggatgaggacactgtcgggcacgacgacatcatcggcaagatctcgctgagcagggaggcgattacagccgacccccgagggattgacagctggattaacttgagccgagtggacccagatgcagaagtgcagggtgagatctgcctgtcagtgcagatgctggaggatgggcagggccgctgccttcgctgccatgtgcttcaggccagggacctggctcccagagacatctctggcacatctgacccatttgcacgtgtgttttggggcagccagagcttggagacctcaaccatcaagaagactcgcttcccgcactgggatgaagtgctggagctgcgggagatgccaggtgccccgtccccactgcgggtggagctctgggactgggacatggtgggcaagaatgacttcttgggcatggtggagttctctccaaagaccctccagcagaagccacctaaaggctggttccgcctcctgccctttcccagagccgaggaggattctggggggaacctgggtgccctgcgagtgaaggtacgcctgattgaggaccgcgtcctgccctcccagtgctaccagcctctcatggagctgctcatggagtctgtgcaggggccagcagaggaggacactgctagccccttggctttgctggaagagctgaccttgggggactgccgccaggaccttgccaccaagctggtgaaactctttcttggccggggactggctgggcgctttctggactatctcacccggcgtgaggtggctcggaccatggaccccaacaccctcttccgttctaactccctggcatccaagtcgatggaacagtttatgaagctcgtgggcatgccctacctgcacgaggtcctgaagcctgtgattagccgtgtctttgaggagaagaagtacatggagctggatccctgcaagatggacctgggccgcacccggaggatctccttcaaaggcgcactctcggaggagcagatgcgggagaccagcctggggctgctgacgggctacctggggcccatcgtggacgccatcgtgggctccgtggggcgctgcccgcccgccatgcgcctcgccttcaagcagctgcaccggcgagtggaggagcgcttcccccaggccgagcaccagcaggatgtgaagtacctggccatcagtggatttctcttcttgcgattcttcgcacctgccatccttaccccaaagctgtttgaccttcgggaccaacacgcggacccccagactagccgctcactgctgttgcttgccaaggctgtgcagagcattggaaacctgggccagcagctgggccaaggcaaggaactgtggatggcccccctgcaccccttcctgctgcagtgtgtctcacgtgtgagagacttcctggaccggctggtggatgtggatggggatgaagaagctggtgtcccagccagggccctgttcccgccctcggccattgttcgagaaggctatctgctgaagcgcaaggaggagcctgccggcctggccacgcgctttgccttcaagaagcgctacgtctggctcagcggggagaccctctccttctccaagagtcctgagtggcagatgtgtcactccatccccgtgtctcacatccgcgccgtggagcgcgtagacgagggcgccttccaactgccccacgtgatgcaggtggtgacgcaggacggcacgggggcgctgcacaccacctacctccagtgcaagaatgtgaatgagctcaaccagtggctctcggccttgcgcaaggccagcgcccccaacccgaacaagctggccgcctgccaccccggtgccttccgcagcgcgcgctggacctgctgcctccaggctgagcgctcagccgccggctgcagccgtacacactcagctgtcaccctgggggactggagtgacccactggatcctgatgctgaggcccagacagtgtatcggcagctgctcctggggcgggaccagctcaggctgaaattactggaggattctaacatggatacaactctggaggcagacacaggggcctgtcctgaggtcctggcccggcaaagagcagcaactgcccgcctgctggaggtgctcgcagacctggatcgtgcccacgaggagttccagcagcaggagcgagggaaggcggccctgggcccccttggcccctaaggaaatgccagagctagcccggaaggaggagcaagagccagggggccctcttcagcgcatcctgccccgggagtctcctgtctccttggacctctttgattctgtggtttggaggctcccagagacgtgcctagtcctgtgtgccttgagtccagaactcagggcatggaagccctttggcaggggccagccttgcactgagtgaaacttgccctctggcttgattcagactggagtggataggataaggaacctgacttatttgactgagactggggtctctacttcaccaaactggcctctatccataccaaggaggccagcctggccctgagctgctggatacagctggacctgaattcctgatgcccatgtgatgttgttgccccagatgggcactaaatggcctcactccttcctgttttcatgtctgctaatccctataacctcactgattcttctgtaccctgcccttggcctaggactccaaccacaagcttccagaatcaggtgccctcaggaagaaccaaggctgggtgggggtccagtgtgccaaactcagacccttggagcctgggagaccttgggccaggctgtttatctctctctgggtctcagattaccctgtataaaaagaggagggaaagtctagatgtgtggttttcaaactggattccaatgaggtagttcaagaacaagggaggagtttctctgactgtgggccaaagaccacccgctagaatgtctgctagaaatgcagatttctgaggcccagccagctactgactcagaatctgagggtatatgaaggcaagaatcagggttatttaacagattccgtaggtcatttggatgagtatcagctttgaggaccacaggcctggggaatgggcaattttattttattttgtttttagagttgggggtctcactctgttgcccaggctgcagtacagtggcatgatcataggtcagtgcaccctcaaacttctggacttcagtgatcctcccacgttagcctccagagcagctgcgactacaggtgcaagccatcacgcctggctaatttttaaatttttgtagagatggggggtctcactatgttgccca

SEQ ID NO: 17401 - DNA, 3382 bp, Homo sapiens
  source 1..3382: mol_type = unassigned DNA
gtgtttaactggaaactagaacgagatggaaggggatgttcaaggcccctcccttgactctgaacggacccccagggaacatgcgaccctctctctggcgacgcctcccacccaccactaatacttgctcctggaccggggggcgcggaggttggagagaggaggcaggtgtctgcatgctacccgggtctcggacaggcggcactgggaccacgaggcagggagccaggcttgaagcaggtgacatgtagacgtcccctggtccagcctcggaacctgagcgcccttctgcctggaaagtttgtggctaggcgccatggccaagagcagctccctgaatgttcgcgtggtggagggccgcgcgctgcctgccaaggacgtgtctgggagcagcgacccctactgcctagtgaaagtggacgacgaggtggtggccaggacagctactgtctggaggagcctgggccccttctggggggaggagtacacggtgcacctgcctctggatttccaccagctggccttctacgtgctggatgaggacactgtcgggcacgacgacatcatcggcaagatctcgctgagcagggaggcgattacagccgacccccgagggattgacagctggattaacttgagccgagtggacccagatgcagaagtgcagggtgagatctgcctgtcagtgcagatgctggaggatgggcagggccgctgccttcgctgccatgtgcttcaggccagggacctggctcccagagacatctctggcacatctgacccatttgcacgtgtgttttggggcagccagagcttggagacctcaaccatcaagaagactcgcttcccgcactgggatgaagtgctggagctgcgggagatgccaggtgccccgtccccactgcgggtggagctctgggactgggacatggtgggcaagaatgacttcttgggcatggtggagttctctccaaagaccctccagcagaagccacctaaaggctggttccgcctcctgccctttcccagagccgaggaggattctggggggaacctgggtgccctgcgagtgaaggtacgcctgattgaggaccgcgtcctgccctcccagtgctaccagcctctcatggagctgctcatggagtctgtgcaggggccagcagaggaggacactgctagccccttggctttgctggaagagctgaccttgggggactgccgccaggaccttgccaccaagctggtgaaactctttcttggccggggactggctgggcgctttctggactatctcacccggcgtgaggtggctcggaccatggaccccaacaccctcttccgttctaactccctggcatccaagtcgatggaacagtttatgaagctcgtgggcatgccctacctgcacgaggtcctgaagcctgtgattagccgtgtctttgaggagaagaagtacatggagctggatccctgcaagatggacctgggccgcacccggaggatctccttcaaaggcgcactctcggaggagcagatgcgggagaccagcctggggctgctgacgggctacctggggcccatcgtggacgccatcgtgggctccgtggggcgctgcccgcccgccatgcgcctcgccttcaagcagctgcaccggcgagtggaggagcgcttcccccaggccgagcaccaggatgtgaagtacctggccatcagtggatttctcttcttgcgattcttcgcacctgccatccttaccccaaagctgtttgaccttcgggaccaacacgcggacccccagactagccgctcactgctgttgcttgccaaggctgtgcagagcattggaaacctgggccagcagctgggccaaggcaaggaactgtggatggcccccctgcaccccttcctgctgcagtgtgtctcacgtgtgagagacttcctggaccggctggtggatgtggatggggatgaagctggtgtcccagccagggccctgttcccgccctcggccattgttcgagaaggctatctgctgaagcgcaaggaggagcctgccggcctggccacgcgctttgccttcaagaagcgctacgtctggctcagcggggagaccctctccttctccaagagtcctgagtggcagatgtgtcactccatccccgtgtctcacatccgcgccgtggagcgcgtagacgagggcgccttccaactgccccacgtgatgcaggtggtgacgcaggacggcacgggggcgctgcacaccacctacctccagtgcaagaatgtgaatgagctcaaccagtggctctcggccttgcgcaaggccagcgcccccaacccgaacaagctggccgcctgccaccccggtgccttccgcagcgcgcgctggacctgctgcctccaggctgagcgctcagccgccggctgcagccgtacacactcagctgtcaccctgggggactggagtgacccactggatcctgatgctgaggcccagacagtgtatcggcagctgctcctggggcgggaccagctcaggctgaaattactggaggattctaacatggatacaactctggaggcagacacaggggcctgtcctgaggtcctggcccggcaaagagcagcaactgcccgcctgctggaggtgctcgcagacctggatcgtgcccacgaggagttccagcagcaggagcgagggaaggcggccctgggcccccttggcccctaaggaaatgccagagctagcccggaaggaggagcaagagccagggggccctcttcagcgcatcctgccccgggagtctcctgtctccttggacctctttgattctgtggtttggaggctcccagagacgtgcctagtcctgtgtgccttgagtccagaactcagggcatggaagccctttggcaggggccagccttgcactgagtgaaacttgccctctggcttgattcagactggagtggataggataaggaacctgacttatttgactgagactggggtctctacttcaccaaactggcctctatccataccaaggaggccagcctggccctgagctgctggatacagctggacctgaattcctgatgcccatgtgatgttgttgccccagatgggcactaaatggcctcactccttcctgttttcatgtctgctaatccctataacctcactgattcttctgtaccctgcccttggcctaggactccaaccacaagcttccagaatcaggtgccctcaggaagaaccaaggctgggtgggggtccagtgtgccaaactcagacccttggagcctgggagaccttgggccaggctgtttatctctctctgggtctcagattaccctgtataaaaagaggagggaaagtcta

SEQ ID NO: 17402 - DNA, 3040 bp, Homo sapiens
  source 1..3040: mol_type = unassigned DNA
ttgtctggagctccagacgcctcggcaagagcccgctgcgccccctgcgcgctcctcctgctcggagcacggctcctacctgtagagtccggacgggcgctccctccccgggcacctacaccttctcctctttcggaaatctcccatccagctacccgggtctcggacaggcggcactgggaccacgaggcagggagccaggcttgaagcaggtgacatgtagacgtcccctggtccagcctcggaacctgagcgcccttctgcctggaaagtttgtggctaggcgccatggccaagagcagctccctgaatgttcgcgtggtggagggccgcgcgctgcctgccaaggacgtgtctgggagcagcgacccctactgcctagtgaaagtggacgacgaggtggtggccaggacagctactgtctggaggagcctgggccccttctggggggaggagtacacggtgcacctgcctctggatttccaccagctggccttctacgtgctggatgaggacactgtcgggcacgacgacatcatcggcaagatctcgctgagcagggaggcgattacagccgacccccgagggattgacagctggattaacttgagccgagtggacccagatgcagaagtgcagggtgagatctgcctgtcagtgcagatgctggaggatgggcagggccgctgccttcgctgccatgtgcttcaggccagggacctggctcccagagacatctctggcacatctgacccatttgcacgtgtgttttggggcagccagagcttggagacctcaaccatcaagaagactcgcttcccgcactgggatgaagtgctggagctgcgggagatgccaggtgccccgtccccactgcgggtggagctctgggactgggacatggtgggcaagaatgacttcttgggcatggtggagttctctccaaagaccctccagcagaagccacctaaaggctggttccgcctcctgccctttcccagagccgaggaggattctggggggaacctgggtgccctgcgagtgaaggtacgcctgattgaggaccgcgtcctgccctcccagtgctaccagcctctcatggagctgctcatggagtctgtgcaggggccagcagaggaggacactgctagccccttggctttgctggaagagctgaccttgggggactgccgccaggaccttgccaccaagctggtgaaactctttcttggccggggactggctgggcgctttctggactatctcacccggcgtgaggtggctcggaccatggaccccaacaccctcttccgttctaactccctggcatccaagtcgatggaacagtttatgaagctcgtgggcatgccctacctgcacgaggtcctgaagcctgtgattagccgtgtctttgaggagaagaagtacatggagctggatccctgcaagatggacctgggccgcacccggaggatctccttcaaaggcgcactctcggaggagcagatgcgggagaccagcctggggctgctgacgggctacctggggcccatcgtggacgccatcgtgggctccgtggggcgctgcccgcccgccatgcgcctcgccttcaagcagctgcaccggcgagtggaggagcgcttcccccaggccgagcaccaggatgtgaagtacctggccatcagtggatttctcttcttgcgattcttcgcacctgccatccttaccccaaagctgtttgaccttcgggaccaacacgcggacccccagactagccgctcactgctgttgcttgccaaggctgtgcagagcattggaaacctgggccagcagctgggccaaggcaaggaactgtggatggcccccctgcaccccttcctgctgcagtgtgtctcacgtgtgagagacttcctggaccggctggtggatgtggatggggatgaagctggtgtcccagccagggccctgttcccgccctcggccattgttcgagaaggctatctgctgaagcgcaaggaggagcctgccggcctggccacgcgctttgccttcaagaagcgctacgtctggctcagcggggagaccctctccttctccaagagtcctgagtggcaggtggtgacgcaggacggcacgggggcgctgcacaccacctacctccagtgcaagaatgtgaatgagctcaaccagtggctctcggccttgcgcaaggccagcgcccccaacccgaacaagctggccgcctgccaccccggtgccttccgcagcgcgcgctggacctgctgcctccaggctgagcgctcagccgccggctgcagccgtacacactcagctgtcaccctgggggactggagtgacccactggatcctgatgctgaggcccagacagtgtatcggcagctgctcctggggcgggaccagctcaggctgaaattactggaggattctaacatggatacaactctggaggcagacacaggggcctgtcctgaggtcctggcccggcaaagagcagcaactgcccgcctgctggaggtgctcgcagacctggatcgtgcccacgaggagttccagcagcaggagcgagggaaggcggccctgggcccccttggcccctaaggaaatgccagagctagcccggaaggaggagcaagagccagggggccctcttcagcgcatcctgccccgggagtctcctgtctccttggacctctttgattctgtggtttggaggctcccagagacgtgcctagtcctgtgtgccttgagtccagaactcagggcatggaagccctttggcaggggccagccttgcactgagtgaaacttgccctctggcttgattcagactggagtggataggataaggaacctgacttatttgactgagactggggtctctacttcaccaaactggcctctatccataccaaggaggccagcctggccctgagctgctggatacagctggacctgaattcctgatgcccatgtgatgttgttgccccagatgggcactaaatggcctcactccttcctg

SEQ ID NO: 17403 - DNA, 895 bp, Homo sapiens
  source 1..895: mol_type = unassigned DNA
gttataagtgccaagatgagacgtttgagattccagtggatgcctctgacccagcctcaggatggggactcaaggagggcttcctggaggaggtgctgcttaaatgtgacctgagtagagcagaagttaagcagcggcattggagacagaactgggagatggggccgccggctgcagccgtacacactcagctgtcaccctgggggactggagtgacccactggatcctgatgctgaggcccagacagtgtatcggcagctgctcctggggcgggaccagctcaggctgaaattactggaggattctaacatggatacaactctggaggcagacacaggggcctgtcctgaggtcctggcccggcaaagagcagcaactgcccgcctgctggaggtgctcgcagacctggatcgtgcccacgaggagttccagcagcaggagcgagggaaggcggccctgggcccccttggcccctaaggaaatgccagagctagcccggaaggaggagcaagagccagggggccctcttcagcgcatcctgccccgggagtctcctgtctccttggacctctttgattctgtggtttggaggctcccagagacgtgcctagtcctgtgtgccttgagtccagaactcagggcatggaagccctttggcaggggccagccttgcactgagtgaaacttgccctctggcttgattcagactggagtggataggataaggaacctgacttatttgactgagactggggtctctacttcaccaaactggcctctatccataccaaggaggccagcctggccctgagctgctggatacagctggacctgaattcctgatgcccatgtgatgttgttgccccagatgggcactaaatggcctcactcctt

SEQ ID NO: 17404 - DNA, 2502 bp, Homo sapiens
  source 1..2502: mol_type = unassigned DNA
acctgagcgcccttctgcctggaaagtttgtggctaggcgccatggccaagagcagctccctgaatgttcgcgtggtggagggccgcgcgctgcctgccaaggacgtgtctgggagcagcgacccctactgcctagtgaaagtggacgacgaggtggtggccaggacagctactgtctggaggagcctgggccccttctggggggaggagtacacggtgcacctgcctctggatttccaccagctggccttctacgtgctggatgaggacactgtcgggcacgacgacatcatcggcaagatctcgctgagcagggaggcgattacagccgacccccgagggattgacagctggattaacttgagccgagtggacccagatgcagaagtgcagggtgagatctgcctgtcagtgcagatgctggaggatgggcagggccgctgccttcgctgccatgtgcttcaggccagggacctggctcccagagacatctctggcacatctgacccatttgcacgtgtgttttggggcagccagagcttggagacctcaaccatcaagaagactcgcttcccgcactgggatgaagtgctggagctgcgggagatgccaggtgccccgtccccactgcgggtggagctctgggactgggacatggtgggcaagaatgacttcttgggcatggtggagttctctccaaagaccctccagcagaagccacctaaaggctggttccgcctcctgccctttcccagagccgaggaggattctggggggaacctgggtgccctgcgagtgaaggtacgcctgattgaggaccgcgtcctgccctcccagtgctaccagcctctcatggagctgctcatggagtctgtgcaggggccagcagaggaggacactgctagccccttggctttgctggaagagctgaccttgggggactgccgccaggaccttgccaccaagctggtgaaactctttcttggccggggactggctgggcgctttctggactatctcacccggcgtgaggtggctcggaccatggaccccaacaccctcttccgttctaactccctggcatccaagtcgatggaacagtttatgaagctcgtgggcatgccctacctgcacgaggtcctgaagcctgtgattagccgtgtctttgaggagaagaagtacatggagctggatccctgcaagatggacctgggccgcacccggaggatctccttcaaaggcgcactctcggaggagcagatgcgggagaccagcctggggctgctgacgggctacctggggcccatcgtggacgccatcgtgggctccgtggggcgctgcccgcccgccatgcgcctcgccttcaagcagctgcaccggcgagtggaggagcgcttcccccaggccgagcaccaggatgtgaagtacctggccatcagtggatttctcttcttgcgattcttcgcacctgccatccttaccccaaagctgtttgaccttcgggaccaacacgcggacccccagactagccgctcactgctgttgcttgccaaggctgtgcagagcattggaaacctgggccagcagctgggccaaggcaaggaactgtggatggcccccctgcaccccttcctgctgcagtgtgtctcacgtgtgagagacttcctggaccggctggtggatgtggatggggatgaagaagctggtgtcccagccagggccctgttcccgccctcggccattgttcgagaaggctatctgctgaagcgcaaggaggagcctgccggcctggccacgcgctttgccttcaagaagcgctacgtctggctcagcggggagaccctctccttctccaagagtcctgagtggcagatgtgtcactccatccccgtgtctcacatccgcgccgtggagcgcgtagacgagggcgccttccaactgccccacgtgatgcaggtggtgacgcaggacggcacgggggcgctgcacaccacctacctccagtgcaagaatgtgaatgagctcaaccagtggctctcggccttgcgcaaggccagcgcccccaacccgaacaagctggccgcctgccaccccggtgccttccgcagcgcgcgctggacctgctgcctccaggctgagcgctcagccgccggctgcagccgtacacactcagctgtcaccctgggggactggagtgacccactggatcctgatgctgaggcccagacagtgtatcggcagctgctcctggggcgggaccagctcaggctgaaattactggaggattctaacatggatacaactctggaggcagacacaggggcctgtcctgaggtcctggcccggcaaagagcagcaactgcccgcctgctggaggtgctcgcagacctggatcgtgcccacgaggagttccagcagcaggagcgagggaaggcggccctgggcccccttggcccctaaggaaatgccagagctagcccggaaggaggagcaagagccagg

SEQ ID NO: 17405 - DNA, 2733 bp, Homo sapiens
  source 1..2733: mol_type = unassigned DNA
ccagacgcctcggcaagagcccgctgcgccccctgcgcgctcctcctgctcggagcacggctcctacctgtagagtccggacgggcgctccctccccgggcacctacaccttctcctctttcggaaatctcccatccagctacccgggtctcggacaggcggcactgggaccacgaggcagggagccaggcttgaagcaggtgacatgtagacgtcccctggtccagcctcggaacctgagcgcccttctgcctggaaagtttgtggctaggcgccatggccaagagcagctccctgaatgttcgcgtggtggagggccgcgcgctgcctgccaaggacgtgtctgggagcagcgacccctactgcctagtgaaagtggacgacgaggtggtggccaggacagctactgtctggaggagcctgggccccttctggggggaggagtacacggtgcacctgcctctggatttccaccagctggccttctacgtgctggatgaggacactgtcgggtttgtggttggggaaagtggaatgtgtgggttagggacccaagcctgggcacctgaggggagaggggatgtgggtccacagcccacgagggtgtgccctcccacccagaccttgacacctgcccccacttctcttggggcggggcaaaggggcccctgactcagaccttcacgtgcccgccttcctgcaggcacgacgacatcatcggcaagatctcgctgagcagggaggcgattacagccgacccccgagggattgacagctggattaacttgagccgagtggacccagatgcagaagtgcagggtgagatctgcctgtcagtgcagatgctggaggatgggcagggccgctgccttcgctgccatgtgcttcaggccagggacctggctcccagagacatctctggcacatctgacccatttgcacgtgtgttttggggcagccagagcttggagacctcaaccatcaagaagactcgcttcccgcactgggatgaagtgctggagctgcgggagatgccaggtgccccgtccccactgcgggtggagctctgggactgggacatggtgggcaagaatgacttcttgggcatggtggagttctctccaaagaccctccagcagaagccacctaaaggctggttccgcctcctgccctttcccagagccgaggaggattctggggggaacctgggtgccctgcgagtgaaggtacgcctgattgaggaccgcgtcctgccctcccagtgctaccagcctctcatggagctgctcatggagtctgtgcaggggccagcagaggaggacactgctagccccttggctttgctggaagagctgaccttgggggactgccgccaggaccttgccaccaagctggtgaaactctttcttggccggggactggctgggcgctttctggactatctcacccggcgtgaggtggctcggaccatggaccccaacaccctcttccgttctaactccctggcatccaagtcgatggaacagtttatgaagctcgtgggcatgccctacctgcacgaggtcctgaagcctgtgattagccgtgtctttgaggagaagaagtacatggagctggatccctgcaagatggacctgggccgcacccggatgtgaagtacctggccatcagtggatttctcttcttgcgattcttcgcacctgccatccttaccccaaagctgtttgaccttcgggaccaacacgcggacccccagactagccgctcactgctgttgcttgccaaggctgtgcagagcattggaaacctgggccagcagctgggccaaggcaaggaactgtggatggcccccctgcaccccttcctgctgcagtgtgtctcacgtgtgagagacttcctggaccggctggtggatgtggatggggatgaagaagctggtgtcccagccagggccctgttcccgccctcggccattgttcgagaaggctatctgctgaagcgcaaggaggagcctgccggcctggccacgcgctttgccttcaagaagcgctacgtctggctcagcggggagaccctctccttctccaagagtcctgagtggcagatgtgtcactccatccccgtgtctcacatccgcgccgtggagcgcgtagacgagggcgccttccaactgccccacgtgatgcaggtggtgacgcaggacggcacgggggcgctgcacaccacctacctccagtgcaagaatgtgaatgagctcaaccagtggctctcggccttgcgcaaggccagcgcccccaacccgaacaagctggccgcctgccaccccggtgccttccgcagcgcgcgctggacctgctgcctccaggctgagcgctcagccgccggctgcagccgtacacactcagctgtcaccctgggggactggagtgacccactggatcctgatgctgaggcccagacagtgtatcggcagctgctcctggggcgggaccagctcaggctgaaattactggaggattctaacatggatacaactctggaggcagacacaggggcctgtcctgaggtcctggcccggcaaagagcagcaactgcccgcctgctggaggtgctcgcagacctggatcgtgcccacgaggagttccagcagcaggagcgagggaaggcggccctgggcccccttggcccctaaggaaatgccagagctagcccggaaggaggagcaagagccag

SEQ ID NO: 17406 - DNA, 2561 bp, Homo sapiens
  source 1..2561: mol_type = unassigned DNA
acctgagcgcccttctgcctggaaagtttgtggctaggcgccatggccaagagcagctccctgaatgttcgcgtggtggagggccgcgcgctgcctgccaaggacgtgtctgggagcagcgacccctactgcctagtgaaagtggacgacgaggtggtggccaggacagctactgtctggaggagcctgggccccttctggggggaggagtacacggtgcacctgcctctggatttccaccagctggccttctacgtgctggatgaggacactgtcgggcacgacgacatcatcggcaagatctcgctgagcagggaggcgattacagccgacccccgagggattgacagctggattaacttgagccgagtggacccagatgcagaagtgcagggtgagatctgcctgtcagtgcagatgctggaggatgggcagggccgctgccttcgctgccatgtgcttcaggccagggacctggctcccagagacatctctggcacatctgacccatttgcacgtgtgttttggggcagccagagcttggagacctcagtgagtggtggggaatgaagccaggaaggagtggggcatttggtggtggggcaggagtccccatcagctctcccactcacagaccacttccttcgccctcagaccatcaagaagactcgcttcccgcactgggatgaagtgctggagctgcgggagatgccaggtgccccgtccccactgcgggtggagctctgggactgggacatggtgggcaagaatgacttcttgggcatggtggagttctctccaaagaccctccagcagaagccacctaaaggctggttccgcctcctgccctttcccagagccgaggaggattctggggggaacctgggtgccctgcgagtgaaggtacgcctgattgaggaccgcgtcctgccctcccagtgctaccagcctctcatggagctgctcatggagtctgtgcaggggccagcagaggaggacactgctagccccttggctttgctggaagagctgaccttgggggactgccgccaggaccttgccaccaagctggtgaaactctttcttggccggggactggctgggcgctttctggactatctcacccggcgtgaggtggctcggaccatggaccccaacaccctcttccgttctaactccctggcatccaagtcgatggaacagtttatgaagctcgtgggcatgccctacctgcacgaggtcctgaagcctgtgattagccgtgtctttgaggagaagaagtacatggagctggatccctgcaagatggacctgggccgcacccggaggatctccttcaaaggcgcactctcggaggagcagatgcgggagaccagcctggggctgctgacgggctacctggggcccatcgtggacgccatcgtgggctccgtggggcgctgcccgcccgccatgcgcctcgccttcaagcagctgcaccggcgagtggaggagcgcttcccccaggccgagcaccagcaggatgtgaagtacctggccatcagtggatttctcttcttgcgattcttcgcacctgccatccttaccccaaagctgtttgaccttcgggaccaacacgcggacccccagactagccgctcactgctgttgcttgccaaggctggagtgcagtggcacgatcttggcttactgcaacctctgcctcctcggttcaagtgatcttcccacctcagcttctggagtagctggatttacaggcgtgagccaccacgaccagctaatttttgcatttttagtagagatgaggtatcaccatgttggccaggctcgtcacaagctcctgacctcaagtgatccgcttacttcggcctcccaaagtgctgggattacaggcatgagccactgtgcccggcaatatgagtcttcttttattgagcactgatttgggagccaggaggggccctaccctctgctgtgaccttggccccggcatccctcgcttctttgctccaggctgtgcagagcattggaaacctgggccagcagctgggccaaggcaaggaactgtggatggcccccctgcaccccttcctgctgcagtgtgtctcacgtgtgagagacttcctggaccggctggtggatgtggatggggatgaagaagctggtgtcccagccagggccctgttcccgccctcggccattgttcgagaaggctatctgctgaagcgcaaggaggagcctgccggcctggccacgcgctttgccttcaagaagcgctacgtctggctcagcggggagaccctctccttctccaagagtcctgagtggcaggctgaaattactggaggattctaacatggatacaactctggaggcagacacaggggcctgtcctgaggtcctggcccggcaaagagcagcaactgcccgcctgctggaggtgctcgcagacctggatcgtgcccacgaggagttccagcagcaggagcgagggaaggcggccctgggcccccttggcccctaaggaaatgccagagctagcccggaaggaggagcaagag

SEQ ID NO: 17407 - DNA, 2472 bp, Homo sapiens
  source 1..2472: mol_type = unassigned DNA
gtgtttaactggaaactagaacgagatggaaggggatgttcaaggcccctcccttgactctgaacggacccccagggaacatgcgaccctctctctggcgacgcctcccacccaccactaatacttgctcctggaccggggggcgcggaggttggagagaggaggcaggtgtctgcatgctacccgggtctcggacaggcggcactgggaccacgaggcagggagccaggcttgaagcaggtgacatgtagacgtcccctggtccagcctcggaacctgagcgcccttctgcctggaaagtttgtggctaggcgccatggccaagagcagctccctgaatgttcgcgtggtggagggccgcgcgctgcctgccaaggacgtgtctgggagcagcgacccctactgcctagtgaaagtggacgacgaggtggtggccaggacagctactgtctggaggagcctgggccccttctggggggaggagtacacggtgcacctgcctctggatttccaccagctggccttctacgtgctggatgaggacactgtcgggcacgacgacatcatcggcaagatctcgctgagcagggaggcgattacagccgacccccgagggattgacagctggattaacttgagccgagtggacccagatgcagaagtgcagggtgagatctgcctgtcagtgcagatgctggaggatgggcagggccgctgccttcgctgccatgtgcttcaggccagggacctggctcccagagacatctctggcacatctgacccatttgcacgtgtgttttggggcagccagagcttggagacctcaaccatcaagaagactcgcttcccgcactgggatgaagtgctggagctgcgggagatgccaggtgccccgtccccactgcgggtggagctctgggactgggacatggtgggcaagaatgacttcttgggcatggtggagttctctccaaagaccctccagcagaagccacctaaaggctggttccgcctcctgccctttcccagagccgaggaggattctggggggaacctgggtgccctgcgagtgaaggtacgcctgattgaggaccgcgtcctgccctcccagtgctaccagcctctcatggagctgctcatggagtctgtgcaggggccagcagaggaggacactgctagccccttggctttgctggaagagctgaccttgggggactgccgccaggaccttgccaccaagctggtgaaactctttcttggccggggactggctgggcgctttctggactatctcacccggcgtgaggtggctcggaccatggaccccaacaccctcttccgttctaactccctggcatccaagtcgatggaacagtttatgaagctcgtgggcatgccctacctgcacgaggtcctgaagcctgtgattagccgtgtctttgaggagaagaagtacatggagctggatccctgcaagatggacctgggccgcacccggaggatctccttcaaaggcgcactctcggaggagcagatgcgggagaccagcctggggctgctgacgggctacctggggcccatcgtggacgccatcgtgggctccgtggggcgctgcccgcccgccatgcgcctcgccttcaagcagctgcaccggcgagtggaggagcgcttcccccaggccgagcaccaggatgtgaagtacctggccatcagtggatttctcttcttgcgattcttcgcacctgccatccttaccccaaagctgtttgaccttcgggaccaacacgcggacccccagactagccgctcactgctgttgcttgccaaggctgtgcagagcattggaaacctgggccagcagctgggccaaggcaaggaactgtggatggcccccctgcaccccttcctgctgcagtgtgtctcacgtgtgagagacttcctggaccggctggtggatgtggatggggatgaagaagctggtgtcccagccagggccctgttcccgccctcggccattgttcgagaaggctatctgctgaagcgcaaggaggagcctgccggcctggccacgcgctttgccttcaagaagcgctacgtctggctcagcggggagaccctctccttctccaagagtcctgagtggcagatgtgtcactccatccccgtgtctcacatccgcgccgtggagcgcgtagacgagggcgccttccaactgccccacgtgatgcaggtggtgacgcaggacggcacgggggcgctgcacaccacctacctccagtgcaagaatgtgaatgagctcaaccagtggctctcggccttgcgcaaggccagcgcccccaacccgaacaagctggccgcctgccaccccggtgccttccgcagcgcgcgctggacctgctgcctccaggctgagcgctcagtgccaagatgagacgtttgagattccagtggatgcctctgacccagcctcag

SEQ ID NO: 17408 - DNA, 2180 bp, Homo sapiens
  source 1..2180: mol_type = unassigned DNA
ttgtctggagctccagacgcctcggcaagagcccgctgcgccccctgcgcgctcctcctgctcggagcacggctcctacctgtagagtccggacgggcgctccctccccgggcacctacaccttctcctctttcggaaatctcccatccagctacccgggtctcggacaggcggcactgggaccacgaggcagggagccaggcttgaagcaggtgacatgtagacgtcccctggtccagcctcggaacctgagcgcccttctgcctggaaagtttgtggctaggcgccatggccaagagcagctccctgaatgttcgcgtggtggagggccgcgcgctgcctgccaaggacgtgtctgggagcagcgacccctactgcctagtgaaagtggacgacgaggtggtggccaggacagctactgtctggaggagcctgggccccttctggggggaggagtacacggtgcacctgcctctggatttccaccagctggccttctacgtgctggatgaggacactgtcgggcacgacgacatcatcggcaagatctcgctgagcagggaggcgattacagccgacccccgagggattgacagctggattaacttgagccgagtggacccagatgcagaagtgcagggtgagatctgcctgtcagtgcagatgctggaggatgggcagggccgctgccttcgctgccatgtgcttcaggccagggacctggctcccagagacatctctggcacatctgacccatttgcacgtgtgttttggggcagccagagcttggagacctcaaccatcaagaagactcgcttcccgcactgggatgaagtgctggagctgcgggagatgccaggtgccccgtccccactgcgggtggagctctgggactgggacatggtgggcaagaatgacttcttgggcatggtggagttctctccaaagaccctccagcagaagccacctaaaggctggttccgcctcctgccctttcccagagccgaggaggattctggggggaacctgggtgccctgcgagtgaaggtacgcctgattgaggaccgcgtcctgccctcccagtgctaccagcctctcatggagctgctcatggagtctgtgcaggggccagcagaggaggacactgctagccccttggctttgctggaagagctgaccttgggggactgccgccaggaccttgccaccaagctggtgaaactctttcttggccggggactggctgggcgctttctggactatctcacccggcgtgaggtggctcggaccatggaccccaacaccctcttccgttctaactccctggcatccaagtcgatggaacagtttatgaagctcgtgggcatgccctacctgcacgaggtcctgaagcctgtgattagccgtgtctttgaggagaagaagtacatggagctggatccctgcaagatggacctgggccgcacccggaggatctccttcaaaggcgcactctcggaggagcagatgcgggagaccagcctggggctgctgacgggctacctggggcccatcgtggacgccatcgtgggctccgtggggcgctgcccgcccgccatgcgcctcgccttcaagcagctgcaccggcgagtggaggagcgcttcccccaggccgagcaccaggatgtgaagtacctggccatcagtggatttctcttcttgcgattcttcgcacctgccatccttaccccaaagctgtttgaccttcgggaccaacacgcggacccccagactagccgctcactgctgttgcttgccaaggctggagtgcagtggcacgatcttggcttactgcaacctctgcctcctcggttcaagtgatcttcccacctcagcttctggagtagctggatttacaggcgtgagccaccacgaccagctaatttttgcatttttagtagagatgaggtatcaccatgttggccaggctcgtcacaagctcctgacctcaagtgatccgcttacttcggcctcccaaagtgctgggattacaggcatgagccactgtgcccggcaatatgagtcttcttttattgagcactgatttgggagccaggaggggccctaccctctgctgtgaccttggccccggcatccctcgcttctttgctccaggctgtgcagagcattggaaacctggg

SEQ ID NO: 17409 - DNA, 582 bp, Homo sapiens
  source 1..582: mol_type = unassigned DNA
ctgcttgtctggagctccagacgcctcggcaagagcccgctgcgccccctgcgcgctcctcctgctcggagcacggctcctacctgtagagtccggacgggcgctccctccccgggcacctacaccttctcctctttcggaaatctcccatccagctacccgggtctcggacaggcggcactgggaccacgaggcagggagccaggcttgaagcaggtgacatgtagacgtcccctggtccagcctcggaacctgagcgcccttctgcctggaaagtttgtggctaggcgccatggccaagagcagctccctgaatgttcgcgtggtggagggccgcgcgctgcctgccaaggacgtggggaacctgggtgccctgcgagtgaaggtacgcctgattgaggaccgcgtcctgccctcccagtgctaccagcctctcatggagctgctcatggagtctgtgcaggggccagcagaggaggacactgctagccccttggctttgctggaagagctgaccttgggggactgccgccaggaccttgccaccaagctggtgaaactctttcttggccggggactggc

SEQ ID NO: 17410 - DNA, 4378 bp, Homo sapiens
  source 1..4378: mol_type = unassigned DNA
gaagaaggcggctccgaggaggtgggagggcgagcctcccctcccgggttcttctgcgtcctctcccgggagggacccacacacacctgagcccggacccacccttggtcggggccacgctggatcctcctcccggcctgggtcccgcccgccgactgcaggtgggctgcatcgcccgagcctcgggcagtgggcgacggggaaggaggtgagaggtgtccgcgccggctgccgctcgggtccctgccctcgctgcgcgctctcctcctccccttaccgcaggcagggcgcggagccgcgcgccagcccgccccgaagccgccgcctcgtccccctcccgcctcggggcaccatggagctctctccgtcgtccggaggagccgcggaggcgctgtcctggccggagatgttcccggcgctggagtccgactcgccgctgcccccggaggacctggacgcggttgtcccagtcagtggagccgtcgccggtggcatgttggatcggatccttctggagtccgtgtgccagcaacagagctgggtccgggtgtacgatgtgaaaggaccacccacccaccgtctgtcttgtggtcagtcaccctacaccgagacaacaacgtgggagcggaagtattgcatcctcacagacagccagttggtattgctcaacaaggagaaggagatacctgtggaagggggacaggagcagcagacagattccaccaaagggcgatgcctgaggagaactgtcagtgtcccttccgagggtcagtttcccgagtacccaccagagggcgccactaaactggaggtaccagcagaaaggtcccctcgtagacggagtatctcagggaccagtacatcagagaaacccaactccatggacactgcaaatacctcacccttcaaagtaccaggattcttcagcaagcgcctgaaaggctccatcaagaggaccaaaagccagtcaaagcttgacagaaacacgagctttcggcttccatcccttcgcagtacagatgacaggtctcgtgggctgcctaaactaaaagagtcacgttcccatgaatccttgctgagcccatgcagcacagtggaatgtctggatcttggtagaggggaacctgtatcagtgaaaccacttcatagtagcatccttggacaagacttctgctttgaggttacctacttaagtggaagtaaatgcttcagctgtaattctgcttctgagagagacaagtggatggaaaaccttcgcaggacagttcaacctaataaggacaattgcaggcgagctgaaaatgttcttcgtttatggatcattgaagccaaggaccttgcccctaaaaagaaatatttctgcgaactgtgccttgatgataccctctttgctcgtacaaccagcaagaccaaagcagacaatattttctggggcgaacattttgaattcttcagccttccacctcttcatagtatcacagttcacatttacaaggatgtggaaaaaaagaaaaaaaaggacaagaataattatgtagggctagtcaacatccccactgccagtgtgactggtcgccaatttgtagaaaagtggtatccagtgagtacacctacacccaacaaaggaaagacaggaggaccttctattcggattaaatcacgtttccaaactatcaccattctgcctatggagcaatacaaagaatttgcagaatttgtcaccagcaactacaccatgctgtgttctgtccttgagccagtaattagtgtgagaaataaagaggagttggcttgtgccttagtgcacattcttcaaagtactggcagagccaaggattttctgactgacttggtgatgtctgaggtggatcgttgtggagagcatgatgtcttgatcttcagagagaacactattgccaccaaatccattgaggaatacctcaagttggtgggacaacagtatcttcatgacgcactgggggagtttatcaaagctttgtatgagtccgatgagaactgtgaagtggatcccagcaaatgttcatctagtgaactgatagaccatcagagcaacctgaaaatgtgctgtgagctggctttctgcaagatcatcaactcttactgtgttttccctcgtgagttgaaagaagtgtttgcatcatggaagcagcagtgcctgaaccgtggcaagcaagacatcagcgagaggctcatcagtgcctcattatttctccgttttctgtgtccagccattatgtctcccagtcttttcaaccttatgcaggagtatcctgatgaccgcacatctcggactctaactcttattgccaaggtcattcagaacctggccaactttgccaagtttggtaacaaagaggaatacatggcattcatgaatgattttttagaacatgaatggggtggaatgaagcgctttcttttggagatctctaatccagacaccatctcaaacaccccaggctttgatggttacattgatctgggccgagagctttcagttttgcattccttactgtgggaagtagtttcccaacttgataaggcgaccgtggcaaaattggggcctctccctcgtgttcttgctgatattaccaagtcattgactaatcctacgccaatacaacagcaactgagacgcttcactgaacataactccagtccaaatgtcagtggaagcctctcctctgggctgcagaaaatatttgaagaccccactgacagtgatttgcataaactaaaatctccaagccaggacaacacagacagctacttcagagggaaaacattattgctggttcagcaagcctcctctcagagcatgacttattctgaaaaggatgaaagggaaagtagccttcctaatggtcggagcgtctccctcatggacctccaggacactcatgctgctcaagtggagcatgcatctgtcatgcttgatgtgcctatacgcttgaccggaagccagctttccataacccaggtggccagcatcaaacagctgcgggaaacccagagcactccccaaagtgcaccccaagtgagaaggcccctgcacccagccttgaaccagccaggtggccttcagcccttgtcgttccagaaccctgtctatcacctcaataacccaattccagcaatgccaaaggcctctatagattccagtttggagaacctaagcactgccagttccagaagccaaagtaacagtgaagacttcaagctcagtggacccagcaatagcagcatggaagatttcactaaacgtagcactcagagtgaggacttctccaggcggcacacggtgccagatagacacatacctcttgctttgccacgacaaaatagtactgggcaggcccagatccgaaaagtggaccagggtgggttaggtgcccgagccaaagccccaccatccctgccacacagtgcttctttacgtagcaccgggagcatgtcagtggtgtccgcagccctggtggccgaacctgtgcagaatgggagccggtcccggcagcagtcctcttcctccagagagagccctgttcccaaagttagagcaatccagagacaacagacacagcaggttcagtcacctgtggactctgccacaatgtccccagtagagaggacagcagcctgggttctgaacaatgggcagtatgaagaggatgtggaagaaactgagcaaaatctagatgaagccaagcatgctgagaagtatgaacaagaaattactaaactgaaggagcgcctgagagtttccagccggcgactggaggaatatgaacgccgcttgctggtgcaggagcagcagatgcagaagctgctgctggaatacaaggcccgactggaggacagcgaggagcggctccgaagacagcaggaagaaaaagatagccagatgaaaagcatcatcagcaggctaatggctgtggaagaggaactgaagaaggatcatgctgagatgcaagcagttattgatgcaaagcagaaaataattgatgcacaggaaaaacggatcgtgtccctggattcagccaacaccagactgatgagcgcgctgacccaagtgaaggagcggtacagcatgcaggtccgcaatggcatctcccccaccaaccccaccaagctttccatcacggagaatggtgaattcaaaaacagcagctgctgacgggctttgtctgtggaaggagacagaaggaaattgacccactctcctatctccagacctttacctagcccctccaggtttacagaatgttgctacttcacaatggcgatgtggtgagaaactcctgaatgaagaaaggaaccttgtctttcagggcataaggcggcgacttccaaggtcaat

SEQ ID NO: 17411 - DNA, 718 bp, Homo sapiens
  source 1..718: mol_type = unassigned DNA
cctgtgtggtggcccagttcctaacaggaaccagggtatggggacccctgttttagagaatcagtttcagggtcccagtaatttccttttcctcaagttttcatactacattttcaagtttttccagatcatctatctaaaaatcacctggaatgcttgttaaaaattcggatccttggacccttccttcacccatctctcaccaatcagaatatctgggagctgcctaggaattgcatttaacaggcacccaggcggaatgcagtggtacagccatggctcattgcagcctcaacctcctgggctcaattgatcctcctgcctcagccttctgagtagctgggactacaggtctttggaatggcatctcttcatatgcaacgtagaatatatgcttactgtattagtccactttgtgttgctgtgaaggaatacctgaggctgggtaatttataaagagaagaagtttaattgtctcagagttcttcaggctgtacaggaaatgtggtgccggcatctgcttctgatgtgaaaggaccacccacccaccgtctgtcttgtggtcagtcaccctacaccgagacaacaacgtgggagcggaagtattgcatcctcacagacagccagttggtattgctcaacaaggagaaggagatacctgtggaagggggacaggagcagcagacagattccaccaaagggcgatgcctgaggagaa

SEQ ID NO: 17412 - DNA, 14453 bp, Homo sapiens
  source 1..14453: mol_type = unassigned DNA
cgaaatgagagcaaaaagggagagagcaggaaagcgagcacaggcgagtacagtatacaaagtgttttgagtttctgactggcgtgccggaaagatcatgttagcacacccagaaacttcacacgatgcagaccccagaggtaccagcagaaaggtcccctcgtagacggagtatctcagggaccagtacatcagagaaacccaactccatggacactgcaaatacctcacccttcaaagtaccaggattcttcagcaagcgcctgaaaggctccatcaagaggaccaaaagccagtcaaagcttgacagaaacacgagctttcggcttccatcccttcgcagtacagatgacaggtctcgtgggctgcctaaactaaaagagtcacgttcccatgaatccttgctgagcccatgcagcacagtggaatgtctggatcttggtagaggggaacctgtatcagtgaaaccacttcatagtagcatccttggacaagacttctgctttgaggttacctacttaagtggaagtaaatgcttcagctgtaattctgcttctgagagagacaagtggatggaaaaccttcgcaggacagttcaacctaataaggacaattgcaggcgagctgaaaatgttcttcgtttatggatcattgaagccaaggaccttgcccctaaaaagaaatatttctgcgaactgtgccttgatgataccctctttgctcgtacaaccagcaagaccaaagcagacaatattttctggggcgaacattttgaattcttcagccttccacctcttcatagtatcacagttcacatttacaaggatgtggaaaaaaagaaaaaaaaggacaagaataattatgtagggctagtcaacatccccactgccagtgtgactggtcgccaatttgtagaaaagtggtatccagtgagtacacctacacccaacaaaggaaagacaggaggaccttctattcggattaaatcacgtttccaaactatcaccattctgcctatggagcaatacaaagaatttgcagaatttgtcaccagcaactacaccatgctgtgttctgtccttgagccagtaattagtgtgagaaataaagaggagttggcttgtgccttagtgcacattcttcaaagtactggcagagccaaggattttctgactgacttggtgatgtctgaggtggatcgttgtggagagcatgatgtcttgatcttcagagagaacactattgccaccaaatccattgaggaatacctcaagttggtgggacaacagtatcttcatgacgcactgggggagtttatcaaagctttgtatgagtccgatgagaactgtgaagtggatcccagcaaatgttcatctagtgaactgatagaccatcagagcaacctgaaaatgtgctgtgagctggctttctgcaagatcatcaactcttactgtgttttccctcgtgagttgaaagaagtgtttgcatcatggaagcagcagtgcctgaaccgtggcaagcaagacatcagcgagaggctcatcagtgcctcattatttctccgttttctgtgtccagccattatgtctcccagtcttttcaaccttatgcaggagtatcctgatgaccgcacatctcggactctaactcttattgccaaggtcattcagaacctggccaactttgccaagtttggtaacaaagaggaatacatggcattcatgaatgattttttagaacatgaatggggtggaatgaagcgctttcttttggagatctctaatccagacaccatctcaaacaccccaggctttgatggttacattgatctgggccgagagctttcagttttgcattccttactgtgggaagtagtttcccaacttgataagggtgaaaattccttcctacaggcgaccgtggcaaaattggggcctctccctcgtgttcttgctgatattaccaagtcattgactaatcctacgccaatacaacagcaactgagacgcttcactgaacataactccagtccaaatgtcagtggaagcctctcctctgggctgcagaaaatatttgaagaccccactgacagtgatttgcataaactaaaatctccaagccaggacaacacagacagctacttcagagggaaaacattattgctggttcagcaagcctcctctcagagcatgacttattctgaaaaggatgaaagggaaagtagccttcctaatggtcggagcgtctccctcatggacctccaggacactcatgctgctcaagtggagcatgcatctgtcatgcttgatgtgcctatacgcttgaccggaagccagctttccataacccaggtggccagcatcaaacagctgcgggaaacccagagcactccccaaagtgcaccccaagtgagaaggcccctgcacccagccttgaaccagccaggtggccttcagcccttgtcgttccagaaccctgtctatcacctcaataacccaattccagcaatgccaaaggcctctatagattccagtttggagaacctaagcactgccagttccagaagccaaagtaacagtgaagacttcaagctcagtggacccagcaatagcagcatggaagatttcactaaacgtagcactcagagtgaggacttctccaggcggcacacggtgccagatagacacatacctcttgctttgccacgacaaaatagtactgggcaggcccagatccgaaaagtggaccagggtgggttaggtgcccgagccaaagccccaccatccctgccacacagtgcttctttacgtagcaccgggagcatgtcagtggtgtccgcagccctggtggccgaacctgtgcagaatgggagccggtcccggcagcagtcctcttcctccagagagagccctgttcccaaagttagagcaatccagagacaacagacacagcaggttcagtcacctgtggactctgccacaatgtccccagtagagaggacagcagcctgggttctgaacaatgggcagtatgaagaggatgtggaagaaactgagcaaaatctagatgaagccaagcatgctgagaagtatgaacaagaaattactaaactgaaggagcgcctgagagtttccagccggcgactggaggaatatgaacgccgcttgctggtgcaggagcagcagatgcagaagctgctgctggaatacaaggcccgactggaggacagcgaggagcggctccgaagacagcaggaagaaaaagatagccagatgaaaagcatcatcagcaggctaatggctgtggaagaggaactgaagaaggatcatgctgagatgcaagcagttattgatgcaaagcagaaaataattgatgcacaggaaaaacggatcgtgtccctggattcagccaacaccagactgatgagcgcgctgacccaagtgaaggagcggtacagcatgcaggtccgcaatggcatctcccccaccaaccccaccaagctttccatcacggagaatggtgaattcaaaaacagcagctgctgacgggctttgtctgtggaaggagacagaaggaaattgacccactctcctatctccagacctttacctagcccctccaggtttacagaatgttgctacttcacaatggcgatgtggtgagaaactcctgaatgaagaaaggaaccttgtctttcagggcataaggcggcgacttccaaggtcaatgcttttcccccacatctctatgtacatagggaacttagttctgggccatgtacagaaaatatcactgtaatataccaaaaggaagttaataatgtagattacctttttgattattgctatttttattattgttttcctcttgttgaaagcactgcagttgttacaggaagtaaagtaggaactgttgtgtgagcgagacatgagcctgtaggttcagtaggtagagaccaagcatctatctgatagaagcacatggagtgcaataggacattgtgagaaggaatttttcagggattcatctactagtttaaaaaccccactctggccctcttgtcctttcagaaaacatgcaaataccaagatccatacaaaacaataatttattccactgatcaaccaagactggttctggttggacagctaatctgatttggggattcactgtttcagaggacacagacaaaagctgttgcatcaaaactggactttaggagtaatttctattgaactcctgtcaatatgtttatttcctctgtctacagcagatgggagtcttctcttttagacaggggctttttgtttttaaccccaattgtaataaagggtgttctttttcctctttagagtttacaaaactataaatatttgtgtctccacataccatcttcatcttcacacattcactgtgctttcctccccatagtgggagctgtcatcaccaacagggtttactctcccctggagaggttatttaaatagctgtccataagccatccagatcaacaccctttcttccatacagaaaagggctaaccataccacagctggaatctctgaatatttcctattaaaaattttttctatgtgttgttataatttttgtttgggataaagactctatccattgtactagcaaatctatggggggtaattttatctccatctttaacttttaaagtacttcttccccttatcccctcaataaagaaaggaaatccaaatttgaagcatcactctcttaaaagaaaaagaaaataatggaaagtgtcaggatggcacattccagttattattccaatgctcgtagatctgacaataatgacccaatttcaacacttgtcatccatagccttattattatagaacagaaaaagtcatggaaacgaattcatttccttttttccagaggtgtgcaatgtcatcttgaatgcaaccttgattaccagaagtatggaaggttacatgttaaacagacattatatatacaaatatatatataatatatattcacacatatgtacatataactgcacaaataggaaaagttcatgccttctatgctgttcagatataatgttaaaagggtctcaaacctctttaagcaagatctaagtagttgttttatattgagaaagcaacaatgtttctcgaataagttgatgttgattttaaattataagctttaaagaattttttttctagaaaaaggggatggaaaaaaaaggacctgagggagccatatgcatcaagtgagtgtttctccataacagaatatttataagagaacatgtatagtgccctcttttgagtgatgccgacagacaccaagccctccttttcaccaagtcccaggcttgcattccagcctcttgagctctgccctctctcaggtggatctttgtgttggaccttacgtttcagcaacctcaccatggccacataacccacaaccttttaaaacagtttctttcatagcaatccctgtttctgccagacagatctaaaatgggagtttctcactgtgtttatctgatctgcacactttatatccagctgttttggcacttttacgttttcttcacctttggttttggtttgcaaattcttacaccttctctccaagcggagggcacactgtggtcaaaatcacttattttattaggaaaaagaggtaactgttccaaagtgtagtgtcctttgttgaaggaggagggatgtaagcatagatttgttcttgtttctggctattctcagctcaagccatgtttaattcattctttgtaaaagccttcaattgtgccacagaaaacctggtaagagaattgtcagtttcattggccataagtatgtaatgtgggtgatgtcttgccattgaggtttggaagctcttaagtgccgattatggattacagagggctgataaaattacttatattgggaattgagagaagccccaaaaaatcaaatgtgcttttgatggatagagtgtatcttattagcattatgggagctccttagagggctgtcttcactgaaagatttaatgcccaaaacatttggacagattatgcagccttctactaccaggttatcttgaatgaagaagaaatagtaaaaaataataataatagagcattaccaataagctaaaagttcagagttgctgatagatgttaaatgttaagttatcctgtgagcctactcctgtccaaccttttttctcagtatttctttagagaatgctgcaatctgtataagttactctgaaggattttttaagaagagaagccaccaacaggtgataatttttatggagatgtttcttaattggctttccctcagttcaagtaggtaaataactttgtttgctgggaggaggtacatggctgaagagaggcaaatagattaagatagcaatgtcttgcacttcctgtttccctcaaaacaacaccacattgtggggcgcaggatagatcagggttgagtggaatttggaattcaggtgaagtgcttgtaaagtgcatgtctagctgacaacagacttgaccattaatgaggacagtgttggtaggagtcagaaaagagcttcatattccccttttatattactgaagcaataagcaatctgagctgaagcagcaaaaagagtcacatttccatcaggtcatcatattccctgagtctctgcagcaaaagccatgtcagaggggagattataactaggtaactataacaagcacttgagcacttaccatgttccaagcactatcaccaaggtactgttggggtttatggcagtctaacggtaagaaaaatgtggtaaaatgaggtaatcatgctgctatagctttttgctttttttcatatagtatcaagttggtcagaattagctttctctgactggtctgcttccgtgtttctctgtgatggtgttaagattatgaaagaaaaagaagattacctaagactgctacaagtgttaactatatgcccttaagaatgagcttgactttggaagtaaagcttttcagatcttagtctacccggggcctttgttgatgggtctgtggttctgtagacccctggctttcactgtgttctcagaggtacaccagattgagagcagagttcttctttggaagtcccagagcaaaataactgccatcaagtgagtttgcattcgtatttgtttccccttccatagagggttagttttagttacctctagcttggagttcctgagaaggctggttataggactgagcgtgggaaaggaaccctcttcaggattacctcagtcccatcagtctaccccattgtgacattgagcccaacacacacgcttgacaccagactagacttgtcacagggccaaacccaacagccacatgccatagcttcactgcattttcagctacacctttggaggccaccttctcctatcaactgtggaaagccagaagggctcccttctccattctccttccctttttcaagtctaatagtgaaatctcctgcttaccccagcagtaaatagttgccttcctaccccttacctgggggccgataatttgagatactttgttttttcaatgcgtcagttgaaggatttagtttcttaaaagcaagaaatgttggagtgttgaatttttaaatagaatctcttttcatgtttgaatgattgttattagttctagaagcattctctttgtcatgacccgattatgtatactcttgggtttaggaaggacaaaagtgatgaaatttgcatgagatagaataaatatcttaggaggagtgaaagaacctgaggaagagacacgaccctaagggaatgaatgcataagcagtcttctcagtagcccagagtttccaggaaacaggaatatttatatcccttgcccactcttaaaatacatagatacataaaaaggcagtctctgtagacaacacatgcacacacccacacaaaacataattcctggggcttcctttttctgaatgttaatccattttatcgagcagtgattcccaaactttgagattttcagattttatgctctcgtctgttagattttatgacattctatcatcctaaaaaatgtactatatgtgttatatgtatatataagttaaagcaacttgaaattgacttggtttggcattgtctcaagaaccctagatatcattattgataccatggggaatcatagaaataaagttgaatatcattgatctgagagtaggatccagaaataagtagtttcagttcctgatcagttaagcctcaagtgtttgagtaaccaacacagcaagacttgggaaatgcagtgagcacccgaggaaaggaaagtggtagtctttgcctgcatttcagcatgcattttcctttcctactcagttgctatcttccacttaaataccctcatttgaccctaggaagttttttgtttttttttttagtttgagacttaaaaccagatttatttgttgttgtagagagatttccacagaagttgtgttttagggacctccatcatctttgtgggggtacagatatttatgtgtaaatatcattttatgtgatttccaaattttcgagggaaacatttcaattcccagttcaacaaaaggttaaatactaattgactcaatgaccaccttcaggaaagttaaatagtaaattaggttaaattttgactggtgcttagacatttcctagttatattaacttaagcagacagcagcacattaacctgagttacacctgtgaggaaatgaccttctaaatttgattttgtttttcatctccagggccttaataagagtgtgttaacacacgactattttacaatgatagctctaaataatttattttttatttcaagaaagagaaatacaccttagaaaaacaaaacccaagattttattttatttttaaagccatatttttgtgctagtagcatttagattattccgtatgtgagatccgtatcagcatttcattacctgggtttgttctaaagaagatttatttttgttctgtgaataatttttgacagttcttgtacatgtacagatatagatacgtttgaggtcttttattgatattcctacaaagaatacaaataaactttaactttaaacatttcagactaaagttgctactatatttgacatattgctgtcttctagcatgcacctgggtgactaggacacttgaagagaaacaagaaaggaaatgtatgccggaatattcttctaaaaatatattttaacattaagaacagtctgtcctagaatttcccaacttccatgtaataagatttcaatttaggaaaaataactagcattagcatgtattgtgataaaactgttactttcgaattctgcagaatttgaaatctctttaataacttgtgacaggtaaagaaagtttcatctggtttattaggaaatgtagccccacttagcttcctagaccactaccatcctcttgtaattttccagttagattaatggggtttgttttcaggatttttgatgtttggttcaggttttttattttaatttcttaatagaagttcatttgtcattcccaacatgattgttcccaaatacacccatcttctcctgcatccctgtttcattctgtaaaatccagggatgcaggtttcatgtgtagtcttgttttgtgttagttgtaggtctgtgctttttggcacatgtcgagttcttcctaatcttgttctactagggattaaaaaattaaaatttactcaaaatccagagaagattgcatgaaacagaaactgcatatccaagaattgtgctattttttgttcacttcgaagctgacccatttcagtctaaattgttcgtgacctaatgtaagctttaagacttcctggatctgaaacatcaaaaagagagaaagtgttgatgcggtctttttacttcatggtcctcttagccctaaactatccatccgtataccctttatgcatatccataccctgtaattgtttttagcctccctccagctgcctgactttttttattagcattttaccagtaggaaaatacataaattaattttgttagcaaaaaaaaaaatttaatgacaaagaacactaaaacagatgactaaatcagtggttttcaatcctgattgttcatcagaatcactggagagttgtttaaaaaaaaaaaaaaagaaaaaaaacagaggagtacctcttgagctccaccattgaacaattaaatagaatctctctaaggattgggcctggccaggcttttttttttttttttttctttttaaccttgccaggggattccgaagagccagggggtaagaaacactagtccaaatcaagctgtgagcactgtgcgtagctgtcttaaaatgttttctgtccccaatcctgaaactggggtaagttggttacaggtgtttccttcccttctatttggaatttaaaattctactaaaactgacaatatatactcagccttcccccacatacaccttgtccccaccaatctgtcctttaagtctgtgaggtagaaattctctccattaacatggtcatcccatttatggaatagatacattctgacaaagctgaccagaagatggaattccctatttcgacctcagtttccccactggcttcaatttaaagcagaaggtaggtggcttctggtttggagtcagaagcttcaatgagtacaccccttgaggagtgctgaagggcccaggccagaatcaaatatgctacatttgactttaaagagtaaacaacagtggctcacgcctgtaatcccagcactttgggaggccaaggcaggtggatcacaaggtcaggagatcgagaccatcctggctaacatggtgaaaccccatctctactgaaaatacaaaaaattagccaggcgtggtggcgggcacctgtagtcccagctactcgggaggctgaggcaggagcatggggtgaactcaggaggtggagcttgcagtgagccgcgatcacgccactgcactccagcctgggcgacagagcaagactccgtcttaaaaaaataaaaattaaaaaaaaaagtaaacaacatagagaactcaaaagttcctttgtctacctccaccaccccccaccaaaaaaaaaggcccttaactacatttgactttaaggaataaacataagagaactcagaattcctttgtctctccccacccaaaaaaaaagaaaaggttcttaacttttcttgacctaatattcagcactgaagtcttattacttgaaacttatcagatgctaaattacaccattcatacttattgttctttcaatagcaaaatgtactgaaagctctccagtcccccctccactcctggcaagcatgcagtcacgtgctcgtgtgaattttccaaaatcatgagcattttgtaagattcagttggttatatgaaattacaataaagagtattatatattttattataatttgtaaattgtgtgctatacattctttatatcagtaaaatttatagtaaacacatatacattatatactcacacacacatattactggtctttctagaaacttgattttgtgaaattctagaatgaattcccagggtgatatttgtttggcctatgaataaattgcaatgaactaacaggtaaatgccaatgtttccttgtctgtaaaattaagattgtggctaaatggtgtatagggtactctctagcactgacattctgtggttattatctgatataattgagaaatgtgtccttagactatgttcaaaaatcggcttgaagcttttctctcagtatttaggaacaattcttcctccacagtctcccatggcacagtagtttttaagaaccaaaaaaaataaagtctggaacaaatgtatattcagaacactacagtgataatgttgataataataatagctggccaggcgtagtggctcacgcttataatcccagccctttgggaggctgaggcaggagtattgcttgagcccaagaattggaggttgcagtgagctataatcacaccattgcactccagccaaggtggacaaagcaagaccctgactcaaaaataatagctaatgtttattgagcaccaactatgtgtcagattatttgctaagcactttatatggaatatatcatttaatcataacaccaaccatgtgagttaggcattattattatcattcttatttcaggaggaaactgaggctcagaaagactaagttacttgcccaaagctacacaatggataagggcaaaactaagacccacgctcagatccctctgaccgtgctgtcttgaccaaaaaaaaacaaaaaaacaaaaaaacaacaaaaaaaaaaacttaggaaagacattggagagggtaagaaaagatccaaaaagatcttgccacataaccaacttgtcaccatgagccaaagtgatggcagtggaacaagatgaggtcatattccacaggttttccaccttaatatattggtttttataagattgtcttgcaatgtccaatcatctgatcagaattagaagagtgtgcagaagtctcacctgtctcagaaattggtctttcatctcttctgggtccatcagagttgagatggtaaagtctgctttcaagattccaaaagggtgccctgaaaaagaaagtgctacctgttcagggggatattatcctatttccatttcaagttcttagcagtcaggagcacccggtggacaccatagatgctacatgttgatttgggatttcaagaagaagaaagaaactgctgagcagaagaatgctcagccacaattagggttaaccaattagtggctgaaaaaaagagtcccatgctttgggtaatgcgaagtcttccacagcctggctacccatcaggcaattattttcttttttgtttcttctgtatttttctccttacttttaatccagtaagtagatactccacaccatgccggaaatactcatctctccttgagctccccaccacagaaaattctaaagaagttctctgactttttaaataaatccagcctttgcccgtgagccatccataatcattacaggaactacaatctcataataagactatatttgcattgcattttattgtttataaagtttatagttatctcattgggtgctcacaacaacgctgtgatataggcagggtagtttttaccacatccccttcacagaagagaaatagaaattcagaaacttgtcccctaagttttcataatagtcatggagcataaactagaatccacctctttattactatccctattcccaacatttcatgctgtctttcatgaaaaggtctcaagggccctgtgccaaggagtgactgtccagatttaactgctccactggtaagagtaggaacttggtagacagaagcagttacctgatttttgtgctgatgttttttctttagattctgaactcagatgttgggcctccgtggcagcagctgtatctcttctatcagtgccactccctacactggccacagctacaggaggggaaaataaaagatttattgcaaatacaaccaggagtaaggtggcctgatattggtgactgcccctgagctaaaagacaggcaaggacagccactgctaggcacacagttgctgcagaagccagcgatgtgggaagctcaattcctgccaatccctgactcacccctacaggctcttttaacccagcacttgagttgctacaccatcatctttcagaaagcccccctggcagcaggacctgtggggcttgggcaatgttaggaggtttttcctcatcaaattttttttgttcagtagcctgtgctccaaagggcctaatgtccttattttgtctgccagctacacaaagcccccaccatggcacccagggaccctcaatatcgccatctccatcccaaaccaagttcaggctctcccccagcaccccctctcttcctgtatggctggccatgcccggaggcgctccagccagagaccctggtgtcctcagcggctcccttgctccatctcacctgctctcatgttcagtcaccaaagtcctgtcagtgccttgcagatgtcttattttttcaaatatggaaataatccttttatttggaatatattattgtaaaatatgtaagcaaatttgtcccctccccaacccagggacacccatgattaacactttgctgtagaaggtccttcacactctcgaatttgttaatttgaatgtgtaaagatctcccttgttctctttaaaggctgcatagtagtatttcactgaatgtaccataacttatttaaccgatctgctttcagtggacattacgttgtttccaccttttcactgtaataaacaatgccgcaacaaac

SEQ ID NO: 17413 - DNA, 2385 bp, Homo sapiens
  source 1..2385: mol_type = unassigned DNA
agaagtgtttgcatcatggaagcagcagtgcctgaaccgtggcaagcaagacatcagcgagaggctcatcagtgcctcattatttctccgttttctgtgtccagccattatgtctcccagtcttttcaaccttatgcaggagtatcctgatgaccgcacatctcggactctaactcttattgccaaggtcattcagaacctggccaactttgccaagtttggtaacaaagaggaatacatggcattcatgaatgattttttagaacatgaatggggtggaatgaagcgctttcttttggagatctctaatccagacaccatctcaaacaccccaggctttgatggttacattgatctgggccgagagctttcagttttgcattccttactgtgggaagtagtttcccaacttgataagggtgaaaattccttcctacaggcgaccgtggcaaaattggggcctctccctcgtgttcttgctgatattaccaagtcattgactaatcctacgccaatacaacagcaactgagacgcttcactgaacataactccagtccaaatgtcagtggaagcctctcctctgggctgcagaaaatatttgaagaccccactgacagtgatttgcataaactaaaatctccaagccaggacaacacagacagctacttcagagggaaaacattattgctggttcagcaagcctcctctcagagcatgacttattctgaaaaggatgaaagggaaagtagccttcctaatggtcggagcgtctccctcatggacctccaggacactcatgctgctcaagtggagcatgcatctgtcatgcttgatgtgcctatacgcttgaccggaagccagctttccataacccaggtggccagcatcaaacagctgcgggaaacccagagcactccccaaagtgcaccccaagtgagaaggcccctgcacccagccttgaaccagccaggtggccttcagcccttgtcgttccagaaccctgtctatcacctcaataacccaattccagcaatgccaaaggcctctatagattccagtttggagaacctaagcactgccagttccagaagccaaagtaacagtgaagacttcaagctcagtggacccagcaatagcagcatggaagatttcactaaacgtagcactcagagtgaggacttctccaggcggcacacggtgccagatagacacatacctcttgctttgccacgacaaaatagtactgggcaggcccagatccgaaaagtggaccagggtgggttaggtgcccgagccaaagccccaccatccctgccacacagtgcttctttacgtagcaccgggagcatgtcagtggtgtccgcagccctggtggccgaacctgtgcagaatgggagccggtcccggcagcagtcctcttcctccagagagagccctgttcccaaagttagagcaatccagagacaacagacacagcaggttcagtcacctgtggactctgccacaatgtccccagtagagaggacagcagcctgggttctgaacaatgggcagtatgaagaggatgtggaagaaactgagcaaaatctagatgaagccaagcatgctgagaagtatgaacaagaaattactaaactgaaggagcgcctgagagtttccagccggcgactggaggaatatgaacgccgcttgctggtgcaggagcagcagatgcagaagctgctgctggaatacaaggcccgactggaggacagcgaggagcggctccgaagacagcaggaagaaaaagatagccagatgaaaagcatcatcagcaggctaatggctgtggaagaggaactgaagaaggatcatgctgagatgcaagcagttattgatgcaaagcagaaaataattgatgcacaggtcataaatggagatgagattattcaaacaggaaaaacggatcgtgtccctggattcagccaacaccagactgatgagcgcgctgacccaagtgaaggagcggtacagcatgcaggtccgcaatggcatctcccccaccaaccccaccaagctttccatcacggagaatggtgaattcaaaaacagcagctgctgacgggctttgtctgtggaaggagacagaaggaaattgacccactctcctatctccagacctttacctagcccctccaggtttacagaatgttgctacttcacaatggcgatgtggtgagaaactcctgaatgaagaaaggaaccttgtctttcagggcataaggcggcgacttccaaggtcaatgcttttcccccacatctctatgtacatagggaacttagttctgggccatgtacagaaaatatcactgtaatataccaaaaggaagttaataatgtagatt

SEQ ID NO: 17414 - DNA, 650 bp, Homo sapiens
  source 1..650: mol_type = unassigned DNA
ctgatttcgatttcctttctttcctcgatgtctgccgcaccttgtttcgcctcctccattcatctcgacgccatggttctgctgctccataacaatgcattatgaacctgccactcccatatgcaaacacttacccttccctccaacctacacccctccatcaatggccatcgttgtgccaaaaacaatctgtggtggatgtcgcaatgcttattatccaattagggtgaaaattccttcctacaggcgaccgtggcaaaattggggcctctccctcgtgttcttgctgatattaccaagtcattgactaatcctacgccaatacaacagcaactgagacgcttcactgaacataactccagtccaaatgtcagtggaagcctctcctctgggctgcagaaaatatttgaagaccccactgacagtgatttgcataaactaaaatctccaagccaggacaacacagacagctacttcagagggaaaacattattgctggttcagcaagcctcctctcagagcatgacttattctgaaaaggatgaaagggaaagtagccttcctaatggtcggagcgtctccctcatggacctccaggacactcatgctgctcaagtggagcatgcatctgtcatgcttgatgtgcctat

SEQ ID NO: 17415 - DNA, 3016 bp, Homo sapiens
  source 1..3016: mol_type = unassigned DNA
gtttatttttgttgtcagtgccatgtaatctaaagtctgactcgtaggaagggacaagggaacagaagtcacatactcgccaccgacaaggtgatgtgctgtcatccttcggtgttcacctggcaaacttgggagacactgagtcgccttgcttttgccagagctcagttgagtcgcctcgggtcacctgcctggggaatctcagatgagctagaggaaagtatgcctcagactcctcccttttcagcaatgtttgacagcagtggttacaatcgaaacctctatcagtctgcagaggacagctgtggagggttgtattaccatgacaacaacctcctctctggatccctggaagcactcatccagcacttagtacctaatgtggattactatccagatagaacatacatatttaccttcctactcagttctcggttatttatgcatccgtatgagctaatggccaaagtttgccacttatgtgttgagcaccagagactaagtgatcctgatagtgataagaaccagatgagaaaaattgcacccaaaatccttcaactcctcacggaatggacggaaacatttccctatgattttcgggatgaaagaatgatgagaaacttaaaagatctggctcaccgaatagccagtggcgaagagacatacagaaagaatgtccagcaaatgatgcagtgtctgatccgcaagcttgctgcgctcagccagtacgaagaagtcctggcaaaaatcagctccacatccacagatcggctcacagttctcaagaccaagccacagtctatacaaagggatatcattactgtctgcaacgacccttacacgttggcccagcagctgactcatatagagctggagaggctcaattatattgggccagaagaatttgttcaggcgttcgtgcagaaggaccctttggataatgacaagagttgctacagtgaacggaagaaaacacgaaacttagaagcttacgtggaatggtttaatcgcctcagctacttggttgctacagaaatctgtatgcctgttaagaaaaaacaccgagcaagaatgattgagtatttcattgacgtagctcgggagtgttttaacattggcaacttcaactccttgatggcgataatctctggtatgaatatgagcccagtctctcgactaaaaaaaacttgggccaaagtgaagactgcaaaatttgacattcttgagcatcagatggacccttcaagcaatttctataattatcgaacagctcttcgtggggcagcacaaaggtctttaactgctcatagtagtagagaaaagattgtgataccattcttcagtctcttaatcaaagatatttatttcctcaatgagggttgtgccaaccgccttcccaatggccatgtcaattttgagaaattttgggaactggccaaacaagtgagtgaatttatgacatggaaacaagtggagtgtccatttgagagggaccggaagatcttgcagtatctgctcacagtaccagtcttcagtgaagatgctctctacttggcttcttatgagagtgaaggacctgaaaatcatatagagaaagacagatggaagtctttaaggtcgagcctcttaggcagagtttaacacatgggagctgcctgcctgctgctgctgctgcttcctgcagatcatggaggggctggcctttgttttctggcatctcgtaccacgaacactcatgaagaccctgcagtcattggagcacccgggtcagcaaagcacacaagctcactcaagaccagatggagaacttatttcctgcagctgacagatagactcagattttgtgagactgaaatgttcactgaagacacttgagaaagaatcctctaaaaatcccggctctgcacattattcatctcctggaatttccatgtgaatcacagctctgcacctggatggagttttcttttgtgtgtgtgtgttttttttaatttggttgaacatttgctgctaatgggacttgcccagctgagtgctggctctgaggaagcccacgtttcttttgttaacttaaatgaagaaaggagtggagggaggggatctaaaacccccccgtttagatcccaaaccttagctcaatcagtattgccagagaggggtaagactggttggaagctgactgcagactttgtttccccttagtatgtgctgtgttgtaaatttttctcctccctcctcctacaaggttttgagttggctgctggttagcaaactcctttttacccatataagttatttaatataataatgaagctcaacactgtggtaggaaaatagccactagaaagaaaataaaaagcagagtttgtcattggactgcttaacatgctagaaggactttttttttttttttttttttttttttttgctcttctgagctgtttacaactgaccactgtgttccacagatgtatttttcaatagctttttgttacttagttttccatgatgcctgttatttttctcttgtaaatttaaatgagctgactttaaggatcttgggaaaacccatggcataattacaattttctttttaatcgacttttcattacttttgggagtctgttggtaactaaagatgtcaacaaagaataaattggagaagttacctgtccccactatagcagtaaacaaaacagatgaaaaacaccttgctgttaactcaatggttgatctaattgtgaaatcgttcaccttgttaaacatctaagtaagtctgtagtcgctctgcaaacagccattatatttatttactctagaagaaactgtagagtagtaattcgtgctaatgagaaaaacaaaataccatgttcaaaacagatgtatttgaaaacttaatgacatggttccaaaaactagagcatgtatgtatgctgtgcatcatctcagcagacctaaaatatccccaagttgtccctttacagccatcaatatattttacactctgcggccagga

SEQ ID NO: 17416 - DNA, 2277 bp, Homo sapiens
  source 1..2277: mol_type = unassigned DNA
gtagtttcagtataaacaaggaacccgactggttagacagattttgtttttcttcttcccgcgcgctttagctccctgtcctttggtcgcatttgtgggcgcgcggcacgcagccgggaggccgaggactcggagttcacctgcaggaaagtatgcctcagactcctcccttttcagcaatgtttgacagcagtggttacaatcgaaacctctatcagtctgcagaggacagctgtggagggttgtattaccatgacaacaacctcctctctggatccctggaagcactcatccagcacttagtacctaatgtggattactatccagatagaacatacatatttaccttcctactcagttctcggttatttatgcatccgtatgagctaatggccaaagtttgccacttatgtgttgagcaccagagactaagtgatcctgatagtgataagaaccagatgagaaaaattgcacccaaaatccttcaactcctcacggaatggacggaaacatttccctatgattttcgggatgaaagaatgatgagaaacttaaaagatctggctcaccgaatagccagtggcgaagagcagacatacagaaagaatgtccagcaaatgatgcagtgtctgatccgcaagcttgctgcgctcagccagtacgaagaagtcctggcaaaaatcagctccacatccacagatcggctcacagttctcaagaccaagccacagtctatacaaagggatatcattactgtctgcaacgacccttacacgttggcccagcagctgactcatatagagctggagaggctcaattatattgggccagaagaatttgttcaggcgttcgtgcagaaggaccctttggataatgacaagagttgctacagtgaacggaagaaaacacgaaacttagaagcttacgtggaatggtttaatcgcctcagctacttggttgctacagaaatctgtatgcctgttaagaaaaaacaccgagcaagaatgattgagtatttcattgacgtagctcgggagtgttttaacattggcaacttcaactccttgatggcgataatctctggtatgaatatgagcccagtctctcgactaaaaaaaacttgggccaaagtgaagactgcaaaatttgacattcttgagcatcagatggacccttcaagcaatttctataattatcgaacagctcttcgtggggcagcacaaaggtctttaactgctcatagtagtagagaaaagattgtgataccattcttcagtctcttaatcaaagatatttatttcctcaatgagggttgtgccaaccgccttcccaatggccatgtcaattttgagaaattttgggaactggccaaacaagtgagtgaatttatgacatggaaacaagtggagtgtccatttgagagggaccggaagatcttgcagtatctgctcacagtaccagtcttcagtgaagatgctctctacttggcttcttatgagagtgaaggacctgaaaatcatatagagaaagacagatggaagtctttaaggtcgagcctcttaggcagagtttaacacatgggagctgcctgcctgctgctgctgctgcttcctgcagatcatggaggggctggcctttgttttctggcatctcgtaccacgaacactcatgaagaccctgcagtcattggagcacccgggtcagcaaagcacacaagctcactcaagaccagatggagaacttatttcctgcagctgacagatagactcagattttgtgagactgaaatgttcactgaagacacttgagaaagaatcctctaaaaatcccggctctgcacattattcatctcctggaatttccatgtgaatcacagctctgcacctggatggagttttcttttgtgtgtgtgtgttttttttaatttggttgaacatttgctgctaatgggacttgcccagctgagtgctggctctgaggaagcccacgtttcttttgttaacttaaatgaagaaaggagtggagggaggggatctaaaacccccccgtttagatcccaaaccttagctcaatcagtattgccagagaggggtaagactggttggaagctgactgcagactttgtttccccttagtatgtgctgtgttgtaaatttttctcctccctcctcctacaaggttttgagttggctgctggttagcaaactcctttttacccatataagttatttaatataataatgaagctcaacactgtggtaggaaaatagccactag

SEQ ID NO: 17417 - DNA, 2386 bp, Homo sapiens
  source 1..2386: mol_type = unassigned DNA
atggcaaagtttctcgccgagctcctgggctgcacgttgccgagcaagggcgcctctcccatgtttgagtctaaaagtcattcccgagttggcctgaaatcaagcaccaagcaaaagaccaccattttcagcacattggccagtgagaagtccttatctgactgcaaaaaggaacagcaatggaaaccttccatgtacagcagcataactccagtttgctttccaagccctctgattgagaagccaataggcaaagaaagtatgcctcagactcctcccttttcagcaatgtttgacagcagtggttacaatcgaaacctctatcagtctgcagaggacagctgtggagggttgtattaccatgacaacaacctcctctctggatccctggaagcactcatccagcacttagtacctaatgtggattactatccagatagaacatacatatttaccttcctactcagttctcggttatttatgcatccgtatgagctaatggccaaagtttgccacttatgtgttgagcaccagagactaagtgatcctgatagtgataagaaccagatgagaaaaattgcacccaaaatccttcaactcctcacggaatggacggaaacatttccctatgattttcgggatgaaagaatgatgagaaacttaaaagatctggctcaccgaatagccagtggcgaagagcagacatacagaaagaatgtccagcaaatgatgcagtgtctgatccgcaagcttgctgcgctcagccagtacgaagaagtcctggcaaaaatcagctccacatccacagatcggctcacagttctcaagaccaagccacagtctatacaaagggatatcattactgtctgcaacgacccttacacgttggcccagcagctgactcatatagagctggagaggctcaattatattgggccagaagaatttgttcaggcgttcgtgcagaaggaccctttggataatgacaagagttgctacagtgaacggaagaaaacacgaaacttagaagcttacgtggaatggtttaatcgcctcagctacttggttgctacagaaatctgtatgcctgttaagaaaaaacaccgagcaagaatgattgagtatttcattgacgtagctcgggagtgttttaacattggcaacttcaactccttgatggcgataatctctggtatgaatatgagcccagtctctcgactaaaaaaaacttgggccaaagtgaagactgcaaaatttgacattcttgagcatcagatggacccttcaagcaatttctataattatcgaacagctcttcgtggggcagcacaaaggtctttaactgctcatagtagtagagaaaagattgtgataccattcttcagtctcttaatcaaagatatttatttcctcaatgagggttgtgccaaccgccttcccaatggccatgtcaattttgagaaattttgggaactggccaaacaagtgagtgaatttatgacatggaaacaagtggagtgtccatttgagagggaccggaagatcttgcagtatctgctcacagtaccagtcttcagtgaagatgctctctacttggcttcttatgagagtgaaggacctgaaaatcatatagagaaagacagatggaagtctttaaggtcgagcctcttaggcagagtttaacacatgggagctgcctgcctgctgctgctgctgcttcctgcagatcatggaggggctggcctttgttttctggcatctcgtaccacgaacactcatgaagaccctgcagtcattggagcacccgggtcagcaaagcacacaagctcactcaagaccagatggagaacttatttcctgcagctgacagatagactcagattttgtgagactgaaatgttcactgaagacacttgagaaagaatcctctaaaaatcccggctctgcacattattcatctcctggaatttccatgtgaatcacagctctgcacctggatggagttttcttttgtgtgtgtgtgttttttttaatttggttgaacatttgctgctaatgggacttgcccagctgagtgctggctctgaggaagcccacgtttcttttgttaacttaaatgaagaaaggagtggagggaggggatctaaaacccccccgtttagatcccaaaccttagctcaatcagtattgccagagaggggtaagactggttggaagctgactgcagactttgtttccccttagtatgtgctgtgttgtaaatttttctcctccctcctcctacaaggttttgagttggctgctggttagcaaactcctttttacccatataagttatttaatataataatgaagctcaacactgtggtaggaaaatagccactag

SEQ ID NO: 17418 - DNA, 1756 bp, Homo sapiens
  source 1..1756: mol_type = unassigned DNA
ataaacaaggaacccgactggttagacagattttgtttttcttcttcccgcgcgctttagctccctgtcctttggtcgcatttgtgggcgcgcggcacgcagccgggaggccgaggactcggagttcacctgcaggaaagtatgcctcagactcctcccttttcagcaatgtttgacagcagtggttacaatcgaaacctctatcagtctgcagaggacagctgtggagggttgtattaccatgacaacaacctcctctctggatccctggaagcactcatccagcacttagtacctaatgtggattactatccagataaccagatgagaaaaattgcacccaaaatccttcaactcctcacggaatggacggaaacatttccctatgattttcgggatgaaagaatgatgagaaacttaaaagatctggctcaccgaatagccagtggcgaagagacatacagaaagaatgtccagcaaatgatgcagtgtctgatccgcaagcttgctgcgctcagccagtacgaagaagtcctggcaaaaatcagctccacatccacagatcggctcacagttctcaagaccaagccacagtctatacaaagggatatcattactgtctgcaacgacccttacacgttggcccagcagctgactcatatagagctggagaggctcaattatattgggccagaagaatttgttcaggcgttcgtgcagaaggaccctttggataatgacaagagttgctacagtgaacggaagaaaacacgaaacttagaagcttacgtggaatggtttaatcgcctcagctacttggttgctacagaaatctgtatgcctgttaagaaaaaacaccgagcaagaatgattgagtatttcattgacgtagctcgggagtgttttaacattggcaacttcaactccttgatggcgataatctctggtatgaatatgagcccagtctctcgactaaaaaaaacttgggccaaagtgaagactgcaaaatttgacattcttgagcatcagatggacccttcaagcaatttctataattatcgaacagctcttcgtggggcagcacaaaggtctttaactgctcatagtagtagagaaaagattgtgataccattcttcagtctcttaatcaaagatatttatttcctcaatgagggttgtgccaaccgccttcccaatggccatgtcaattttgagaaattttgggaactggccaaacaagtgagtgaatttatgacatggaaacaagtggagtgtccatttgagagggaccggaagatcttgcagtatctgctcacagtaccagtcttcagtgaagatgctctctacttggcttcttatgagagtgaaggacctgaaaatcatatagagaaagacagatggaagtctttaaggtcgagcctcttaggcagagtttaacacatgggagctgcctgcctgctgctgctgctgcttcctgcagatcatggaggggctggcctttgttttctggcatctcgtaccacgaacactcatgaagaccctgcagtcattggagcacccgggtcagcaaagcacacaagctcactcaagaccagatggagaacttatttcctgcagctgacagatagactcagattttgtgagactgaaatgttcactgaagacacttgagaaagaatcctctaaaaatcccggctctgcacattattcatctcctggaatttccatgtgaatcacagctctgcacctggatgga

SEQ ID NO: 17419 - DNA, 860 bp, Homo sapiens
  source 1..860: mol_type = unassigned DNA
agtataaacaaggaacccgactggttagacagattttgtttttcttcttcccgcgcgctttagctccctgtcctttggtcgcatttgtgggcgcgcggcacgcagccgggaggccgaggactcggagttcacctgcagacatacagaaagaatgtccagcaaatgatgcagtgtctgatccgcaagcttgctgcgctcagccagtacgaagaagtcctggcaaaaatcagctccacatccacagatcggctcacagttctcaagaccaagccacagtctatacaaagggatatcattactgtctgcaacgacccttacacgttggcccagcagctgactcatatagagctggagaggctcaattatattgggccagaagaatttgttcaggcgttcgtgcagaaggaccctttggataatgacaagagttgctacagtgaacggaagaaaacacgaaacttagaagcttacgtggaatggtttaatcgcctcagctacttggttgctacagaaatctgtatgcctgttaagaaaaaacaccgagcaagaatgattgagtatttcattgacgtagctcgggagtgttttaacattggcaacttcaactccttgatggcgataatctctggtatgaatatgagcccagtctctcgactaaaaaaaacttgggccaaagtgaagactgcaaaatttgacattcttgagcatcagatggacccttcaagcaatttctataattatcgaacagctcttcgtggggcagcacaaaggtctttaactgctcatagtagtagagaaaagattgtgataccattcttcagtctcttaatcaaagatatttatttcctcaatgagggttg

SEQ ID NO: 17420 - DNA, 6323 bp, Homo sapiens
  source 1..6323: mol_type = unassigned DNA
cgactggttagacagattttgtttttcttcttcccgcgcgctttagctccctgtcctttggtcgcatttgtgggcgcgcggcacgcagccgggaggccgaggactcggagttcacctgcaggaaagtatgcctcagactcctcccttttcagcaatgtttgacagcagtggttacaatcgaaacctctatcagtctgcagaggacagctgtggagggttgtattaccatgacaacaacctcctctctggatccctggaagcactcatccagcacttagtacctaatgtggattactatccagatagaacatacatatttaccttcctactcagttctcggttatttatgcatccgtatgagctaatggccaaagtttgccacttatgtgttgagcaccagagactaagtgatcctgatagtgataagaaccagatgagaaaaattgcacccaaaatccttcaactcctcacggaatggacggaaacatttccctatgattttcgggatgaaagaatgatgagaaacttaaaagatctggctcaccgaatagccagtggcgaagaggttggtaacctgaatttagcgcggctgctggaattcccaggcagagcctgggtgggaaatggtgccgaattatgcatcctaatctccactgcttcctctctgttttgcctttgggcaagccctccacatcacatattggtctatttagtatgtcaagtgagaatgattataccatcccacttcaaagggatatgatctagagttttatgtgattaatttggggctatgttcatgtcaactcatgcacaggatttatgttgcaagtatgttttaattttactttacttttaccttttttcctcccaaaaaggtttgacacagctagttagatgataaatggcatgttagtagacataaacactagtggatacaaagtaaataacattattctattaaccgaggataaatagtagattaataaatcataaatagaaatagacattctgggccatggcagaaagaaaataaatacgctcctgttgagaatgagtagaggaggacaggactgctgtggtatgagtttaagttccaggtaaaagggaaatacagctggtcatgtaatattcactgtcagaaaaggggaagtatagtaattattgagggacttaaatgaaaaatttagaaactttcttctgaagaactttgtatagggtcatagaatgagatcctacaaactgctctttatggtgtttacaacataccttcctggatagaagctgagttcatagattcatgtgtaaattagcaaagataattcttgggggaggagaagactgagaaaatgaggcaagtcttccagtgctcagaagttgatttaaggatagactctagtataggtagagattaaaagtaagtctcttagataggctttcataaatatcacttccctcagttgagcctttgataagcactaactactagctgtgacaaattcaaggttatcctttttgaagcaggaccagagggctggtattctgtgttgagacttgctgggcaaggatgcccttgtagtttccatgttgcaggtcaacttctgggaacaagtcattcaggcacagatacactttcacctggaaaaagtagatgaagcatttggcaatgatgttgcattttattcgtcttaaaatgcattttccattatgaataaccttccttgagaactctttcagtggtgtgctgcaacgtataacttgataccctatcctttttttctgagacagagccttgctctgttcctcaggctagagtgtagagttgcgatcatggctcactgcatccttgacttctctggcttaatcaatcctcccacctcagcttccctagtagctgggactacaggtgcatgcaactgtgcctggctcgttttttctattttttgtagagacaaagcctcactatgttgcccaggctggtctccaacttttgggctcaagcaatccactggccttggcctcccaaagtgctggaattacaggtgtgagtcactgcacccagccgcaattttttgtgagaaaaggggaagtatattaattgttgagggaattaagtgaaaaatttaaaaaccttcatctgaagaactttggggctatgttcatgtcagctcatgcacaggatttatgttgcaagtgtgttttaattttactttacttatacctttttacttccaaaaaggtttgacacagctagttagatgataataagtggcatcttaatagatataaacattttaatgccatttatcccaattttacaaaatcagactaaaattatgtaaggctagcttttgaaaaatttgtatgggctttcctgtattatgttctcatgaaaatgggattaaccattttactgttactttttgacattatattatgatgaacccaagtgctcgagacagccattatttctgccgggccgaatgagtcatttcctgagtcactgtgcaagttatgacggttataatcattttgccagtttgcctcttacaggttctagccaggtatgaattgataggtcccttgcttacaaaggcaaaagttaagcatcatggtgcagttttgtagtaaatcttatgttagaggggttagccgtggagttccttggcagggtcagtgctggctcagtgaccttggtttatgtatctgaagctgctcaaaagatcagtgacatcataagggctttttcttgtatgaaggctgagacctaagtcaaacagttttcatttcagtttggttgtctttagctacttaacattatatgtcagtcatcttatcttccctctattgcctttataacttagttctttccaaaagaaacaccttaaaaatctttttcttttaagataaaatgttggcattttgaaaataccaaatggatggtccttgttgttgcggcagtcaaaggggagatcatttttatttgtgtttacctgatgagaattggtctttttgtttaacagaatcaagccattcgagagctgggtagaacagagagaagggccaaacagccttgtgaccctggcttcttttcaacactcctgggttaataacatattcttgatagaaaccttgcgaagttcagatggttttgagcatgaaaagaggagataagaagacaagccagttctaactgaggaattgattaaactaagggttgagtggagagatgtcacctgccttgatcgggttgggtttcacagggagatgttgtttctttagctgcttctattcagtattcagaattcaaatccacacttgccagctggtttatctgagtgtgttttggctagtcctctaaatccttgctcctttctcatctctataaatcacagaagtaactgccttgtgttaatgccctttcagctctgaaactgtgtgatcgatgtccttcctccagttctttggcttcaggctccttatcagtcacgtgcttaggtggctctcctcagagagaccttcccttggcacccaactatgatcataccccctcccattatgggctttcactgctcttcccttcatagtcattcttagcactctgtgatgagtaatgatagctggccctctctctgtatttgtgggatctgcatccatgggttcaaccaacctcagattgaaaatattcaaaaaatattaagtctgtactgaacacatatagactttttttccttgtcattattccctaaacaatacagtatcacagtgatttacatagcatttacgttgcgttagctattataagtaatgtagagatgatttaaagtatacaggaggatgtgcggatgttgtatgaaaatactgtaccatcttagagcggagacttgaccatctgcagattttagaatcccagggaagtcctggaaccaatctcccgaggatactgagggatgactgtacttgcatttttattgcttgttttcccctctagaccccatgctgtgccctctttgttcaccacggcatccttaactcctagctcagtacctggcacctagtattctctcagtagtgtttgaatgaatgagtcaatcaatgaatgaatgaacaaatgaattactggaatagggaaaaattatttccctctattggaaggaatatgggtctgggttgggatttgttgcttcttgcctgggacttttttttttttttttctccttttggcagtcagtgaatccaggtgtgccgtatatataatttagtcaggttcttctgaatctaccaggacagttctacataatttggcataatatgtttctcccctggggatttgcccaaaatgaagtggtttattaggacttgcctgcaagaaacatgaaatgaaactaatgattgaattacatgacaaatgactgtagtgagtagaatgcaattttctcttccttaaggggctggtctttataataagagcttctatctttatttgccaggtaattactgtcactggcatttgaagttataaaaaagaataagtacatatttagtaattcatgactcagtgaggaaccatgcttaacaacacaaagcttgatttctcaaatggaatcaactggcagcaggaaacttttaaaagaggtcatatacatacactctctcacatgctcacacactagttgttgttgaatagctttcccccatactctattgcatacatttttcccttatattttgatgcagttttttgctaacaacctgattatacattcctctgcctcttcccccagtaaatttttctaaaattgcggaataggctgggtgcggtggctcatgcctgtaatcccagcactttgggaggctgaagcaggcagatcacctgaagtcgggagttcaagaccagcctgaccaccatggagaaaccccatttctaccaaagatacacaattagccaggtgtggtggtgcatgcctataatcccagctacttgggaggctgaggcaggagaattgcttgaacccgggaggcagaaattgtggtgagccaagatcgtgccattgcactccagcctgggcaacaagagtgaaactccgcctcaagaaaaaagaattgcaaaataaaaatctttcagcagatatgctggtaaagcattgcttctcacacttggcttatacaaggatcagctgaggagcatccagagcatgtgacacaagtgcactgcagaccaagtcgatcagaatctctggggtggaacccaggctgcccccattcagcggttctgctcattgcttcccagcaggtacccttgtgtggtaccctgaatagaagtggtaatttcttactaaagtattttctgcagggatcccgggaaggggtgaggagaaggtgcatgatgtaggaatgataacatgcatggaatagcagctgaggcatagaataataaatatttttaaatgagttgttggcttttttaagtgaaaagaactttcttgtgcatgtctcatgcctgtgttatccaaaaaatcccattctgtgggaaaattttaaaacattttatttttaatatatcaagtaatataggaatatattcacttagattttgtttaaaaagaattcatacaaagcaaaagaggccaaaaaactccattcaatccagcttctctcttaaaggtaacaagtgttgtcaattttgtgtgtatccttccggcgctgctcctatgtatacaggtgttcacagaaagtagtgtgtatggcttttgtttccatgtatgtttacctagtattcatcaccctgcttgttttctctgtgttatgtcttggaaacccttccatgtcaatgtaggtagctgtatcttctttcagctgctatacagtagtccagtatgtgattgggccatgtttctttttctttttaaaaactattctattggacacaaacaagttaaatttgtttatactgaaaactcaggcgttttctgagaaagacttagcaaagaagattaagtcccttcttcatatcaaactctgtttagtaaagtagtaacatatagttgtgggttgctcttgtaaacaggctttactgactgtgaaacttcaactttgtaacatgtattttctactctgcacttgatcttagccaaaagggtgagaagcgattctaccctggatagtatatgctgtaattaagtatctccaagaaggtgtttattagccattctgagtaatacactgggaaatatttgcataattattagaagtagtatctaactctcatgtagtcatttgttatgacattttggacaaaggactgaataaaacattttaagttggta

SEQ ID NO: 17421 - DNA, 648 bp, Homo sapiens
  source 1..648: mol_type = unassigned DNA
tcctactcagttctcggttatttatgcatccgtatgagctaatggccaaagtttgccacttatgtgttgagcaccagagactaagtgatcctgatagtgataagaaccagatgagaaaaattgcacccaaaatccttcaactcctcacggaatggacggaaacatttccctatgattttcgggatgaaagaatgatgagaaacttaaaagatctggctcaccgaatagccagtggcgaagagtaaatttttctaaaattgcggaataggctgggtgcggtggctcatgcctgtaatcccagcactttgggaggctgaagcaggcagatcacctgaagtcgggagttcaagaccagcctgaccaccatggagaaaccccatttctaccaaagatacacaattagccaggtgtggtggtgcatgcctataatcccagctacttgggaggctgaggcaggagaattgcttgaacccgggaggcagaaattgtggtgagccaagatcgtgccattgcactccagcctgggcaacaagagtgaaactccgcctcaagaaaaaagaattgcaaaataaaaatctttcagcagatatgctggtaaagcattgcttctcacacttggcttatacaaggatcagctgaggagcatcc

SEQ ID NO: 17422 - DNA, 691 bp, Homo sapiens
  source 1..691: mol_type = unassigned DNA
ggcggcggctgccgtagtttcagtataaacaaggaacccgactggttagacagattttgtttttcttcttcccgcgcgctttagctccctgtcctttggtcgcatttgtgggcgcgcggcacgcagccgggaggccgaggactcggagttcacctgcaggaaagtatgcctcagactcctcccttttcagcaatgtttgacagcagtggttacaatcgaaacctctatcagtctgcagaggacagctgtggagggttgtattaccatgacaacaacctcctctctggatccctggaagcactcatccagcacttagtacctaatgtggattactatccagatgtaggtattcatgtttctctgaaacacatccttggcaatgagtagaaattgcagtacagtaggcagggaccatagataatacagaattatatctaggttgctaagaatttttctaacaagaaattgcatattgattatcaagtgcattgaaatcaaatcgagcctggataaggatcagattttggtatactatgtgtatcaatttcttttcaggttagttacaacattgtagatggtctgataccatctaaatgaagtatctgtagagttgattcatgcatatagcttagtccttaaatagaaatgtcagagaacattggatgctcccagaatatgtaatgcctttttt

SEQ ID NO: 17423 - DNA, 516 bp, Homo sapiens
  source 1..516: mol_type = unassigned DNA
gcggccgccgagctctccccgcccggcccagcccctccgccgcagccgcggggcagccccgagccacggccccggctggcgggcgggctgcgggcaggatcctggcgctcgggctctggcaaggggaaaggacagaaacggcgcatcgggagggaccctgcctcaccgcttgtatatggcaaagtttctcgccgagctcctgggctgcacgttgccgagcaagggcgcctctcccatgtttgagtctaaaagtcattcccgagttggcctgaaatcaagcaccaagcaaaagaccaccattttcagcacattggccagtgagaagtccttatctgactgcaaaaagataattgaaccagggcacaaggagacttttgtacttgttcaggtcacacagtaagtgatggagccaggattacaacctgcccttccttacaacctgctcttccttacaacctctgacaccatattctgaaagaggaaagtatgcctcagactcctcccttttcagcaatg

SEQ ID NO: 17424 - DNA, 537 bp, Homo sapiens
  source 1..537: mol_type = unassigned DNA
gcggccgccgagctctccccgcccggcccagcccctccgccgcagccgcggggcagccccgagccacggccccggctggcgggcgggctgcgggcaggatcctggcgctcgggctctggcaaggggaaaggacagaaacggcgcatcgggagggaccctgcctcaccgcttgtatatggcaaagtttctcgccgagctcctgggctgcacgttgccgagcaagggcgcctctcccatgtttgagtctaaaagtcattcccgagttggcctgaaatcaagcaccaagcaaaagaccaccattttcagcacattggccagtgagaagtccttatctgactgcaaaaaggaacagcaatggaaaccttccatgtacagcagcataactccagtttgctttccaagccctctgattgagaagccaataggcaaagtaagaatgaacctacttttatcagacactatgattcgagccagttggctgttatttctttttgccttgagctatttcggtgaaataataaaattgatcttataaaa

SEQ ID NO: 17425 - DNA, 498 bp, Homo sapiens
  source 1..498: mol_type = unassigned DNA
gcggccgccgagctctccccgcccggcccagcccctccgccgcagccgcggggcagccccgagccacggccccggctggcgggcgggctgcgggcaggatcctggcgctcgggctctggcaaggggaaaggacagaaacggcgcatcgggagggaccctgcctcaccgcttgtatatggcaaagtttctcgccgagctcctgggctgcacgttgccgagcaagggcgcctctcccatgtttgagtctaaaagtcattcccgagttggcctgaaatcaagcaccaagcaaaagaccaccattttcagcacattggccagtgagaagtccttatctgactgcaaaaagaggctgtgttccctgccacgtggggtgagccaatgggctgaagaagcatgaggaaaaggagactcgggtatggcaggtggctgtgtggagaggacacttggaacagcaatggaaaccttccatgtacagcagcataactccagtttgctttc

SEQ ID NO: 17426 - DNA, 539 bp, Homo sapiens
  source 1..539: mol_type = unassigned DNA
gcggccgccgagctctccccgcccggcccagcccctccgccgcagccgcggggcagccccgagccacggccccggctggcgggcgggctgcgggcaggatcctggcgctcgggctctggcaaggggaaaggacagaaacggcgcatcgggagggaccctgcctcaccgcttgtatatggcaaagtttctcgccgagctcctgggctgcacgttgccgagcaagggcgcctctcccatgtttgagtctaaaagtcattcccgagttggcctgaaatcaagcaccaagcaaaagtttatgtattcatcctcctgtagcttcctgagaagtcatgggagaccaccattttcagcacattggccagtgagaagtccttatctgactgcaaaaagaggctgtgttccctgccacgtggggtgagccaatgggctgaagaagcatgaggaaaaggagactcgggtatggcaggtggctgtgtggagaggacacttggaacagcaatggaaaccttccatgtacagcagcataactccagtttgct

SEQ ID NO: 17427 - DNA, 504 bp, Homo sapiens
  source 1..504: mol_type = unassigned DNA
gcggccgccgagctctccccgcccggcccagcccctccgccgcagccgcggggcagccccgagccacggccccggctggcgggcgggctgcgggcaggatcctggcgctcgggctctggcaaggggaaaggacagaaacggcgcatcgggagggaccctgcctcaccgcttgtatatggcaaagtttctcgccgagctcctgggctgcacgttgccgagcaagggcgcctctcccatgtttgagtctaaaagtcattcccgagttggcctgaaatcaagcaccaagcaaaagaccaccattttcagcacattggccagtgagaagtccttatctgactgcaaaaagcatactcagaccagaccctggaacggagcaggtttttgatgaatgcctgttgaatgatgaataaacggatgaagggaaccaagaggctgtgttccctgccacgtggggtgagccaatgggctgaagaagcatgaggaaaaggagactcgggtatggca

SEQ ID NO: 17428 - DNA, 3485 bp, Homo sapiens
  source 1..3485: mol_type = unassigned DNA
cgactggttagacagattttgtttttcttcttcccgcgcgctttagctccctgtcctttggtcgcatttgtgggcgcgcggcacgcagccgggaggccgaggactcggagttcacctgcaggaaagtatgcctcagactcctcccttttcagcaatgtttgacagcagtggttacaatcgaaacctctatcagtctgcagaggacagctgtggagggttgtattaccatgacaacaacctcctctctggatccctggaagcactcatccagcacttagtacctaatgtggattactatccagatagaacatacatatttaccttcctactcagttctcggttatttatgcatccgtatgagctaatggccaaagtttgccacttatgtgttgagcaccagagactaagtgatcctgatagtgataagaaccagatgagaaaaattgcacccaaaatccttcaactcctcacggaatggacggaaacatttccctatgattttcgggatgaaagaatgatgagaaacttaaaagatctggctcaccgaatagccagtggcgaagaggttggtaacctgaatttagcgcggctgctggaattcccaggcagagcctgggtgggaaatggtgccgaattatgcatcctaatctccactgcttcctctctgttttgcctttgggcaagccctccacatcacatattggtctatttagtatgtcaagtgagaatgattataccatcccacttcaaagggatatgatctagagttttatgtgattaatttggggctatgttcatgtcaactcatgcacaggatttatgttgcaagtatgttttaattttactttacttttaccttttttcctcccaaaaaggtttgacacagctagttagatgataaatggcatgttagtagacataaacactagtggatacaaagtaaataacattattctattaaccgaggataaatagtagattaataaatcataaatagaaatagacattctgggccatggcagaaagaaaataaatacgctcctgttgagaatgagtagaggaggacaggactgctgtggtatgagtttaagttccaggtaaaagggaaatacagctggtcatgtaatattcactgtcagaaaaggggaagtatagtaattattgagggacttaaatgaaaaatttagaaactttcttctgaagaactttgtatagggtcatagaatgagatcctacaaactgctctttatggtgtttacaacataccttcctggatagaagctgagttcatagattcatgtgtaaattagcaaagataattcttgggggaggagaagactgagaaaatgaggcaagtcttccagtgctcagaagttgatttaaggatagactctagtataggtagagattaaaagtaagtctcttagataggctttcataaatatcacttccctcagttgagcctttgataagcactaactactagctgtgacaaattcaaggttatcctttttgaagcaggaccagagggctggtattctgtgttgagacttgctgggcaaggatgcccttgtagtttccatgttgcaggtcaacttctgggaacaagtcattcaggcacagatacactttcacctggaaaaagtagatgaagcatttggcaatgatgttgcattttattcgtcttaaaatgcattttccattatgaataaccttccttgagaactctttcagtggtgtgctgcaacgtataacttgataccctatcctttttttctgagacagagccttgctctgttcctcaggctagagtgtagagttgcgatcatggctcactgcatccttgacttctctggcttaatcaatcctcccacctcagcttccctagtagctgggactacaggtgcatgcaactgtgcctggctcgttttttctattttttgtagagacaaagcctcactatgttgcccaggctggtctccaacttttgggctcaagcaatccactttgggaggctgaagcaggcagatcacctgaagtcgggagttcaagaccagcctgaccaccatggagaaaccccatttctaccaaagatacacaattagccaggtgtggtggtgcatgcctataatcccagctacttgggaggctgaggcaggagaattgcttgaacccgggaggcagaaattgtggtgagccaagatcgtgccattgcactccagcctgggcaacaagagtgaaactccgcctcaagaaaaaagaattgcaaaataaaaatctttcagcagatatgctggtaaagcattgcttctcacacttggcttatacaaggatcagctgaggagcatccagagcatgtgacacaagtgcactgcagaccaagtcgatcagaatctctggggtggaacccaggctgcccccattcagcggttctgctcattgcttcccagcaggtacccttgtgtggtaccctgaatagaagtggtaatttcttactaaagtattttctgcagggatcccgggaaggggtgaggagaaggtgcatgatgtaggaatgataacatgcatggaatagcagctgaggcatagaataataaatatttttaaatgagttgttggcttttttaagtgaaaagaactttcttgtgcatgtctcatgcctgtgttatccaaaaaatcccattctgtgggaaaattttaaaacattttatttttaatatatcaagtaatataggaatatattcacttagattttgtttaaaaagaattcatacaaagcaaaagaggccaaaaaactccattcaatccagcttctctcttaaaggtaacaagtgttgtcaattttgtgtgtatccttccggcgctgctcctatgtatacaggtgttcacagaaagtagtgtgtatggcttttgtttccatgtatgtttacctagtattcatcaccctgcttgttttctctgtgttatgtcttggaaacccttccatgtcaatgtaggtagctgtatcttctttcagctgctatacagtagtccagtatgtgattgggccatgtttctttttctttttaaaaactattctattggacacaaacaagttaaatttgtttatactgaaaactcaggcgttttctgagaaagacttagcaaagaagattaagtcccttcttcatatcaaactctgtttagtaaagtagtaacatatagttgtgggttgctcttgtaaacaggctttactgactgtgaaacttcaactttgtaacatgtattttctactctgcacttgatcttagccaaaagggtgagaagcgattctaccctggatagtatatgctgtaattaagtatctccaagaaggtgtttattagccattctgagtaatacactgggaaatatttgcataattattagaagtagtatctaactctcatgtagtcatttgttatgacattttggacaaaggactgaataaaacattttaagttggt

SEQ ID NO: 17429 - DNA, 6237 bp, Homo sapiens
  source 1..6237: mol_type = unassigned DNA
cggcaccggaggagggtcgggcggcatcttccgggtactggggctctgcggagcggagaagaggttccagcggggaatggtatatctggattcaagaagccgcggctcggcgccagatcctggagtgtagatatttggggggaggggagagctagagggagcgagcgagcgagcgccagagagaggcagcgcgcagcgcgcacggacggggggctgctgcgcggagaagatgtaagcgcgtggggtctcgctggcctctgagcaccatgcagaaggggatccggctgaatgatggccacgtcgcgtccctgggactgctggcgcgcaaggacggcacgcgcaaaggctacctgagcaagcggagttcggacaacacaaaatggcaaaccaagtggttcgcgctgctgcagaacctgctcttctacttcgagagcgactcgagctcgcggccctcggggctttacctgctggagggctgcgtctgcgaccgcgcgccctcccccaagccggcgctgtcggccaaggagccgctggagaaacagcattacttcacggtgaacttcagccatgagaaccagaaagccttggagctgaggacagaggacgcaaaagattgtgacgaatgggtggcagccattgcacatgccagctacaggaccctcgccacagagcatgaggcattaatgcagaaatacctgcacctgctgcagatcgtggagacagagaagaccgtggccaagcagcttcggcagcagatcgaggatggggagatcgagatcgagcggctgaaggcagagatcacatccctgctcaaggacaatgagcgcatccagtccacccagactgtcgcccccaacgatgaagacagcgacatcaagaaaattaagaaggtgcagagcttcctgcggggctggctgtgccggcggaagtggaagaccatcatccaggactacatccggtcaccccatgctgacagcatgcgcaagaggaaccaggtggtgttcagcatgctggaggctgaggctgagtacgtgcagcagctgcacatccttgtcaacaatttcctgcgcccgctgcggatggccgccagctccaagaagcctcccatcacacacgacgacgtcagcagcatcttcctgaacagcgaaaccatcatgtttttacatcagatcttttaccaaggcctgaaggcccgcatctccagctggcccacgctggtcctggctgacctatttgacatcctgctgcccatgctcaacatctaccaagagttcgtccgcaaccaccagtacagcctgcagatcctggcccactgcaagcagaaccgtgacttcgacaagctgctgaagcactacgaggccaagcctgactgcgaggagaggacgctggagaccttcctcacctaccccatgttccagatccccaggtacatcctgaccctccatgagctcctggcccacacgcctcatgagcacgttgagcgcaacagcctggactacgccaagtccaaactggaggagctgtccagaataatgcacgatgaagtaagtgagacggagaacatccggaaaaacctggccatcgagcgcatgatcatcgaaggctgtgagatcctcctggacaccagccagacctttgtgagacaaggttccctcattcaggtgcccatgtctgaaaagggcaagatcaccagggggcgcctggggtctctctccctaaagaaagagggcgagcgacagtgcttcctgttttctaagcatctgattatctgtaccagaggctctggagggaagcttcacttgaccaagaatggagtcatatccctcattgactgcactttattggaggagccagaaagcacggaggaggaagccaaaggatccggccaagacatagatcacttggattttaaaatcggggtggagccaaaggattccccgccctttacagtcatcctagtggcctcgtccagacaggagaaggcagcgtggaccagtgacatcagccagtgtgtggataacatccgatgcaatgggctcatgatgaacgcatttgaagaaaattccaaggtcactgtgccgcagatgatcaagtccgacgcctccttatattgtgatgatgttgacattcgcttcagcaaaaccatgaactcctgcaaagtgctgcagatccgctacgccagtgtggagcggctgctggagaggctgacggacctgcgcttcctgagcatcgacttcctcaacaccttcctgcactcctaccgcgtcttcaccaccgccatcgtggtcctggacaagctcattaccatctacaagaagcctatcagtgccattcctgccaggtcgctggagctcctgtttgccagtggccagaacaataagctcctgtacggtgaaccccccaagtccccgcgcgccacccgcaagttctcctcgccgccacctctgtccatcaccaagacatcgtcaccgagccgccggcggaagctctccctgaacatccccatcatcactggcggcaaggccctggacctggccgccctcagctgcaactccaatggctacaccagcatgtactcggccatgtcacccttcagcaaggccacgctggacaccagcaagctctatgtgtccagcagcttcaccaacaagattccagatgagggcgatacgacccctgagaagcccgaagacccttcagcgctcagcaagcagagctcagaagtctccatgagagaggagtcagatattgatcaaaaccagagtgatgatggtgatactgaaacatcaccaactaaatctccaacaacacccaaatcagtcaaaaacaaaaattcttcagagttcccactcttttcctataacaatggagtcgtcatgacctcctgtcgtgaactggacaataaccgcagtgccttgtcggccgcctctgcctttgccatagcaaccgccggggccaacgagggcaccccaaacaaggagaagtaccggaggatgtccttagccagtgcagggtttcccccagaccagaggaatggagacaaggagtttgtgatccgcagagcagccaccaatcgtgtcttgaacgtgctccgccactgggtgtccaagcactctcaggactttgagaccaacgatgagctcaaatgcaaggtgatcggcttcctggaagaagtcatgcacgacccggagctcctgacccaggagcggaaggctgcagccaacatcatcaggactctgacccaggaggacccaggtgacaaccagatcacgctggaggagatcacgcagatggctgaaggcgtgaaggctgagccctttgaaaaccactcagccctggagatcgcggagcagctgaccctgctagatcacctcgtcttcaagaagattccttatgaggagttcttcggacaaggatggatgaaactggaaaagaatgaaaggaccccttatatcatgaaaaccactaagcacttcaatgacatcagtaacttgattgcttcagaaatcatccgcaatgaggacatcaacgccagggtgagcgccatcgagaagtgggtggccgtagctgacatatgccgctgcctccacaactacaatgccgtactggagatcacctcgtccatgaaccgcagtgcaatcttccggctcaaaaagacgtggctcaaagtctctaagcagactaaagctttgattgataagctccaaaagcttgtgtcatctgagggcagatttaagaatctcagagaagctctgaaaaattgtgacccaccctgtgtcccttacctggggatgtacctcaccgacctggccttcatcgaggaggggacgcccaattacacggaagacggcctggtcaacttctccaagatgaggatgatatcccatattatccgagagattcgccagtttcaacaaactgcctacaaaatagagcaccaagcaaaggtaacgcaatatttactggaccaatcttttgtaatggatgaagaaagcctctacgagtcttctctccgaatagaaccaaaactccccacctgaagctgagcccagcccagacccagctgctcccggggacatgtgctagatgatactgtacatattcgtttggtttcactggattttcttcttcagtatgtgcttctccaagaatacaaatcgtccttgttcttagattcctgtagaaccggaatatgaatttctgcaccgtttcagacttcgcccacccatccctcccctcgtctcctgcagtgcctgtttcttttaaacagctgtactcttggtccctcttccctagactcctcactcttctcagaggggaaacagcacccttgcatacaagaatcttagactccagtcctgcttccgtccctccccagcccaggctcctgggttgaggtggccacccaggcatcctcccagcatgttccatgtagttgttataactgggtggggggtggggggcggcgggagggggaaaccataccctgaagtccagtcattgacaaatcttcccgctgatggtgatgtcaatttccaaagcagcttctccagccaaaatcgcaggtctcaaaactccccatgtgtctcccagtaacctggacggaagggagtcctctctgctcagaaccacacccctcgtaccaatgctgccatctcgttcaggccccacgtcgctccttgctctaggattaacaccagatagcatgaatagcagtctcaatacaactggatgaggccctagacttcccgaggaaatggagtcacaaacaccaagccacgtcgactcttgccgaccactggcccagcatccactgaaagtcgggaacacaaaaatgtcacttttcctctttaagctgcctaacggtcactacaagcttacattgagatgctctaagtctgtataccttgtgataattagtaccacactgtagaattaggaaatcaataaccaagtgtttttattgcatatactgtagtcctgtctaaatgccttctagcaggaatatagtaatgtagtgcttattctgtgaatattaccatgtattttttacactgtacagtatagaaaacacaggttaactccgaagtggcaggcatgctccactacaacagacagacaacttttgctgtaagcaatacctagtggtatgagaattctatttcaagtcctaaaatatttcaacttacagcttgtttggaaaaaaatttccatttttgtaaaaatatatgtttcctgattacctcttgctaataaatctattctatctcagggtgaacagcgagttttgatgggtttcattcgttcagtcaaggaatatttgatgagcacttgctccttacccagcccagcctgggaccggagatccagagtgtcaaggacaccatacctgctttttaggcaccaacagtttggtggggaagactgtttcagttgcctattgcaccaagaacaagccactccaaaacataatggcttaaaaccatttttgttacctttcacagttctatgggttgactgggtccagctgtcagttcttatttggagtctctcatgaagtttcagtcactcagcaactgggactggagtcatctgaaggctcaactggaccgggtggtgctctagttggtgcaccaagatggcgctgtcacatggctggatgttgatgtctgctgggctgcactggggctgttcatgggagcatccacacgtggcctctctgtgtggcttgggctcctcacagtccggaagctgggttccaagagcgactgttccagcagcctcaggcagaagctacaaggctgcccagatgccatcctgcccagatgtgtcctcactgtcacccaggaagggaagccccggaacaccaccctcagtcacaggcatggggcccactgcaaggcacaacccactccagagctcccaaggccgcctcccctgggacctgcagccagctggctccataactgcttttccgtttcctccaggcattttcatcctagccctactttgtgctgggatctgagggggatagcaagcggagaaagaagggatctagagggagaagattctagatccttcttttgactgccagctgattttgattgccagctttacctgcttcatgagctcagccaagtcacttaacctctcagagcttcactgttctcatctgaaaaatggggatgaaaatggtatctcattacagagtagaattaaatgaattattataattaa

SEQ ID NO: 17430 - DNA, 6294 bp, Homo sapiens
  source 1..6294: mol_type = unassigned DNA
cagtttgcccggcaccggaggagggtcgggcggcatcttccgggtactggggctctgcggagcggagaagaggttccagcggggaatggtatatctggattcaagaagccgcggctcggcgccagatcctggagtgtagatatttggggggaggggagagctagagggagcgagcgagcgagcgccagagagaggcagcgcgcagcgcgcacggacggggggctgctgcgcggagaagatgtaagcgcgtggggtctcgctggcctctgagcaccatgcagaaggggatccggctgaatgatggccacgtcgcgtccctgggactgctggcgcgcaaggacggcacgcgcaaaggctacctgagcaagcggagttcggacaacacaaaatggcaaaccaagtggttcgcgctgctgcagaacctgctcttctacttcgagagcgactcgagctcgcggccctcggggctttacctgctggagggctgcgtctgcgaccgcgcgccctcccccaagccggcgctgtcggccaaggagccgctggagaaacagcattacttcacggtgaacttcagccatgagaaccagaaagccttggagctgaggacagaggacgcaaaagattgtgacgaatgggtggcagccattgcacatgccagctacaggaccctcgccacagagcatgaggcattaatgcagaaatacctgcacctgctgcagatcgtggagacagagaagaccgtggccaagcagcttcggcagcagatcgaggatggggagatcgagatcgagcggctgaaggcagagatcacatccctgctcaaggacaatgagcgcatccagtccacccagactgtcgcccccaacgatgaagacagcgacatcaagaaaattaagaaggtgcagagcttcctgcggggctggctgtgccggcggaagtggaagaccatcatccaggactacatccggtcaccccatgctgacagcatgcgcaagaggaaccaggtggtgttcagcatgctggaggctgaggctgagtacgtgcagcagctgcacatccttgtcaacaatttcctgcgcccgctgcggatggccgccagctccaagaagcctcccatcacacacgacgacgtcagcagcatcttcctgaacagcgaaaccatcatgtttttacatcagatcttttaccaaggcctgaaggcccgcatctccagctggcccacgctggtcctggctgacctatttgacatcctgctgcccatgctcaacatctaccaagagttcgtccgcaaccaccagtacagcctgcagatcctggcccactgcaagcagaaccgtgacttcgacaagctgctgaagcactacgaggccaagcctgactgcgaggagaggacgctggagaccttcctcacctaccccatgttccagatccccaggtacatcctgaccctccatgagctcctggcccacacgcctcatgagcacgttgagcgcaacagcctggactacgccaagtccaaactggaggagctgtccagaataatgcacgatgaagtaagtgagacggagaacatccggaaaaacctggccatcgagcgcatgatcatcgaaggctgtgagatcctcctggacaccagccagacctttgtgagacaaggttccctcattcaggtgcccatgtctgaaaagggcaagatcaccagggggcgcctggggtctctctccctaaagaaagagggcgagcgacagtgcttcctgttttctaagcatctgattatctgtaccagaggctctggagggaagcttcacttgaccaagaatggagtcatatccctcattgactgcactttattggaggagccagaaagcacggaggaggaagccaaaggatccggccaagacatagatcacttggattttaaaatcggggtggagccaaaggattccccgccctttacagtcatcctagtggcctcgtccagacaggagaaggcagcgtggaccagtgacatcagccagtgtgtggataacatccgatgcaatgggctcatgatgaacgcatttgaagaaaattccaaggtcactgtgccgcagatgatcaagaggaccagggaggggaccagggaagcagaaatgagcaggtccgacgcctccttatattgtgatgatgttgacattcgcttcagcaaaaccatgaactcctgcaaagtgctgcagatccgctacgccagtgtggagcggctgctggagaggctgacggacctgcgcttcctgagcatcgacttcctcaacaccttcctgcactcctaccgcgtcttcaccaccgccatcgtggtcctggacaagctcattaccatctacaagaagcctatcagtgccattcctgccaggtggctgaggtcgctggagctcctgtttgccagtggccagaacaataagctcctgtacggtgaaccccccaagtccccgcgcgccacccgcaagttctcctcgccgccacctctgtccatcaccaagacatcgtcaccgagccgccggcggaagctctccctgaacatccccatcatcactggcggcaaggccctggacctggccgccctcagctgcaactccaatggctacaccagcatgtactcggccatgtcacccttcagcaaggccacgctggacaccagcaagctctatgtgtccagcagcttcaccaacaagattccagatgagggcgatacgacccctgagaagcccgaagacccttcagcgctcagcaagcagagctcagaagtctccatgagagaggagtcagatattgatcaaaaccagagtgatgatggtgatactgaaacatcaccaactaaatctccaacaacacccaaatcagtcaaaaacaaaaattcttcagagttcccactcttttcctataacaatggagtcgtcatgacctcctgtcgtgaactggacaataaccgcagtgccttgtcggccgcctctgcctttgccatagcaaccgccggggccaacgagggcaccccaaacaaggagaagtaccggaggatgtccttagccagtgcagggtttcccccagaccagaggaatggagacaaggagtttgtgatccgcagagcagccaccaatcgtgtcttgaacgtgctccgccactgggtgtccaagcactctcaggactttgagaccaacgatgagctcaaatgcaaggtgatcggcttcctggaagaagtcatgcacgacccggagctcctgacccaggagcggaaggctgcagccaacatcatcaggactctgacccaggaggacccaggtgacaaccagatcacgctggaggagatcacgcagatggctgaaggcgtgaaggctgagccctttgaaaaccactcagccctggagatcgcggagcagctgaccctgctagatcacctcgtcttcaagaagattccttatgaggagttcttcggacaaggatggatgaaactggaaaagaatgaaaggaccccttatatcatgaaaaccactaagcacttcaatgacatcagtaacttgattgcttcagaaatcatccgcaatgaggacatcaacgccagggtgagcgccatcgagaagtgggtggccgtagctgacatatgccgctgcctccacaactacaatgccgtactggagatcacctcgtccatgaaccgcagtgcaatcttccggctcaaaaagacgtggctcaaagtctctaagcagactaaagctttgattgataagctccaaaagcttgtgtcatctgagggcagatttaagaatctcagagaagctctgaaaaattgtgacccaccctgtgtcccttacctggggatgtacctcaccgacctggccttcatcgaggaggggacgcccaattacacggaagacggcctggtcaacttctccaagatgaggatgatatcccatattatccgagagattcgccagtttcaacaaactgcctacaaaatagagcaccaagcaaaggtaacgcaatatttactggaccaatcttttgtaatggatgaagaaagcctctacgagtcttctctccgaatagaaccaaaactccccacctgaagctgagcccagcccagacccagctgctcccggggacatgtgctagatgatactgtacatattcgtttggtttcactggattttcttcttcagtatgtgcttctccaagaatacaaatcgtccttgttcttagattcctgtagaaccggaatatgaatttctgcaccgtttcagacttcgcccacccatccctcccctcgtctcctgcagtgcctgtttcttttaaacagctgtactcttggtccctcttccctagactcctcactcttctcagaggggaaacagcacccttgcatacaagaatcttagactccagtcctgcttccgtccctccccagcccaggctcctgggttgaggtggccacccaggcatcctcccagcatgttccatgtagttgttataactgggtggggggtggggggcggcgggagggggaaaccataccctgaagtccagtcattgacaaatcttcccgctgatggtgatgtcaatttccaaagcagcttctccagccaaaatcgcaggtctcaaaactccccatgtgtctcccagtaacctggacggaagggagtcctctctgctcagaaccacacccctcgtaccaatgctgccatctcgttcaggccccacgtcgctccttgctctaggattaacaccagatagcatgaatagcagtctcaatacaactggatgaggccctagacttcccgaggaaatggagtcacaaacaccaagccacgtcgactcttgccgaccactggcccagcatccactgaaagtcgggaacacaaaaatgtcacttttcctctttaagctgcctaacggtcactacaagcttacattgagatgctctaagtctgtataccttgtgataattagtaccacactgtagaattaggaaatcaataaccaagtgtttttattgcatatactgtagtcctgtctaaatgccttctagcaggaatatagtaatgtagtgcttattctgtgaatattaccatgtattttttacactgtacagtatagaaaacacaggttaactccgaagtggcaggcatgctccactacaacagacagacaacttttgctgtaagcaatacctagtggtatgagaattctatttcaagtcctaaaatatttcaacttacagcttgtttggaaaaaaatttccatttttgtaaaaatatatgtttcctgattacctcttgctaataaatctattctatctcagggtgaacagcgagttttgatgggtttcattcgttcagtcaaggaatatttgatgagcacttgctccttacccagcccagcctgggaccggagatccagagtgtcaaggacaccatacctgctttttaggcaccaacagtttggtggggaagactgtttcagttgcctattgcaccaagaacaagccactccaaaacataatggcttaaaaccatttttgttacctttcacagttctatgggttgactgggtccagctgtcagttcttatttggagtctctcatgaagtttcagtcactcagcaactgggactggagtcatctgaaggctcaactggaccgggtggtgctctagttggtgcaccaagatggcgctgtcacatggctggatgttgatgtctgctgggctgcactggggctgttcatgggagcatccacacgtggcctctctgtgtggcttgggctcctcacagtccggaagctgggttccaagagcgactgttccagcagcctcaggcagaagctacaaggctgcccagatgccatcctgcccagatgtgtcctcactgtcacccaggaagggaagccccggaacaccaccctcagtcacaggcatggggcccactgcaaggcacaacccactccagagctcccaaggccgcctcccctgggacctgcagccagctggctccataactgcttttccgtttcctccaggcattttcatcctagccctactttgtgctgggatctgagggggatagcaagcggagaaagaagggatctagagggagaagattctagatccttcttttgactgccagctgattttgattgccagctttacctgcttcatgagctcagccaagtcacttaacctctcagagcttcactgttctcatctgaaaaatggggatgaaaatggtatctcattacagagtagaattaaatgaattattataattaa

SEQ ID NO: 17431 - DNA, 2850 bp, Homo sapiens
  source 1..2850: mol_type = unassigned DNA
ggagccctttttggcctacttggggtgagtcaacataaggagtgcaggccaccttagcctttgcttctcaaaagtcatggggcaatgaaggacttggccaaggctgtccagcagtaggccaagttcagggattggctcaggcccctaatggacttcactgcatccaggaatggtaggtgattatcttttccgagaggccacctacccagatcccagttgtggacagcccatcccagccctcagaggctcagaggctctctgagtgccctgccccaaaacaccctaggcaagacattatgccagagcctcagctctagggctgcctggagcagagctcctgaatcacactggctccccagggctccccaggaacctcaccattcctcccccaatccacacctctgctgccagagcaacgcaacgacccagaatacacccgttccctcttctgttccctcctcctgcccccacctcaggcctcactggggcagggtacatcttgcctctctgccctgaacttctgaaacctcaatgatcagattcccagggctctgagaaaacagaagcaaacatcccatccaggatggatttaccccctaaaagtcactgagatcattcccaggggcccagcagacagtgtccttcctttcccagcagcagtgccctgcagaacaaagaggctggttcagagccagctctcagccctatggccttggctgagtcccttaacctttctgagactcagtttcctacctgtgacattcctgcagttatcctgtaggaataagagtgcctacgtcctggggcaacagtgagggttaaaagatcaatcctatcctgtgtgcaacgtggagcagacagcctcgatgagacaagctatggtttgcaatgttctggatgtataacctgtttccagcctggcctgaggtggaaccctgtcatgaggatggtcgctggagctcctgtttgccagtggccagaacaataagctcctgtacggtgaaccccccaagtccccgcgcgccacccgcaagttctcctcgccgccacctctgtccatcaccaagacatcgtcaccgagccgccggcggaagctctccctgaacatccccatcatcactggcggcaaggccctggacctggccgccctcagctgcaactccaatggctacaccagcatgtactcggccatgtcacccttcagcaaggccacgctggacaccagcaagctctatgtgtccagcagcttcaccaacaagattccagatgagggcgatacgacccctgagaagcccgaagacccttcagcgctcagcaagcagagctcagaagtctccatgagagaggagtcagatattgatcaaaaccagagtgatgatggtgatactgaaacatcaccaactaaatctccaacaacacccaaatcagtcaaaaacaaaaattcttcagagttcccactcttttcctataacaatggagtcgtcatgacctcctgtcgtgaactggacaataaccgcagtgccttgtcggccgcctctgcctttgccatagcaaccgccggggccaacgagggcaccccaaacaaggagaagtaccggaggatgtccttagccagtgcagggtttcccccagaccagaggaatggagacaaggagtttgtgatccgcagagcagccaccaatcgtgtcttgaacgtgctccgccactgggtgtccaagcactctcaggactttgagaccaacgatgagctcaaatgcaaggtgatcggcttcctggaagaagtcatgcacgacccggagctcctgacccaggagcggaaggctgcagccaacatcatcaggactctgacccaggaggacccaggtgacaaccagatcacgctggaggagatcacgcagatggctgaaggcgtgaaggctgagccctttgaaaaccactcagccctggagatcgcggagcagctgaccctgctagatcacctcgtcttcaagaagattccttatgaggagttcttcggacaaggatggatgaaactggaaaagaatgaaaggaccccttatatcatgaaaaccactaagcacttcaatgacatcagtaacttgattgcttcagaaatcatccgcaatgaggacatcaacgccagggtgagcgccatcgagaagtgggtggccgtagctgacatatgccgctgcctccacaactacaatgccgtactggagatcacctcgtccatgaaccgcagtgcaatcttccggctcaaaaagacgtggctcaaagtctctaagcagactaaagctttgattgataagctccaaaagcttgtgtcatctgagggcagatttaagaatctcagagaagctctgaaaaattgtgacccaccctgtgtcccttacctggggatgtacctcaccgacctggccttcatcgaggaggggacgcccaattacacggaagacggcctggtcaacttctccaagatgaggatgatatcccatattatccgagagattcgccagtttcaacaaactgcctacaaaatagagcaccaagcaaaggtaacgcaatatttactggaccaatcttttgtaatggatgaagaaagcctctacgagtcttctctccgaatagaaccaaaactccccacctgaagctgagcccagcccagacccagctgctcccggggacatgtgctagatgatactgtacatattcgtttggtttcactggattttcttcttcagtatgtgcttctccaagaatacaaatcgtccttgttcttagattcctgtagaaccggaatatgaatttctgcaccgtttcagacttcgcccacccatccctcccctcgtc

SEQ ID NO: 17432 - DNA, 348 bp, Homo sapiens
  source 1..348: mol_type = unassigned DNA
gggagctgccccctccgtgcattcaccaacttgtccgtccgtccgcccccggggcaccactccatccacctcctcacatggctggcttcctcgtctgccgccgccaccaccgctgcctccactgcctctggggccccccattctgtctgagtccccaccctgaccgtcttccctctttcaggtggcctgtgggcccgtttgtgacccaccctgtgtcccttacctggggatgtacctcaccgacctggccttcatcgaggaggggacgcccaattacacggaagacggcctggtcaacttctccaagatgaggatgatatcccatattatccgagagattcgccagtt

SEQ ID NO: 17433 - DNA, 4187 bp, Homo sapiens
  source 1..4187: mol_type = unassigned DNA
ctgattatcacaaacaaggaatctgtgcctagctgatgtggcagcaggcactttgcaaaacagctagattgattgcaagagtcgttgttggtcccatggacactctggtaattggagatgtcttcttcttgatacagcattacttcacggtgaacttcagccatgagaaccagaaagccttggagctgaggacagaggacgcaaaagattgtgacgaatgggtggcagccattgcacatgccagctacaggaccctcgccacagagcatgaggcattaatgcagaaatacctgcacctgctgcagatcgtggagacagagaagaccgtggccaagcagcttcggcagcagatcgaggatggggagatcgagatcgagcggctgaaggcagagatcacatccctgctcaaggacaatgagcgcatccagtccacccagactgtcgcccccaacgatgaagacagcgacatcaagaaaattaagaaggtgcagagcttcctgcggggctggctgtgccggcggaagtggaagaccatcatccaggactacatccggtcaccccatgctgacagcatgcgcaagaggaaccaggtggtgttcagcatgctggaggctgaggctgagtacgtgcagcagctgcacatccttgtcaacaatttcctgcgcccgctgcggatggccgccagctccaagaagcctcccatcacacacgacgacgtcagcagcatcttcctgaacagcgaaaccatcatgtttttacatcagatcttttaccaaggcctgaaggcccgcatctccagctggcccacgctggtcctggctgacctatttgacatcctgctgcccatgctcaacatctaccaagagttcgtccgcaaccaccagtacagcctgcagatcctggcccactgcaagcagaaccgtgacttcgacaagctgctgaagcactacgaggccaagcctgactgcgaggagaggacgctggagaccttcctcacctaccccatgttccagatccccaggtacatcctgaccctccatgagctcctggcccacacgcctcatgagcacgttgagcgcaacagcctggactacgccaagtccaaactggaggagctgtccagaataatgcacgatgaagtaagtgagacggagaacatccggaaaaacctggccatcgagcgcatgatcatcgaaggctgtgagatcctcctggacaccagccagacctttgtgagacaaggttccctcattcaggtgcccatgtctgaaaagggcaagatcaccagggggcgcctggggtctctctccctaaagaaagagggcgagcgacagtgcttcctgttttctaagcatctgattatctgtaccagaggctctggagggaagcttcacttgaccaagaatggagtcatatccctcattgactgcactttattggaggagccagaaagcacggaggaggaagccaaaggatccggccaagacatagatcacttggattttaaaatcggggtggagccaaaggattccccgccctttacagtcatcctagtggcctcgtccagacaggagaaggcagcgtggaccagtgacatcagccagtgtgtggataacatccgatgcaatgggctcatgatgaacgcatttgaagaaaattccaaggtcactgtgccgcagatgatcaagtccgacgcctccttatattgtgatgatgttgacattcgcttcagcaaaaccatgaactcctgcaaagtgctgcagatccgctacgccagtgtggagcggctgctggagaggctgacggacctgcgcttcctgagcatcgacttcctcaacaccttcctgcactcctaccgcgtcttcaccaccgccatcgtggtcctggacaagctcattaccatctacaagaagcctatcagtgccattcctgccaggtggctgaggtcgctggagctcctgtttgccagtggccagaacaataagctcctgtacggtgaaccccccaagtccccgcgcgccacccgcaagttctcctcgccgccacctctgtccatcaccaagacatcgtcaccgagccgccggcggaagctctccctgaacatccccatcatcactggcggcaaggccctggacctggccgccctcagctgcaactccaatggctacaccagcatgtactcggccatgtcacccttcagcaaggccacgctggacaccagcaagctctatgtgtccagcagcttcaccaacaagattccagatgagggcgatacgacccctgagaagcccgaagacccttcagcgctcagcaagcagagctcagaagtctccatgagagaggagtcagatattgatcaaaaccagagtgatgatggtgatactgaaacatcaccaactaaatctccaacaacacccaaatcagtcaaaaacaaaaattcttcagagttcccactcttttcctataacaatggagtcgtcatgacctcctgtcgtgaactggacaataaccgcagtgccttgtcggccgcctctgcctttgccatagcaaccgccggggccaacgagggcaccccaaacaaggagaagtaccggaggatgtccttagccagtgcagggtttcccccagaccagaggaatggagacaaggagtttgtgatccgcagagcagccaccaatcgtgtcttgaacgtgctccgccactgggtgtccaagcactctcaggactttgagaccaacgatgagctcaaatgcaaggtgatcggcttcctggaagaagtcatgcacgacccggagctcctgacccaggagcggaaggctgcagccaacatcatcaggactctgacccaggaggacccaggtgacaaccagatcacgctggaggagatcacgcagatggctgaaggcgtgaaggctgagccctttgaaaaccactcagccctggagatcgcggagcagctgaccctgctagatcacctcgtcttcaagaagattccttatgaggagttcttcggacaaggatggatgaaactggaaaagaatgaaaggaccccttatatcatgaaaaccactaagcacttcaatgacatcagtaacttgattgcttcagaaatcatccgcaatgaggacatcaacgccagggtgagcgccatcgagaagtgggtggccgtagctgacatatgccgctgcctccacaactacaatgccgtactggagatcacctcgtccatgaaccgcagtgcaatcttccggctcaaaaagacgtggctcaaagtctctaagcagactaaagctttgattgataagctccaaaagcttgtgtcatctgagggcagatttaagaatctcagagaagctctgaaaaaatgttgcacccatctgtgctgtccagccgtctctcttctgcctgggctcccgagagcccctgtggactgtgcttgtggggagctgccccctccgtgcattcaccaacttgtccgtccgtccgcccccggggcaccactccatccacctcctcacatggctggcttcctcgtctgccgccgccaccaccgctgcctccactgcctctggggccccccattctgtctgagtccccaccctgaccgtcttccctctttcaggtggcctgtgggcccgtgtaagtgtctctcccacattcccctgctccctgcagcacagggcagaggtggcctgcgggcctctggaagctaagagctttatgcaaaccaggttctggacttgcagagacataggcagggcacacagaggagggagggactggggaaacctggggcaaatgcttcccgcaccccctctcctgaggctctaaggttttcacaaagagcggtgttgcatgaatactgagcgtctgtttcactaggcaggggacgggggcaagagtagcgaggtggcagtccatgggcatagccaatgacctccccagagaaggagtcctgctatgggcctcaccatgttggtctgcagcccattcatacgtcccaggcatctttttttagcttttcattaagatatccaattcgggctaggcacagtggctcatgcctataatcccagcactttaggaggccgaggtgggcagatcacttgaggtcaggagctagaaaccaaccttgccaacatggcaaaaccctgtctctactgaaaatacaaaaattagccaggcgt

SEQ ID NO: 17434 - DNA, 1521 bp, Homo sapiens
  source 1..1521: mol_type = unassigned DNA
cttgaagagcacacacagatctcttcctgtcagaatggagacttagattgtccttctcagtagacaaatttctcagcagaaatctgaccccaagattgggcgtgtgcttggcctccggggcctgtgtcccctccaggctgactagggctctggtggcgtgacgtaccgctgtgctcccgcggtttctcagccacattctgaatcttgaggaacagagctgcaaaggaagtctctaacctatctcaccattttatcaatgagggagctgaggacccctgagggaaagggccttccctcgggctacacagggaaaggtgcacaaagccaggcttgacccggggtgctccatgggtcagacaaactccagccaccgaaactctgctccagcctgatgtgtgcgctgggcctggcgaggtcgcttggcaaagccctttgctgtggagcttcctcttctccagccaggccttttcttttctgatgatcagttcgtctcccatcttttttcttgatccttaaatttgggtggcatttctggtgtgaaaaggggaacgtgtgaaatgacggtcacatcctttgggtctagttcatgagaaagatcaggaaaatgaaaaatctgccatttcctgctctgagcgcaggctcctgggagtcacccactaagtccttctaaactgcccaggtctcgggatcctgcagcatttccaagggccaaatccacactcaggtccctcacacccacttccttgcttctgagagatgtgggagcacaggcacactcaacaaggacccgtgcccaactcctgaggagttcaggggcaaggtgcccaaacacaggaggcccccagatcccaagggaaggcaattctggagccctgttgggcagcatgttggagtgtgggcctgatccccgggcctcggggatcacagcgtgtgctgtgtgttagtaaatgcttctgcttccttctagactaaagctttgattgataagctccaaaagcttgtgtcatctgagggcagatttaagaatctcagagaagctctgaaaaagtaagtgtgtgtcgttttgtcgctgttatttttaaaatcatagacctgcattgcagaggcattcacgtgccgcccccagccagagcaggaggtctttctgtctgtctgttcgtctgtctacccacaagacccctagatttcctggaccccaatggtggagtcctccatggtctgccagagaaactccagagtttgctagcatttcctgagagaagcacaggaatactgctgggatccctgaaagcatagtagctgtgatgataatagtagtggtgccagatttctcgattctaaaatgcacgttttcttttcacattttaataattctgacatcaggagacgtcttaacgtcagttttgtttatttaacacaattgtgtttcctttttcactccagaattcatcatcaaaatgtttgcattttataaacaatggcatccgggaattaaaaaaatacagttttacaataatcata

SEQ ID NO: 17435 - DNA, 579 bp, Homo sapiens
  source 1..579: mol_type = unassigned DNA
ccttcttgtattttcaagcaggcaatcatatctgcaaatagtgaccatttatcatctttgcaatacttactcctctttttccctgtcttattgcatcggcttaaagatcagtaacttgattgcttcagaaatcatccgcaatgaggacatcaacgccagggtgagcgccatcgagaagtgggtggccgtagctgacatatgccgctgcctccacaactacaatgccgtactggagatcacctcgtccatgaaccgcagtgcaatcttccggctcaaaaagacgtggctcaaagtctctaagcagactaaagctttgattgataagctccaaaagcttgtgtcatctgagggcagatttaagaatctcagagaagctctgaaaaagtaagtgtgtgtcgttttgtcgctgttatttttaaaatcatagacctgcattgcagaggcattcacgtgccgcccccagccagagcaggaggtctttctgtctgtctgttcgtctgtctacccacaagacccctagatttcctggaccccaatggtggagtcctccatggtctgccagagaaactccagagtttg

SEQ ID NO: 17436 - DNA, 662 bp, Homo sapiens
  source 1..662: mol_type = unassigned DNA
ccactgcagagcagctcaaaaacagtaaccagagccacccatcacaccttcccggcaggactttgagaccaacgatgagctcaaatgcaaggtgatcggcttcctggaagaagtcatgcacgacccggagctcctgacccaggagcggaaggctgcagccaacatcatcaggactctgacccaggaggacccaggtgacaaccagatcacgctggaggagatcacgcagatggctgaaggcgtgaaggctgagccctttgaaaaccactcagccctggagatcgcggagcagctgaccctgctagatcacctcgtcttcaagaagattccttatgaggagttcttcggacaaggatggatgaaactggaaaagaatgaaaggaccccttatatcatgaaaaccactaagcacttcaatgacatcagtaacttgattgcttcagaaatcatccgcaatgaggacatcaacgccagggtgagcgccatcgagaagtgggtggccgtagctgacatatgccgctgcctccacaactacaatgccgtactggagatcacctcgtccatgaaccgcagtgcaatcttccggctcaaaaagacgtggctcaaagtctctaagcagactaaagctttgattgataagctccaaaagcttgtgtcatctg

SEQ ID NO: 17437 - DNA, 265 bp, Homo sapiens
  source 1..265: mol_type = unassigned DNA
ctcagaactgcctgctgggacaggagccctgccttctgcctccatgtgggctggtcagaggcccgggaggtgaagagcgcccttgtcaaggacagccccaagtaggagtgctggggtagaggactctgacccaggaggacccaggtgacaaccagatcacgctggaggagatcacgcagatggctgaaggcgtgaaggctgagccctttgaaaaccactcagccctggagatcgcggagcagctgaccctgctagatcacctcgt

SEQ ID NO: 17438 - DNA, 5023 bp, Homo sapiens
  source 1..5023: mol_type = unassigned DNA
acaaagtttgtgcctgcggtgcacctcggtcgggctcgccgggctcgagggctggcgggcgccggggctacgaggcccgggggggagagagccggcaggcggcggcggtggtggcgggggcgatgcgccgcgcccggccgcgctaggtgagccggcaccgggagcgcgggccgcggccatgggcaccctgggcaaggcgagagaggctccgcggaaaccttcccatggctgcagagctgcctctaaagcaagactagaggcaaagccagccaacagccccttcccctcccatcccagcttggcccacatcacccagttccgaatgatggtgtctctgggacatttagccaaaggagccagcctggacgatctcattgacagctgcattcaatcttttgatgcagatggaaacctgtgtcgaagtaaccaactgttgcaagtcatgctgaccatgcaccgaattgtcatctcctctgcagaactgctccaaaaagttatcaccctctataaggatgctttggcaaagaattcaccaggactttgcctgaagatctgttattttgtaaggtattggataacagaattctgggtcatgtttaaaatggacgccagcttgacagacactatggaggagtttcaggaactggtgaaagctaagggtgaggagttacattgccgcctgattgacacaactcaaatcaatgcccgtgactggtccaggaaacttactcaaaggataaaatcaaataccagcaagaaacggaaagtctccctgctctttgaccatctggaaccagaagagctatccgagcacctcacctaccttgagttcaagtctttccggaggatatcgttctctgattatcagaattaccttgtaaatagctgtgtgaaggaaaaccccaccatggagcgatctattgctctgtgcaacggcatctcccagtgggtacaactgatggttctcagccgccccacgccgcagctccgagcagaagtcttcatcaagttcatccaggtggctcagaagctccaccaactacagaacttcaatacactgatggctgtgataggtgggctgtgtcacagctcaatctcgaggctcaaggagacaagttcgcatgtcccacatgaaatcaataaggttctcggtgagatgactgagctgctgtcctcctccagaaactacgacaattaccggcgagcctatggagagtgcaccgacttcaagatccccattctgggtgtgcatctcaaggacctcatctccctgtatgaagccatgcctgactatctggaggacgggaaagtgaacgtccataagctactggccctatacaatcatatcagtgaattggtccagctgcaagaggtggccccacccttggaggctaacaaggacttggtacacttgctgacgttatccctggatctttactacactgaggatgaaatctatgagctttcctatgcccgggaaccaaggaaccacagagctccaccactaacaccttcaaagccaccagtagtagtggactgggcttctggagtgtctcccaaacctgatccaaaaaccattagcaaacacgtccagaggatggtggattctgtcttcaagaactatgatcacgaccaggatggatacatttctcaggaagaatttgaaaagattgctgcgagttttccattttccttctgtgtgatggacaaagacagggaaggcctcatcagcagggatgagatcacagcctacttcatgagagccagctcaatctattccaagctgggcctgggctttcctcacaacttccaagagaccacctacctgaagcccactttttgtgacaactgtgctggatttctctggggagtgatcaaacaaggatatcgatgtaaagactgcgggatgaactgtcacaaacaatgcaaagatctggttgtgtttgagtgtaagaagcgagccaagaacccagtagctcccacagagaacaacacttctgtggggccagtgtccaacctttgctcattgggagccaaagatctgctccatgcacctgaggaaggaccttttacattccctaatggggaggctgtggaacatggtgaggagagtaaggatcggaccatcatgctgatgggagtgtcctcacagaagatttctcttcggctgaagagggctgttgcccacaaggccacccagactgaatcacagccttggattggcagtgagggcccttcaggtccctttgtgctgtcttccccaaggaagacagcccaggatactctatatgtgcttcccagtcccacctctccatgtcctagcccagtcttggtcagaaagcgggcttttgtcaagtgggagaataaagactccctcataaaatcaaaggaggagctccgtcacctcagactgcctacctaccaagaactggaacaggaaataaatactctgaaagcagataatgatgccctaaagatccaactgaaatatgcacagaagaaaatagaatccctccagcttgaaaaaagcaatcatgtcttagctcaaatggagcagggtgactgttcttagcccagaaactaagtagcacaatctgtagatgagtatagtgatctcatttcctaaactgtaatgcacagacctgaggaactttacactgaccagctttaaaacagtactttaaaaggaaaagcctgttactgtttatttacctaaaagattcctaatgtgcagcactgttttctctttcagttagttgactcaaagggggaaaactaaagaatgcaaaacttttgctattcataccactgatgttcatcaaaagtatgcgatctaaaacatgactatcatttcctgacaatggggcatctcggtggcctgcctggctgattcttccttaaaactaaaatctctggaaaatggatttgcttcttaccctgtgttttctgcaaactgacttactttgttccagccaaagcttgctaataatagaaaactacccatattccaaaagtagatttcctctgtatcccagcatactttgtgaacctggctccttcttcactacctcagatctaatcaattagtccatgtaccctccttcctcactacagtcataacacatgagcatatctacctagaagccaatttctactgatgtagccacaactttttagaggcctattaaacatgacgttatccaattgcaggtcaacttatagttgtagccttacaacttacaggcatcagaaaataagtaatcaaattaggtacctggaaacatagctattaccatctcatattactgtctaattaaaataaacataacgcaaacatgtttgtccttatatattctacagtggatagaattaggaattgatggcttaaaaaaaaaagtctatgaagagtctgtttaactcttcatgttccatctttctcttctgaagtaaactattttgaaagttctctttttgaaatgaatttgtgcttaactgtcttcactattaatactatttagaaataagctaattggatcagtggcttaaataatagctgactgtgtgtacatatgtatataatatgtatatacaatatcaggcatgcatgtggcttggaattttgtttcctccataaaatgtggaagtgaattaaacaagttttagtcatttatacaaagtcacaaatataaagttcagtttgtcacaagattaaattgctcacaaggtaaaattgtattgtttggcaaaatcacaagtaacaatcctgtgagttttctattatgaaggttaataataaatgggctcatttagttgcctgggcacctattcacaaattcatttgtcagcctctttttagttctcttaaaaaaaaaaaaatcatatgatcattttcctttttgggggtacttagcttccatgcctataaagtctggtaccagactgacttgaaattcataaacaagttgtccaattgccaagaatatgttaacaattaaaagttccaaactaaagccaatagcaccaagtcttcataagaatacaaagtatacatacagtattgcttacctggaggattcagatcatttaggaattctctttgatgaaagatcagttcccatttgagttcctccttgcactgagttttagtgatatagaactagcttgtagttagtgtttcattacattataaagaatagttttacacacgtatttaccgttttccaaatttaaactcagaaatacccaaagcaggcctgcttaagcccactacctggcatataaacttatagtaacactttgttactttctttttaataggacaagcatgagttaggacaaactctaaaaattcatattcttcactattcttgttttcctttgattgatatagaccaaagatggtgtactctaattttttaaaacagtaatggaacacaatttttttcattcttcctcctctccattcgaagtaaagatccccagttagtttttatataaataatctatagggattcaaaaggtgtcacagtccacttaattagtcaaattagcaatggctaaacagtatcaagtactgcagaatttatcactgaaatggataagaggaaatagtttagtcacaggtttttacagtccagcaagggccaaagaggtatagtatacaagttaatagtatttgtgttgagcaacatggggctagtgggatcacagaaatctggaaaaaaaaaaaaaaggctttggcttatcaagcctagtgtaaatttctgcatctcacacgactttagtttggccaggtatttatctgccaaaacaaggacaaatcttgttgtattaacagcagggtcacttctcattttctttgctgacttacctttttactgaccgttgtgaatttctgtctcaaaatgtataatatagaaatgcaagaaaaaaacaaatgtacagattgtaaagttttttgatacctaatgtaagttttctttgtgtaatatttatatgataaaagacattaggatccctacaa

SEQ ID NO: 17439 - DNA, 2895 bp, Homo sapiens
  source 1..2895: mol_type = unassigned DNA
attcccttcctctccaatctgccttcagagcgtggagctgcccgtttgtcccctcactgccttctctctttccccaggaaaccttcccatggctgcagagctgcctctaaagcaagactagaggcaaagccagccaacagccccttcccctcccatcccagcttggcccacatcacccagttccgaatgatggtgtctctgggacatttagccaaaggagccagcctggacgatctcattgacagctgcattcaatcttttgatgcagatggaaacctgtgtcgaagtaaccaactgttgcaagtcatgctgaccatgcaccgaattgtcatctcctctgcagaactgctccaaaaagttatcaccctctataaggatgctttggcaaagaattcaccaggactttgcctgaagatctgttattttgtaaggtattggataacagaattctgggtcatgtttaaaatggacgccagcttgacagacactatggaggagtttcaggaactggtgaaagctaagggtgaggagttacattgccgcctgattgacacaactcaaatcaatgcccgtgactggtccaggaaacttactcaaaggataaaatcaaataccagcaagaaacggaaagtctccctgctctttgaccatctggaaccagaagagctatccgagcacctcacctaccttgagttcaagtctttccggaggatatcgttctctgattatcagaattaccttgtaaatagctgtgtgaaggaaaaccccaccatggagcgatctattgctctgtgcaacggcatctcccagtgggtacaactgatggttctcagccgccccacgccgcagctccgagcagaagtcttcatcaagttcatccaggtggctcagaagctccaccaactacagaacttcaatacactgatggctgtgataggtgggctgtgtcacagctcaatctcgaggctcaaggagacaagttcgcatgtcccacatgaaatcaataaggttctcggtgagatgactgagctgctgtcctcctccagaaactacgacaattaccggcgagcctatggagagtgcaccgacttcaagatccccattctgggtgtgcatctcaaggacctcatctccctgtatgaagccatgcctgactatctggaggacgggaaagtgaacgtccataagctactggccctatacaatcatatcagtgaattggtccagctgcaagaggtggccccacccttggaggctaacaaggacttggtacacttgctgacgttatccctggatctttactacactgaggatgaaatctatgagctttcctatgcccgggaaccaaggaaccacagagctccaccactaacaccttcaaagccaccagtagtagtggactgggcttctggagtgtctcccaaacctgatccaaaaaccattagcaaacacgtccagaggatggtggattctgtcttcaagaactatgatcacgaccaggatggatacatttctcaggaagaatttgaaaagattgctgcgagttttccattttccttctgtgtgatggacaaagacagggaaggcctcatcagcagggatgagatcacagcctacttcatgagagccagctcaatctattccaagctgggcctgggctttcctcacaacttccaagagaccacctacctgaagcccactttttgtgacaactgtgctggatttctctggggagtgatcaaacaaggatatcgatgtaaagactgcgggatgaactgtcacaaacaatgcaaagatctggttgtgtttgagtgtaagaagcgagccaagaacccagtagctcccacagagaacaacacttctgtggggccagtgtccaacctttgctcattgggagccaaagatctgctccatgcacctgaggaaggaccttttacattccctaatggggaggctgtggaacatggtgaggagagtaaggatcggaccatcatgctgatgggagtgtcctcacagaagatttctcttcggctgaagagggctgttgcccacaaggccacccagactgaatcacagccttggattggcagtgagggcccttcaggtccctttgtgctgtcttccccaaggaagacagcccaggatactctatatgtgcttcccagtcccacctctccatgtcctagcccagtcttggtcagaaagcgggcttttgtcaagtgggagaataaagactccctcataaaatcaaaggaggagctccgtcacctcagactgcctacctaccaagaactggaacaggaaataaatactctgaaagcagataatgatgccctaaagatccaactgaaatatgcacagaagaaaatagaatccctccagcttgaaaaaagcaatcatgtcttagctcaaatggagcagggtgactgttcttagcccagaaactaagtagcacaatctgtagatgagtatagtgatctcatttcctaaactgtaatgcacagacctgaggaactttacactgaccagctttaaaacagtactttaaaaggaaaagcctgttactgtttatttacctaaaagattcctaatgtgcagcactgttttctctttcagttagttgactcaaagggggaaaactaaagaatgcaaaacttttgctattcataccactgatgttcatcaaaagtatgcgatctaaaacatgactatcatttcctgacaatggggcatctcggtggcctgcctggctgattcttccttaaaactaaaatctctggaaaatggatttgcttcttaccctgtgttttctgcaaactgacttactttgttccagccaaagcttgctaataatagaaaactacccatattccaaaagtagatttcctctgtatc

SEQ ID NO: 17440 - DNA, 2707 bp, Homo sapiens
  source 1..2707: mol_type = unassigned DNA
ctattgagattatcagcactatcacctggacaagcagcggatgggccgcccctcttggccaggtcttctgtgcgcactgacgttgtatgaaagttgtccccacatctcctacacccaccgacgccaggcggccgcgtctgggccagatatggatcacgcctgtggagcgcacctccacacaggcagccctcgtccaaggtgcagggcgcagggcacagggcacatgtctacggcccagtcctgcagacggctacctagagaccccagggcacaggaaaccttcccatggctgcagagctgcctctaaagcaagactagaggcaaagccagccaacagccccttcccctcccatcccagcttggcccacatcacccagttccgaatgatggtgtctctgggacatttagccaaaggagccagcctggacgatctcattgacagctgcattcaatcttttgatgcagatggaaacctgtgtcgaagtaaccaactgttgcaagtcatgctgaccatgcaccgaattgtcatctcctctgcagaactgctccaaaaagttatcaccctctataaggatgctttggcaaagaattcaccaggactttgcctgaagatctgttattttgtaaggtattggataacagaattctgggtcatgtttaaaatggacgccagcttgacagacactatggaggagtttcaggaactggtgaaagctaagggtgaggagttacattgccgcctgattgacacaactcaaatcaatgcccgtgactggtccaggaaacttactcaaaggataaaatcaaataccagcaagaaacggaaagtctccctgctctttgaccatctggaaccagaagagctatccgagcacctcacctaccttgagttcaagtctttccggaggatatcgttctctgattatcagaattaccttgtaaatagctgtgtgaaggaaaaccccaccatggagcgatctattgctctgtgcaacggcatctcccagtgggtacaactgatggttctcagccgccccacgccgcagctccgagcagaagtcttcatcaagttcatccaggtggctcagaagctccaccaactacagaacttcaatacactgatggctgtgataggtgggctgtgtcacagctcaatctcgaggctcaaggagacaagttcgcatgtcccacatgaaatcaataaggttctcggtgagatgactgagctgctgtcctcctccagaaactacgacaattaccggcgagcctatggagagtgcaccgacttcaagatccccattctgggtgtgcatctcaaggacctcatctccctgtatgaagccatgcctgactatctggaggacgggaaagtgaacgtccataagctactggccctatacaatcatatcagtgaattggtccagctgcaagaggtggccccacccttggaggctaacaaggacttggtacacttgctgacgttatccctggatctttactacactgaggatgaaatctatgagctttcctatgcccgggaaccaaggaaccacagagctccaccactaacaccttcaaagccaccagtagtagtggactgggcttctggagtgtctcccaaacctgatccaaaaaccattagcaaacacgtccagaggatggtggattctgtcttcaagaactatgatcacgaccaggatggatacatttctcaggaagaatttgaaaagattgctgcgagttttccattttccttctgtgtgatggacaaagacagggaaggcctcatcagcagggatgagatcacagcctacttcatgagagccagctcaatctattccaagctgggcctgggctttcctcacaacttccaagagaccacctacctgaagcccactttttgtgacaactgtgctggatttctctggggagtgatcaaacaaggatatcgatgtaaagactgcgggatgaactgtcacaaacaatgcaaagatctggttgtgtttgagtgtaagaagcgagccaagaacccagtagctcccacagagaacaacacttctgtggggccagtgtccaacctttgctcattgggagccaaagatctgctccatgcacctgaggaaggaccttttacattccctaatggggaggctgtggaacatggtgaggagagtaaggatcggaccatcatgctgatgggagtgtcctcacagaagatttctcttcggctgaagagggctgttgcccacaaggccacccagactgaatcacagccttggattggcagtgagggcccttcaggtccctttgtgctgtcttccccaaggaagacagcccaggatactctatatgtgcttcccagtcccacctctccatgtcctagcccagtcttggtcagaaagcgggcttttgtcaagtgggagaataaagactccctcataaaatcaaaggaggagctccgtcacctcagactgcctacctaccaagaactggaacaggaaataaatactctgaaagcagataatgatgccctaaagatccaactgaaatatgcacagaagaaaatagaatccctccagcttgaaaaaagcaatcatgtcttagctcaaatggagcagggtgactgttcttagcccagaaactaagtagcacaatctgtagatgagtatagtgatctcatttcctaaactgtaatgcacagacctga

SEQ ID NO: 17441 - DNA, 2296 bp, Homo sapiens
  source 1..2296: mol_type = unassigned DNA
cgcggccatgggcaccctgggcaaggcgagagaggctccgcggaaaccttcccatggctgcagagctgcctctaaagcaagactagaggcaaagccagccaacagccccttcccctcccatcccagcttggcccacatcacccagttccgaatgatggtgtctctgggacatttagccaaaggagccagcctggacgatctcattgacagctgcattcaatcttttgatgcagatggaaacctgtgtcgaagtaaccaactgttgcaagtcatgctgaccatgcaccgaattgtcatctcctctgcagaactgctccaaaaagttatcaccctctataaggatgctttggcaaagaattcaccaggactttgcctgaagatctgttattttgtaaggtattggataacagaattctgggtcatgtttaaaatggacgccagcttgacagacactatggaggagtttcaggaactggtgaaagctaagggtgaggagttacattgccgcctgattgacacaactcaaatcaatgcccgtgactggtccaggaaacttactcaaaggataaaatcaaataccagcaagaaacggaaagtctccctgctctttgaccatctggaaccagaagagctatccgagcacctcacctaccttgagttcaagtctttccggaggatatcgttctctgattatcagaattaccttgtaaatagctgtgtgaaggaaaaccccaccatggagcgatctattgctctgtgcaacggcatctcccagtgggtacaactgatggttctcagccgccccacgccgcagctccgagcagaagtcttcatcaagttcatccaggtggctcagaagctccaccaactacagaacttcaatacactgatggctgtgataggtgggctgtgtcacagctcaatctcgaggctcaaggagacaagttcgcatgtcccacatgaaatcaataaggttctcggtgagatgactgagctgctgtcctcctccagaaactacgacaattaccggcgagcctatggagagtgcaccgacttcaagatccccattctgggtgtgcatctcaaggacctcatctccctgtatgaagccatgcctgactatctggaggacgggaaagtgaacgtccataagctactggccctatacaatcatatcagtgaattggtccagctgcaagaggtggccccacccttggaggctaacaaggacttggtacacttgctgacgttatccctggatctttactacactgaggatgaaatctatgagctttcctatgcccgggaaccaaggaaccacagagctccatctgtcttcaagaactatgatcacgaccaggatggatacatttctcaggaagaatttgaaaagattgctgcgagttttccattttccttctgtgtgatggacaaagacagggaaggcctcatcagcagggatgagatcacagcctacttcatgagagccagctcaatctattccaagctgggcctgggctttcctcacaacttccaagagaccacctacctgaagcccactttttgtgacaactgtgctggatttctctggggagtgatcaaacaaggatatcgatgtaaagactgcgggatgaactgtcacaaacaatgcaaagatctggttgtgtttgagtgtaagaagcgagccaagaacccagtagctcccacagagaacaacacttctgtggggccagtgtccaacctttgctcattgggagccaaagatctgctccatgcacctgaggaaggaccttttacattccctaatggggaggctgtggaacatggtgaggagagtaaggatcggaccatcatgctgatgggagtgtcctcacagaagatttctcttcggctgaagagggctgttgcccacaaggccacccagactgaatcacagccttggattggcagtgagggcccttcaggtccctttgtgctgtcttccccaaggaagacagcccaggatactctatatgtgcttcccagtcccacctctccatgtcctagcccagtcttggtcagaaagcgggcttttgtcaagtgggagaataaagactccctcataaaatcaaaggaggagctccgtcacctcagactgcctacctaccaagaactggaacaggaaataaatactctgaaagcagataatgatgccctaaagatccaactgaaatatgcacagaagaaaatagaatccctccagcttgaaaaaagcaatcatgtcttagctcaaatggagcagggtgactgttcttag

SEQ ID NO: 17442 - DNA, 1910 bp, Homo sapiens
  source 1..1910: mol_type = unassigned DNA
cgcggccatgggcaccctgggcaaggcgagagaggctccgcggaaaccttcccatggctgcagagctgcctctaaagcaagactagaggcaaagccagccaacagccccttcccctcccatcccagcttggcccacatcacccagttccgaatgatggtgtctctgggacatttagccaaaggagccagcctggacgatctcattgacagctgcattcaatcttttgatgcagatggaaacctgtgtcgaagtaaccaactgttgcaagtcatgctgaccatgcaccgaattgtcatctcctctgcagaactgctccaaaaagttatcaccctctataaggatgctttggcaaagaattcaccaggactttgcctgaagatctgttattttgtaaggtattggataacagaattctgggtcatgtttaaaatggacgccagcttgacagacactatggaggagtttcaggaactggtgaaagctaagggtgaggagttacattgccgcctgattgacacaactcaaatcaatgcccgtgactggtccaggaaacttactcaaaggataaaatcaaataccagcaagaaacggaaagtctccctgctctttgaccatctggaaccagaagagctatccgagcacctcacctaccttgagttcaagtctttccggaggatatcgttctctgattatcagaattaccttgtaaatagctgtgtgaaggaaaaccccaccatggagcgatctattgctctgtgcaacggcatctcccagtgggtacaactgatggttctcagccgccccacgccgcagctccgagcagaagtcttcatcaagttcatccaggtggctcagaagctccaccaactacagaacttcaatacactgatggctgtgataggtgggctgtgtcacagctcaatctcgaggctcaaggagacaagttcgcatgtcccacatgaaatcaataaggttctcggtgagatgactgagctgctgtcctcctccagaaactacgacaattaccggcgagcctatggagagtgcaccgacttcaagatccccattctgggtgtgcatctcaaggacctcatctccctgtatgaagccatgcctgactatctggaggacgggaaagtgaacgtccataagctactggccctatacaatcatatcagtgaattggtccagctgcaagaggtggccccacccttggaggctaacaaggacttggtacacttgctgacgttatccctggatctttactacactgaggatgaaatctatgagctttcctatgcccgggaaccaaggaaccacagagctccatctgtcttcaagaactatgatcacgaccaggatggatacatttctcaggaagaatttgaaaagattgctgcgagttttccattttccttctgtgtgatggacaaagacagggaaggcctcatcagcagggatgagatcacagcctacttcatgagagccagctcaatctattccaagctgggcctgggctttcctcacaacttccaagagaccacctacctgaagcccactttttgtgacaactgtgctggatttctctggggagtgatcaaacaaggatatcgatgtaaagactgcgggatgaactgtcacaaacaatgcaaagatctggttgtgtttgagtgtaagaagcgagccaagaacccagtagctcccacagagaacaacacttctgtggggccagtgtccaacctttgctcattgggagccaaagatctgctccatggaaataaatactctgaaagcagataatgatgccctaaagatccaactgaaatatgcacagaagaaaatagaatccctccagcttgaaaaaagcaatcatgtcttagctcaaatggagcagggtgactgttcttag

SEQ ID NO: 17443 - DNA, 2151 bp, Homo sapiens
  source 1..2151: mol_type = unassigned DNA
cgcggccatgggcaccctgggcaaggcgagagaggctccgcggaaaccttcccatggctgcagagctgcctctaaagcaagactagaggcaaagccagccaacagccccttcccctcccatcccagcttggcccacatcacccagttccgaatgatggtgtctctgggacatttagccaaaggagccagcctggacgatctcattgacagctgcattcaatcttttgatgcagatggaaacctgtgtcgaagtaaccaactgttgcaagtcatgctgaccatgcaccgaattgtcatctcctctgcagaactgctccaaaaagttatcaccctctataaggatgctttggcaaagaattcaccaggactttgcctgaagatctgttattttgtaaggtattggataacagaattctgggtcatgtttaaaatggacgccagcttgacagacactatggaggagtttcaggaactggtgaaagctaagggtgaggagttacattgccgcctgattgacacaactcaaatcaatgcccgtgactggtccaggaaacttactcaaaggataaaatcaaataccagcaagaaacggaaagtctccctgctctttgaccatctggaaccagaagagctatccgagcacctcacctaccttgagttcaagtctttccggaggatatcgttctctgattatcagaattaccttgtaaatagctgtgtgaaggaaaaccccaccatggagcgatctattgctctgtgcaacggcatctcccagtgggtacaactgatggttctcagccgccccacgccgcagctccgagcagaagtcttcatcaagttcatccaggtggctcagaagctccaccaactacagaacttcaatacactgatggctgtgataggtgggctgtgtcacagctcaatctcgaggctcaaggagacaagttcgcatgtcccacatgaaatcaataaggttctcggtgagatgactgagctgctgtcctcctccagaaactacgacaattaccggcgagcctatggagagtgcaccgacttcaagatccccattctgggtgtgcatctcaaggacctcatctccctgtatgaagccatgcctgactatctggaggacgggaaagtgaacgtccataagctactggccctatacaatcatatcagtgaattggtccagctgcaagaggtggccccacccttggaggctaacaaggacttggtacacttgctgacgttatccctggatctttactacactgaggatgaaatctatgagctttcctatgcccgggaaccaaggaaccacagagctccatctgtcttcaagaactatgatcacgaccaggatggatacatttctcaggaagaatttgaaaagattgctgcgagttttccattttccttctgtgtgatggacaaagacagctctggggagtgatcaaacaaggatatcgatgtaaagactgcgggatgaactgtcacaaacaatgcaaagatctggttgtgtttgagtgtaagaagcgagccaagaacccagtagctcccacagagaacaacacttctgtggggccagtgtccaacctttgctcattgggagccaaagatctgctccatgcacctgaggaaggaccttttacattccctaatggggaggctgtggaacatggtgaggagagtaaggatcggaccatcatgctgatgggagtgtcctcacagaagatttctcttcggctgaagagggctgttgcccacaaggccacccagactgaatcacagccttggattggcagtgagggcccttcaggtccctttgtgctgtcttccccaaggaagacagcccaggatactctatatgtgcttcccagtcccacctctccatgtcctagcccagtcttggtcagaaagcgggcttttgtcaagtgggagaataaagactccctcataaaatcaaaggaggagctccgtcacctcagactgcctacctaccaagaactggaacaggaaataaatactctgaaagcagataatgatgccctaaagatccaactgaaatatgcacagaagaaaatagaatccctccagcttgaaaaaagcaatcatgtcttagctcaaatggagcagggtgactgttcttag

SEQ ID NO: 17444 - DNA, 1757 bp, Homo sapiens
  source 1..1757: mol_type = unassigned DNA
cgcggccatgggcaccctgggcaaggcgagagaggctccgcggaaaccttcccatggctgcagagctgcctctaaagcaagactagaggcaaagccagccaacagccccttcccctcccatcccagcttggcccacatcacccagttccgaatgatggtgtctctgggacatttagccaaaggagccagcctggacgatctcattgacagctgcattcaatcttttgatgcagatggaaacctgtgtcgaagtaaccaactgttgcaagtcatgctgaccatgcaccgaattgtcatctcctctgcagaactgctccaaaaagttatcaccctctataaggatgctttggcaaagaattcaccaggactttgcctgaagatctgttattttgtaaggtattggataacagaattctgggtcatgtttaaaatggacgccagcttgacagacactatggaggagtttcaggaactggtgaaagctaagggtgaggagttacattgccgcctgattgacacaactcaaatcaatgcccgtgactggtccaggaaacttactcaaaggataaaatcaaataccagcaagaaacggaaagtctccctgctctttgaccatctggaaccagaagagctatccgagcacctcacctaccttgagttcaagtctttccggaggatatcgttctctgattatcagaattaccttgtaaatagctgtgtgaaggaaaaccccaccatggagcgatctattgctctgtgcaacggcatctcccagtgggtacaactgatggttctcagccgccccacgccgcagctccgagcagaagtcttcatcaagttcatccaggtggctcagaagctccaccaactacagaacttcaatacactgatggctgtgataggtgggctgtgtcacagctcaatctcgaggctcaaggagacaagttcgcatgtcccacatgaaatcaataaggttctcggtgagatgactgagctgctgtcctcctccagaaactacgacaattaccggcgagcctatggagagtgcaccgacttcaagatccccattctgggtgtgcatctcaaggacctcatctccctgtatgaagccatgcctgactatctggaggacgggaaagtgaacgtccataagctactggccctatacaatcatatcagtgaattggtccagctgcaagaggtggccccacccttggaggctaacaaggacttggtacacttgctgacgttatccctggatctttactacactgaggatgaaatctatgagctttcctatgcccgggaaccaaggaaccacagagctccatctgtcttcaagaactatgatcacgaccaggatggatacatttctcaggaagaatttgaaaagattgctgcgagttttccattttccttctgtgtgatggacaaagacagggaaggcctcatcagcagggatgagatcacagcctacttcatgagagccagctcaatctattccaagctgggcctgggctttcctcacaacttccaagagaccacctacctgaagcccactttttgtgacaactgtgctggatttctctggggagtgatcaaacaaggatatcgatgtaaaggaaataaatactctgaaagcagataatgatgccctaaagatccaactgaaatatgcacagaagaaaatagaatccctccagcttgaaaaaagcaatcatgtcttagctcaaatggagcagggtgactgttcttag

SEQ ID NO: 17445 - DNA, 792 bp, Homo sapiens
  source 1..792: mol_type = unassigned DNA
gagaccacctacctgaagcccactttttgtgacaactgtgctggatttctctggggagtgatcaaacaaggatatcgatgtaaagatatcaggatactgcttctgatgctgagattcactgataagggctacatcaagagtgtgagctctgggcttcaccaagtgagaagaatgctagcttcattaggaatgttaagtgtcttagctccagaagatagaacagacatgtgtgacaagaaagcactgcatgaatttggttgtgagacacactggggaagagagaaaagtgaaagacttcttgacccaggatgtcttgtccacagactgcgggatgaactgtcacaaacaatgcaaagatctggttgtgtttgagtgtaagaagcgagccaagaacccagtagctcccacagagaacaacacttctgtggggccagtgtccaacctttgctcattgggagccaaagatctgctccatgcacctgaggaaggaccttttacattccctaatggggaggctgtggaacatggtgaggagagtaaggatcggaccatcatgctgatgggagtgtcctcacagaagatttctcttcggctgaagagggctgttgcccacaaggccacccagactgaatcacagccttggattggcagtgagggcccttcaggtccctttgtgctgtcttccccaaggaagacagcccaggatactctatatgtgcttcccagtcccacctctccatgtcctagcccagtcttggtcagaaagcgggcttttgtcaagtgggagaataa

SEQ ID NO: 17446 - DNA, 843 bp, Homo sapiens
  source 1..843: mol_type = unassigned DNA
cagaacttcaatacactgatggctgtgataggtgggctgtgtcacagctcaatctcgaggctcaaggagacaagttcgcatgtcccacatgaaatcaataaggttctcggtgagatgactgagctgctgtcctcctccagaaactacgacaattaccggcgagcctatggagagtgcaccgacttcaagatccccattctgggtgtgcatctcaaggacctcatctccctgtatgaagccatgcctgactatctggaggacgggaaagtgaacgtccataagctactggccctatacaatcatatcagtgaattggtccagctgcaagaggtggccccacccttggaggctaacaaggacttggtacacttgctgacgttatccctggatctttactacactgaggatgaaatctatgagctttcctatgcccgggaaccaaggaaccacagagctccatctgtcttcaagaactatgatcacgaccaggatggatacatttctcaggaagaatttgaaaagattgctgcgagttttccattttccttctgtgtgatggacaaagacagggcccatggaagtaatcatgaggtagcacataccatattaccactgaggataaaaagaaagggaaggcctcatcagcagggatgagatcacagcctacttcatgagagccagctcaatctattccaagctgggcctgggctttcctcacaacttccaagagaccacctacctgaagcccactttttgtgacaactgtgctggatttctctggggagtgatcaaacaaggatatcgatgtaaagactgcgggatgaactgtcacaaacaatgcaa

SEQ ID NO: 17447 - DNA, 547 bp, Homo sapiens
  source 1..547: mol_type = unassigned DNA
ttccccttcaggaagtgggagacagtaggacagagcaatcctaatgccaggatgaagagcactagttgcaaccctgaaatctcacctttgctggggagatgtctctttaacagccaaccagtcatttggtgcatttgccaagtgggaggggaaaccttcccatggctgcagagctgcctctaaagcaagactagaggcaaagccagccaacagccccttcccctcccatcccagcttggcccacatcacccagttccgaatgatggtgtctctgggacatttagccaaaggagccagcctggacgatctcattgacagctgcattcaatcttttgatgcagatggaaacctgtgtcgaagtaaccaactgttgcaagtcatgctgaccatgcaccgaattgtcatctcctctgcagaactgctccaaaaagttatcaccctctataaggatgctttggcaaagaattcaccaggactttgcctgaagatctgttattttgtaaggtattggataacagaattctgggtcatgtttaaaatggacgcc

SEQ ID NO: 17448 - DNA, 548 bp, Homo sapiens
  source 1..548: mol_type = unassigned DNA
tatacaggagaggccctggaggggagaaggcgtcctcactgcagtgctccgagcagcggccgcaggaagaggcgtggaagctgcgggtcggctgcgggaaagggggtcccatgggagccgctaggcgcagcccgtttcccgagctgaggtggaggtcgacgggcacaggtgccctgcaaggcgcgggcgtggtagccgggagcccgctcctctccaactcccctgagacttaaccctttggccaagagaggtcgaaggcgggcaggggaaaccttcccatggctgcagagctgcctctaaagcaagactagaggcaaagccagccaacagccccttcccctcccatcccagcttggcccacatcacccagttccgaatgatggtgtctctgggacatttagccaaaggagccagcctggacgatctcattgacagctgcattcaatcttttgatgcagatggaaacctgtgtcgaagtaaccaactgttgcaagtcatgctgaccatgcaccgaattgtcatctcctctgcagaactgctccaaaaag

SEQ ID NO: 17449 - DNA, 304 bp, Homo sapiens
  source 1..304: mol_type = unassigned DNA
ggcgtggaagctgcgggtcggctgcgggaaagggggtcccatgggagccgctaggcgcagcccgtttcccgagctgaggtggaggtcgacgggcacaggaaaccttcccatggctgcagagctgcctctaaagcaagactagaggcaaagccagccaacagccccttcccctcccatcccagcttggcccacatcacccagttccgaatgatggtgtctctgggacatttagccaaaggagccagcctggacgatctcattgacagctgcattcaatcttttgatgcagatggaaacctgtgtc

SEQ ID NO: 17450 - DNA, 5021 bp, Homo sapiens
  source 1..5021: mol_type = unassigned DNA
acaaagtttgtgcctgcggtgcacctcggtcgggctcgccgggctcgagggctggcgggcgccggggctacgaggcccgggggggagagagccggcaggcggcggcggtggtggcgggggcgatgcgccgcgcccggccgcgctaggtgagccggcaccgggagcgcgggccgcggccatgggcaccctgggcaaggcgagagaggctccgcggaaaccttcccatggctgcagagctgcctctaaagcaagactagaggcaaagccagccaacagccccttcccctcccatcccagcttggcccacatcacccagttccgaatgatggtgtctctgggacatttagccaaaggagccagcctggacgatctcattgacagctgcattcaatcttttgatgcagatggaaacctgtgtcgaagtaaccaactgttgcaagtcatgctgaccatgcaccgaattgtcatctcctctgcagaactgctccaaaaagttatcaccctatatcctgatgctttggcaaagaattcaccaggactttgcctgaagatctgttattttgtaaggtattggataacagaattctgggtcatgtttaaaatggacgccagcttgacagacactatggaggagtttcaggaactggtgaaagctaagggtgaggagttacattgccgcctgattgacacaactcaaatcaatgcccgtgactggtccaggaaacttactcaaaggataaaatcaaataccagcaagaaacggaaagtctccctgctctttgaccatctggaaccagaagagctatccgagcacctcacctaccttgagttcaagtctttccggaggatatcgttctctgattatcagaattaccttgtaaatagctgtgtgaaggaaaaccccaccatggagcgatctattgctctgtgcaacggcatctcccagtgggtacaactgatggttctcagccgccccacgccgcagctccgagcagaagtcttcatcaagttcatccaggtggctcagaagctccaccaactacagaacttcaatacactgatggctgtgataggtgggctgtgtcacagctcaatctcgaggctcaaggagacaagttcgcatgtcccacatgaaatcaataaggttctcggtgagatgactgagctgctgtcctcctccagaaactacgacaattaccggcgagcctatggagagtgcaccgacttcaagatccccattctgggtgtgcatctcaaggacctcatctccctgtatgaagccatgcctgactatctggaggacgggaaagtgaacgtccataagctactggccctatacaatcatatcagtgaattggtccagctgcaagaggtggccccacccttggaggctaacaaggacttggtacacttgctgacgttatccctggatctttactacactgaggatgaaatctatgagctttcctatgcccgggaaccaaggaaccacagagctccaccactaacaccttcaaagccaccagtagtagtggactgggcttctggagtgtctcccaaacctgatccaaaaaccattagcaaacacgtccagaggatggtggattctgtcttcaagaactatgatcacgaccaggatggatacatttctcaggaagaatttgaaaagattgctgcgagttttccattttccttctgtgtgatggacaaagacagggaaggcctcatcagcagggatgagatcacagcctacttcatgagagccagctcaatctattccaagctgggcctgggctttcctcacaacttccaagagaccacctacctgaagcccactttttgtgacaactgtgctggatttctctggggagtgatcaaacaaggatatcgatgtaaagactgcgggatgaactgtcacaaacaatgcaaagatctggttgtgtttgagtgtaagaagcgagccaagaacccagtagctcccacagagaacaacacttctgtggggccagtgtccaacctttgctcattgggagccaaagatctgctccatgcacctgaggaaggaccttttacattccctaatggggaggctgtggaacatggtgaggagagtaaggatcggaccatcatgctgatgggagtgtcctcacagaagatttctcttcggctgaagagggctgttgcccacaaggccacccagactgaatcacagccttggattggcagtgagggcccttcaggtccctttgtgctgtcttccccaaggaagacagcccaggatactctatatgtgcttcccagtcccacctctccatgtcctagcccagtcttggtcagaaagcgggcttttgtcaagtgggagaataaagactccctcataaaatcaaaggaggagctccgtcacctcagactgcctacctaccaagaactggaacaggaaataaatactctgaaagcagataatgatgccctaaagatccaactgaaatatgcacagaagaaaatagaatccctccagcttgaaaaaagcaatcatgtcttagctcaaatggagcagggtgactgttcttagcccagaaactaagtagcacaatctgtagatgagtatagtgatctcatttcctaaactgtaatgcacagacctgaggaactttacactgaccagctttaaaacagtactttaaaaggaaaagcctgttactgtttatttacctaaaagattcctaatgtgcagcactgttttctctttcagttagttgactcaaagggggaaaactaaagaatgcaaaacttttgctattcataccactgatgttcatcaaaagtatgcgatctaaaacatgactatcatttcctgacaatggggcatctcggtggcctgcctggctgattcttccttaaaactaaaatctctggaaaatggatttgcttcttaccctgtgttttctgcaaactgacttactttgttccagccaaagcttgctaataatagaaaactacccatattccaaaagtagatttcctctgtatcccagcatactttgtgaacctggctccttcttcactacctcagatctaatcaattagtccatgtaccctccttcctcactacagtcataacacatgagcatatctacctagaagccaatttctactgatgtagccacaactttttagaggcctattaaacatgacgttatccaattgcaggtcaacttatagttgtagccttacaacttacaggcatcagaaaataagtaatcaaattaggtacctggaaacatagctattaccatctcatattactgtctaattaaaataaacataacgcaaacatgtttgtccttatatattctacagtggatagaattaggaattgatggcttaaaaaaaaaagtctatgaagagtctgtttaactcttcatgttccatctttctcttctgaagtaaactattttgaaagttctctttttgaaatgaatttgtgcttaactgtcttcactattaatactatttagaaataagctaattggatcagtggcttaaataatagctgactgtgtgtacatatgtatataatatgtatatacaatatcaggcatgcatgtggcttggaattttgtttcctccataaaatgtggaagtgaattaaacaagttttagtcatttatacaaagtcacaaatataaagttcagtttgtcacaagattaaattgctcacaaggtaaaattgtattgtttggcaaaatcacaagtaacaatcctgtgagttttctattatgaaggttaataataaatgggctcatttagttgcctgggcacctattcacaaattcatttgtcagcctctttttagttctcttaaaaaaaaaaaaatcatatgatcattttcctttttgggggtacttagcttccatgcctataaagtctggtaccagactgacttgaaattcataaacaagttgtccaattgccaagaatatgttaacaattaaaagttccaaactaaagccaatagcaccaagtcttcataagaatacaaagtatacatacagtattgcttacctggaggattcagatcatttaggaattctctttgatgaaagatcagttcccatttgagttcctccttgcactgagttttagtgatatagaactagcttgtagttagtgtttcattacattataaagaatagttttacacacgtatttaccgttttccaaatttaaactcagaaatacccaaagcaggcctgcttaagcccactacctggcatataaacttatagtaacactttgttactttctttttaataggacaagcatgagttaggacaaactctaaaaattcatattcttcactattcttgttttcctttgattgatatagaccaaagatggtgtactctaattttttaaaacagtaatggaacacaatttttttcattcttcctcctctccattcgaagtaaagatccccagttagtttttatataaataatctatagggattcaaaaggtgtcacagtccacttaattagtcaaattagcaatggctaaacagtatcaagtactgcagaatttatcactgaaatggataagaggaaatagtttagtcacaggtttttacagtccagcaagggccaaagaggtatagtatacaagttaatagtatttgtgttgagcaacatggggctagtgggatcacagaaatctggaaaaaaaaaaaaaaggctttggcttatcaagcctagtgtaaatttctgcatctcacacgactttagtttggccaggtatttatctgccaaaacaaggacaaatcttgttgtattaacagcagggtcacttctcattttctttgctgacttacctttttactgaccgttgtgaatttctgtctcaaaatgtataatatagaaatgcaagaaaaaaacaaatgtacagattgtaaagttttttgatacctaatgtaagttttctttgtgtaatatttatatgataaaagacattaggatccctac

SEQ ID NO: 17451 - DNA, 4738 bp, Homo sapiens
  source 1..4738: mol_type = unassigned DNA
atttagccaaacaacctttaattcattgagctcaaagcttagcagcttcaatgttgttgttaggcataaacagcttgcaaatttcaattttttttctctcctcacttttgaactagatttgggcaatggaggtgatgacagcattttagaagacagaacaggaattctaggtgtttaggcacgttgaagagaaacttgctagaggtgatgaagtggaaagaaaaagacaattcactatagggatcaacattattgcagttctgcaaaggatattttcttttaaaacatccatatctcttctttgccatggaaactacacccaatctacctgaacctgcggcacccctctgatgacccatttggattctctgatttcactgccaagattctcagttctccaaaatacttatcattcaggttgaataaaccagttctacagactgcttcttccatgcatttcccaatgatgctagctgcccttaaaattctttcagatttggaactgtatctgtatggaaacaacagagttttcttgaagtacaactaaggacaggtcaccactaggcactaacatcgctgacttgcatgattatggagatggtctatctgatgctgaaaatgtctctagttttttgacaacggctaaataaccatgggatcaagtggccttgggaaagcagcaacattagatgaactgctgtgcacttgcattgagatgtttgatgacaatggagagctggataatagttatttgccaagaatagttctactgatgcaccgatggtatttatcttccactgaattggcagaaaaacttctctgcatgtatcgaaatgccactggagaaagctgcaatgaatttcgattaaagatctgctacttcatgaggtactggattctgaagtttcctgcagagtttaatttggatcttggtttgattcgtatgactgaggaatttcgggaagtagctagtcaactaggatatgaaaaacacgtcagcctcatcgacatatccagcattccttcctatgactggatgagaagagtcacacagaggaaaaaagtatccaagaagggaaaagcctgtctgctgtttgaccatctggagcccattgaattggctgagcacctcacttttctggagcataaatcttttagaaggatctcattcactgattaccaaagctatgtcatccatggctgcctggagaataatccaaccttggaaagatcgattgctttatttaatggaatctctaagtgggtccagttgatggttcttagcaaaccaaccccccagcaaagggcagaagtcatcacaaagtttatcaatgttgcaaagaagctccttcagctcaaaaattttaacaccctgatggcagtggtgggaggcctcagtcatagttccatttcacgcctcaaagagacccattctcatctttcttcagaagttacaaagaactggaatgaaatgacagagttggtctcctccaacggcaattactgcaattaccgcaaggcctttgccgactgcgatggcttcaaaatccccatccttggagtacacttgaaagacttgatagctgtccatgtcattttcccagactggacagaggagaacaaagtgaacattgtgaaaatgcaccagctctccgttaccctgagtgaactagtctccctgcagaatgcctctcaccacttagaacccaacatggatttgatcaacctgctcacgctttccctggacctctatcacactgaagatgatatttacaaactgtcactggtgctggagcctagaaattctaaatcgcagcctacctcccctacgacgcccaacaagcctgtggtacccctggagtgggcattaggggtgatgccaaagccagaccccacggtcatcaacaagcacataaggaaattagtggagtctgtatttagaaactatgatcacgaccatgatgggtacatttcccaagaggactttgaaagtatagctgccaattttcccttcttggattccttctgtgttctggacaaagatcaggatggcctaattagtaaagatgaaatgatggcttacttcctgagagctaaatcccaactacactgtaaaatgggaccaggatttatccataattttcaggagatgacctatctcaagccaaccttctgcgaacactgtgcgggatttctctggggcataatcaagcaaggatacaaatgcaaagactgtggagccaattgtcacaaacagtgcaaagacctcctggttctggcctgcaggagatttgcccgggcgccctccttgagcagtggtcatgggtcactgcctggaagcccctcgctgcccccagcgcaggatgaggtgtttgagttccctggagtcactgctggacacagggatttagacagcagagccatcacactggttacaggctcttctcgcaagatctctgtgaggctacagagggccaccaccagccaggccacccagactgaacctgtctggtcagaggctggctggggggactcggggtcccacaccttccctaaaatgaaatccaagttccatgacaaagcagcaaaggacaaaggctttgccaaatgggaaaatgagaagcccagggtgcatgctggtgtggatgttgtagaccggggcacggagtttgaacttgaccaggatgaaggagaagagaccagacaggatggtgaggatggctgacttcaggctgcggaaactgaaggcaataatgttggcttttggaaggggcaagacgagaaactctgaagaaagctctgactctcaggaagttatctggaaagatacctggatgtttactgccttgggacactgtgggatctccatgtttggactatgggacagagaattgaccctaactaactaactatgaactatttatttcctcctcccctacccctagttaagtgccacaaagactgtgttatgtagtcagtacttttttctcatgtatctttctctagaccatttatatacgggtgaaatgaaagcttttttgcatgtacttgatactcagtctgtaaactcagacttcgctttttttgtgagactatcctttcaatatttttataaacttttgtgtgtgctgtggcagggaacagttaacaaggagtttatttagaggggtttttttcattttttgtttttcttgttttgttttgttttgttttgttcttcttggtgtgctttttggatgggaccagaacttaacattttcctgaggactaggaagctcatcagacactggaatgcagtgattcttctaatgatggtcaactgcaaggagaaactgtttacatccttcccactacacagttgctatgatatgtaacaagtcacacatgtatatatcacacaagtcttaccaattctgcgtcactaggaagctatagcatggtcgtgaaagctctcctaatacttacttaaatagccatggaagaaaattatgcttgtcccttctgactgggttaagccatctttcttaagattcctgaagtagaaatagcaattaagaaattaattcaagttttgacggttaacatttagcagaaaaacaaaccattgaataagctactaggtgaaatgcaaaacaaccatcaatttttttaaactcaataattttgtgaaaaaaaaaaccaccaccaaacttttggttgtaaaagagaacccttgttcccttcctaagaaactgccttccacaattaaagaatactcatagaaagaaaataatcataaatcatatttgattaacatttcatttaagcttttaaaatatcaattttttaaatagctcccatttacccaaaataactagttatgggtctatttcttccatgattagaggagagagaacttgattcaagatactgaaaaatagagctgggactgagcctgtgaatgacaggaatgatctattaccaggtgactagtcggaaactacacagacgtgcactggtctgcatttgggggctaaagtgtatatattccatttaaaatggaatttgtttgtatttggggcagtcttcagtaaagcctttctcctttcttttctccattgaggacagttctgctcagcaaaattgttgagtacctgttctgggcaggtcccacgctatatgcacaaagttaagaaaaacttggtcttagcccttgggagctgacagcccatgggcattaaggcaaagtagttccagtgatttaaaatacggttccaaatacgctaaaaccaacttgtgccaaccagatttacagattggaaatactgcagatgatgtgaagttatcagttggaggagctgtgattaagctggataataagagaacgtgccatctgtaaagcactcagaaggcagccatccctagatgttggtttcatgtatattacactatctactactatccataaatgcaataatatgcatgttaacaacattaaaaacagcaaacagcaatctaagtacagaaaagctttttgtgtgtttaaaaaaattgaagaaaattcaggaagaaacgtgttaataaacattgtactgttcttttgcttctcaaaggaattattcacttgccactttggttatttttgagttttcgtacataggaagttttatattgccagccttcctgtgataaagatattaaatgtaacttgagtaaaaaataaaaaagaataactatgtatatacatatataaattaca

SEQ ID NO: 17452 - DNA, 2144 bp, Homo sapiens
  source 1..2144: mol_type = unassigned DNA
ttagccaaacaacctttaattcattgagctcaaagcttagcagcttcaatgttgttgttaggcataaacagcttgcaaatttcaattttttttctctcctcacttttgaactagatttgggcaatggaggtgatgacagcattttagaagacagaacaggaattctaggtgtttaggcacgttgaagagaaacttgctagaggtgatgaagtggaaagaaaaagacaattcactatagggatcaacattattgcagttctgcaaaggatattttcttttaaaacatccatatctcttctttgccatggaaactacacccaatctacctgaacctgcggcacccctctgatgacccatttggattctctgatttcactgccaagattctcaatggagtttcactctgtcgcccaggctggagtgcagtggcacgatctcggctcactgcaagctccgcctcccgggttcacaccattcttctgcctcagcctcccgagtagctgggactacaggtgcccaccaccacgcctggctaatttttttgtatttttaatagagacggggtttcatcatgttagcaggatggtctcgatctcctgacctggtgatccacccacctcggcctcccaaagtgctgggattacaggcatgagccactgcgcctggcctagttatgctatctttcaaagaaagaccaatttcaactatttcatgaccatgcacttacacaatctgtggaattatctttggtgataaaaagttgtgtaatttgtattctcttcagataggcaaagagtgactggataaccgatttgcgacatgccactcatgatatttccaaagcctatggacatttgactttggaaacagggtcagcttagtcttcagacaccgtatttgcttaggataattttgtttgtttgttttttcagacagagtcccactctgtcacccaagctggagtgcagtggcacaatcttggctcactgcaacctctgcctcccaggttcaagcgattctcttgcctcagcctcctgagtagctgggactacaggcgtgcaccaccacacccagctaatttttgtgtttttagtagagatgggttttcaccatgttggccaggctggtctcgaactcctgacctcaggtgatccacccaccttggcttcccaaagtgctgggattataggcatgagccactgtgcctggctagcttagggtaatattttttttttttttgagatggagtctcgctttgtcgcccaggctggagtgcagtggcacaatctcggctcactgcaagctccgcctcccaggttcatgccattctcctgcctcagcctcccgagtagctgggactataggcgcccgccaccatgccgggctaatttttttgtatttttagtagagacagggtttcactgtgttagccaggatggtctcgatttcctgacctcgtgatctgcccgcctgggcctcccaaagtgcttggattagaggcgtgagccaccgtgccgggccgcagcttagggtaatgtttttaaaggaacttagtgatcatttttctgtcttgaagactcatatagtcaagttggagttataccaactatggcatgatgtaacgttaccttttagagacaatttggttgtttcctgaggtatgaaaactgcagtctgctcttcagtgtgcacgctccttgcccaacaaaaccatcggcattcttgaaagttctgcctgagtatagcacctttattcctgtggaggtatagtgcattctaactaccatgaatagtgtccactgtgatcatttccctctgcacgattatctgcccacaactgagagagtcttaacttgctagaataatggggacgcttcactatctgtcagtttcccaatatggcaattcagttcattgtatgacagcatcatcagaatgttgccaagatcataaaaatagcagtgcatgttgcctgatgattttacagtgcatattgtcatggccagggcttagaggtaggggaaaaacatgtggacagctttgtgacaagagtctctcttatagtgtttctttctaaagtaactttttctgagtatgaatgtgaaaggtagccttctttgaattaaaaaatattctgaaaaatg

SEQ ID NO: 17453 - DNA, 558 bp, Homo sapiens
  source 1..558: mol_type = unassigned DNA
ttttttctctcctcacttttgaactagatttgggcaatggaggtgatgacagcattttagaagacagaacaggaattctaggtgtttaggcacgttgaagagaaacttgctagaggtgatgaagtggaaagaaaaagacaattcactatagggatcaacattattgcagttctgcaaaggatattttcttttaaaacatccatatctcttctttgccatggaaactacacccaatctacctgaacctgcggcacccctctgatgacccatttggattctctgatttcactgccaagattctcaatggagtttcactctgtcgcccaggctggagtgcagtggcacgatctcggctcactgcaagctccgcctcccgggttcacaccattcttctgcctcagcctcccgagtagctgggactacaggttctccaaaatacttatcattcaggttgaataaaccagttctacagactgcttcttccatgcatttcccaatgatgctagctgcccttaaaattctttcagatttggaactgtatctgtatggaaacaacag

SEQ ID NO: 17454 - DNA, 631 bp, Homo sapiens
  source 1..631: mol_type = unassigned DNA
tcaacattattgcagttctgcaaaggatattttcttttaaaacatccatatctcttctttgccatggaaactacacccaatctacctgaacctgcggcacccctctgatgacccatttggattctctgatttcactgccaagattctcagttctccaaaatacttatcattcaggttgaataaaccagttctacagactgcttcttccatgcatttcccaatgatgctagctgcccttaaaattctttcagatttggaactgtatctgtatggaaacaacagagttttcttgaagtacaactaaggacaggtcaccactaggcactaacatcgctgacttgcatgattatggagatggtctatctgatgctgaaaatgtctctagttttttgacaacggctaaataaccatgggatcaagtggccttgggaaagcagcaacattagatgaactgctgtgcacttgcattgagatgtttgatgacaatggagagctggataatagttatttgccaagaatagttctactgatgcaccgatggtatttatcttccactgaattggcagaaaaacttctctgcatatatcttttcaactactgtgtaatttttacaatcataaatcaagctctg

SEQ ID NO: 17455 - DNA, 861 bp, Homo sapiens
  source 1..861: mol_type = unassigned DNA
gaaatagctgtctatcacaggcagctaggaactgcttgcccacttttttttgttctgaaagaaaggatacagaccatctgggccagttctccaaaatacttatcattcaggttgaataaaccagttctacagactgcttcttccatgcatttcccaatgatgctagctgcccttaaaattctttcagatttggaactgtatctgtatggaaacaacagagttttcttgaagtacaactaaggacaggtcaccactaggcactaacatcgctgacttgcatgattatggagatggtctatctgatgctgaaaatgtctctagttttttgacaacggctaaataaccatgggatcaagtggccttgggaaagcagcaacattagatgaactgctgtgcacttgcattgagatgtttgatgacaatggagagctggataatagttatttgccaagaatagttctactgatgcaccgatggtatttatcttccactgaattggcagaaaaacttctctgcatgtatcgaaatgccactggagaaagctgcaatgaatttcgattaaagatctgctacttcatgaggtactggattctgaagtttcctgcagagtttaatttggatcttggtttgattcgtatgactgaggaatttcgggaagtagctagtcaactaggatatgaaaaacacgtcagcctcatcgacatatccagcattccttcctatgactggatgagaagagtcacacagaggaaaaaagtatccaagaagggaaaagcctgtctgctgtttgaccatctggagcccattgaattggctgagcacctcacttttctggagcataaatcttttagaaggatctca

SEQ ID NO: 17456 - DNA, 4807 bp, Homo sapiens
  source 1..4807: mol_type = unassigned DNA
acagagcaacttccacctgctgtgcgagttggtgatcctctctcttgccgttcgagagccccagtgaaacttgagtgagatgagagagcatggagcctgccagtctccccctctgcgcacacacacacgcaaacacatttaactttccacttgcagtgacctgcccttcagtgtgacttatcagctgtttggcttttgtcactaaaggaaaacaaattgtggaatatcccgctctgcatgctcatgagatggctgagccaactcaggggttatgaggtggtttgcgagtgaggagaagaatgatcttcagtttctgacctcctggcacggtggcgggcggtatttatcaggaggtacatgtgactggttaagactcagagccccagcttgaaggaaacagctgctctcggcgtgctccggcacttggcagctggacaggcagagtgctgatgtgaaaaataccacgacaaaaccaccctagttctccaaaatacttatcattcaggttgaataaaccagttctacagactgcttcttccatgcatttcccaatgatgctagctgcccttaaaattctttcagatttggaactgtatctgtatggaaacaacagagttttcttgaagtacaactaaggacaggtcaccactaggcactaacatcgctgacttgcatgattatggagatggtctatctgatgctgaaaatgtctctagttttttgacaacggctaaataaccatgggatcaagtggccttgggaaagcagcaacattagatgaactgctgtgcacttgcattgagatgtttgatgacaatggagagctggataatagttatttgccaagaatagttctactgatgcaccgatggtatttatcttccactgaattggcagaaaaacttctctgcatgtatcgaaatgccactggagaaagctgcaatgaatttcgattaaagatctgctacttcatgaggtactggattctgaagtttcctgcagagtttaatttggatcttggtttgattcgtatgactgaggaatttcgggaagtagctagtcaactaggatatgaaaaacacgtcagcctcatcgacatatccagcattccttcctatgactggatgagaagagtcacacagaggaaaaaagtatccaagaagggaaaagcctgtctgctgtttgaccatctggagcccattgaattggctgagcacctcacttttctggagcataaatcttttagaaggatctcattcactgattaccaaagctatgtcatccatggctgcctggagaataatccaaccttggaaagatcgattgctttatttaatggaatctctaagtgggtccagttgatggttcttagcaaaccaaccccccagcaaagggcagaagtcatcacaaagtttatcaatgttgcaaagaagctccttcagctcaaaaattttaacaccctgatggcagtggtgggaggcctcagtcatagttccatttcacgcctcaaagagacccattctcatctttcttcagaagttacaaagaactggaatgaaatgacagagttggtctcctccaacggcaattactgcaattaccgcaaggcctttgccgactgcgatggcttcaaaatccccatccttggagtacacttgaaagacttgatagctgtccatgtcattttcccagactggacagaggagaacaaagtgaacattgtgaaaatgcaccagctctccgttaccctgagtgaactagtctccctgcagaatgcctctcaccacttagaacccaacatggatttgatcaacctgctcacgctttccctggacctctatcacactgaagatgatatttacaaactgtcactggtgctggagcctagaaattctaaatcgcagcctacctcccctacgacgcccaacaagcctgtggtacccctggagtgggcattaggggtgatgccaaagccagaccccacggtcatcaacaagcacataaggaaattagtggagtctgtatttagaaactatgatcacgaccatgatgggtacatttcccaagaggactttgaaagtatagctgccaattttcccttcttggattccttctgtgttctggacaaagatcaggatggcctaattagtaaagatgaaatgatggcttacttcctgagagctaaatcccaactacactgtaaaatgggaccaggatttatccataattttcaggagatgacctatctcaagccaaccttctgcgaacactgtgcgggatttctctggggcataatcaagcaaggatacaaatgcaaagactgtggagccaattgtcacaaacagtgcaaagacctcctggttctggcctgcaggagatttgcccgggcgccctccttgagcagtggtcatgggtcactgcctggaagcccctcgctgcccccagcgcaggatgaggtgtttgagttccctggagtcactgctggacacagggatttagacagcagagccatcacactggttacaggctcttctcgcaagatctctgtgaggctacagagggccaccaccagccaggccacccagactgaacctgtctggtcagaggctggctggggggactcggggtcccacaccttccctaaaatgaaatccaagttccatgacaaagcagcaaaggacaaaggctttgccaaatgggaaaatgagaagcccagggtgcatgctggtgtggatgttgtagaccggggcacggagtttgaacttgaccaggatgaaggagaagagaccagacaggatggtgaggatggctgacttcaggctgcggaaactgaaggcaataatgttggcttttggaaggggcaagacgagaaactctgaagaaagctctgactctcaggaagttatctggaaagatacctggatgtttactgccttgggacactgtgggatctccatgtttggactatgggacagagaattgaccctaactaactaactatgaactatttatttcctcctcccctacccctagttaagtgccacaaagactgtgttatgtagtcagtacttttttctcatgtatctttctctagaccatttatatacgggtgaaatgaaagcttttttgcatgtacttgatactcagtctgtaaactcagacttcgctttttttgtgagactatcctttcaatatttttataaacttttgtgtgtgctgtggcagggaacagttaacaaggagtttatttagaggggtttttttcattttttgtttttcttgttttgttttgttttgttttgttcttcttggtgtgctttttggatgggaccagaacttaacattttcctgaggactaggaagctcatcagacactggaatgcagtgattcttctaatgatggtcaactgcaaggagaaactgtttacatccttcccactacacagttgctatgatatgtaacaagtcacacatgtatatatcacacaagtcttaccaattctgcgtcactaggaagctatagcatggtcgtgaaagctctcctaatacttacttaaatagccatggaagaaaattatgcttgtcccttctgactgggttaagccatctttcttaagattcctgaagtagaaatagcaattaagaaattaattcaagttttgacggttaacatttagcagaaaaacaaaccattgaataagctactaggtgaaatgcaaaacaaccatcaatttttttaaactcaataattttgtgaaaaaaaaaaccaccaccaaacttttggttgtaaaagagaacccttgttcccttcctaagaaactgccttccacaattaaagaatactcatagaaagaaaataatcataaatcatatttgattaacatttcatttaagcttttaaaatatcaattttttaaatagctcccatttacccaaaataactagttatgggtctatttcttccatgattagaggagagagaacttgattcaagatactgaaaaatagagctgggactgagcctgtgaatgacaggaatgatctattaccaggtgactagtcggaaactacacagacgtgcactggtctgcatttgggggctaaagtgtatatattccatttaaaatggaatttgtttgtatttggggcagtcttcagtaaagcctttctcctttcttttctccattgaggacagttctgctcagcaaaattgttgagtacctgttctgggcaggtcccacgctatatgcacaaagttaagaaaaacttggtcttagcccttgggagctgacagcccatgggcattaaggcaaagtagttccagtgatttaaaatacggttccaaatacgctaaaaccaacttgtgccaaccagatttacagattggaaatactgcagatgatgtgaagttatcagttggaggagctgtgattaagctggataataagagaacgtgccatctgtaaagcactcagaaggcagccatccctagatgttggtttcatgtatattacactatctactactatccataaatgcaataatatgcatgttaacaacattaaaaacagcaaacagcaatctaagtacagaaaagctttttgtgtgtttaaaaaaattgaagaaaattcaggaagaaacgtgttaataaacattgtactgttcttttgcttctcaaaggaattattcacttgccactttggttatttttgagttttcgtacataggaagttttatattgccagccttcctgtgataaagatattaaatgtaacttgagtaaaaaataaaaaagaataactatgta

SEQ ID NO: 17457 - DNA, 688 bp, Homo sapiens
  source 1..688: mol_type = unassigned DNA
aagactcagagccccagcttgaaggaaacagctgctctcggcgtgctccggcacttggcagctggacaggcagagtgctgatgtgaaaaataccacgacaaaaccaccctagttctccaaaatacttatcattcaggttgaataaaccagttctacagactgcttcttccatgcatttcccaatgatgctagctgcccttaaaattctttcagatttggaactgtatctgtatggaaacaacagagttttcttgaagtacaactaaggacaggtcaccactaggcactaacatcgctgacttgcatgattatggagatggtctatctgatgctgaaaatgtctctagttttttgacaacggctaaataaccatgggatcaagtggccttgggaaagcagcaacattagatgaactgctgtgcacttgcattgagatgtttgatgacaatggagagctggataatagttatttgccaagaatagttctactgatgcaccgatggtatttatcttccactgaattggcagaaaaacttctctgcatatatcttttcaactactgtgtaatttttacaatcataaatcaagctctgtatttagatagagtgtctatccaaagccagtaaattaagatgaataaatagtctttggttatccagctgttttgtgaatatatatagatgtctag

SEQ ID NO: 17458 - DNA, 596 bp, Homo sapiens
  source 1..596: mol_type = unassigned DNA
aacagctgctctcggcgtgctccggcacttggcagctggacaggcagagtgctgatgtgaaaaataccacgacaaaaccaccctaatggagtttcactctgtcgcccaggctggagtgcagtggcacgatctcggctcactgcaagctccgcctcccgggttcacaccattcttctgcctcagcctcccgagtagctgggactacagatttggaactgtatctgtatggaaacaacagagttttcttgaagtacaactaaggacaggtcaccactaggcactaacatcgctgacttgcatgattatggagatggtctatctgatgctgaaaatgtctctagttttttgacaacggctaaataaccatgggatcaagtggccttgggaaagcagcaacattagatgaactgctgtgcacttgcattgagatgtttgatgacaatggagagctggataatagttatttgccaagaatagttctactgatgcaccgatggtatttatcttccactgaattggcagaaaaacttctctgcatgtatcgaaatgccactggagaaagctgcaatgaatttcgattaaagatctgctacttc

SEQ ID NO: 17459 - DNA, 540 bp, Homo sapiens
  source 1..540: mol_type = unassigned DNA
acttggcagctggacaggcagagtgctgatgtgaaaaataccacgacaaaaccaccctagtgttcatttcactgggcaggttgtctaccagaaccaaggggcctctttgaattttctttcaagctattaataagaggcatgcatcctcctagacacaatcatccatttagtaaaataggttctccaaaatacttatcattcaggttgaataaaccagttctacagactgcttcttccatgcatttcccaatgatgctagctgcccttaaaattctttcagatttggaactgtatctgtatggaaacaacagagttttcttgaagtacaactaaggacaggtcaccactaggcactaacatcgctgacttgcatgattatggagatggtctatctgatgctgaaaatgtctctagttttttgacaacggctaaataaccatgggatcaagtggccttgggaaagcagcaacattagatgaactgctgtgcacttgcattgagatgtttgatgacaatggagagctggataatagttatttg

SEQ ID NO: 17460 - DNA, 554 bp, Homo sapiens
  source 1..554: mol_type = unassigned DNA
acttggcagctggacaggcagagtgctgatgtgaaaaataccacgacaaaaccaccctaatttggaactgtatctgtatggaaacaacagagttttcttgaagtacaactaaggacaggtcaccactaggcactaacatcgctgacttgcatgattatggagatggtctatctgatgctgaaaatgtctctagttttttgacaacggctaaataaccatgggatcaagtggccttgggaaagcagcaacattagatgaactgctgtgcacttgcattgagatgtttgatgacaatggagagctggataatagttatttgccaagaatagttctactgatgcaccgatggtatttatcttccactgaattggcagaaaaacttctctgcatgtatcgaaatgccactggagaaagctgcaatgaatttcgattaaagatctgctacttcatgaggtactggattctgaagtttcctgcagagtttaatttggatcttggtttgattcgtatgactgaggaatttcgggaagtagctagtcaactaggatatgaaa

SEQ ID NO: 17461 - DNA, 557 bp, Homo sapiens
  source 1..557: mol_type = unassigned DNA
acttggcagctggacaggcagagtgctgatgtgaaaaataccacgacaaaaccaccctaatttggaactgtatctgtatggaaacaacagagttttcttgaagtacaactaaggacaggtcaccactaggcactaacatcgctgacttgcatgattatggagatggtctatctgatgctgaaaatgtctctagttttttgacaacggctaaataaccatgggatcaagtggccttgggaaagcagcaacattagatgaactgctgtgcacttgcattgagatgtttgatgacaatggagagctggataatagttatttgccaagaatagttctactgatgcaccgatggtatttatcttccactgaattggcagaaaaacttctctgcatgtatcgaaatgccactggagaaagctgcaatgaatttcgattaaagatctgctacttcatgaggtactggattctgaagtttcctgcagagtttaatttggatcttggtttgattcgtatgactgaggaatttcgggaagtagctagtcaactaggatatgaaaaac

SEQ ID NO: 17462 - DNA, 875 bp, Homo sapiens
  source 1..875: mol_type = unassigned DNA
ggcagagtgctgatgtgaaaaataccacgacaaaaccaccctaatggagtttcactctgtcgcccaggctggagtgcagtggcacgatctcggctcactgcaagctccgcctcccgggttcacaccattcttctgcctcagcctcccgagtagctgggactacaggtgcccaccaccacgcctggctaatttttttgtatttttaatagagacggggtttcatcatgttagcaggatggtctcgatctcctgacctggtgatccacccacctcggcctcccaaagtgctgggattacaggcatgagccactgcgcctggcctagttatgctatctttcaaagaaagaccaatttcaactatttcatgaccatgcacttacacaatctgtggaattatctttggtgataaaaagttgtgtaatttgtattctcttcagataggcaaagagtgactggataaccgatttgcgacatgccactcatgatatttccaaagcctatggacatttgactttggaaacagggtcagcttagtcttcagacaccgtatttgcttaggataattttgtttgtttgttttttcagacagagtcccactctgtcacccaagctggagtgcagtggcacaatcttggctcactgcaacctctgcctcccaggttcaagcgattctcttgcctcagcctcctgagtagctgggactacaggcgtgcaccaccacacccagctaatttttgtgtttttagtagagatgggttttcaccatgttggccaggctggtctcgaactcctgacctcaggtgatccacccaccttggcttcccaaagtgctgggattataggcatgagccactgtgcctggctagcttagggta

SEQ ID NO: 17463 - DNA, 4210 bp, Homo sapiens
  source 1..4210: mol_type = unassigned DNA
gataccctttacactagattagcaggcaaaactatgatggtttgtgatatccatgcttgtagaagtaataagaagaaagggaacacagaagctttattttatagtggagtcctgactctaggccttaataattgcatggttttggagttttcttgaagtacaactaaggacaggtcaccactaggcactaacatcgctgacttgcatgattatggagatggtctatctgatgctgaaaatgtctctagttttttgacaacggctaaataaccatgggatcaagtggccttgggaaagcagcaacattagatgaactgctgtgcacttgcattgagatgtttgatgacaatggagagctggataatagttatttgccaagaatagttctactgatgcaccgatggtatttatcttccactgaattggcagaaaaacttctctgcatgtatcgaaatgccactggagaaagctgcaatgaatttcgattaaagatctgctacttcatgaggtactggattctgaagtttcctgcagagtttaatttggatcttggtttgattcgtatgactgaggaatttcgggaagtagctagtcaactaggatatgaaaaacacgtcagcctcatcgacatatccagcattccttcctatgactggatgagaagagtcacacagaggaaaaaagtatccaagaagggaaaagcctgtctgctgtttgaccatctggagcccattgaattggctgagcacctcacttttctggagcataaatcttttagaaggatctcattcactgattaccaaagctatgtcatccatggctgcctggagaataatccaaccttggaaagatcgattgctttatttaatggaatctctaagtgggtccagttgatggttcttagcaaaccaaccccccagcaaagggcagaagtcatcacaaagtttatcaatgttgcaaagaagctccttcagctcaaaaattttaacaccctgatggcagtggtgggaggcctcagtcatagttccatttcacgcctcaaagagacccattctcatctttcttcagaagttacaaagaactggaatgaaatgacagagttggtctcctccaacggcaattactgcaattaccgcaaggcctttgccgactgcgatggcttcaaaatccccatccttggagtacacttgaaagacttgatagctgtccatgtcattttcccagactggacagaggagaacaaagtgaacattgtgaaaatgcaccagctctccgttaccctgagtgaactagtctccctgcagaatgcctctcaccacttagaacccaacatggatttgatcaacctgctcacgctttccctggacctctatcacactgaagatgatatttacaaactgtcactggtgctggagcctagaaattctaaatcgcctacctcccctacgacgcccaacaagcctgtggtacccctggagtgggcattaggggtgatgccaaagccagaccccacggtcatcaacaagcacataaggaaattagtggagtctgtatttagaaactatgatcacgaccatgatgggtacatttcccaagaggactttgaaagtatagctgccaattttcccttcttggattccttctgtgttctggacaaagatcaggatggcctaattagtaaagatgaaatgatggcttacttcctgagagctaaatcccaactacactgtaaaatgggaccaggatttatccataattttcaggagatgacctatctcaagccaaccttctgcgaacactgtgcgggatttctctggggcataatcaagcaaggatacaaatgcaaagactgtggagccaattgtcacaaacagtgcaaagacctcctggttctggcctgcaggagatttgcccgggcgccctccttgagcagtggtcatgggtcactgcctggaagcccctcgctgcccccagcgcaggatgaggtgtttgagttccctggagtcactgctggacacagggatttagacagcagagccatcacactggttacaggctcttctcgcaagatctctgtgaggctacagagggccaccaccagccaggccacccagactgaacctgtctggtcagaggctggctggggggactcggggtcccacaccttccctaaaatgaaatccaagttccatgacaaagcagcaaaggacaaaggctttgccaaatgggaaaatgagaagcccagggtgcatgctggtgtggatgttgtagaccggggcacggagtttgaacttgaccaggatgaaggagaagagaccagacaggatggtgaggatggctgacttcaggctgcggaaactgaaggcaataatgttggcttttggaaggggcaagacgagaaactctgaagaaagctctgactctcaggaagttatctggaaagatacctggatgtttactgccttgggacactgtgggatctccatgtttggactatgggacagagaattgaccctaactaactaactatgaactatttatttcctcctcccctacccctagttaagtgccacaaagactgtgttatgtagtcagtacttttttctcatgtatctttctctagaccatttatatacgggtgaaatgaaagcttttttgcatgtacttgatactcagtctgtaaactcagacttcgctttttttgtgagactatcctttcaatatttttataaacttttgtgtgtgctgtggcagggaacagttaacaaggagtttatttagaggggtttttttcattttttgtttttcttgttttgttttgttttgttttgttcttcttggtgtgctttttggatgggaccagaacttaacattttcctgaggactaggaagctcatcagacactggaatgcagtgattcttctaatgatggtcaactgcaaggagaaactgtttacatccttcccactacacagttgctatgatatgtaacaagtcacacatgtatatatcacacaagtcttaccaattctgcgtcactaggaagctatagcatggtcgtgaaagctctcctaatacttacttaaatagccatggaagaaaattatgcttgtcccttctgactgggttaagccatctttcttaagattcctgaagtagaaatagcaattaagaaattaattcaagttttgacggttaacatttagcagaaaaacaaaccattgaataagctactaggtgaaatgcaaaacaaccatcaatttttttaaactcaataattttgtgaaaaaaaaaaccaccaccaaacttttggttgtaaaagagaacccttgttcccttcctaagaaactgccttccacaattaaagaatactcatagaaagaaaataatcataaatcatatttgattaacatttcatttaagcttttaaaatatcaattttttaaatagctcccatttacccaaaataactagttatgggtctatttcttccatgattagaggagagagaacttgattcaagatactgaaaaatagagctgggactgagcctgtgaatgacaggaatgatctattaccaggtgactagtcggaaactacacagacgtgcactggtctgcatttgggggctaaagtgtatatattccatttaaaatggaatttgtttgtatttggggcagtcttcagtaaagcctttctcctttcttttctccattgaggacagttctgctcagcaaaattgttgagtacctgttctgggcaggtcccacgctatatgcacaaagttaagaaaaacttggtcttagcccttgggagctgacagcccatgggcattaaggcaaagtagttccagtgatttaaaatacggttccaaatacgctaaaaccaacttgtgccaaccagatttacagattggaaatactgcagatgatgtgaagttatcagttggaggagctgtgattaagctggataataagagaacgtgccatctgtaaagcactcagaaggcagccatccctagatgttggtttcatgtatattacactatctactactatccataaatgcaataatatgcatgttaacaacattaaaaacagcaaacagcaatctaagtacagaaaagctttttgtgtgtttaaaaaaattgaagaaaattcaggaagaaacgtgttaataaacattgtactgttcttttgcttctcaaagg

SEQ ID NO: 17464 - DNA, 477 bp, Homo sapiens
  source 1..477: mol_type = unassigned DNA
agaagctccttcagctcaaaaattttaacaccctgatggcagtggtgggaggcctcagtcatagttccatttcacgcctcaaagagacccattctcatctttcttcagaagttacaaagaactggaatgaaatgacagagttggtctcctccaacggcaattactgcaattaccgcaaggcctttgccgactgcgatggcttcaaaatccccatccttggagtacacttgaaagacttgatagctgtccatgtcattttcccagactggacagaggagaacaaagtgaacattgtgaaaatgcaccagctctccgttaccctgagtgaactagtctccctgcagaatgcctctcaccacttagaacccaacatggatttgatcaacctgctcacgggaatatctggagaggacatttgccttacatcccaattcacgtaaccaggagttttaaaagctgatgtttctgttgcgtggg

SEQ ID NO: 17465 - DNA, 566 bp, Homo sapiens
  source 1..566: mol_type = unassigned DNA
ctgcaattaccgcaaggcctttgccgactgcgatggcttcaaaatccccatccttggagtacacttgaaagacttgatagctgtccatgtcattttcccagactggacagaggagaacaaagtgaacattgtgaaaatgcaccagctctccgttaccctgagtgaactagtctccctgcagaatgcctctcaccacttagaacccaacatggatttgatcaacctgctcacgctttccctggacctctatcacactgaagatgatatttacaaactgtcactggtgctggagcctagaaattctaaatcgcagcctacctcccctacgacgcccaacaagcctgtggtacccctggagtgggcattaggggtgatgccaaagccagaccccacggtcatcaacaagcacataaggaaattagtggaggtaagtggttgagggagaataaagagagggcactagaagaccctttctctttccagaatgttctgcgattgtccaggaatctgatggaacccctgaaaacaaccctctggcaggtaggaacaatttagcaggcacttag

SEQ ID NO: 17466 - DNA, 548 bp, Homo sapiens
  source 1..548: mol_type = unassigned DNA
gccgactgcgatggcttcaaaatccccatccttggagtacacttgaaagacttgatagctgtccatgtcattttcccagactggacagaggagaacaaagtgaacattgtgaaaatgcaccagctctccgttaccctgagtgaactagtctccctgcagaatgcctctcaccacttagaacccaacatggatttgatcaacctgctcacgctttccctggacctctatcacactgaagatgatatttacaaactgtcactggtgctggagcctagaaattctaaatcgcagcctacctcccctacgacgcccaacaagcctgtggtacccctggagtgggcattaggggtgatgccaaagccagaccccacggtcatcaacaagcacataaggaaattagtggaggtaagtggttgagggagaataaagagagggcactagaagaccctttctctttccagaatgttctgcgattgtccaggaatctgatggaacccctgaaaacaaccctctggcagcctgggagacagagtgagactccgtctgaa

SEQ ID NO: 17467 - DNA, 3764 bp, Homo sapiens
  source 1..3764: mol_type = unassigned DNA
ccatcgctgagccagttatccatttgacacatggaaatacccaagggtgttctggttctcttgagagagcatctccttgccttactgtgtggcttatttggattcttggttggctgtggtagtgcttctgtcatctcatctccagcagatgctggtgccagtcatcacaggacttggaagctgagtcaggaggaagggaacatgctcctccaagtctgcactaactcctgataacagggaattcagaaggaaggagtcacttggttttctctctttatttatgtaaccttcacagtgcgaggcttcaagctgggactcagggtacagaggtgcaaaagacagatgtgctgcccactttcatgaggcttagagcctggcacagttgtctgttgtgggaattacaaaatagtaggcaactgcccacggctgatgtattttatttggcccatacggaatcctaaacttttgtcgttgttagttcccagtgtttgaaaattgggatagtttatctaaaactccagatttctggcttctcttaacaaatcagaagacttggcaactcaaggtccaacgttaggctgacagcaatttgtcatcactgagcagtgatgttcatcacaaaccgcacctctccctgtgacttccctaacagagagtggtgtcaggtcccacttatcatcacacatttttttttattgtggcgctaaggggaaagatccctaaataaattacatctgcaaagactctgttttccaaataagacgtttctatcaaaatgtaccttttacgcatcctacttggctcttttatataatggtatggctcccaaaggcatttgtttgtgacatgcggatgtttcctttcctgtaaaaaggcagagcctgggaggtgggagtgattactgttcaggggaaggtgaatacgatgtctcttctttgtaagcaggattgtcatgatcttgaaatgatactggggagattttacagttaagtcggttttattttgtttagaaaaaaaactttgtgacaaagtgcaggtaaaagaaacgtgacctgattatgaagtccttaatttaaatgttatattcaagcagctgctagaacagtgactagaacaatccctgacacatagtagattactgataaatatttgttgaatgaatgatttgaaaatgaaattttatgacaccaacttcatttttaaaggaagtagaacaggaaaaggaatctttgaaaacatcttcgcctctgagttttctctggcttcctccttctttcttttcccccacactccacctcatacacatgttagataaaatatgttaaagaaaacttttcattcctacatggtcaaagaagggagcccgcactggttatgttcatggccagggaagtgatgtgattcattgagtgtcctagctttaaaggactaggtgagaatggttcaggtttattttaagcctcatgacttctgttttaggtgagtggaaacatgcactgtaaggctttacagagtttatccatgttctccagcctggatctgtgttgttgtccttgcctacaatgatcttcctctctcttttgtccaaattaagtcccaatcctcctggttaagtcccaattcacaaggacctccatgaatccatcctgatcatttctgtctccggggcccctatgcatagtaataatataactaataacaaatgcgataataacagtaacattaacactataaaataacacttcttgagattttattgtgtaccaggtcctgtgtgaaatactttacatgcattatttcatttggtcctgacacaaatccaactcagtagggacttttatgatcatttccattttccagatgcagaaactgagtgtcagagaggaaattacttgctaaaggttacagagctagccagtggcaggctgcatgcttgaacccagccctgcctgaccacacagcctctgccctcgtgtatttactatgctgcctccctgatttctgaccggttcctggagcacttaaagtggagcaactacttcacactcagcatgtgctgttttattgctacgaacacatctttttaggttcaggccctgtttattcaaataaattatcagggccttgagggcaagaaatgattttatatcagcttgcctcactaggacttagcacaatgctctcaaataataggagcctagttaactgctcctttatttcaacagttctttaatcaaacttcaaaggcagcatttattacatttacaagtcttattgtttgcatctgtccccacttccagcctggaaacatcacatatccctcatccgtgactcagcactgagcacctgggagctgctcagtaaatattgctgaggaattgagttgatggttctcgtcaatactgatgattaaccaggattaacgttttctcttttaaatttcattttccatctctgcgtgccgtctttttattgttctgcatttactcaaattattagacagtgaacttaaaacattcaacttgaaaaaaaattcagcaacgtaaataaataaataaatgtaatccgacatttttatcccttctaattttgttgtagctttccctggacctctatcacactgaagatgatatttacaaactgtcactggtgctggagcctagaaattctaaatcgcagcctacctcccctacgacgcccaacaagcctgtggtacccctggagtgggcattaggggtgatgccaaagccagaccccacggtcatcaacaagcacataaggaaattagtggaggtaagtggttgagggagaataaagagagggcactagaagaccctttctctttccagaatgttctgcgattgtccaggaatctgatggaacccctgaaaacaaccctctggcaggtaggaacaatttagcaggcacttagtcctaccaggcattgggtcctggggagagtcgatcagaaaggcccttttccctttgttgtctctcttgcccagatactctcagctacttccagctcctctctttcacaggcatttgccacctctgtcattgtcaacagctcaagggattggggattagaatcactcatgaaaaacccacataggtcccactaagatgcccaataaattgattacccaagggcaggaaagaaatcctgtaagttggatagtttctccttttgtatagttttggaattttatgacacagcagcccgatgttactgagattagaaaaatcacctaatgtaggacaaggctctgtcagagttttccgtgtagaaaaaagagtagggccgggcgcggtggctcacgcctgtaatcccagcacttgggaggccgaggcgggcggatcacgaggtcaggagatcgagaccacggtgaaaccctgtccctactaaaaatacaaaaaattagccgggcgcgatggcgggcgcctgcagtctcagctactcaggaggcagaggcaggagaatggagtgaacccgggaagcagagcttgcagtgaggtgagatcgcgccactgcactccagcctgggagacagagtgagactccgtctgaaaaaaaaaaaaagaaaagaaaagaaaagaaaaaagagtagaagtgccgatgggggaacacggaaacatctcgggtacaggaaactgcgatcctgaattaaatgtctactttaatggattggtaggtacatctgctggtgcaacagaattgagtctttgggatagaatgtgctttttgctgggagaagatattt

SEQ ID NO: 17468 - DNA, 574 bp, Homo sapiens
  source 1..574: mol_type = unassigned DNA
tgagattagaaaaatcacctaatgtaggacaaggctctgtcagagttttccgtgtagaaaaaagagtagggccgggcgcggtggctcacgcctgtaatcccagcacttgggaggccgaggcgggcggatcacgaggtcaggagatcgagaccacggtgaaaccctgtccctactaaaaatacaaaaaattagccgggcgcgatggcgggcgcctgcagtctcagctactcaggaggcagaggcaggagaatggagtgaacccgggaagcagagcttgcagtgaggtgagatcgcgccactgcactccagcctgggagacagagtgagactccgtctgaaaaaaaaaaaaagaaaagaaaagaaaagaaaaaagagtagaagtgccgatgggggaacacggaaacatctcgggtacaggaaactgcgatcctgaattaaatgtctactttaatggattgtctgtatttagaaactatgatcacgaccatgatgggtacatttcccaagaggactttgaaagtatagctgccaattttcccttcttggattccttctgtgttctggacaaagatca

SEQ ID NO: 17469 - DNA, 1597 bp, Homo sapiens
  source 1..1597: mol_type = unassigned DNA
attacccttgaccttaacaccacttcttggcattctcagggtttctggcttatggtgggcttgatgccctatgtgcaagaatgagagaggatcttttgggacagctaactatcagtctctaagttcctctagcagcctggattgtgaagccctttcctccttcacttcctgtacattcctgccaagtgtgcgtttatttcttctgtttctgacctcatttcctgtccttggcctgatctcattttccactggcaaactgccatcccactcccacttcctgactctccattctttttctttcctttgggaattcaggatgaataattctttgactgaaagggaactctttgtccagtatcctttgtcctccttgagctgtctctgctgagaactacaagtcccacaatgcacaagaggtgatcttaaaatactcgagaaacttgtatacccttctatcaagtagggatttgctcacggagaccctttgggtgttgactgtagaatggactacaactcccagaagactttggtggagctccccactatcttcatgctctattaccctgaagcttcctgggagttgtagtccaatcacttgtttccacttctctattttctcagactctctattcaacgctgcctgctctcctggatagtaaccctttcacagctggtgcagagctgccggggcctggcgcggagctgggggccatgcctccaggattgagacctaccctgggcgtgttccaggcagccttggagctgaccagccagtgcgagctgcaccctgacctcgtgtctcagacttttggctacttgttcttcttctccaacgcatcccttctcaactcgctgatggaacgaggtcaaggccggcctttctatcaatggtcccgagctgttcaaatccgaaccaacctggacctcgtcttggactggctacagggagctgggctgggcgacattgccactgagttcttccggaaactctccatggctgtgaacctgctctgtgtgccccgcacttccctgctcaaggcttcatggagcagcctaagaaccgaccaccccaccttgacccccgcccagctgcaccatctgctcagccactatcagctgggccctggccgcgggccgccagccgcgtgggaccctccccctgcagagcgggaggctgtggacacaggggacatcttcgaaagcttctcctcgcacccgcccctcatcctccccctggggagctcgcgcctgcgcctcactggtccagtgacggacgatgccttgcaccgtgaactccgtaggctccgccgcctcctctgggatcttgagcagcaggagctgccagccaattatcgccatgggcctcccgtggccacgtctccttgagaaccaataccaaacgagcgcgcgaaccttgaaatgtcacgggcttctacggacaggagcccgcctgagcgcaaagctttctgggagttgtagttcttatcccgcgtggaatgttgggagattgagttttcgggaagtagcggatgggacggtgggagcatgggcttaggatgtgaatgccagggagcaataaaggtatccgtggtatcgg

SEQ ID NO: 17470 - DNA, 3308 bp, Homo sapiens
  source 1..3308: mol_type = unassigned DNA
ggcagggccaaccctacccagatctcctcccccaggcctggtctcctcacaggacgccccctccccgctcttcctgccgggtttcctcttgccttttcctgtcccccacccagtgctgggagccgtggcagaggcaagagcagtggaactgacccaggccagtggagccagggcctccgggtgtgccggacccgaagcaggggccatgctgtctggtgaacggaaggagggcggaagcccccgcttcgggaagcttcatctccccgtgggcctgtggatcaattcccccaggaagcagctggcgaagctggggcggcgctggcccagcgcagcctctgtcaagtcttcttcgtcggacacggggagccgcagcagcgagccgctacctccgcccccgccgcacgtggagctgcggcgagtgggcgctgtcaaggcggccgggggagcctccggtagccgcgccaagcgcatctcccagctcttccggggctcggggaccgggaccacggggtccagcggcgcaggaggccctgggaccccggggggcgcgcagcgctgggccagcgagaagaagctgccggagctggcggcgggcgtggcccccgagcccccgctggctacccgcgccacggcgcctccgggggtcctcaagatcttcggcgccggactggcatcgggcgccaactacaagagcgtgctggccacggcgcgctccacggcgcgcgagctcgtggccgaggcgctagagcgctacggcctagcaggcagccccggcggtggccccggcgagagcagctgcgtggacgccttcgctttgtgcgacgctctgggccggcccgcggcggcgggcgtgggaagcggcgagtggcgggcggagcacctgcgcgtgctgggcgactccgagcgcccgctgctggtgcaggagctgtggcgggcgcggcccggctgggcgcggcgcttcgagttgcgcggccgcgaggaggcgcggcgcctggagcaggaggccttcggggccgcggacagcgaaggcaccggcgccccttcgtggcggccacagaagaaccgctcccgggcggcgtcgggtggggcagcgctggccagtcctggcccggggaccggatcaggggccccagctgggtctggaggcaaggagcgctcagaaaacttgtctttgcggcgcagcgtgtcggagcttagccttcaggggcggcggcggcggcagcaggagcggagacagcaggcacttagcatggccccaggggcagccgacgcccaaatcggaactgcagaccccggggacttcgatcagttgactcagtgcctcatccaggcccccagcaaccgcccctacttcctgctgctccagggctaccaggacgcccaggactttgtggtgtatgtgatgacgcgagagcagcacgtgtttgggcgaggtgggaactcgtctggccgcggggggtccccggctccctatgtggacaccttcctcaacgccccggacatcctgccgcgtcactgcacagtgcgcgcgggccctgagcacccggccatggtgcgcccgtcccggggcgccccagtcacgcacaacgggtgcctcctgctgcgggaggctgagctgcacccgggcgacctcctggggctgggcgagcacttcctgttcatgtacaaggacccccgcactgggggctcggggcctgcgaggccgccgtggctgcccgcgcgccccggggccacgccgccaggccctggctgggccttctcctgtcgcctgtgcggccgcggcctgcaggagcgcggcgaggcactggccgcctacctggacggccgtgagccagtcctgcgcttccggccgcgcgaggaggaggcgctgctgggcgagatcgtgcgcgccgcagccgccggctcgggagacctgccgcccctcgggcccgccacgctgctggcgctgtgcgtgcagcattccgcccgtgagctggagctgggccacctgccacgactgctgggccgcctggcccggctcatcaaggaggccgtctgggaaaagattaaggaaattggagaccgtcagccagaaaaccaccctgagggggtccccgaggtgcccctgactcctgaagctgtgtctgtggagctgcggccactcatgctgtggatggccaacaccacggagctgcttagctttgtgcaggagaaggtgctggaaatggagaaggaggctgaccaagaggacccacagctctgcaatgacttggaattatgtgatgaggccatggccctcctggatgaggtcatcatgtgtaccttccagcagtctgtctactacctcaccaagactctctattcaacgctgcctgctctcctggatagtaaccctttcacagctggtgcagagctgccggggcctggcgcggagctgggggccatgcctccaggattgagacctaccctgggcgtgttccaggcagccttggagctgaccagccagtgcgagctgcaccctgacctcgtgtctcagacttttggctacttgttcttcttctccaacgcatcccttctcaactcgctgatggaacgaggtcaaggccggcctttctatcaatggtcccgagctgttcaaatccgaaccaacctggacctcgtcttggactggctacagggagctgggctgggcgacattgccactgagttcttccggaaactctccatggctgtgaacctgctctgtgtgccccgcacttccctgctcaaggcttcatggagcagcctaagaaccgaccaccccaccttgacccccgcccagctgcaccatctgctcagccactatcagctgggccctggccgcgggccgccagccgcgtgggaccctccccctgcagagcgggaggctgtggacacaggggacatcttcgaaagcttctcctcgcacccgcccctcatcctccccctggggagctcgcgcctgcgcctcactggtccagtgacggacgatgccttgcaccgtgaactccgtaggctccgccgcctcctctgggatcttgagcagcaggagctgccagccaattatcgccatgggcctcccgtggccacgtctccttgagaaccaataccaaacgagcgcgcgaaccttgaaatgtcacgggcttctacggacaggagcccgcctgagcgcaaagctttctgggagttgtagttcttatcccgcgtggaatgttgggagattgagttttcgggaagtagcggatgggacggtgggagcatgggcttaggatgtgaatgccagggagcaataaaggtatccgtggtatcgg

SEQ ID NO: 17471 - DNA, 546 bp, Homo sapiens
  source 1..546: mol_type = unassigned DNA
cggccgcgaggaggcgcggcgcctggagcaggaggccttcggggccgcggacagcgaaggcaccggcgccccttcgtggcggccacagaagaaccgctcccgggcggcgtcgggtggggcagcgctggccagtcctggcccggggaccggatcaggggccccagctgggtctggaggcaaggagcgctcagaaaacttgtctttgcggcgcagcgtgtcggagcttagccttcaggggcggcggcggcggcagcaggagcggagacagcaggcacttagcatggccccaggggcagccgacgcccaaatcggaactgcagaccccggggacttcgatcagttgactcagtgcctcatccaggcccccagcaaccgcccctacttcctgctgctccagggctaccaggacgcccagactctctattcaacgctgcctgctctcctggatagtaaccctttcacagctggtgcagagctgccggggcctggcgcggagctgggggccatgcctccaggattgagacctaccctgggcgtgttccaggc

SEQ ID NO: 17472 - DNA, 614 bp, Homo sapiens
  source 1..614: mol_type = unassigned DNA
ttggggcttaggcgggacgggggctggttgctggtggtggcttggagtggcctgaagtggctccgaattggggttagggccttctgcaggcatttcagactgccttggaggaggtggggtgtgtagcggggtctgcggagtagtagatcctgaggagcgtttgtggagtccagtggaatgggcaggagtccgcaggggcctaagggattcgccctgtgtggcaccggcgccccttcgtggcggccacagaagaaccgctcccgggcggcgtcgggtggggcagcgctggccagtcctggcccggggaccggatcaggggccccagctgggtctggaggcaaggagcgctcagaaaacttgtctttgcggcgcagcgtgtcggagcttagccttcaggggcggcggcggcggcagcaggagcggagacagcaggcacttagcatggccccaggggcagccgacgcccaaatcggaactgcagaccccggggacttcgatcagttgactcagtgcctcatccaggcccccagcaaccgcccctacttcctgctgctccagggctaccaggacgcccaggactttgtggtgtatgtgatgacgcgagagcagcacgt

SEQ ID NO: 17473 - DNA, 1995 bp, Homo sapiens
  source 1..1995: mol_type = unassigned DNA
aaaacagccggcgcgccgcgcgagtgcagtctgggtctggagcctgagccctgcggaacctcggcgctcggccccaccccgcccgtacctgcacttatttattgttgttatttcttaccgcggagccccgcagtcgggtcctcccgcccgctcccgcgcagcgctagcattctccagtccctcagtcccttcccgcgcggtgcgccgcagccgaggcgatgcgcctcattcagaacatgtgcaccatcgccgagtaccccgcgccgggcaacgccgcggcctccgactgctgtgtgggcgccgccggccgccgcctggtcaagatcgccgtggtgggcgccagcggcgtgggcaagaccgcactggtggtccggttcctcaccaaacgattcatcggtgactatgaaagaaatgcaggtaatctctatactagacaagttcagatagaaggtgaaaccctggctcttcaggttcaagacactccaggtattcaggtccatgagaacagcctgagctgcagtgaacagctgaataggtgcattcgctgggcagatgctgtggtgatcgttttctccatcactgactacaagagctatgaactcatcagccagctccaccagcacgtgcagcagctacacctgggcacccggctgcctgtggtggtcgtggccaacaaagctgacctgttgcacatcaaacaggttgaccctcagcttggactgcagctagccagcatgctaggctgctcattctatgaagtgtctgtcagtgaaaattataatgatgtctacagcgccttccacgtcctctgtaaagaggtcagtcacaaacagcagcctagcagtacacccgagaagcgaagaacctccctcattcccaggcccaagtcacccaacatgcaggacctgaagaggaggtttaagcaagccctctctgccaaagtgaggactgtcacctccgtctgaagcaggaggagcactcaagggggtttggtcttcccaggaagagggcctgaggttctcctagtgcaggaacgttgaatattggcaatgattcctggttccagaaagggctggagcagaagggccaagagggcctgtggaactgctacagaaaaggaagtgttgttctgagcagggggacaggattgatgaggcttgaaagagcccactgagccactctctgaatatgtgaaatgtactctgtgtcttttcctttagagtggggagggggcataatcgtttcggtttctgcattcaactaccttgtaaatggtggtccgttgcagtttcaccaaatgtattgatgtgatttacagtgggaatgaaagaacagattaagcattgataggctttcttttttcccccttttttcttttttctcttttcttctttcttttcctctttttccccaagaggaagaattgcttttctcttaccagtatgatttgtaactctggaacactattcttacagaatgcctttctaacctgaaggatacccagatttctttctttatgtacaagatggaaaatcccctacccctcaaaaacaggttgagtttatgggccagaatattttgtataccagacattggtaagctctcatggtttacaggaaggctctggttccccctcacaggatgagcatgctcagttgggcgtgtgtggaggagctgtgaacttcacgctcttcaaccccagactttgactgtatagttttttgtttttttaactgttccatcaggaaaaaaatgtgtcagttgattttggtgtgacttgtgtaaatggttcatggcaatgacgttgggttgcttcctaggcctggctgagttgtgcctaagggtggctgaaatactaaaacacttatcttacagcaagtgaacaggggctacctgccacatcccctccacagatgcactttaaaaagccactcatgctttggcttaaactgtaattaatttattttatgtacaataaatcgcatttgaaaaaga

SEQ ID NO: 17474 - DNA, 661 bp, Homo sapiens
  source 1..661: mol_type = unassigned DNA
cctgagccctgcggaacctcggcgctcggccccaccccgcccgtacctgcacttatttattgttgttatttcttaccgcggagccccgcagtcgggtcctcccgcccgctcccgcgcagcgctagcattctccagtccctcagtcccttcccgcgcggtgcgccgcagccgaggcgatgcgcctcattcagaacatgtgcaccatcgccgagtaccccgcgccgggcaacgccgcggcctccgactgctgtgtgggcgccgccggccgccgcctggtcaagatcgccgtggtgggcgccagcggcgtgggcaagaccgcactggtggtccggttcctcaccaaacgattcatcggtgactatgaaagaaatgcaggtgagacaatgcatttgagaaaaattctgtcccattgcaggaggactgcggttcccattttccagcgcttcccagggaggttctttcagtgacagtccgagcctgaggatcccgccacttaaaactttccccagtccccagccctccatggcgcccccctcccataactaccatctggcctcattccattccaagcccattcatcattttatcaagtgcctgaaagtattccccttggtatgttttaactatagtgaccccagttggaagcaccctttgtagtcaa

SEQ ID NO: 17475 - DNA, 1733 bp, Homo sapiens
  source 1..1733: mol_type = unassigned DNA
atcaagtactcaagaaaacagaaacctcacataggctgagcaagataatttgcatcaagggagtactctaaaaatggaaactttgtttaaaactagataaataagttttcaaaaacttgcaaactttgccctggttttaataaatctaacatagggttaaaattgctgttgttttttaaaaaaaatctgaagtaatctctatactagacaagttcagatagaaggtgaaaccctggctcttcaggttcaagacactccaggtattcaggtccatgagaacagcctgagctgcagtgaacagctgaataggtgcattcgctgggcagatgctgtggtgatcgttttctccatcactgactacaagagctatgaactcatcagccagctccaccagcacgtgcagcagctacacctgggcacccggctgcctgtggtggtcgtggccaacaaagctgacctgttgcacatcaaacaggttgaccctcagcttggactgcagctagccagcatgctaggctgctcattctatgaagtgtctgtcagtgaaaattataatgatgtctacagcgccttccacgtcctctgtaaagaggtcagtcacaaacagcagcctagcagtacacccgagaagcgaagaacctccctcattcccaggcccaagtcacccaacatgcaggacctgaagaggaggtttaagcaagccctctctgccaaagtgaggactgtcacctccgtctgaagcaggaggagcactcaagggggtttggtcttcccaggaagagggcctgaggttctcctagtgcaggaacgttgaatattggcaatgattcctggttccagaaagggctggagcagaagggccaagagggcctgtggaactgctacagaaaaggaagtgttgttctgagcagggggacaggattgatgaggcttgaaagagcccactgagccactctctgaatatgtgaaatgtactctgtgtcttttcctttagagtggggagggggcataatcgtttcggtttctgcattcaactaccttgtaaatggtggtccgttgcagtttcaccaaatgtattgatgtgatttacagtgggaatgaaagaacagattaagcattgataggctttcttttttcccccttttttcttttttctcttttcttctttcttttcctctttttccccaagaggaagaattgcttttctcttaccagtatgatttgtaactctggaacactattcttacagaatgcctttctaacctgaaggatacccagatttctttctttatgtacaagatggaaaatcccctacccctcaaaaacaggttgagtttatgggccagaatattttgtataccagacattggtaagctctcatggtttacaggaaggctctggttccccctcacaggatgagcatgctcagttgggcgtgtgtggaggagctgtgaacttcacgctcttcaaccccagactttgactgtatagttttttgtttttttaactgttccatcaggaaaaaaatgtgtcagttgattttggtgtgacttgtgtaaatggttcatggcaatgacgttgggttgcttcctaggcctggctgagttgtgcctaagggtggctgaaatactaaaacacttatcttacagcaagtgaacaggggctacctgccacatcccctccacagatgcactttaaaaagccactcatgctttggcttaaactgtaattaa

SEQ ID NO: 17476 - DNA, 2640 bp, Homo sapiens
  source 1..2640: mol_type = unassigned DNA
gctccaggagccggctgagcgcgccccgcggggggctccgcagcccttacaaggaatttggtggcgcttggggtggccccgcccgccaggctccaccggcccctcctccccgcggggtggcagcccgctggacgcggggccgagggcgcggacgccgacgggtccggggccgcgcgctccagggaagcctgcatcccgctcccctgggccccgacgggcgggcgcactgcgcggggcccaccggccgcagacctgcgtggccgtccagggcgtcgccatgtcctcggtgtttggaaaaccccgcgcgggcagcgggcctcagagcgcgcccctcgaggtcaacctggccatcctggggcgccgcggggctggcaagtctgccctgaccgtgaagtttctgaccaagaggtttatcagtgaatatgaccccaacttggaggacacctacagctccgaggagactgtggaccaccagcctgtccacctgagggtcatggacactgcagacctggacacccccaggaactgcgagcgctacctgaactgggcccatgccttcctggtggtgtacagcgtcgacagccgccagagctttgatagcagcagcagctacctggagctgcttgccttgcacgcgaaggagacacagcgcagcatccctgccctgctgctgggcaacaagctggacatggctcagtacaggcaagtcaccaaggcagagggtgtggctttggcaggcaggtttgggtgcctgtttttcgaggtctctgcctgtctggactttgagcacgtgcagcatgtcttccacgaggcagtgcgagaggcacggcgggagctggagaagagccccctgacccggcccctcttcatctccgaggagagggccctgccccaccaggccccgctcaccgcgcggcatgggctggccagctgcaccttcaacacgctctccaccatcaacctgaaggagatgcccactgtggcccaggccaagctggtcaccgtgaagtcatcccgggcccagagcaagcgcaaggcgcctaccctgactctcctgaagggcttcaagatcttctgaggccccctccccaggaagcctaggctcggtggctggacaggactgcagcaggacagggactggcttctcaccaccagcctttccgtctgatggacagcagaccccgcctccagcaccaagcagtgtccctacactcaattcactgtgtgagctggagtggcaggcagggatgctgcttctgttccctccaggccttggtcttcatggtaaccaccgcgtctgtggccgtagagggaaacagccactgtgacaacccagagacctggggtcagccttaagtaggaagaaattgcagtgtctatcctgctgccatcagcccttcctgctccagctacagttgggccagctgtggccttagtggatggtctgggtggatggctctgtcaatgtcaggcccgagaacagcctgcggaatgacagcctggggtccttgtgccacctggtggacgggaaaggcagggcggctgcagtttcagaggccagagcctggccctcctgtcatctgctgacttcacagaaggcccaggctacaaaccccacagtttatccaaggaaaatctagttaaaataatccaatggacagaagccccaggaaggggtatttccaacacttggcgtctcaatgaggataaaagggagggactgtaggttgtccagcataaggagccccagagttctttcaccagcagacagattctccatgtgttttcccactgttaaggactctgtccaaagaacctcagcatcagctccctcaagcttaatgatccaggctgcagaagaaagttgtcactccagtgagttacccagggctccagggagcccacagcagcatcagacccatccaggggctacagggcctgcccccctgcaggtagaaacacagtatacccgtttgtcatctggtttggcaggacccaggaccctcagcaatgagtctgagtgttcaaagcccactttagaacctaaagcattttgggttaataaagcaaaattttgcttatgttatttggtggtgtcaccgcagcttataccaagacaccatggctcagacatgggatcaggacacacctttgagatcccactgttagcaagaaaaggctgtccaaggcaggcagtgtggtagttgtctgattttgtttaccacacgccaggtcccagggaagtcttgcacagactcttagcagacaagcagggaaaagagagggtcctggtgggtggaaggattgggaaggggattctgggcctggaagcctgctccttcccctctcagccgtctcaggactactgttggattgcaaacagcatctctgacccagtcttcggactcattctgtaaatggaggagctgaggtcagaggggggctgtgaactactcaagaccacatgcttgcagtcctacaggcttcccgacccacaggccagctacggattttgcacttttgctccaggccacttgtgtgtgtatgtgtgtgtgtaccactgccatctgaacaaactatgcaataccacctgctcccttccaggagcattttaataaaagattttttttaataacagaa

SEQ ID NO: 17477 - DNA, 1523 bp, Homo sapiens
  source 1..1523: mol_type = unassigned DNA
ccgcgcgctccagggaagcctgcatcccgctcccctgggccccgacgggcgggcgcactgcgcggggcccaccggccgcagacctgcgtggccgtccagggcgtcgccatgtcctcggtgtttggaaaaccccgcgcgggcagcgggcctcagagcgcgcccctcgaggtcaacctggccatcctggggcgccgcggggctggcaagtctgaggacacctacagctccgaggagactgtggaccaccagcctgtccacctgagggtcatggacactgcagacctggacacccccaggaactgcgagcgctacctgaactgggcccatgccttcctggtggtgtacagcgtcgacagccgccagagctttgatagcagcagcagctacctggagctgcttgccttgcacgcgaaggagacacagcgcagcatccctgccctgctgctgggcaacaagctggacatggctcagtacaggcaagtcaccaaggcagagggtgtggctttggcaggcaggtttgggtgcctgtttttcgaggtctctgcctgtctggactttgagcacgtgcagcatgtcttccacgaggcagtgcgagaggcacggcgggagctggagaagagccccctgacccggcccctcttcatctccgaggagagggccctgccccaccaggccccgctcaccgcgcggcatgggctggccagctgcaccttcaacacgctctccaccatcaacctgaaggagatgcccactgtggcccaggccaagctggtcaccgtgaagtcatcccgggcccagagcaagcgcaaggcgcctaccctgactctcctgaagggcttcaagatcttctgaggccccctccccaggaagcctaggctcggtggctggacaggactgcagcaggacagggactggcttctcaccaccagcctttccgtctgatggacagcagaccccgcctccagcaccaagcagtgtccctacactcaattcactgtgtgagctggagtggcaggcagggatgctgcttctgttccctccaggccttggtcttcatggtaaccaccgcgtctgtggccgtagagggaaacagccactgtgacaacccagagacctggggtcagccttaagtaggaagaaattgcagtgtctatcctgctgccatcagcccttcctgctccagctacagttgggccagctgtggccttagtggatggtctgggtggatggctctgtcaatgtcaggcccgagaacagcctgcggaatgacagcctggggtccttgtgccacctggtggacgggaaaggcagggcggctgcagtttcagaggccagagcctggccctcctgtcatctgctgacttcacagaaggcccaggctacaaaccccacagtttatccaaggaaaatctagttaaaataatccaatggacagaagccccaggaaggggtatttccaacacttggcgtctcaatgaggataaaagggagggactgtaggttgtccagcataaggagcccca

SEQ ID NO: 17478 - DNA, 982 bp, Homo sapiens
  source 1..982: mol_type = unassigned DNA
tggctcatgtgatgtggtggcccgcaggctgtatggctgcaggcccggagggcatctggagacctgtgtgatcactcatatccttagaagaaatggtaataatgggtccagaattggtgggttcttggtctgacttcaagaatgaagccgcggaccctcgagccctgaccgtgaagtttctgaccaagaggtttatcagtgaatatgaccccaacttggaggacacctacagctccgaggagactgtggaccaccagcctgtccacctgagggtcatggacactgcagacctggacacccccaggaactgcgagcgctacctgaactgggcccatgccttcctggtggtgtacagcgtcgacagccgccagagctttgatagcagcagcagctacctggagctgcttgccttgcacgcgaaggagacacagcgcagcatccctgccctgctgctgggcaacaagctggacatggctcagtacaggcaagtcaccaaggcagagggtgtggctttggcaggcaggtttgggtgcctgtttttcgaggtctctgcctgtctggactttgagcacgtgcagcatgtcttccacgaggcagtgcgagaggcacggcgggagctggagaagagccccctgacccggcccctcttcatctccgaggagagggccctgccccaccaggccccgctcaccgcgcggcatgggctggccagctgcaccttcaacacgctctccaccatcaacctgaaggagatgcccactgtggcccaggccaagctggtcaccgtgaagtcatcccgggcccagagcaagcgcaaggcgcctaccctgactctcctgaagggcttcaagatcttctgaggccccctccccaggaagcctaggctcggtggctggacaggactgcagcaggacagggactggcttctcaccaccagcctttccgtctgatggacagcagaccccgcctccagcaccaagca

SEQ ID NO: 17479 - DNA, 5201 bp, Homo sapiens
  source 1..5201: mol_type = unassigned DNA
gtggctagtgaggcccagcctgtatatttctaacagggcgccccatgccccagcaccctccccactgggaccactcctcatagaatagccccactccaaagcatttatgacttgaaccttctgaccaaagctctctgaatcttgggggaacctagaagaggaaaaggaatgtcaggctctgtcagagtcagccaagcgagatcagccaggggtctgctccctgcagaccatacggggagccagggtttgcaatgagtctaaactggaatcttaccctgcaaaacgaatggccactattagagttttccaaaaccactctgaagcccctgactgtgcccaaagttcagatctcagaggtggatgccccgccggagggtgaccagatgccaagctccacagactccaggggcctgaagcccctgcaggaggacaccccacagctgatgcgcacacgcagtgatgttggggtgcgtcgccgtggcaatgtgaggacgcctagtgaccagcggcgaatcagacgccaccgcttctccatcaacggccatttctacaaccataagacatccgtgttcacaccagcctatggctctgtcaccaacgtccgcatcaacagcaccatgaccaccccacaggtcctgaagctgctgctcaacaaatttaagattgagaattcagcagaggagtttgccttgtacgtggtccatacgagtggtgggcccatgtgagcagatctccaaagtgttcctaatggagaaggaccaggtggaggaagtcacctacgacgtggcccagtatataaagttcgagatgccggtacttaaaagcttcattcagaagctccaggaggaagaagatcgggaagtaaagaagctgatgcgcaagtacaccgtgctccggctaatgattcgacagaggctggaggagatagccgagaccccagcaacaatctgagccatgagaacgaggggatctgggcaccccaggaaccgccattgcccataagacccccaggaagctaggcactttctttccatggaaacatttagacacaaacctccccagctccggccaagccatcatttgctacctggagctggatgtagaagtcagcagacagctccctatccctggacccctgccctccttttttctgctcacaaggacttttgattttagttataaggaggacccaaaatgtgtgtgtgtacatgtgtgtgcacacatggtacgtgtccatgtgcctacctgatactttcacatgtaattaaattccaggcaaccagcacaagagccgtgagcttggcacatgtgctgctcgtgagcaggaaaatcagaggagccactgatctgagtggtatttaggttgaaggaaagatttctcctctcaagtgccagggagcagccacacgtctgtctgtgtttagagagggaagagggttctccaggttcaccatttgggttgtttatatgttggtagaaattctccctgtatgcctagaaggatcagtgaatgtaagagccttggaaattaacaaaataacagccacataaccttgcggcaagtctgatggaaagaaaaagataaaccatccgtggggtagatgcaataagcccacgtatttttacactggaaacgttgattgttttaaatgacaaagacatatgtgatgttctatgtggaaacctgtgaagagtggattctgcctccatctctgcctccatggctacctttaggagacagagaagatcctgtgtgtttctctgtacccagctgacagcctgtctctatggcgcttccttgagtggaaggaaatgtctcaagaaacaaagatctcgctggtgcgtacacagtgctgaccagctagtgtggccagggcctggtggcctggtggccaggaagtttcaggttgaagggaaatgtcgaggctacctgcagatatgacaggtgccttgaacgcagcccatcttcatgtcatcaaaggtcttcctgcacttgaagctggggcgatgtttgcagtcaagaccattctttccaacctctgggttcttgcaagttgccctcaccttgtgtgtggagatgcattccaagaatgaagcctcatcttgctactgagtgtggggttcagggaagctctttaggccacctggtgaaggtgcatggggaggatggagcttctcctcagctcctctgagcagccacctatgtgatctttaaatccaaccccaatgggagaaaagggcaagaacagtctgtgccctgggactcctatcaggaagcttgacaggcagctgggcatcagtgcagctgatatcgtttgaggagggagacagatgcttggacctgggtgcctggctatggagattgaccaagcaagatcaggagctcctgatagcaggcgtctttgagcctagctggggtagaggcactgcccatctcttctccaccttctctccacagaatgtttgcagagctgggcagttgaggaaaggacagcccctggttggtgcctccaaaggaaggtggacttttttggtggagacgtttctgccctgggcaccctcctgcccccgattcatacctatggcttcttgagaaggctcacagctgtggtcttaacgtagactgcagaaagatggcatgcggcccctggcatttcgccaagggttttatagcaagtctccttcctccatagggacagcagcaccagccctgtggggcatggagtggaagcccagaagggcttctgcaagctgcacagaactggggtaagaagacaaagagtagccaccgggagaggcttcctttgttacagctgggaaagaacagttctgtgaatgcaaacacctcctgagttttgcaattgagaaaatgatttggagaacttctcttctggtaatttttattttgaatgttcagggccttagttggccccagtaattctccttggaggacttgggagaagaatttccacaaagcaaactactaaccactagctcttactggacagcgatttctggcttataagagttctctttgatttgcactagcactacgatagtgttagatggggaaatactgcaacatgtccagttggccagatcactttccaagggagcgatactaaggcagactcagctttttaaagatgggaggtcaggaggtggaagtgagaggagatcccatctcacacaacacacttccacgtaatgcagaccacacttttccattttgtcctgccctcttgagaggtcatttctcacgtcctaagaacctgatcagaaattttggaagggttctttgaaatagcagcagttgaaacagagacactttgccacagtgtggagcagattttctcactggtatcacatggtcttgcagttttgaactcttcgaccgatttgtgggagtttatgtaattgcgtgcaatgaacctgaaattgtgtaaaggacaaaagaccagtttatagggttgggttttttttccaacttgtgaaaagcagtttagctgcatctgtctccccaccacccccaccccgggaggggcttatgttacaaggtgatcaagtgaaggaaaaacctgagcctatctggctgggatggtggaattaagcacaaggtcacattctctgtgatcacatgagagggaaggtgatgacttaaatggcagggggtggggattatcttggggagaggctgaaaagcacaaaagatagtcttccctgtacgtattggtgaagaacgtgcacaaggctggatggacttcaacttggagttgagttgaggcaagaggatttctggatattagtcacccatctgcaagaaaaatgctgaggcctcgggtcaagattttgatctgagacatgctgatgcttcaaggagaaatattttcacaatcctctcttccctcaccagaagagaacagtactctctcctagaaacctctaggtaaacacattttatcctaatatcggtagcatataatgccccccccaaaatatctgttttccatgcaaaaaagtctcaacaagaagtctgtggagttgagtggttacttcaaagtgtcaggagagtgaagaaattggccacagaagagcaagaagctctcttaagaaaagggaattctctttaaagaaaccaccaccaacaacaaaacaaccaaaaaccatgttttatgtcaaagctctgtagcacagagaatgtggtgtcacagatacatcgccgagagaggtttctttctttcttttttttttttttgagacagagtctggttctgtttcccaggctggagtgcagtggtgggatctcagctcactgcaacatccgcctctggggttcaagtgattctcctgtctcagcctcccaagtagctggaattacagggacccgccaccacgcccggctaatttttttgtgtggttttagtagaggtggggtttcaccatcttggccaggctggtcttgaactcctgacctcgtgatccacccgcctaggcctcccaaagtgttgggattacaggcgtgagccactgtgcccagccaaaagagaaatttctacatgaacaaggcaatttcagtgtcttacagcggccaaaccatgacgtgaagaatgagataggagacaggagatcaccataagcgtccctgatatagcagcacacattttcacgtttccacttaaatcgttttgcacaaagtcttgcttcgctcagatgagatgagatatgatttcctagagatgtaaaaataagaatgaatgtggcgcccccttcttccagatgtaatagaaagctctgccctatcacaaggggggtgttgaagcgccccttgtgttttaactgtatttaactgagcacaagatgcacaagctgtggtgggaaaccctcagtttacctttggagtcttccctgcagatcgcagacctgtttccaggctgatgtttctggtgtgtaattgctagcgtttctgaagggttttcccaattgttttagccttgtgaagtattcttaattataacttgcctttcagcgatggtacatgacttgattcaacgtttggttctgaacttacacactgatgcgtttactcatctaacataatctgacagggcctcagcaagggagccatacatttttgtaacattttgatatgttttaatgcatctgacttagatcttactgaaataaagcacttttcaaagaga

SEQ ID NO: 17480 - DNA, 5427 bp, Homo sapiens
  source 1..5427: mol_type = unassigned DNA
ggggaggaagaaaggcgaaggcaaggcgaaggggtggagagtgatatgaagagcgagagaaaagagaggacagcggacgagcagatccggtatctggaatcccggcgcctagaacgtgtttttcgggagagcaaaggctgtgtctacggcagcctggggatatagcctctccttccgatgaaaagagaaaggaagaatggactacagccaccaaacgtccctagtcccatgtggacaagataaatacatttccaaaaatgaacttctcttgcatctgaagacctacaacttgtactatgaaggccagaatttacagctccggcaccgggaggaagaagacgagttcattgtggaggggctcctgaacatctcctggggcctgcgccggcccattcgcctgcagatgcaggatgacaacgaacgcattcgaccccctccatcctcctcctcctggcactctggctgtaacctgggggctcagggaaccactctgaagcccctgactgtgcccaaagttcagatctcagaggtggatgccccgccggagggtgaccagatgccaagctccacagactccaggggcctgaagcccctgcaggaggacaccccacagctgatgcgcacacgcagtgatgttggggtgcgtcgccgtggcaatgtgaggacgcctagtgaccagcggcgaatcagacgccaccgcttctccatcaacggccatttctacaaccataagacatccgtgttcacaccagcctatggctctgtcaccaacgtccgcatcaacagcaccatgaccaccccacaggtcctgaagctgctgctcaacaaatttaagattgagaattcagcagaggagtttgccttgtacgtggtccatacgagtggtgagaaacagaagctgaaggccaccgattacccgctgattgcccgaatcctccagggcccatgtgagcagatctccaaagtgttcctaatggagaaggaccaggtggaggaagtcacctacgacgtggcccagtatataaagttcgagatgccggtacttaaaagcttcattcagaagctccaggaggaagaagatcgggaagtaaagaagctgatgcgcaagtacaccgtgctccggctaatgattcgacagaggctggaggagatagccgagaccccagcaacaatctgagccatgagaacgaggggatctgggcaccccaggaaccgccattgcccataagacccccaggaagctaggcactttctttccatggaaacatttagacacaaacctccccagctccggccaagccatcatttgctacctggagctggatgtagaagtcagcagacagctccctatccctggacccctgccctccttttttctgctcacaaggacttttgattttagttataaggaggacccaaaatgtgtgtgtgtacatgtgtgtgcacacatggtacgtgtccatgtgcctacctgatactttcacatgtaattaaattccaggcaaccagcacaagagccgtgagcttggcacatgtgctgctcgtgagcaggaaaatcagaggagccactgatctgagtggtatttaggttgaaggaaagatttctcctctcaagtgccagggagcagccacacgtctgtctgtgtttagagagggaagagggttctccaggttcaccatttgggttgtttatatgttggtagaaattctccctgtatgcctagaaggatcagtgaatgtaagagccttggaaattaacaaaataacagccacataaccttgcggcaagtctgatggaaagaaaaagataaaccatccgtggggtagatgcaataagcccacgtatttttacactggaaacgttgattgttttaaatgacaaagacatatgtgatgttctatgtggaaacctgtgaagagtggattctgcctccatctctgcctccatggctacctttaggagacagagaagatcctgtgtgtttctctgtacccagctgacagcctgtctctatggcgcttccttgagtggaaggaaatgtctcaagaaacaaagatctcgctggtgcgtacacagtgctgaccagctagtgtggccagggcctggtggcctggtggccaggaagtttcaggttgaagggaaatgtcgaggctacctgcagatatgacaggtgccttgaacgcagcccatcttcatgtcatcaaaggtcttcctgcacttgaagctggggcgatgtttgcagtcaagaccattctttccaacctctgggttcttgcaagttgccctcaccttgtgtgtggagatgcattccaagaatgaagcctcatcttgctactgagtgtggggttcagggaagctctttaggccacctggtgaaggtgcatggggaggatggagcttctcctcagctcctctgagcagccacctatgtgatctttaaatccaaccccaatgggagaaaagggcaagaacagtctgtgccctgggactcctatcaggaagcttgacaggcagctgggcatcagtgcagctgatatcgtttgaggagggagacagatgcttggacctgggtgcctggctatggagattgaccaagcaagatcaggagctcctgatagcaggcgtctttgagcctagctggggtagaggcactgcccatctcttctccaccttctctccacagaatgtttgcagagctgggcagttgaggaaaggacagcccctggttggtgcctccaaaggaaggtggacttttttggtggagacgtttctgccctgggcaccctcctgcccccgattcatacctatggcttcttgagaaggctcacagctgtggtcttaacgtagactgcagaaagatggcatgcggcccctggcatttcgccaagggttttatagcaagtctccttcctccatagggacagcagcaccagccctgtggggcatggagtggaagcccagaagggcttctgcaagctgcacagaactggggtaagaagacaaagagtagccaccgggagaggcttcctttgttacagctgggaaagaacagttctgtgaatgcaaacacctcctgagttttgcaattgagaaaatgatttggagaacttctcttctggtaatttttattttgaatgttcagggccttagttggccccagtaattctccttggaggacttgggagaagaatttccacaaagcaaactactaaccactagctcttactggacagcgatttctggcttataagagttctctttgatttgcactagcactacgatagtgttagatggggaaatactgcaacatgtccagttggccagatcactttccaagggagcgatactaaggcagactcagctttttaaagatgggaggtcaggaggtggaagtgagaggagatcccatctcacacaacacacttccacgtaatgcagaccacacttttccattttgtcctgccctcttgagaggtcatttctcacgtcctaagaacctgatcagaaattttggaagggttctttgaaatagcagcagttgaaacagagacactttgccacagtgtggagcagattttctcactggtatcacatggtcttgcagttttgaactcttcgaccgatttgtgggagtttatgtaattgcgtgcaatgaacctgaaattgtgtaaaggacaaaagaccagtttatagggttgggttttttttccaacttgtgaaaagcagtttagctgcatctgtctccccaccacccccaccccgggaggggcttatgttacaaggtgatcaagtgaaggaaaaacctgagcctatctggctgggatggtggaattaagcacaaggtcacattctctgtgatcacatgagagggaaggtgatgacttaaatggcagggggtggggattatcttggggagaggctgaaaagcacaaaagatagtcttccctgtacgtattggtgaagaacgtgcacaaggctggatggacttcaacttggagttgagttgaggcaagaggatttctggatattagtcacccatctgcaagaaaaatgctgaggcctcgggtcaagattttgatctgagacatgctgatgcttcaaggagaaatattttcacaatcctctcttccctcaccagaagagaacagtactctctcctagaaacctctaggtaaacacattttatcctaatatcggtagcatataatgccccccccaaaatatctgttttccatgcaaaaaagtctcaacaagaagtctgtggagttgagtggttacttcaaagtgtcaggagagtgaagaaattggccacagaagagcaagaagctctcttaagaaaagggaattctctttaaagaaaccaccaccaacaacaaaacaaccaaaaaccatgttttatgtcaaagctctgtagcacagagaatgtggtgtcacagatacatcgccgagagaggtttctttctttcttttttttttttttgagacagagtctggttctgtttcccaggctggagtgcagtggtgggatctcagctcactgcaacatccgcctctggggttcaagtgattctcctgtctcagcctcccaagtagctggaattacagggacccgccaccacgcccggctaatttttttgtgtggttttagtagaggtggggtttcaccatcttggccaggctggtcttgaactcctgacctcgtgatccacccgcctaggcctcccaaagtgttgggattacaggcgtgagccactgtgcccagccaaaagagaaatttctacatgaacaaggcaatttcagtgtcttacagcggccaaaccatgacgtgaagaatgagataggagacaggagatcaccataagcgtccctgatatagcagcacacattttcacgtttccacttaaatcgttttgcacaaagtcttgcttcgctcagatgagatgagatatgatttcctagagatgtaaaaataagaatgaatgtggcgcccccttcttccagatgtaatagaaagctctgccctatcacaaggggggtgttgaagcgccccttgtgttttaactgtatttaactgagcacaagatgcacaagctgtggtgggaaaccctcagtttacctttggagtcttccctgcagatcgcagacctgtttccaggctgatgtttctggtgtgtaattgctagcgtttctgaagggttttcccaattgttttagccttgtgaagtattcttaattataacttgcctttcagcgatggtacatgacttgattcaacgtttggttctgaacttacacactgatgcgtttactcatctaacataatctgacagggcctcagcaagggagccatacatttttgtaacattttgatatgttttaatgcatctgacttagatcttactgaaataaagcacttttcaaagaga

SEQ ID NO: 17481 - DNA, 5282 bp, Homo sapiens
  source 1..5282: mol_type = unassigned DNA
aatgctgtgagttccttgttaggcctctccttccgatgaaaagagaaaggaagaatggactacagccaccaaacgtccctagtcccatgtggacaagataaatacatttccaaaaatgaacttctcttgcatctgaagacctacaacttgtactatgaaggccagaatttacagctccggcaccgggaggaagaagacgagttcattgtggaggggctcctgaacatctcctggggcctgcgccggcccattcgcctgcagatgcaggatgacaacgaacgcattcgaccccctccatcctcctcctcctggcactctggctgtaacctgggggctcagggaaccactctgaagcccctgactgtgcccaaagttcagatctcagaggtggatgccccgccggagggtgaccagatgccaagctccacagactccaggggcctgaagcccctgcaggaggacaccccacagctgatgcgcacacgcagtgatgttggggtgcgtcgccgtggcaatgtgaggacgcctagtgaccagcggcgaatcagacgccaccgcttctccatcaacggccatttctacaaccataagacatccgtgttcacaccagcctatggctctgtcaccaacgtccgcatcaacagcaccatgaccaccccacaggtcctgaagctgctgctcaacaaatttaagattgagaattcagcagaggagtttgccttgtacgtggtccatacgagtggtgagaaacagaagctgaaggccaccgattacccgctgattgcccgaatcctccagggcccatgtgagcagatctccaaagtgttcctaatggagaaggaccaggtggaggaagtcacctacgacgtggcccagtatataaagttcgagatgccggtacttaaaagcttcattcagaagctccaggaggaagaagatcgggaagtaaagaagctgatgcgcaagtacaccgtgctccggctaatgattcgacagaggctggaggagatagccgagaccccagcaacaatctgagccatgagaacgaggggatctgggcaccccaggaaccgccattgcccataagacccccaggaagctaggcactttctttccatggaaacatttagacacaaacctccccagctccggccaagccatcatttgctacctggagctggatgtagaagtcagcagacagctccctatccctggacccctgccctccttttttctgctcacaaggacttttgattttagttataaggaggacccaaaatgtgtgtgtgtacatgtgtgtgcacacatggtacgtgtccatgtgcctacctgatactttcacatgtaattaaattccaggcaaccagcacaagagccgtgagcttggcacatgtgctgctcgtgagcaggaaaatcagaggagccactgatctgagtggtatttaggttgaaggaaagatttctcctctcaagtgccagggagcagccacacgtctgtctgtgtttagagagggaagagggttctccaggttcaccatttgggttgtttatatgttggtagaaattctccctgtatgcctagaaggatcagtgaatgtaagagccttggaaattaacaaaataacagccacataaccttgcggcaagtctgatggaaagaaaaagataaaccatccgtggggtagatgcaataagcccacgtatttttacactggaaacgttgattgttttaaatgacaaagacatatgtgatgttctatgtggaaacctgtgaagagtggattctgcctccatctctgcctccatggctacctttaggagacagagaagatcctgtgtgtttctctgtacccagctgacagcctgtctctatggcgcttccttgagtggaaggaaatgtctcaagaaacaaagatctcgctggtgcgtacacagtgctgaccagctagtgtggccagggcctggtggcctggtggccaggaagtttcaggttgaagggaaatgtcgaggctacctgcagatatgacaggtgccttgaacgcagcccatcttcatgtcatcaaaggtcttcctgcacttgaagctggggcgatgtttgcagtcaagaccattctttccaacctctgggttcttgcaagttgccctcaccttgtgtgtggagatgcattccaagaatgaagcctcatcttgctactgagtgtggggttcagggaagctctttaggccacctggtgaaggtgcatggggaggatggagcttctcctcagctcctctgagcagccacctatgtgatctttaaatccaaccccaatgggagaaaagggcaagaacagtctgtgccctgggactcctatcaggaagcttgacaggcagctgggcatcagtgcagctgatatcgtttgaggagggagacagatgcttggacctgggtgcctggctatggagattgaccaagcaagatcaggagctcctgatagcaggcgtctttgagcctagctggggtagaggcactgcccatctcttctccaccttctctccacagaatgtttgcagagctgggcagttgaggaaaggacagcccctggttggtgcctccaaaggaaggtggacttttttggtggagacgtttctgccctgggcaccctcctgcccccgattcatacctatggcttcttgagaaggctcacagctgtggtcttaacgtagactgcagaaagatggcatgcggcccctggcatttcgccaagggttttatagcaagtctccttcctccatagggacagcagcaccagccctgtggggcatggagtggaagcccagaagggcttctgcaagctgcacagaactggggtaagaagacaaagagtagccaccgggagaggcttcctttgttacagctgggaaagaacagttctgtgaatgcaaacacctcctgagttttgcaattgagaaaatgatttggagaacttctcttctggtaatttttattttgaatgttcagggccttagttggccccagtaattctccttggaggacttgggagaagaatttccacaaagcaaactactaaccactagctcttactggacagcgatttctggcttataagagttctctttgatttgcactagcactacgatagtgttagatggggaaatactgcaacatgtccagttggccagatcactttccaagggagcgatactaaggcagactcagctttttaaagatgggaggtcaggaggtggaagtgagaggagatcccatctcacacaacacacttccacgtaatgcagaccacacttttccattttgtcctgccctcttgagaggtcatttctcacgtcctaagaacctgatcagaaattttggaagggttctttgaaatagcagcagttgaaacagagacactttgccacagtgtggagcagattttctcactggtatcacatggtcttgcagttttgaactcttcgaccgatttgtgggagtttatgtaattgcgtgcaatgaacctgaaattgtgtaaaggacaaaagaccagtttatagggttgggttttttttccaacttgtgaaaagcagtttagctgcatctgtctccccaccacccccaccccgggaggggcttatgttacaaggtgatcaagtgaaggaaaaacctgagcctatctggctgggatggtggaattaagcacaaggtcacattctctgtgatcacatgagagggaaggtgatgacttaaatggcagggggtggggattatcttggggagaggctgaaaagcacaaaagatagtcttccctgtacgtattggtgaagaacgtgcacaaggctggatggacttcaacttggagttgagttgaggcaagaggatttctggatattagtcacccatctgcaagaaaaatgctgaggcctcgggtcaagattttgatctgagacatgctgatgcttcaaggagaaatattttcacaatcctctcttccctcaccagaagagaacagtactctctcctagaaacctctaggtaaacacattttatcctaatatcggtagcatataatgccccccccaaaatatctgttttccatgcaaaaaagtctcaacaagaagtctgtggagttgagtggttacttcaaagtgtcaggagagtgaagaaattggccacagaagagcaagaagctctcttaagaaaagggaattctctttaaagaaaccaccaccaacaacaaaacaaccaaaaaccatgttttatgtcaaagctctgtagcacagagaatgtggtgtcacagatacatcgccgagagaggtttctttctttcttttttttttttttgagacagagtctggttctgtttcccaggctggagtgcagtggtgggatctcagctcactgcaacatccgcctctggggttcaagtgattctcctgtctcagcctcccaagtagctggaattacagggacccgccaccacgcccggctaatttttttgtgtggttttagtagaggtggggtttcaccatcttggccaggctggtcttgaactcctgacctcgtgatccacccgcctaggcctcccaaagtgttgggattacaggcgtgagccactgtgcccagccaaaagagaaatttctacatgaacaaggcaatttcagtgtcttacagcggccaaaccatgacgtgaagaatgagataggagacaggagatcaccataagcgtccctgatatagcagcacacattttcacgtttccacttaaatcgttttgcacaaagtcttgcttcgctcagatgagatgagatatgatttcctagagatgtaaaaataagaatgaatgtggcgcccccttcttccagatgtaatagaaagctctgccctatcacaaggggggtgttgaagcgccccttgtgttttaactgtatttaactgagcacaagatgcacaagctgtggtgggaaaccctcagtttacctttggagtcttccctgcagatcgcagacctgtttccaggctgatgtttctggtgtgtaattgctagcgtttctgaagggttttcccaattgttttagccttgtgaagtattcttaattataacttgcctttcagcgatggtacatgacttgattcaacgtttggttctgaacttacacactgatgcgtttactcatctaacataatctgacagggcctcagcaagggagccatacatttttgtaacattttgatatgttttaatgcatctgacttagatcttactgaaataaagcacttttcaaag

SEQ ID NO: 17482 - DNA, 1973 bp, Homo sapiens
  source 1..1973: mol_type = unassigned DNA
caggcaacaaggaactaatactcggggtttacaggaaccaggggatgggccagatatggagaaagagacgcctctggccttgggggctcgttcttgagggaatcagcgtgatggggatgagaagggcatctttggaacgggggccttctccataggaagaggaggcgagtcccctggccatatttaaaccacagttctccacgccacctgtgcgactcgggatccaacctccccgcaccagccccagtccaggtacctggaacttagtccgatcggtaaccggcgactacgtggggtacaggtacccgagcgcgcccccgacagacgcaccgacctgcgcgcgcgccgcgggcaggatgcgtgcgcactccccggacgtcccgccccgccccctctgcggccccgaagctgggcggcgtgcgcgcccccgcgccgcgccgagccgggcgctcggaaaggcgtccccgcggtgcctgacagttccttcctcagcgcctgccccgtgagtgacgaggagcgcggagtctcgccatatcaggagggccctgttacgtgaggctgtgcaccgagactattccaggaagaagaggggacacttggtgggcggggtgatttcgggcagtcaggtgggcgacccgcgtaggcgtctgaaaggcccgcgtcgttagggagggcaggagtggcgtctctggttacggggtcgggcaaagggcagaggtcaccgtccaggttggacagcagcacctttgagcgatggcggcgtctggggaaccccagaggcagtggcaagaggaggtggcggcggtggtagtggtgggctcctgcatgaccgacctggtcagtcttacttctcgtttgccaaaaactggagaaaccatccatggacataagttttttattggctttggagggaaaggtgccaaccagtgtgtccaagctgctcggcttggagcaatgacgtccatggtgtgtaaggttggcaaagattcttttggcaatgattatatagaaaacttaaaacagaatgatatttctacagaatttacatatcagactaaagatgctgctacaggaactgcttctataattgtcaataatgaaggccagaatatcattgtcatagtggctggagcaaatttacttttgaatacggaggatctgagggcagcagccaatgtcattagcagagccaaagtcatggtctgccagctcgaaataactccagcaacttctttggaagccctaacaatggcccgcaggagtggagtgaaaaccttgttcaatccagcccctgccattgctgacctggatccccagttctacaccctctcagatgtgttctgctgcaatgaaagtgaggctgagattttaactggcctcacggtgggcagcgctgcagatgctggggaggctgcattagtgctcttgaaaaggggctgccaggtggtaatcattaccttaggggctgaaggatgtgtggtgctgtcacagacagaacctgagccaaagcacattcccacagagaaagtcaaggctgtggataccacgggtgctggtgacagctttgtgggagctctggccttctacctggcttactatccaaatctgtccttggaagacatgctcaacagatccaatttcattgcagcagtcagtgtccaggctgcaggaacacagtcatcttacccttacaaaaaagaccttccgcttactctgttttgattgctattagtcccaaaataaatatacctgggaataaaatgtacttgggggtggctgctcctggctaatgcttattagaaaatgtcctcgtcccctttctttgcaaatattagttcttttacgaagtcatcctcaagcttcaatttatttataacgatgattcttttgctttccatgcatttgcacaaaacaaccagaattaaagattccacaaccaagatctgtacaaacataaagacaagtaacctcaa

SEQ ID NO: 17483 - DNA, 2151 bp, Homo sapiens
  source 1..2151: mol_type = unassigned DNA
ggacagcagcacctttgagcgatggcggcgtctggggaaccccagaggcagtggcaagaggaggtggcggcggtggtagtggtgggctcctgcatgaccgacctggtcaggaggatgtgcatgaggatatgttatgtgcacttttgttgccagcccacaccacagctgcagaactgttcaagtctttgcgtgattacatgtcaggaaaactgaactggtcattttgtgtgagtatatgcatggacagagtggctgccatggctggacagcttctggtttcactactcacatcaaagaggttgcttctgaatgtgagtctacacaccatgtcatccatagagaaatgctggctagccaaaaaatgtcacctgaacttaacagcattttgcaggatgtgattaaaattatcaaccacgttaaagtacatgcccttaactcacgtctcttcgcacagctctgtgaggaggtgggtgcagtgcacacatgtcttctctcacacacacaagtgagatggctttctaaaggtagatcactgatcagagtttttgagttacaagagccactccggagatttcttttagaaaaacagtcaccactggcagcacatttcagtgacacagaatgggttgcaaacctggcttccttgtgtgacatattcaacctgctcaacgaactcgatctgtcacttcaggggagaatgacaactgtgttcaaattgtcagataaaggggctgcattcaaagccaaactggaattatgggggtgacaagtgaacatggggatttctgacatgtttcaaacattagcagatattttgaaagagactgaaccagggccttctttcccccagctggtgcatgatcacctatctcagcttttaaaggagtttgagcattacttcccaaccacaaaagaccccccagactgggaaggaatggatctgcaacccatttgtggataagccaaggtgaatcgactttgtccgtgctggaaaaggaccaactgcttgagatcgcaaatgacggtggccttaaaagtatgttgaaacagcttcaaatcttcacacagtccggattgaagtcaaggcataatatccagagactgccccaaaagcactgaaaagcttgcttccatttccaacaccctatctttgtgaagcagagttttctgcagtaacagcaaccaaaacgagattatggagtagactggacataaacaacacacttcagtcttacttctcgtttgccaaaaactggagaaaccatccatggacataagttttttattggctttggagggaaaggtgccaaccagtgtgtccaagctgctcggcttggagcaatgacgtccatggtgtgtaaggttggcaaagattcttttggcaatgattatatagaaaacttaaaacagaatgatatttctacagaatttacatatcagactaaagatgctgctacaggaactgcttctataattgtcaataatgaaggccagaatatcattgtcatagtggctggagcaaatttacttttgaatacggaggatctgagggcagcagccaatgtcattagcagagccaaagtcatggtctgccagctcgaaataactccagcaacttctttggaagccctaacaatggcccgcaggagtggagtgaaaaccttgttcaatccagcccctgccattgctgacctggatccccagttctacaccctctcagatgtgttctgctgcaatgaaagtgaggctgagattttaactggcctcacggtgggcagcgctgcagatgctggggaggctgcattagtgctcttgaaaaggggctgccaggtggtaatcattaccttaggggctgaaggatgtgtggtgctgtcacagacagaacctgagccaaagcacattcccacagagaaagtcaaggctgtggataccacgggtgctggtgacagctttgtgggagctctggccttctacctggcttactatccaaatctgtccttggaagacatgctcaacagatccaatttcattgcagcagtcagtgtccaggctgcaggaacacagtcatcttacccttacaaaaaagaccttccgcttactctgttttgattgctattagtcccaaaataaatatacctgggaataaaatgt

SEQ ID NO: 17484 - DNA, 735 bp, Homo sapiens
  source 1..735: mol_type = unassigned DNA
caatgtcattagcagagccaaagtcatggtctgccagctcgaaataactccagcaacttctttggaagccctaacaatggcccgcaggagtggagtgaaaaccttgttcaatccagcccctgccattgctgacctggatccccagttctacaccctctcagatgtgttctgctgcaatgaaagtgaggctgagattttaactggcctcacggtgggcagcgctgcagatgctggggaggctgcattagtgctcttgaaaaggggctgccaggtggtaatcattaccttaggggctgaaggatgtgtggtgctgtcacagacagaacctgagccaaagcacattcccacagagaaagtcaaggctgtggataccacgtgtagacctggctcaagacccaagagtgaagcagcaagtgtgaagaagcagaaacattataaataacccagagaatccttttataacagcaactgcctactgattttgtggcctaacagctcgagcaaaaatgaatataaatacaacattgtgcaatgactaattactcaaaattttgtgcatcagcagaagtggaacctgtggttggtgctaatattatgaaatgcctttgctgtttaataatctggtagctctgtattatttagcatgcatttttcttggagaacaatgattttatttcaagtacctctcactgaaataaaaaagcagctgttagaagatgaacatttagcagaaaa

SEQ ID NO: 17485 - DNA, 630 bp, Homo sapiens
  source 1..630: mol_type = unassigned DNA
gtgcgcgcccccgcgccgcgccgagccgggcgctcggaaaggcgtccccgcggtgcctgacagttccttcctcagcgcctgccccgtgagtgacgaggagcgcggagtctcgccatatcaggagggccctgttacgtgaggctgtgcaccgagactattccaggaagaagaggggacacttggtgggcggggtgatttcgggcagtcaggtgggcgacccgcgtaggcgtctgaaaggcccgcgtcgttagggagggcaggagtggcgtctctggttacggggtcgggcaaagggcagaggtcaccgtccaggttggacagcagcacctttgagcgatggcggcgtctggggaaccccagaggcagtggcaagaggaggtggcggcggtggtagtggtgggctcctgcatgaccgacctggtcaggagatacatcaggacacagtgatgaacatttgttgaattagtgcatgaatgaaggaatatatgacttctagttacagttcttgcttgtggaagaggaatgctgctgatactgggagtgcagtgggcaagatctgtcttacttctcgtttgccaaaaactggagaaaccatccatggacataagttttttattggctttggaggga

SEQ ID NO: 17486 - DNA, 54 bp, Homo sapiens
  source 1..54: mol_type = unassigned DNA
gtattatccttgtaccttttctgtaaatctaaaactaaaaaaaatgtcctcgtc

SEQ ID NO: 17487 - DNA, 2067 bp, Homo sapiens
  source 1..2067: mol_type = unassigned DNA
ttggcttgtattatgcttggctagatgagacttctgggcagatagtaatggaaattacctcttccaaagagataaagtggagaagaaactcctgtaagtttataacctgcccttggtagcctgtctccattaaaccctatctaagtgagctagacaacccccaggggttggcagactttcgctgtaagaggctggatggtgaatattttaggcattgtgggccacatgcagtctctgtcacgtattcttgttttaaactttcttggctcatgggccttgagagctatggtttgccaacctcttatctagggtttagggtctttaaagaacctattagaaccccctttcctccatgggaaaaaaccctgagatgtttgagaacctttatttactcattatttttctttccttctctcaatcagcagcacccacagtaggacaagatatggggtggagacctgcgggtagttaggcagataaccttggggcccacctgcctagtggtgtgtcagtgaaagttaatccattttcagtctcctgggtacatcttttttaactcccactttcatttttctctgcctgtttcccttcagaaatcatttctaccagttcggagagatccggacgatcactgttgtgcagagacagcagtgtgctttcatccagtttgccacacggcaggctgcagaagtggctgctgagaagtcctttaataagttgattgtaaatggccgcagactgaatgtgaaatggggaagatcccaggcagccagaggaaaagaaaaagagaaagatggaactacagactctgggatcaaactagaacctgttccaggattgccaggagctcttcctcctcctcctgcagcagaagaagaagcctctgccaactacttcaacttgcccccaagtggtcctccagctgtggtgaacattgctctgccaccgccccctggcattgctccacccccacccccaggttttgggccacacatgttccacccaatgggaccaccccctcctttcatgcgggctccaggaccaatccactatccttctcaggaccctcagaggatgggagctcatgctggaaaacacagcagcccctagcaccttgtcaccactctggggctctgtggaagaaagggcacttaaaactcccagtaaatcttggaataaatatatttttccttcccttgtagtttccatggtagctgaatgtgctcagatgtgagcagtcagagactgacagccatgctttcctatacttgttcaaaggatcgatggaccgtaaataagctgccattaacacatctggttactgctgtaacatgactaataaaaccgaacgcctgttccccttacccgtgtgggggacacgcagatgagtgaattggaatgtccagcagagttaccctcccaattatatgttcattttgtatattttttggtcgggggaaaaattgacctgcagtaaaaaaacctttgaccatttttatgtccattggatactttcctttttatcatcttaaaaaaagataactagtactaatcattgtagtggcctaagtgtgatttaactcttgaagtcacaccctccgaaagatgagtagaaaccagcaccagcacagcccagatcttctctttcctctccttttcctcatttattcctaaaggaatctgaccattttacgtctctacggcccaaaaaaagacaaaaataaaaattcctttttattcctgtcaactggatggaaacacaaatttcatggagctgtgtaccatcgaagaaacctggtgtctggcatgaaattactgtaaagaacttcctgtaaaacacgttctttaacaaactgaaatgaaaagcattggagcgtctgaatgaaagacgtgacctcctgctgggactctgatggtcttcagcattcaccttcgtgtgtcttcagtgtctcattgtcatccctgcttctgtttggtcttagagtgtttggatataactgaattgtagatggtaaaggaaatttgatgtgttttttgtttttaaataattaaaacgggtcaattttt

SEQ ID NO: 17488 - DNA, 2342 bp, Homo sapiens
  source 1..2342: mol_type = unassigned DNA
aagaagccctagacgcgtaaataagacgccgaccggcgcggcgctagcctcggggcttgacgggattgtggcggtcctctctcccaattcggaagctacagctacctccggacgctctcaagatggcgacctctctgggttccaacacctacaacaggcagaactgggaggatgcggacttccccattctgtgccagacatgtcttggagaaaacccatatatccgaatgaccaaagaaaagtatgggaaggaatgcaaaatctgtgccaggccattcacagtgtttcgctggtgccctggagtccgcatgcgtttcaagaagactgaagtgtgccaaacctgcagtaaattgaagaatgtctgtcagacctgcctcttagacctagagtatggcctgcccatccaggttcgtgacgcaggattgtcttttaaagatgacatgccaaagtcagatgtcaacaaagagtactatacacagaatatggagagagagatttctaactctgatggaacacggccagttggcatgctggggaaagccacatctaccagtgacatgctgctcaaactggcccggaccacaccctactacaaaaggaatcgaccccacatttgctccttctgggtgaaaggagagtgtaagagaggagaggaatgtccatacagacatgagaagcctacagatccagatgacccccttgctgatcagaatattaaagaccgttattacggaatcaatgatcctgtagctgacaagcttctaaagcgggcttcaacaatgcctcggctggacccaccagaggataaaactatcaccacactatatgttggtggtctaggtgataccattactgagacagatttaagaaatcatttctaccagttcggagagatccggacgatcactgttgtgcagagacagcagtgtgctttcatccagtttgccacacggcaggctgcagaagtggctgctgagaagtcctttaataagttgattgtaaatggccgcagactgaatgtgaaatggggaagatcccaggcagccagaggaaaagaaaaagagaaagatggaactacagactctgggatcaaactagaacctgttccaggattgccaggagctcttcctcctcctcctgcagcagaagaagaagcctctgccaactacttcaacttgcccccaagtggtcctccagctgtggtgaacattgctctgccaccgccccctggcattgctccacccccacccccaggttttgggccacacatgttccacccaatgggaccaccccctcctttcatgcgggctccaggaccaatccactatccttctcaggaccctcagaggatgggagctcatgctggaaaacacagcagcccctagcaccttgtcaccactctggggctctgtggaagaaagggcacttaaaactcccagtaaatcttggaataaatatatttttccttcccttgtagtttccatggtagctgaatgtgctcagatgtgagcagtcagagactgacagccatgctttcctatacttgttcaaaggatcgatggaccgtaaataagctgccattaacacatctggttactgctgtaacatgactaataaaaccgaacgcctgttccccttacccgtgtgggggacacgcagatgagtgaattggaatgtccagcagagttaccctcccaattatatgttcattttgtatattttttggtcgggggaaaaattgacctgcagtaaaaaaacctttgaccatttttatgtccattggatactttcctttttatcatcttaaaaaaagataactagtactaatcattgtagtggcctaagtgtgatttaactcttgaagtcacaccctccgaaagatgagtagaaaccagcaccagcacagcccagatcttctctttcctctccttttcctcatttattcctaaaggaatctgaccattttacgtctctacggcccaaaaaaagacaaaaataaaaattcctttttattcctgtcaactggatggaaacacaaatttcatggagctgtgtaccatcgaagaaacctggtgtctggcatgaaattactgtaaagaacttcctgtaaaacacgttctttaacaaactgaaatgaaaagcattggagcgtctgaatgaaagacgtgacctcctgctgggactctgatggtcttcagcattcaccttcgtgtgtcttcagtgtctcattgtcatccctgcttctgtttggtcttagagtgtttggatataactgaattgtagatggtaaaggaaatttgatgtgttttttgtttttaaataattaaaacgggtcaattttt

SEQ ID NO: 17489 - DNA, 1386 bp, Homo sapiens
  source 1..1386: mol_type = unassigned DNA
caattcggaagctacagctacctccggacgctctcaagatggcgacctctctgggttccaacacctacaacaggcagaactgggaggatgcggacttccccattctgtgccagacatgtcttggagaaaacccatatatccgaatgaccaaagaaaagtatggcctgcccatccaggttcgtgacgcaggattgtcttttaaagatgacatgccaaagtcagatgtcaacaaagagtactatacacagaatatggagagagagatttctaactctgatggaacacggccagttggcatgctggggaaagccacatctaccagtgacatgctgctcaaactggcccggaccacaccctactacaaaaggaatcgaccccacatttgctccttctgggtgaaaggagagtgtaagagaggagaggaatgtccatacagacatgagaagcctacagatccagatgacccccttgctgatcagaatattaaagaccgttattacggaatcaatgatcctgtagctgacaagcttctaaagcgggcttcaacaatgcctcggctggacccaccagaggataaaactatcaccacactatatgttggtggtctaggtgataccattactgagacagatttaagaaatcatttctaccagttcggagagatccggacgatcactgttgtgcagagacagcagtgtgctttcatccagtttgccacacggcaggctgcagaagtggctgctgagaagtcctttaataagttgattgtaaatggccgcagactgaatgtgaaatggggaagatcccaggcagccagaggaaaagaaaaagagaaagatggaactacagactctgggatcaaactagaacctgttccaggattgccaggagctcttcctcctcctcctgcagcagaagaagaagcctctgccaactacttcaacttgcccccaagtggtcctccagctgtggtgaacattgctctgccaccgccccctggcattgctccacccccacccccaggttttgggccacacatgttccacccaatgggaccaccccctcctttcatgcgggctccaggaccaatccactatccttctcaggaccctcagaggatgggagctcatgctggaaaacacagcagcccctagcaccttgtcaccactctggggctctgtggaagaaagggcacttaaaactcccagtaaatcttggaataaatatatttttccttcccttgtagtttccatggtagctgaatgtgctcagatgtgagcagtcagagactgacagccatgctttcctatacttgttcaaaggatcgatggaccgtaaataagctgccattaacacatctggttactgctgtaacatgactaataa

SEQ ID NO: 17490 - DNA, 989 bp, Homo sapiens
  source 1..989: mol_type = unassigned DNA
gggattgtggcggtcctctctcccaattcggaagctacagctacctccggacgctctcaagatggcgacctctctgggttccaacacctacaacaggcagaactgggaggatgcggacttccccattctgtgccagacatgtcttggagaaaacccatatatccgaatgaccaaagaaaagtatgggaaggaatgcaaaatctgtgccaggccattcacagtgtttcgctggtgccctggagtccgcatgcgtttcaagaagactgaagtgtgccaaacctgcagtaaattgaagaatgtctgtcagacctgcctcttagacctagagtatggcctgcccatccaggttcgtgacgcaggattgtcttttaaagatgacatgccaaagtcagatgtcaacaaagagtactatacacagaatatggagagagagatttctaactctgatggaacacggccagttggcatgctggggaaagccacatctaccagtgacatgctgctcaaactggcccggaccacaccctactacaaaaggaatcgaccccacatttgctccttctgggtgaaaggagagtgtaagagaggagaggaatgtccatacagacatgagaagcctacagatccagatgacccccttgctgatcagaatattaaagaccgttattacggaatcaatgatcctgtagctgacaagcttctaaagcgggcttcaacaatgcctcggctggacccaccagaggataaaactatcaccacactatatgttggtggtctaggtgataccattactgagacagatttaaggtttgtgggtataagttagagagttatttttgcctttaactgccctggaataatttatttgcaaaaactgcaagaatgatcattctgtacaaaatacatttttctgtagtctctctattgttagtatcatgctgactggaatttttgtaaaattgtcctttatggtgccacagtaataatgt

SEQ ID NO: 17491 - DNA, 566 bp, Homo sapiens
  source 1..566: mol_type = unassigned DNA
agctacagctacctccggacgctctcaagatggcgacctctctgggttccaacacctacaacaggcagaactgggaggatgcgacatgtcttggagaaaacccatatatccgaatgaccaaagaaaagtatgggaaggaatgcaaaatctgtgccaggccattcacagtgtttcgctggtgccctggagtccgcatgcgtttcaagaagactgaagtgtgccaaacctgcagtaaattgaagaatgtctgtcagacctgcctcttagacctagagtatggcctgcccatccaggttcgtgacgcaggattgtcttttaaagatgacatgccaaagtcagatgtcaacaaagagtactatacacagaatatggagagagagatttctaactctgatggaacacggccagttggcatgctggggaaagccacatctaccagtgacatgctgctcaaactggcccggaccacaccctactacaaaaggaatcgaccccacatttgctccttctgggtgaaaggagagtgtaagagaggagaggaatgtccatacagacatgagaagcct

SEQ ID NO: 17492 - DNA, 660 bp, Homo sapiens
  source 1..660: mol_type = unassigned DNA
gaccggcgcggcgctagcctcggggcttgacgggattgtggcggtcctctctcccaattcggaagctacagctacctccggacgctctcaagatggcgacctctctgggttccaacacctacaacaggcagaactgggaggatgcggacttccccattctgtgccagacatgtcttggagaaaacccatatatccgaatgaccaaagaaaagtatgggaaggaatgcaaaatctgtgccaggccattcacagtgtttcgctggtgccctggagtccgcatgcgtttcaagaagactgaagtgtgccaaacctgcagtaaattgaagaatgtctgtcagacctgcctcttagacctagagtatggcctgcccatccaggttcgtgacgcaggattgtcttttaaagatgacatgccaaagtcagatgtcaacaaagagtactatacacagaatatggagagagaggtatgctgccactttttggataaaaatcctaatgaattgacacagtctgtataatttatcttttgaatttgtcatccccacttagatttctaactctgatggaacacggccagttggcatgctggggaaagccacatctaccagtgacatgctgctcaaactggcccggaccacaccctactacaaaaggaatcga

SEQ ID NO: 17493 - DNA, 566 bp, Homo sapiens
  source 1..566: mol_type = unassigned DNA
acttcgggttcctgccgtgcctagttccccaccctcgcttcccgccccctcgccaccccaagtgtcactgaggtgtcagggtcttcggagggtggtcctcaaccagatttcccattttcaccaggacttccccattctgtgccagacatgtcttggagaaaacccatatatccgaatgaccaaagaaaagtatgggaaggaatgcaaaatctgtgccaggccattcacagtgtttcgctggtgccctggagtccgcatgcgtttcaagaagactgaagtgtgccaaacctgcagtaaattgaagaatgtctgtcagacctgcctcttagacctagagtatggcctgcccatccaggttcgtgacgcaggattgtcttttaaagatgacatgccaaagtcagatgtcaacaaagagtactatacacagaatatggagagagaggtatgctgccactttttggataaaaatcctaatgaattgacacagtctgtataatttatcttttgaatttgtcatccccacttagatttctaactctgatggaacacggccagttggcatgctg

SEQ ID NO: 17494 - DNA, 731 bp, Homo sapiens
  source 1..731: mol_type = unassigned DNA
ggatggaaggaggaggcgaagccgcgcaccttgcaagctggcaggacagggcctgcggcgcggccgaaggaataccggggaggagccagcgcggcggcctagcttggccggagcaggagggcggagggcgatcctcctgcgggcttgaagggagggggcttagccagggtcccgggaccagcaccctttccatccctgccccctccagcctattagagctggttttcttttctcccgccgcctgccggaagtgcagacagcgccccctcccgcgatcgggtcgtgatggacttcgggttcctgccgtgcctagttccccaccctcgcttcccgccccctcgccaccccaagtgtcactgaggtgtcagggtcttcggagggtggtcctcaaccagatttcccattttcaccaggacttccccattctgtgccagacatgtcttggagaaaacccatatatccgaatgaccaaagaaaagtatgggaaggaatgcaaaatctgtgccaggccattcacagtgtttcgctggtgccctggagtccgcatgcgtttcaagaagactgaagtgtgccaaacctgcagtaaattgaagaatgtctgtcagacctgcctcttagacctagagtatggcctgcccatccaggttcgtgacgcaggattgtcttttaaagatgacatgccaaagtcagatgtcaacaaagagtactatacacagaatatggagagagag

SEQ ID NO: 17495 - DNA, 2703 bp, Homo sapiens
  source 1..2703: mol_type = unassigned DNA
ggagagagcgaagtcaagtctccagggccgctggcgacttcggaagccgcgcgcccggcgctctcggccgcccccggccgctcgcccccgccgcgccgccgccctcgcccccgggctcgcccttggcccccggcggccgcgaaagggtgcgggagacgcggagccggaggaggaggcgcagccgctgcccgagccgcagccgcagccggagcccgagccgcggggcgggtgcgaagatgcacacgacccagaaggacacgacgtacaccaagatcttcgtcggggggctgccctaccacaccaccgacgccagcctgcgcaagtacttcgaggtcttcggcgagatcgaggaggcggtggtcatcaccgaccggcagacgggcaagtcccggggctatggatttgtcaccatggctgaccgggctgctgccgaaagggcctgcaaggatcccaatcccatcattgatggcagaaaggccaacgtgaacctggcatacttaggagcaaaaccaaggatcatgcaaccaggttttgcctttggtgttcaacaacttcatccagcccttatacaaagacctttcgggatacctgcccactatgtctatccgcaggcttttgtgcagccgggagtggtcattccacacgtccagccgacagcagctgccgcctccaccaccccttacattgattacactggagctgcatacgcacaatactcagcagctgctgctgctgccgccgccgctgctgcctatgaccagtacccctatgcagcctctccagctgctgcaggatatgttactgctgggggctatggctacgcagtccagcagccaatcaccgcagcggcacctgggacagctgccgccgccgctgcagcagctgctgccgctgcagcatttggccagtaccagcctcagcagctgcagacagaccgaatgcaatagaccagccatctgatcaaagttgaattgttttctctttccctcccaattttccaatttttagtagctaataagagagttaacattgacttaacagctttaaaaaaaaaaacagccatgctattgtgaagcagagttattattttttttatactccaggtagtgttctagatgagaaagaggtaagaatgaggggaatgggcacaattttggaaatcaatcccaaagagcctgagtaaatgaaaggccactacgaaatgacgccaggagtaacaacggaacttcacttttgtaacgggatttttatttttgctctttttatagtatcagggaagcaaactgccttttacaagttagaaaatgctgtttgaatctagttgaaccagggaatacagagcgagcaatatgtagcttgaattacatttaaaagcagattttttacaaacaaaatggcgaaagcactgattgtcatttttagcagtcacttaaggcctatagaacttttttcaagtcggaaggtcctgttcttactatctcaaaaatgggcatcgaacaatcaatctaggagcgtggcagtgggtaaaatggtggacaggcaccaaagctattttctcatctgtcctgtggatgagtggaactgtggaacaagtgatgtggaattaatgggtgcaacagctgtacagacaatcaataacacacacagttctggaaagaacacatcacttgtgcttgtttgatgagcttgtcacattctaatccctctccccatcctgtttcaattttgggaaacttgtatctgctggtgtcagcaattctgattctgaaataggatcaggcttttactacaacagccttctctttctatttattgtgtcgactcgtggcttatgaataaaggcaggcaaagtttgcagaactgtcttaaggacatttattttttttccctttttaagtaattttacactttagtatctatttcagagtcatatttaaaactatttattagtgactacagtacatgagacaacaaggttactgagattacaattcttcaaaggttaatgataatgtggtttatactgtgccttaatagtaatgctatttaagatatttatttttaagttttactatgctgcactctaaagaaaggaactttagatgtgacactgtaaaattatgtattcatctcatggcataaattatttagtaagtctagatgtagcgtattaaatattaacctattcaactaaagatgttgacttggatttatttaaattcatatgtgcactgtataagagagtactcttacattaacacattttagtttagtttttagatttttttttaaacgatatattgctagtttcatgcttcctcctctgattttgcctgtgtagatttcatttattggtaattcattagtttaacactattatgtagtttttaaatgctgctttacatttttcttctgaaactgcaatacttgcaatttttattcttaaactaaattgaatactattttacactgtattggatttttatacttgaacaatttcatacaagggaagacaggttagcatttttatggactttctccattatcactggatttactttaagtattcccatactagacagtgttatgtaatgtagacatgactctcctgtgcaaattatttattcgttgtgtatattgctttataacatttcagatcttctaatctattcacttgtattaaatataatttttaaaaacttc

SEQ ID NO: 17496 - DNA, 1544 bp, Homo sapiens
  source 1..1544: mol_type = unassigned DNA
gtcatcaccgaccggcagacgggcaagtcccggggctatggatttgtcaccatggctgaccgggctgctgccgaaagggcctgcaaggatcccaatcccatcattgatggcagaaaggccaacgtgaacctggcatacttaggagcaaaaccaaggatcatgcaaccaggttttgcctttggtgttcaacaacttcatccagcccttatacaaagacctttcggagataaacaagctggctgaccctcaggtgcctgatagtcaaacaggatacctgcccactatgtctatccgcaggcttttgtgcagccgggagtggtcattccacacgtccagccgacagcagctgccgcctccaccaccccttacattgattacactggagctgcatacgcacaatactcagcagctgctgctgctgccgccgccgctgctgcctatgaccagtacccctatgcagcctctccagctgctgcaggatatgttactgctgggggctatggctacgcagtccagcagccaatcaccgcagcggcacctgggacagctgccgccgccgctgcagcagctgctgccgctgcagcatttggccagtaccagcctcagcagctgcagacagaccgaatgcaatagaccagccatctgatcaaagttgaattgttttctctttccctcccaattttccaatttttagtagctaataagagagttaacattgacttaacagctttaaaaaaaaaaacagccatgctattgtgaagcagagttattattttttttatactccaggtagtgttctagatgagaaagaggtaagaatgaggggaatgggcacaattttggaaatcaatcccaaagagcctgagtaaatgaaaggccactacgaaatgacgccaggagtaacaacggaacttcacttttgtaacgggatttttatttttgctctttttatagtatcagggaagcaaactgccttttacaagttagaaaatgctgtttgaatctagttgaaccagggaatacagagcgagcaatatgtagcttgaattacatttaaaagcagattttttacaaacaaaatggcgaaagcactgattgtcatttttagcagtcacttaaggcctatagaacttttttcaagtcggaaggtcctgttcttactatctcaaaaatgggcatcgaacaatcaatctaggagcgtggcagtgggtaaaatggtggacaggcaccaaagctattttctcatctgtcctgtggatgagtggaactgtggaacaagtgatgtggaattaatgggtgcaacagctgtacagacaatcaataacacacacagttctggaaagaacacatcacttgtgcttgtttgatgagcttgtcacattctaatccctctccccatcctgtttcaattttgggaaacttgtatctgctggtgtcagcaattctgattctgaaataggatcaggcttttactacaacagccttctctttctatttattgtgtcgactcgtggcttatgaataaaggcaggcaaagtttgcag

SEQ ID NO: 17497 - DNA, 1034 bp, Homo sapiens
  source 1..1034: mol_type = unassigned DNA
acaattgcattcccgggctggatgccggttgttaagcgcgctgttgctttgtaaaaatgcgtgtgttctggtgttttggctggggcagggaggggacaccccacgaggtctggggctgttgcccttgtgtcatccccccgccttttaactgcaaaggtcaccatggctgaccgggctgctgccgaaagggcctgcaaggatcccaatcccatcattgatggcagaaaggccaacgtgaacctggcatacttaggagcaaaaccaaggatcatgcaaccaggttttgcctttggtgttcaacaacttcatccagcccttatacaaagacctttcgggatacctgcccactatgtctatccgcaggcttttgtgcagccgggagtggtcattccacacgtccagccgacagcagctgccgcctccaccaccccttacattgattacactggagctgcatacgcacaatactcagcagctgctgctgctgccgccgccgctgctgcctatgaccagtacccctatgcagcctctccagctgctgcaggatatgttactgctgggggctatggctacgcagtccagcagccaatcaccgcagcggcacctgggacagctgccgccgccgctgcagcagctgctgccgctgcagcatttggccagtaccagcctcagcagctgcagacagaccgaatgcaatagaccagccatctgatcaaagttgaattgttttctctttccctcccaattttccaatttttagtagctaataagagagttaacattgacttaacagctttaaaaaaaaaaacagccatgctattgtgaagcagagttattattttttttatactccaggtagtgttctagatgagaaagaggtaagaatgaggggaatgggcacaattttggaaatcaatcccaaagagcctgagtaaatgaaaggccactacgaaatgacgccaggagtaacaacggaacttcacttttgtaacgggatttttatttttgctctttttatagtatcagggaagcaa

SEQ ID NO: 17498 - DNA, 622 bp, Homo sapiens
  source 1..622: mol_type = unassigned DNA
agagtaggacaatagctattgtcgttggggagtgttttcgaggttgggagcgttgggcggatgtcaccatggctgaccgggctgctgccgaaagggcctgcaaggatcccaatcccatcattgatggcagaaaggccaacgtgaacctggcatacttaggagcaaaaccaaggatcatgcaaccaggttttgcctttggtgttcaacaacttcatccagcccttatacaaagacctttcgggatacctgcccactatgtctatccgcaggcttttgtgcagccgggagtggtcattccacacgtccagccgacagcagctgccgcctccaccaccccttacattgattacactggagctgcatacgcacaatactcagcagctgctgctgctgccgccgccgctgctgcctatgaccagtacccctatgcagcctctccagctgctgcaggatatgttactgctgggggctatggctacgcagtccagcagccaatcaccgcagcggcacctgggacagctgccgccgccgctgcagcagctgctgccgctgcagcatttggccagtaccagcctcagcagctgcagacagaccgaatgcaatagaccagccatctgatcaa

SEQ ID NO: 17499 - DNA, 2394 bp, Homo sapiens
  source 1..2394: mol_type = unassigned DNA
gatctcagttttatcatgaatgacttctccattgtgattcttgatttccttcatgggttaatttagaggttatgtatgtatgtctgtgtgtgtctgttgctaaggtcaccatggctgaccgggctgctgccgaaagggcctgcaaggatcccaatcccatcattgatggcagaaaggccaacgtgaacctggcatacttaggagcaaaaccaaggatcatgcaaccaggttttgcctttggtgttcaacaacttcatccagcccttatacaaagacctttcgggatacctgcccactatgtctatccgcaggcttttgtgcagccgggagtggtcattccacacgtccagccgacagcagctgccgcctccaccaccccttacattgattacactggagctgcatacgcacaatactcagcagctgctgctgctgccgccgccgctgctgcctatgaccagtacccctatgcagcctctccagctgctgcaggatatgttactgctgggggctatggctacgcagtccagcagccaatcaccgcagcggcacctgggacagctgccgccgccgctgcagcagctgctgccgctgcagcatttggccagtaccagcctcagcagctgcagacagaccgaatgcaatagaccagccatctgatcaaagttgaattgttttctctttccctcccaattttccaatttttagtagctaataagagagttaacattgacttaacagctttaaaaaaaaaaacagccatgctattgtgaagcagagttattattttttttatactccaggtagtgttctagatgagaaagaggtaagaatgaggggaatgggcacaattttggaaatcaatcccaaagagcctgagtaaatgaaaggccactacgaaatgacgccaggagtaacaacggaacttcacttttgtaacgggatttttatttttgctctttttatagtatcagggaagcaaactgccttttacaagttagaaaatgctgtttgaatctagttgaaccagggaatacagagcgagcaatatgtagcttgaattacatttaaaagcagattttttacaaacaaaatggcgaaagcactgattgtcatttttagcagtcacttaaggcctatagaacttttttcaagtcggaaggtcctgttcttactatctcaaaaatgggcatcgaacaatcaatctaggagcgtggcagtgggtaaaatggtggacaggcaccaaagctattttctcatctgtcctgtggatgagtggaactgtggaacaagtgatgtggaattaatgggtgcaacagctgtacagacaatcaataacacacacagttctggaaagaacacatcacttgtgcttgtttgatgagcttgtcacattctaatccctctccccatcctgtttcaattttgggaaacttgtatctgctggtgtcagcaattctgattctgaaataggatcaggcttttactacaacagccttctctttctatttattgtgtcgactcgtggcttatgaataaaggcaggcaaagtttgcagaactgtcttaaggacatttattttttttccctttttaagtaattttacactttagtatctatttcagagtcatatttaaaactatttattagtgactacagtacatgagacaacaaggttactgagattacaattcttcaaaggttaatgataatgtggtttatactgtgccttaatagtaatgctatttaagatatttatttttaagttttactatgctgcactctaaagaaaggaactttagatgtgacactgtaaaattatgtattcatctcatggcataaattatttagtaagtctagatgtagcgtattaaatattaacctattcaactaaagatgttgacttggatttatttaaattcatatgtgcactgtataagagagtactcttacattaacacattttagtttagtttttagatttttttttaaacgatatattgctagtttcatgcttcctcctctgattttgcctgtgtagatttcatttattggtaattcattagtttaacactattatgtagtttttaaatgctgctttacatttttcttctgaaactgcaatacttgcaatttttattcttaaactaaattgaatactattttacactgtattggatttttatacttgaacaatttcatacaagggaagacaggttagcatttttatggactttctccattatcactggatttactttaagtattcccatactagacagtgttatgtaatgtagacatgactctcctgtgcaaattatttattcgttgtgtatattgctttataacatttcagatcttctaatctattcacttgtattaaatataattttt

SEQ ID NO: 17500 - DNA, 677 bp, Homo sapiens
  source 1..677: mol_type = unassigned DNA
aaccatggcttgttattctaccaaggcattaaacataaatgagagttgttttgcctttggtgttcaacaacttcatccagcccttatacaaagacctttcggggctcgtatacagttaagctaactgatcagaaggataccatgataagaggtggaatagttctgtttggaattaaactctgtaaccagtagactcagacacacaagctcagatggatacctgcccactatgtctatccgcaggcttttgtgcagccgggagtggtcattccacacgtccagccgacagcagctgccgcctccaccaccccttacattgattacactggagctgcatacgcacaatactcagcagctgctgctgctgccgccgccgctgctgcctatgaccagtacccctatgcagcctctccagctgctgcaggatatgttactgctgggggctatggctacgcagtccagcagccaatcaccgcagcggcacctgggacagctgccgccgccgctgcagcagctgctgccgctgcagcatttggccagtaccagcctcagcagctgcagacagaccgaatgcaatagaccagccatctgatcaaagttgaattgttttctctttccctcccaattttccaatttttagtagctaataagagagttaacattgacttaacagcttt

SEQ ID NO: 17501 - DNA, 1222 bp, Homo sapiens
  source 1..1222: mol_type = unassigned DNA
acacgttgtagacacggcagcctccagggacagtgtttcataaagccacacctgttgttgcgagtgagccagtcacctgacctgcagcaaagttctgagtgtgtgcatgaccacgcgcctggtttctgacaagcagttaagaacatctctgagtgtcctcagaaacacttgatgacgtcgtttctcctggcactgggaaacatctacaagtctggatacctgcccactatgtctatccgcaggcttttgtgcagccgggagtggtcattccacacgtccagccgacagcagctgccgcctccaccaccccttacattgattacactggagctgcatacgcacaatactcagcagctgctgctgctgccgccgccgctgctgcctatgaccagtacccctatgcagcctctccagctgctgcaggatatgttactgctgggggctatggctacgcagtccagcagccaatcaccgcagcggcacctgggacagctgccgccgccgctgcagcagctgctgccgctgcagcatttggccagtaccagcctcagcagctgcagacagaccgaatgcaatagaccagccatctgatcaaagttgaattgttttctctttccctcccaattttccaatttttagtagctaataagagagttaacattgacttaacagctttaaaaaaaaaaacagccatgctattgtgaagcagagttattattttttttatactccaggtagtgttctagatgagaaagaggtaagaatgaggggaatgggcacaattttggaaatcaatcccaaagagcctgagtaaatgaaaggccactacgaaatgacgccaggagtaacaacggaacttcacttttgtaacgggatttttatttttgctctttttatagtatcagggaagcaaactgccttttacaagttagaaaatgctgtttgaatctagttgaaccagggaatacagagcgagcaatatgtagcttgaattacatttaaaagcagattttttacaaacaaaatggcgaaagcactgattgtcatttttagcagtcacttaaggcctatagaacttttttcaagtcggaaggtcctgttcttactatctcaaaaatgggcatcgaacaatcaatctaggagcgtggcagtgggtaaaatggtggacaggcaccaaagctattttctcatctgtcctgtggatgagtggaactgtggaaca

SEQ ID NO: 17502 - DNA, 1413 bp, Homo sapiens
  source 1..1413: mol_type = unassigned DNA
gcgcctggtttctgacaagcagttaagaacatctctgagtgtcctcagaaacacttgatgacgtcgtttctcctggcactgggaaacatctacaagtctgagataaacaagctggctgaccctcaggtgcctgatagtcaaacaggatacctgcccactatgtctatccgcaggcttttgtgcagccgggagtggtcattccacacgtccagccgacagcagctgccgcctccaccaccccttacattgattacactggagctgcatacgcacaatactcagcagctgctgctgctgccgccgccgctgctgcctatgaccagtacccctatgcagcctctccagctgctgcaggatatgttactgctgggggctatggctacgcagtccagcagccaatcaccgcagcggcacctgggacagctgccgccgccgctgcagcagctgctgccgctgcagcatttggccagtaccagcctcagcagctgcagacagaccgaatgcaatagaccagccatctgatcaaagttgaattgttttctctttccctcccaattttccaatttttagtagctaataagagagttaacattgacttaacagctttaaaaaaaaaaacagccatgctattgtgaagcagagttattattttttttatactccaggtagtgttctagatgagaaagaggtaagaatgaggggaatgggcacaattttggaaatcaatcccaaagagcctgagtaaatgaaaggccactacgaaatgacgccaggagtaacaacggaacttcacttttgtaacgggatttttatttttgctctttttatagtatcagggaagcaaactgccttttacaagttagaaaatgctgtttgaatctagttgaaccagggaatacagagcgagcaatatgtagcttgaattacatttaaaagcagattttttacaaacaaaatggcgaaagcactgattgtcatttttagcagtcacttaaggcctatagaacttttttcaagtcggaaggtcctgttcttactatctcaaaaatgggcatcgaacaatcaatctaggagcgtggcagtgggtaaaatggtggacaggcaccaaagctattttctcatctgtcctgtggatgagtggaactgtggaacaagtgatgtggaattaatgggtgcaacagctgtacagacaatcaataacacacacagttctggaaagaacacatcacttgtgcttgtttgatgagcttgtcacattctaatccctctccccatcctgtttcaattttgggaaacttgtatctgctggtgtcagcaattctgattctgaaataggatcaggcttttactacaacagccttctctttctatttattgtgtcgactcgtggcttatgaataaaggcaggcaaag

SEQ ID NO: 17503 - DNA, 6910 bp, Homo sapiens
  source 1..6910: mol_type = unassigned DNA
tggtgagtcagagccaacagcggagacgatctatatacgttcttctctatggttccgcgctccccgcccccggccgcagtgcacgccgggcaagaggaagacctccatcagctcgccgcgcagcgcggctgtatttgcggcctgtgcgagtaggcgcttgggcactcagtctccctggcgagcgacgggcagaaatctcgaaccagtggagcgcactcgtaacctggatcccagaaggtcgcgaaggcagtaccgtttcctcagcggcggactgctgcagtaagaatgtcttttccacctcatttgaatcgccctcccatgggaatcccagcactcccaccagggatcccacccccgcagtttccaggatttcctccacctgtacctccagggaccccaatgattcctgtaccaatgagcattatggctcctgctccaactgtcttagtacccactgtgtctatggttggaaagcatttgggcgcaagaaaggatcatccaggcttaaaggctaaagaaaatgatgaaaattgtggtcctactaccactgtttttgttggcaacatttccgagaaagcttcagacatgcttataagacaactcttagctaaatgtggtttggttttgagctggaagagagtacaaggtgcttccggaaagcttcaagccttcggattctgtgagtacaaggagccagaatctaccctccgtgcactcagattattacatgacctgcaaattggagagaaaaagctactcgttaaagttgatgcaaagacaaaggcacagctggatgaatggaaagcaaagaagaaagcttctaatgggaatgcaaggccagaaactgtcactaatgacgatgaagaagccttggatgaagaaacaaagaggagagatcagatgattaaaggggctattgaagttttaattcgtgaatactccagtgagctaaatgccccctcacaggaatctgattctcaccccaggaagaagaagaaggaaaagaaggaggacattttccgcagatttccagtggccccactgatcccttatccactcatcactaaggaggatataaatgctatagaaatggaagaagacaaaagagacctgatatctcgagagatcagcaaattcagagacacacataagaaactggaagaagagaaaggcaaaaaggaaaaagaaagacaggaaattgagaaagaacggagagaaagagagagggagcgtgaaagggaacgagaaaggcgagaacgggaacgagaaagggaaagagaacgtgaacgagaaaaggagaaagaacgggagcgggaacgagaacgggatagggaccgtgaccggacaaaagagagagaccgagatcgggatcgagagagagatcgtgaccgggatagagaaaggagctcagatcgtaataaggatcgcagtcgatcaagagaaaaaagcagagatcgtgaaagggaacgagagcgggaaagagagagagagagagaacgagagcgagaacgagaacgggagcgagagagagagcgagagagggaacgggagcgagaaagagaaaaagacaaaaaacgggaccgagaagaagatgaagaagatgcatacgaacgaagaaaacttgaaagaaaactccgagagaaagaagctgcttatcaagagcgccttaagaattgggaaatcagagaacgaaagaaaacccgggaatatgagaaagaagctgaaagagaagaagaaagaagaagagaaatggccaaagaagctaaacgactaaaagaattcttagaagactatgatgatgatagagatgaccccaaatattacagaggaagtgctcttcagaaaaggttgcgtgatagagaaaaggaaatggaagcagatgaacgagataggaagagagagaaggaggagcttgaggaaatcaggcagcgccttctggcagaagggcatccagatccagatgcagagctccagaggatggaacaagaggctgagaggcgcaggcagccacaaataaagcaagagccagaatcagaagaggaggaagaagaaaagcaagaaaaagaagaaaaacgagaagaacccatggaagaggaagaggagccagagcaaaagccttgtctgaaacctactctgaggcccatcagctctgctccatctgtttcctctgccagtggcaatgcaacacctaacactcctggggatgagtctccctgtggtattattattcctcatgaaaactcaccagatcaacagcaacctgaggagcataggccaaaaataggactaagtcttaaactgggtgcttccaatagtcctggtcagcctaattctgtgaagagaaagaaactacctgtagatagtgtctttaacaaatttgaggatgaagacagtgatgacgtaccccgaaaaaggaaactggttcccttggattatggtgaagatgataaaaatgcaaccaaaggcactgtaaacactgaagaaaagcgtaaacacattaagagtctcattgagaaaatccctacagccaaacctgagctcttcgcttatcccctggattggtctattgtggattctatactgatggaacgtcgaattagaccatggattaataagaaaatcatagaatatataggtgaagaagaagctacattagttgattttgtttgttctaaggttatggctcatagttcaccccagagcattttagatgatgttgccatggtacttgatgaagaagcagaagtttttatagtcaaaatgtggagattattgatatatgaaacagaagccaagaaaattggtcttgtgaagtaaaactttttatatttagagttccatttcagatttcttctttgccacccttttaaggactttgaatttttctttgtctttgaagacattgtgagatctgtaattttttttttttgtagaaaatgtgaattttttggtcctctaatttgttgttgccctgtgtactcccttggttgtaaagtcatctgaatccttggttctctttatactcaccaggtacaaattactggtatgttttataagccgcagctactgtacacagcctatctgatataatcttgttctgctgatttgtttcttgtaaatattaaaacgactccccaattattttgcagaattgcacttaatattgaaatgtactgtataggaaccaacatgaacaattttaattgaaaacaccagtcataaactattaccacccccactctcttttgatcagaaatggcaagcccttgtgaaggcatggagtttaaaattggaatgcaaaaattagcagacaatccattcctactgtatttctgtatgaatgtgtttgtgaatgtatgtgtaaaagtctttcttttccctaatttgctttggtggggtccttaaaacatttcccaactaaagaatagaattgtaaaggaaaagtggtactgttccaacctgaaatgtctgttataattaggttattagtttcccagagcatggtgttctcgtgtcgtgagcaatgtggtttgctaactggatggggttttcttattaataagatggctgcttcagcttctcttttaaaggaatgtggatcatagtgatttttccttttaattttattgctcagaaatgaggcatatcctaaaaatcctggagagctgtatttaatgcatttttgcactaattggtccttagtttaattctattgtatctgtttatttaacaaaaaattcatcataccaaaaagtgtaagtgaaaaccccctttaaaacaaaacaaaaaaatgaaataaaattaggcaaattgacagacagtgagagttttacaaacatgataggtattctgctcggcaatttgtaagtttacatgttatttaaggataaaggtaaatcattcaaggcagttaccaaccactaactatttgttttcatttttgtcttgtagaaggtttatatcttgttttaccttggctcattagtgtttaaaaatgtactgatgatgtgcttagagaaattcctggggctttcttcgttgtagatcagaatttcaccagggagtaaaattacctgaaaacgtaagaagttttaaacagcttttcacacaaattagatgcaactgttcccatgtctgagtacttatttaaaagaaaggtaaagattggcctgttagaaaaagcataatgtgagctttggattactggattttttttttttttaaacacacctggagaggacatttgaaaacactgttcttaccctcgaaccctgatgtggttccattatgtaaatatttcaaatattaaaaatgtatatatttgatcctggggactcatattctttcagaatcatgtaaataaatggcatcatgttgtaattgtgtggtgcatactagaaaagttaaaaatatgggctgaactttttatggacttgatttttatgactattggtatctaaaggtcaaggaagccatttacattattttggatgaatctactatacatctatggaaatgtctcttttattttaaattctggtttctcaacggaaaatttcagaaaagatgccccttgccattttcgttaatttttcagtcttttcttagacacacccccagcctaagaccttgttcgaggagtttattgtgtctgtcttttcttaacatactgcactgttcttaagcatcatattgtgttgtttttatttagccactattaacatgaaggtttattcaggtagatttgatttcctttgcttcgtttcttctcctgctctgtcaactgtacttatcttaaagggccactctaaaaacaagggagatgtcgtaatctgaaacctttggggagatgtactctgtactgcataacatctccagtgaggtttgtgacaggacctcaactaaatatatgaatttgtgcaagttcatatattaaagtttctgcagcagagtgaaaattgttacagtaaatgtggtagaaactgttaatcgcttaatgccagtttaaatcatgttttgtaaccaagcttcagtaaaaggctttagattgtcagagttggttgatttttagaattgtatatataaagaattagacattaaacaggcatattctagtgtctgaaaatacacataagaaatttctattaagttgcttgaactttgtgggttaattttaccataatctcataaattaattttagtttgaaaaccttatacagtatgaattcattttgccatttcaagttgttatataaagagcatgaaagtctttttttgttgtttttttggggtttttttttttttgagaggaagttgtgcttttgtcgcccaggatggagtgcaatggcgcgagctcagctcacttcaacttccgcctcccgggttctggagatattctgcttcagttttctgagtagctgggattacaggtgcccaccacgacacctggctaattttttgtatttttagtagagacaggatttcaccttgttggccaggctggtctcaaactcctgacctcaggtgatccacccgcctcagcctcccaaagtgctggtattacaggcgtgagccaccttgcctggccaaagcgtgaacatcttaagaaccagtcttgatctggcaaaaaagtagtagaatactacttttctttatttgtccctaaaaataaagtatgtacatctgttcacaaggaagaaaggtaagtttgaagttgtttttcttaaactttaatgtgaccccaaatcatctgaggagtgcttgtagaaatagagacactgaagtagcagcgctggggtggcgccgcaggctttgcatttctggacagctcccagctaatgtcattgccaactgatccaagactacattttgattagcactttaaggtgtctattcagtattattttatcctaacagactacataaatgcagctgaattttcctttaagtagattttaaagagaaaaacattttttgaggcaaatacacgtaactcatgaacgtaatgtaatcttgcaaaattatgtctgagaaagccctaatattctaggctttttttccatccagccctgaaaattttttctgtagataactttatgttgtaacttattctgaatcttattatggcatttccctgtaaactatgtaagtgtaagctaatgattattttgtgaagcgtgctgtttcaggtattaatctgccatgaatactagatatagtagaaaaactgagaaaacatttagcttgagagccaatttgaactagacactatctttttttctcctttttaatggaataaatttaatgcaaataagtgtaagcaggtatacaatgtttagatgaggcttattttcccaactctttttaacaggttttatgatatccccaatttatacccaaaagactgctgagaggttttatgtcaaattgattacaaacttctctgggttgtatttcagtcttctgttaagtatgaaattgagaaatagttttgctcaacaaaagatgatgagggattgatttgtgaatgtcactggagataaaagggtatgagaaggaatcccaagcaggcaaagaaacagtctagctgtcaagaagaaaacagggagatacataccaaacccaggagctactaatataacaatcatactatagagcgaagtgaacttacactttttgataaactgatagattttttgtaatgtgattatggtaaaatactgaaatatttatgttaatttatttgcatttgaatgcttacatttttaattgacagaatctttgcatttcattacttgagtcatgaaggcgaaattaaagaatggcagtctaaaatacccaggtaaagaagataatttctagaaacaaaaataaaaattcttttcaagccatgttgtttgaattaaatgac

SEQ ID NO: 17504 - DNA, 3375 bp, Homo sapiens
  source 1..3375: mol_type = unassigned DNA
gaagacctccatcagctcgccgcgcagcgcggctgtatttgcggcctgtgcgagtaggcgcttgggcactcagtctccctggcgagcgacgggcagaaatctcgaaccagtggagcgcactcgtaacctggatcccagaaggtcgcgaaggcagtaccgtttcctcagcggcggggtctttctctgtctctcagcctcaagccatcctcctgcatcagcctcccaagtagttgggaccatagactgctgcagtaagaatgtcttttccacctcatttgaatcgccctcccatgggaatcccagcactcccaccagggatcccacccccgcagtttccaggatttcctccacctgtacctccagggaccccaatgattcctgtaccaatgagcattatggctcctgctccaactgtcttagtacccactgtgtctatggttggaaagcatttgggcgcaagaaaggatcatccaggcttaaaggctaaagaaaatgatgaaaattgtggtcctactaccactgtttttgttggcaacatttccgagaaagcttcagacatgcttataagacaactcttagctaaatgtggtttggttttgagctggaagagagtacaaggtgcttccggaaagcttcaagccttcggattctgtgagtacaaggagccagaatctaccctccgtgcactcagattattacatgacctgcaaattggagagaaaaagctactcgttaaagttgatgcaaagacaaaggcacagctggatgaatggaaagcaaagaagaaagcttctaatgggaatgcaaggccagaaactgtcactaatgacgatgaagaagccttggatgaagaaacaaagaggagagatcagatgattaaaggggctattgaagttttaattcgtgaatactccagtgagctaaatgccccctcacaggaatctgattctcaccccaggaagaagaagaaggaaaagaaggaggacattttccgcagatttccagtggccccactgatcccttatccactcatcactaaggaggatataaatgctatagaaatggaagaagacaaaagagacctgatatctcgagagatcagcaaattcagagacacacataagaaactggaagaagagaaaggcaaaaaggaaaaagaaagacaggaaattgagaaagaacggagagaaagagagagggagcgtgaaagggaacgagaaaggcgagaacgggaacgagaaagggaaagagaacgtgaacgagaaaaggagaaagaacgggagcgggaacgagaacgggatagggaccgtgaccggacaaaagagagagaccgagatcgggatcgagagagagatcgtgaccgggatagagaaaggagctcagatcgtaataaggatcgcagtcgatcaagagaaaaaagcagagatcgtgaaagggaacgagagcgggaaagagagagagagagagaacgagagcgagaacgagaacgggagcgagagagagagcgagagagggaacgggagcgagaaagagaaaaagacaaaaaacgggaccgagaagaagatgaagaagatgcatacgaacgaagaaaacttgaaagaaaactccgagagaaagaagctgcttatcaagagcgccttaagaattgggaaatcagagaacgaaagaaaacccgggaatatgagaaagaagctgaaagagaagaagaaagaagaagagaaatggccaaagaagctaaacgactaaaagaattcttagaagactatgatgatgatagagatgaccccaaatattacagaggaagtgctcttcagaaaaggttgcgtgatagagaaaaggaaatggaagcagatgaacgagataggaagagagagaaggaggagcttgaggaaatcaggcagcgccttctggcagaagggcatccagatccagatgcagagctccagaggatggaacaagaggctgagaggcgcaggcagccacaaataaagcaagagccagaatcagaagaggaggaagaagaaaagcaagaaaaagaagaaaaacgagaagaacccatggaagaggaagaggagccagagcaaaagccttgtctgaaacctactctgaggcccatcagctctgctccatctgtttcctctgccagtggcaatgcaacacctaacactcctggggatgagtctccctgtggtattattattcctcatgaaaactcaccagatcaacagcaacctgaggagcataggccaaaaataggactaagtcttaaactgggtgcttccaatagtcctggtcagcctaattctgtgaagagaaagaaactacctgtagatagtgtctttaacaaatttgaggatgaagacagtgatgacgtaccccgaaaaaggaaactggttcccttggattatggtgaagatgataaaaatgcaaccaaaggcactgtaaacactgaagaaaagcgtaaacacattaagagtctcattgagaaaatccctacagccaaacctgagctcttcgcttatcccctggattggtctattgtggattctatactgatggaacgtcgaattagaccatggattaataagaaaatcatagaatatataggtgaagaagaagctacattagttgattttgtttgttctaaggttatggctcatagttcaccccagagcattttagatgatgttgccatggtacttgatgaagaagcagaagtttttatagtcaaaatgtggagattattgatatatgaaacagaagccaagaaaattggtcttgtgaagtaaaactttttatatttagagttccatttcagatttcttctttgccacccttttaaggactttgaatttttctttgtctttgaagacattgtgagatctgtaattttttttttttgtagaaaatgtgaattttttggtcctctaatttgttgttgccctgtgtactcccttggttgtaaagtcatctgaatccttggttctctttatactcaccaggtacaaattactggtatgttttataagccgcagctactgtacacagcctatctgatataatcttgttctgctgatttgtttcttgtaaatattaaaacgactccccaattattttgcagaattgcacttaatattgaaatgtactgtataggaaccaacatgaacaattttaattgaaaacaccagtcataaactattaccacccccactctcttttgatcagaaatggcaagcccttgtgaaggcatggagtttaaaattggaatgcaaaaattagcagacaatccattcctactgtatttctgtatgaatgtgtttgtgaatgtatgtgtaaaagtctttcttttccctaatttgctttggtggggtcctt

SEQ ID NO: 17505 - DNA, 1039 bp, Homo sapiens
  source 1..1039: mol_type = unassigned DNA
aagacctccatcagctcgccgcgcagcgcggctgtatttgcggcctgtgcgagtaggcgcttgggcactcagtctccctggcgagcgacgggcagaaatctcgaaccagtggagcgcactcgtaacctggatcccagaaggtcgcgaaggcagtaccgtttcctcagcggcggacggagtcttactctgtcgttcaggttggagtgcagtggcgcgacctcggctcactgcaacatctgcctcccaggttcaagcaattctcctgcctcaccttccagagtagctgggattacagactgctgcagtaagaatgtcttttccacctcatttgaatcgccctcccatgggaatcccagcactcccaccagggatcccacccccgcagtttccaggatttcctccacctgtacctccagggaccccaatgattcctgtaccaatgagcattatggctcctgctccaactgtcttagtacccactgtgtctatggttggaaagcatttgggcgcaagaaaggatcatccaggcttaaaggctaaagaaaatgatgaaaattgtggtcctactaccactgtttttgttggcaacatttccgagaaagcttcagacatgcttataagacaactcttagctaaatgtggtttggttttgagctggaagagagtacaaggtgcttccggaaagcttcaagccttcggattctgtgagtacaaggagccagaatctaccctccgtgcactcagattattacatgacctgcaaattggagagaaaaagctactcgttaaagttgatgcaaagacaaaggcacagctggatgaatggaaagcaaagaagaaagcttctaatgggaatgcaaggccagaaactgtcactaatgacgatgaagaagccttggatgaagaaacaaagaggagagatcagatgattaaaggggctattgaagttttaattcgtgaatactccagtgagctaaatgccccctcacaggaatctgattctcaccccaggaagaagaagaaggaaaagaaggaggac

SEQ ID NO: 17506 - DNA, 6848 bp, Homo sapiens
  source 1..6848: mol_type = unassigned DNA
atcagctcgccgcgcagcgcggctgtatttgcggcctgtgcgagtaggcgcttgggcactcagtctccctggcgagcgacgggcagaaatctcgaaccagtggagcgcactcgtaacctggatcccagaaggtcgcgaaggcagtaccgtttcctcagcggcggactgctgcagtaagaatgtcttttccacctcatttgaatcgccctcccatgggaatcccagcactcccaccagggatcccacccccgcagtttccaggatttcctccacctgtacctccagggaccccaatgattcctgtaccaatgagcattatggctcctgctccaactgtcttagtacccactgtgtctatggttggaaagcatttgggcgcaagaaaggatcatccaggcttaaaggctaaagaaaatgatgaaaattgtggtcctactaccactgtttttgttggcaacatttccgagaaagcttcagacatgcttataagacaactcttagctaaatgtggtttggttttgagctggaagagagtacaaggtgcttccggaaagcttcaagccttcggattctgtgagtacaaggagccagaatctaccctccgtgcactcagattattacatgacctgcaaattggagagaaaaagctactcgttaaagttgatgcaaagacaaaggcacagctggatgaatggaaagcaaagaagaaagcttctaatgggaatgcaaggccagaaactgtcactaatgacgatgaagaagccttggatgaagaaacaaagaggagagatcagatgattaaaggggctattgaagttttaattcgtgaatactccagtgagctaaatgccccctcacaggaatctgattctcaccccaggaagaagaagaaggaaaagaaggaggacattttccgcagatttccagtggccccactgatcccttatccactcatcactaaggaggatataaatgctatagaaatggaagaagacaaaagagacctgatatctcgagagatcagcaaattcagagacacacataaggtagtattcttgtcttttcacttgataccaatctagactttttacagaatccaaagcaaagagacaaaaaaaatcaaccttaaattagaatataattttaaatgttttttataggtttaattgatatttagatagaaaaaagaaacagaagaccaataccatattaaagtggtccttgacatgttgtgcttagttttttcagttactgactattctgcagtcatctcactttaatatgaatagaagctaattttatttttagatttcaacataaacatcaaggtcagacttaaattagattcagggggcagcaggataacatacactgtagtgtatttctgggggcagttatttaacttgatcttaggaataccttttctttagagctgagattaaaatttacattttatatttgtatagatttaagttgagtgggggagattttaaacagtaggtcagtggttaccagacttaccaaattttagatgcatggaagaactgtaaattcccataaagctaatctattcattgacccccaccattatgatagagatcatatggtgactaatgcaagatgaaactctcagcttggaaagtaacaaggaataggatgtaagtatgagcttctgttttttattatatttatggatgccccctcagaaaaatatgcaaaggggtaactggcttggaaatgggtatttatgcatagtaaatcccactcacgagttttgcctatttgaagcttctctcaatgacagtgcatctgtgaatgttcgctggtgttgaaaatgatgcttttgaacggtgcaatgcaaacactgcatgaaatgtattttgatggtcgagataataaggtgttgctggttcttactgatagactgagagatctttaactcagtgaaatgttaaatgttcattttctcttttattcttactttttcccattgctttcaaaatctgcagttcacaaataatgccaatgaatcagtgctgctgaacacttactatccagatgcccagcccttgctcacaaacacaatgctttttcaagaattaaatgtgtctaagagcacaaacataattctcccaaaattaattttgagagttgaaaaggtggtctatgggaaatcattttagatgaataattttggttaggtataatactgaaattcaggaccgagtaagcttaaaaatggtatatggttgtgtgtgtggtttaccccctttttgtttttatttatttgttaaaccctgtcatgttattggtaaattatgaggaaatcatgttttaagaaaaattcaaaaatatatttgctttaaagtttgggaatctgttaggcattttactgccttagtattatttcactggagggaatgttttgaattttcagaatgtcttttcaaaataaaaagaaatcaaaatgaaaaaccaaaacagttgttttttattgggtggtttggctaaaagggttgtttgaaactccagtaacaaaaaatgagctcagtgaacctttgcatgttttggtatgagtttattaaataaccacagactgtcagggtatcagcgtggcagggggcgtccatttacagcacggatgagtctgaagagagaataaggtaagatttatgattttttaatctgtcctttcctcttcatgactttcttacataattttagactcacctcatttcccttctccagtctttctttaaaaatatacatgtatgtttacatgtatacctgtatttgtatacatgtgtgtatatatatatatatatatatctcatatataaacttcaggaaacatttagtatggactagattcactcactttttcatttacttagaaccaaacttttgaaatgagttctgaaacaaatggttatttatataactgaatataaggagcacagtgaaataagcaagaattaaaaattgaggaattctacaggaaaaattagtattggaacagctaaaatattctgtaagtatctatttcagaaataaacaaatttctttataagtgtatgccattgaggtaagttttatatagtctagcctcattttacaatataaatttttatattcattggaactgtttcagaaatgagatttttccccctttaatagctgttagtttctgtcctctttctatcatatcttatttcatccctttgtaatttcaatgtattcagttttgactttgcccgtattctacttcgatatagactggcacagcaactgaatatattgctcatacattagctttcctttcataacctgctataagttctctgatccatgaggaagagaaaaagagtatctgacaggtaagattgctttttaaagttgttttaaatgcattacatgactgagaaaagaaaaatgcacattttattgttgcagtttaaaatttcattttggtgaaactaaacgtgaaacaaaagggataaatgtgttttgttttgttttgttttacctgtttggggtatttttttctgagtttgtgtagaaaccgtgtggtacactggtaatcttgtcagggtacaaacttggtctgactttgttatttggtttatttgtgaaccatgtacttgctcttcctcccagaaacatagcttgtaggcaaggttaatccagtgttggcgatccatgtcctagcacagcatctgtaagttaatgcacaatcgttccttccaaggatggatttatcattgtaaatatattttcattgtcttacaggcataatgggcataagtatgttgcttttaaatattttaaattaaactattacagttacatatattttgcttgaagtgagtgattttcaaactttttgtatttggtgggctgtccatcttgtaatggtgggagtaaatgtttccatagatgataaggcagttcttggctgaattcagcttgtgtttcttttggagggtgggcaaatcagagggcagagattatttagttgcattataggtattcttctataccacttgccctttgaaaccctcaacttgaggtaatgtgcagtctggggttttaattagtattaataatcttgtggatttacagaaatctataatgcacagagttgagttttaaccaatgatcgtattcatagaaaatatttcgaaccaccacattcttcatggtcattttagttagtacatagtcattgagtggccagccacacctgacacaatctcccagcatccaagattggagattcctggtctgtgtagagtatatggttttgcacgaaatctttctagtcttgtgattgcttcagtttaatttgtcacataaaaccacaagtatttaatattaatgtatcagtggtttggtgtttttgttcccagtactgggctttgcgccgggaaaaatctgaatactggagctacagagttaactctaaaagtgcttttattggtttctagaaactggaagaagagaaaggcaaaaaggaaaaagaaagacaggaaattgagaaagaacggagagaaagagagagggagcgtgaaagggaacgagaaaggcgagaacgggaacgagaaagggaaagagaacgtgaacgagaaaaggagaaagaacgggagcgggaacgagaacgggatagggaccgtgaccggacaaaagagagagaccgagatcgggatcgagagagagatcgtgaccgggatagagaaaggagctcagatcgtaataaggatcgcagtcgatcaagagaaaaaagcagagatcgtgaaagggaacgagagcgggaaagagagagagagagagaacgagagcgagaacgagaacgggagcgagagagagagcgagagagggaacgggagcgagaaagagaaaaagacaaaaaacgggaccgagaagaagatgaagaagatgcatacgaacgaagaaaacttgaaagaaaactccgagagaaagaagctgcttatcaagagcgccttaagaattgggaaatcagagaacgaaagaaaacccgggaatatgagaaagaagctgaaagagaagaagaaagaagaagagaaatggccaaagaagctaaacgactaaaagaattcttagaagactatgatgatgatagagatgaccccaaatattacagaggaagtgctcttcagaaaaggttgcgtgatagagaaaaggaaatggaagcagatgaacgagataggaagagagagaaggaggagcttgaggaaatcaggcagcgccttctggcagaagggcatccagatccagatgcagagctccagaggatggaacaagaggctgagaggcgcaggcagccacaaataaagcaagagccagaatcagaagaggaggaagaagaaaagcaagaaaaagaagaaaaacgagaagaacccatggaagaggaagaggagccagagcaaaagccttgtctgaaacctactctgaggcccatcagctctgctccatctgtttcctctgccagtggcaatgcaacacctaacactcctggggatgagtctccctgtggtattattattcctcatgaaaactcaccagatcaacagcaacctgaggagcataggccaaaaataggactaagtcttaaactgggtacgttagcatttccttccttctttattttcttcccttcacccctgcaaatacctgtattgtgctttaaagaaaaaaatttatatttgtgcttggttaggtagatagaagattactaaaaaatgcctttctagctcacgattgttttcatagttttactagtgctcctatatctgcagctgcctcgagttctgagaagaagtgaaaagtttaattttctagcacttgtgagtagtgagttattttttacagttgggatctttctctaagatttgtggaagtatattttgcattgcttttgagggatggtgggttataaaatgaaacatttggaaattaagtcatcttgctaagagagtgtttttactgtaggtgcttccaatagtcctggtcagcctaattctgtgaagagaaagaaactacctgtagatagtgtctttaacaaatttgaggatgaagacagtgatgacgtaccccgaaaaaggaaactggttcccttggattatggtgaagatgataaaaatgcaaccaaaggcactgtaaacactgaagaaaagcgtaaacacattaagagtctcattgagaaaatccctacagccaaacctgagctcttcgcttatcccctggattggtctattgtggattctatactgatggaacgtcgaattagaccatggattaataagaaaatcatagaatatataggtgaagaagaagctacattagttgattttgtttgttctaaggttatggctcatagttcaccccagagcattttagatgatgttgccatggtacttgatgaagaagcagaagtttttatagtcaaaatgtggagattattgatatatgaaacagaagccaagaaaattggtcttgtgaagtaaaactttttatatttagagttccatttcagatttcttctttgccacccttttaaggactttgaatttttctttgtctttgaagacattgtgagatctgtaattttttttttttgtagaaaatgtgaattttttggtcctctaatttgttgttgccctgtgtactcccttggttgtaaagtcatctgaatccttggttctctttatactcaccaggtacaaattactggtatgttttataagccgcagctactgtacacagcctatctgatataatcttgttctgctgatttgtttcttgtaaatattaaaacgactccccaatta

SEQ ID NO: 17507 - DNA, 2470 bp, Homo sapiens
  source 1..2470: mol_type = unassigned DNA
ctcgccgcgcagcgcggctgtatttgcggcctgtgcgagtaggcgcttgggcactcagtctccctggcgagcgacgggcagaaatctcgaaccagtggagcgcactcgtaacctggatcccagaaggtcgcgaaggcagtaccgtttcctcagcggcggactgctgcagtaagaatgtcttttccacctcatttgaatcgccctcccatgggaatcccagcactcccaccagggatcccacccccgcagtttccaggatttcctccacctgtacctccagggaccccaatgattcctgtaccaatgagcattatggctcctgctccaactgtcttagtacccactgtgtctatggttggaaagcatttgggcgcaagaaaggatcatccaggcttaaaggctaaagaaaatgatgaaaattgtggtcctactaccactgtttttgttggcaacatttccgagaaagcttcagacatgcttataagacaactcttagctaaatgtggtttggttttgagctggaagagagtacaaggtgcttccggaaagcttcaagccttcggattctgtgagtacaaggagccagaatctaccctccgtgcactcagattattacatgacctgcaaattggagagaaaaagctactcgttaaagttgatgcaaagacaaaggcacagctggatgaatggaaagcaaagaagaaagcttctaatgggaatgcaaggccagaaactgtcactaatgacgatgaagaagccttggatgaagaaacaaagaggagagatcagatgattaaaggggctattgaagttttaattcgtgaatactccagtgagctaaatgccccctcacaggaatctgattctcaccccaggaagaagaagaaggaaaagaaggaggacattttccgcagatttccagtggccccactgatcccttatccactcatcactaaggaggatataaatgctatagaaatggaagaagacaaaagagacctgatatctcgagagatcagcaaattcagagacacacataaggtagtattcttgtcttttcacttgataccaatctagactttttacagaatccaaagcaaagagacaaaaaaaatcaaccttaaattagaatataattttaaatgttttttataggtttaattgatatttagatagaaaaaagaaacagaagaccaataccatattaaagtggtccttgacatgttgtgcttagttttttcagttactgactattctgcagtcatctcactttaatatgaatagaagctaattttatttttagatttcaacataaacatcaaggtcagacttaaattagattcagggggcagcaggataacatacactgtagtgtatttctgggggcagttatttaacttgatcttaggaataccttttctttagagctgagattaaaatttacattttatatttgtatagatttaagttgagtgggggagattttaaacagtaggtcagtggttaccagacttaccaaattttagatgcatggaagaactgtaaattcccataaagctaatctattcattgacccccaccattatgatagagatcatatggtgactaatgcaagatgaaactctcagcttggaaagtaacaaggaataggatgtaagtatgagcttctgttttttattatatttatggatgccccctcagaaaaatatgcaaaggggtaactggcttggaaatgggtatttatgcatagtaaatcccactcacgagttttgcctatttgaagcttctctcaatgacagtgcatctgtgaatgttcgctggtgttgaaaatgatgcttttgaacggtgcaatgcaaacactgcatgaaatgtattttgatggtcgagataataaggtgttgctggttcttactgatagactgagagatctttaactcagtgaaatgttaaatgttcattttctcttttattcttactttttcccattgctttcaaaatctgcagttcacaaataatgccaatgaatcagtgctgctgaacacttactatccagatgcccagcccttgctcacaaacacaatgctttttcaagaattaaatgtgtctaagagcacaaacataattctcccaaaattaattttgagagttgaaaaggtggtctatgggaaatcattttagatgaataattttggttaggtataatactgaaattcaggaccgagtaagcttaaaaatggtatatggttgtgtgtgtggtttaccccctttttgtttttatttatttgttaaaccctgtcatgttattggtaaattatgaggaaatcatgttttaagaaaaattcaaaaatatatttgctttaaagtttgggaatctgttaggcattttactgccttagtattatttcactggagggaatgttttgaattttcagaatgtcttttcaaaataaaaagaaatcaaaatgaaaaa

SEQ ID NO: 17508 - DNA, 1567 bp, Homo sapiens
  source 1..1567: mol_type = unassigned DNA
cgccgcgcagcgcggctgtatttgcggcctgtgcgagtaggcgcttgggcactcagtctccctggcgagcgacgggcagaaatctcgaaccagtggagcgcactcgtaacctggatcccagaaggtcgcgaaggcagtaccgtttcctcagcggcggactgctgcagtaagaatgtcttttccacctcatttgaatcgccctcccatgggaatcccagcactcccaccagggatcccacccccgcagtttccaggatttcctccacctgtacctccagggaccccaatgattcctgtaccaatgagcattatggctcctgctccaactgtcttagtacccactgtgtctatggttggaaagcatttgggcgcaagaaaggatcatccaggcttaaaggctaaagaaaatgatgaaaattgtggtcctactaccactgtttttgttggcaacatttccgagaaagcttcagacatgcttataagacaactcttagctaaatgtggtttggttttgagctggaagagagtacaaggtgcttccggaaagcttcaagccttcggattctgtgagtacaaggagccagaatctaccctccgtgcactcagattattacatgacctgcaaattggagagaaaaagctactcgttaaagttgatgcaaagacaaaggcacagctggatgaatggaaagcaaagaagaaagcttctaatgggaatgcaaggccagaaactgtcactaatgacgatgaagaagccttggatgaagaaacaaagaggagagatcagatgattaaaggggctattgaagttttaattcgtgaatactccagtgagctaaatgccccctcacaggaatctgattctcaccccaggaagaagaagaaggaaaagaaggaggacattttccgcagatttccagtggccccactgatcccttatccactcatcactaaggaggatataaatgctatagaaatggaagaagacaaaagagacctgatatctcgagagatcagcaaattcagagacacacataagagatcatatggtgactaatgcaagatgaaactctcagcttggaaagtaacaaggaataggatttcacaaataatgccaatgaatcagtgctgctgaacacttactatccagatgcccagcccttgctcacaaacacaatgctttttcaagaattaaatgtgtctaagagcacaaacataattctcccaaaattaattttgagagttgaaaaggtggtctatgggaaatcattttagatgaataattttggttaggtataatactgaaattcaggaccgagtaagcttaaaaatggtatatggttgtgtgtgtggtttaccccctttttgtttttatttatttgttaaaccctgtcatgttattggtaaattatgaggaaatcatgttttaagaaaaattcaaaaatatatttgctttaaagtttgggaatctgttaggcattttactgccttagtattatttcactggagggaatgttttgaattttcagaatgtcttttcaaaataaaaagaaatcaaaatgaaaaa

SEQ ID NO: 17509 - DNA, 541 bp, Homo sapiens
  source 1..541: mol_type = unassigned DNA
agaaggtcgcgaaggcagtaccgtttcctcagcggcgggtgagtttgtgtctctgaacgcgtgtggaaaccgggagaccgggtgcctcagctggtggaggaggaaaagccggggtggctgcgaaagcgccagggtggggtagagactgctgcagtaagaatgtcttttccacctcatttgaatcgccctcccatgggaatcccagcactcccaccagggatcccacccccgcagtttccaggatttcctccacctgtacctccagggaccccaatgattcctgtaccaatgagcattatggctcctgctccaactgtcttagtacccactgtgtctatggttggaaagcatttgggcgcaagaaaggatcatccaggcttaaaggctaaagaaaatgatgaaaattgtggtcctactaccactgtttttgttggcaacatttccgagaaagcttcagacatgcttataagacaactcttagctaaatgtggtttggttttgagctggaagagagtacaaggtgcttccggaaagcttcaag

SEQ ID NO: 17510 - DNA, 3008 bp, Homo sapiens
  source 1..3008: mol_type = unassigned DNA
taagaatgtcttttccacctcatttgaatcgccctcccatgggaatcccagcactcccaccagggatcccacccccgcagtttccaggatttcctccacctgtacctccagggaccccaatgattcctgtaccaatgagcattatggctcctgctccaactgtcttagtacccactgtgtctatggttggaaagcatttgggcgcaagaaaggatcatccaggcttaaaggctaaagaaaatgatgaaaattgtggtcctactaccactgtttttgttggcaacatttccgagaaagcttcagacatgcttataagacaactcttagctccttcggattctgtgagtacaaggagccagaatctaccctccgtgcactcagattattacatgacctgcaaattggagagaaaaagctactcgttaaagttgatgcaaagacaaaggcacagctggatgaatggaaagcaaagaagaaagcttctaatggggttgggatgaaagtagtaagggaggctggacaaggttaacttgccagagaaagcactggtacagactattccaaacagagctaattcattaaggcagctttgtaaaatgcaaggccagaaactgtcactaatgacgatgaagaagccttggatgaagaaacaaagaggagagatcagatgattaaaggggctattgaagttttaattcgtgaatactccagtgagctaaatgccccctcacaggaatctgattctcaccccaggaagaagaagaaggaaaagaaggaggacattttccgcagatttccagtggccccactgatcccttatccactcatcactaaggaggatataaatgctatagaaatggaagaagacaaaagagacctgatatctcgagagatcagcaaattcagagacacacataagaaactggaagaagagaaaggcaaaaaggaaaaagaaagacaggaaattgagaaagaacggagagaaagagagagggagcgtgaaagggaacgagaaaggcgagaacgggaacgagaaagggaaagagaacgtgaacgagaaaaggagaaagaacgggagcgggaacgagaacgggatagggaccgtgaccggacaaaagagagagaccgagatcgggatcgagagagagatcgtgaccgggatagagaaaggagctcagatcgtaataaggatcgcagtcgatcaagagaaaaaagcagagatcgtgaaagggaacgagagcgggaaagagagagagagagagaacgagagcgagaacgagaacgggagcgagagagagagcgagagagggaacgggagcgagaaagagaaaaagacaaaaaacgggaccgagaagaagatgaagaagatgcatacgaacgaagaaaacttgaaagaaaactccgagagaaagaagctgcttatcaagagcgccttaagaattgggaaatcagagaacgaaagaaaacccgggaatatgagaaagaagctgaaagagaagaagaaagaagaagagaaatggccaaagaagctaaacgactaaaagaattcttagaagactatgatgatgatagagatgaccccaaatattacagaggaagtgctcttcagaaaaggttgcgtgatagagaaaaggaaatggaagcagatgaacgagataggaagagagagaaggaggagcttgaggaaatcaggcagcgccttctggcagaagggcatccagatccagatgcagagctccagaggatggaacaagaggctgagaggcgcaggcagccacaaataaagcaagagccagaatcagaagaggaggaagaagaaaagcaagaaaaagaagaaaaacgagaagaacccatggaagaggaagaggagccagagcaaaagccttgtctgaaacctactctgaggcccatcagctctgctccatctgtttcctctgccagtggcaatgcaacacctaacactcctggggatgagtctccctgtggtattattattcctcatgaaaactcaccagatcaacagcaacctgaggagcataggccaaaaataggactaagtcttaaactgggtgcttccaatagtcctggtcagcctaattctgtgaagagaaagaaactacctgtagatagtgtctttaacaaatttgaggatgaagacagtgatgacgtaccccgaaaaaggaaactggttcccttggattatggtgaagatgataaaaatgcaaccaaaggcactgtaaacactgaagaaaagcgtaaacacattaagagtctcattgagaaaatccctacagccaaacctgagctcttcgcttatcccctggattggtctattgtggattctatactgatggaacgtcgaattagaccatggattaataagaaaatcatagaatatataggtgaagaagaagctacattagttgattttgtttgttctaaggttatggctcatagttcaccccagagcattttagatgatgttgccatggtacttgatgaagaagcagaagtttttatagtcaaaatgtggagattattgatatatgaaacagaagccaagaaaattggtcttgtgaagtaaaactttttatatttagagttccatttcagatttcttctttgccacccttttaaggactttgaatttttctttgtctttgaagacattgtgagatctgtaattttttttttttgtagaaaatgtgaattttttggtcctctaatttgttgttgccctgtgtactcccttggttgtaaagtcatctgaatccttggttctctttatactcaccaggtacaaattactggtatgttttataagccgcagctactgtacacagcctatctgatataatcttgttctgctgatttgtttcttgtaaatattaaaacgactccccaattattttgcagaattgcacttaatattgaaatgtactgtataggaaccaacatgaacaattttaattgaaaacaccagtcataaactattaccacccccactc

SEQ ID NO: 17511 - DNA, 898 bp, Homo sapiens
  source 1..898: mol_type = unassigned DNA
taaatgccccctcacaggaatctgattctcaccccaggaagaagaagaaggaaaagaaggaggacattttccgcagatttccagtggccccactgatcccttatccactcatcactaaggaggatataaatgctatagaaatggaagaagacaaaagagacctgatatctcgagagatcagcaaattcagagacacacataagagatcatatggtgactaatgcaagatgaaactctcagcttggaaagtaacaaggaataggatgtaagtatgagcttctgttttttattatatttatggatgccccctcagaaaaatatgcaaaggggtaactggcttggaaatgggtatttatgcatagtaaatcccactcacgagttttgcctatttgaagcttctctcaatgacagtgcatctgtgaatgttcgctggtgttgaaaatgatgcttttgaacggtgcaatgcaaacactgcatgaaatgtattttgatggtcgagataataaggtgttgctggttcttactgatagactgagagatctttaactcagtgaaatgttaaatgttcattttctcttttattcttactttttcccattgctttcaaaatctgcagttcacaaataatgccaatgaatcagtgctgctgaacacttactatccagatgcccagcccttgctcacaaacacaatgctttttcaagaattaaatgtgtctaagagcacaaacataattctcccaaaattaattttgagagttgaaaaggtggtctatgggaaatcattttagatgaataattttggttaggtataatactgaaattcaggaccgagtaagcttaaaaatggtatatggttgtgtgtgtggtttaccccctttttgtttttatttatttgt

SEQ ID NO: 17512 - DNA, 1052 bp, Homo sapiens
  source 1..1052: mol_type = unassigned DNA
gaaatggccaaagaagctaaacgactaaaagaattcttagaagactatgatgatgatagagatgaccccaaatattacagaggaagtgctcttcagaaaaggttgcgtgatagagaaaaggaaatggaagcagatgaacgagataggaagagagagaaggaggagcttgaggaaatcaggcagcgccttctggcagaagggcatccagatccagatgcagagctccagaggatggaacaagaggctgagaggcgcaggcagccacaaataaagcaagagccagaatcagaagaggaggaagaagaaaagcaagaaaaagaagaaaaacgagaagaacccatggaagaggaagaggagccagagcaaaagccttgtctgaaacctactctgaggcccatcagctctgctccatctgtttcctctgccagtggcaatgcaacacctaacactcctggggatgagtctccctgtggtattattattcctcatgaaaactcaccagatcaacagcaacctgaggagcataggccaaaaataggactaagtcttaaactggttttactagtgctcctatatctgcagctgcctcgagttctgagaagaagtgaaaagtttaattttctagcacttgtgcttccaatagtcctggtcagcctaattctgtgaagagaaagaaactacctgtagatagtgtctttaacaaatttgaggatgaagacagtgatgacgtaccccgaaaaaggaaactggttcccttggattatggtgaagatgataaaaatgcaaccaaaggcactgtaaacactgaagaaaagcgtaaacacattaagagtctcattgagaaaatccctacagccaaacctgagctcttcgcttatcccctggattggtctattgtggattctatactgatggaacgtcgaattagaccatggattaataagaaaatcatagaatatataggtgaagaagaagctacattagttgattttgtttgttctaaggttatggctcatagttcaccccagagcattttagatgatgttgccatg

SEQ ID NO: 17513 - DNA, 3469 bp, Homo sapiens
  source 1..3469: mol_type = unassigned DNA
aatttaaaatgtctaatgtgacctatacttaatatatggagtatatgaaaactaaaatttaagaggacaagaaaaatcttttttttaaccaaagtattattatatttattatggcatagagtggtattttatacatatctcattttacagtaaaaacattttatgtacaactgtagagagatagctgcacagatagctccaacttaaattagaaaatattttctctatagaaaataataaaaacaccgtttcccaggctagcccaacaagtttatttaaaccaaatagctgaatacatatacatttataaatatggtttgaattctgggatccaggagaaactttagtttcatttattgaaacggccatgtttgtcttaaaattatgtgaagagaaattcctataagtctccctcttactcttggtttatgtctgggtcagaaaaatctgtttacacaaaaaagggaagagtaatctttattacttgtatgttaattttatacattgtccttatttcctcaaaggccaaagaagctaaacgactaaaagaattcttagaagactatgatgatgatagagatgaccccaaatattacagaggaagtgctcttcagaaaaggttgcgtgatagagaaaaggaaatggaagcagatgaacgagataggaagagagagaaggaggagcttgaggaaatcaggcagcgccttctggcagaagggcatccagatccagatgcagagctccagaggatggaacaagaggctgagaggcgcaggcagccacaaataaagcaagagccagaatcagaagaggaggaagaagaaaagcaagaaaaagaagaaaaacgagaagaacccatggaagaggaagaggagccagagcaaaagccttgtctgaaacctactctgaggcccatcagctctgctccatctgtttcctctgccagtggcaatgcaacacctaacactcctggggatgagtctccctgtggtattattattcctcatgaaaactcaccagatcaacagcaacctgaggagcataggccaaaaataggactaagtcttaaactgggtacgttagcatttccttccttctttattttcttcccttcacccctgcaaatacctgtattgtgctttaaagaaaaaaatttatatttgtgcttggttaggtagatagaagattactaaaaaatgcctttctagctcacgattgttttcatagttttactagtgctcctatatctgcagctgcctcgagttctgagaagaagtgaaaagtttaattttctagcacttgtgagtagtgagttattttttacagttgggatctttctctaagatttgtggaagtatattttgcattgcttttgagggatggtgggttataaaatgaaacatttggaaattaagtcatcttgctaagagagtgtttttactgtaggtgcttccaatagtcctggtcagcctaattctgtgaagagaaagaaactacctgtagatagtgtctttaacaaatttgaggatgaagacagtgatgacgtaccccgaaaaaggaaactggttcccttggattatggtgaagatgataaaaatgcaaccaaaggcactgtaaacactgaagaaaagcgtaaacacattaagagtctcattgagaaaatccctacagccaaacctgagctcttcgcttatcccctggattggtctattgtggattctatactgatggaacgtcgaattagaccatggattaataagaaaatcatagaatatataggtgaagaagaagctacattagttgattttgtttgttctaaggttatggctcatagttcaccccagagcattttagatgatgttgccatggtacttgatgaagaagcagaagtttttatagtcaaaatgtggagattattgatatatgaaacagaagccaagaaaattggtcttgtgaagtaaaactttttatatttagagttccatttcagatttcttctttgccacccttttaaggactttgaatttttctttgtctttgaagacattgtgagatctgtaattttttttttttgtagaaaatgtgaattttttggtcctctaatttgttgttgccctgtgtactcccttggttgtaaagtcatctgaatccttggttctctttatactcaccaggtacaaattactggtatgttttataagccgcagctactgtacacagcctatctgatataatcttgttctgctgatttgtttcttgtaaatattaaaacgactccccaattattttgcagaattgcacttaatattgaaatgtactgtataggaaccaacatgaacaattttaattgaaaacaccagtcataaactattaccacccccactctcttttgatcagaaatggcaagcccttgtgaaggcatggagtttaaaattggaatgcaaaaattagcagacaatccattcctactgtatttctgtatgaatgtgtttgtgaatgtatgtgtaaaagtctttcttttccctaatttgctttggtggggtccttaaaacatttcccaactaaagaatagaattgtaaaggaaaagtggtactgttccaacctgaaatgtctgttataattaggttattagtttcccagagcatggtgttctcgtgtcgtgagcaatgtggtttgctaactggatggggttttcttattaataagatggctgcttcagcttctcttttaaaggaatgtggatcatagtgatttttccttttaattttattgctcagaaatgaggcatatcctaaaaatcctggagagctgtatttaatgcatttttgcactaattggtccttagtttaattctattgtatctgtttatttaacaaaaaattcatcataccaaaaagtgtaagtgaaaaccccctttaaaacaaaacaaaaaaatgaaataaaattaggcaaattgacagacagtgagagttttacaaacatgataggtattctgctcggcaatttgtaagtttacatgttatttaaggataaaggtaaatcattcaaggcagttaccaaccactaactatttgttttcatttttgtcttgtagaaggtttatatcttgttttaccttggctcattagtgtttaaaaatgtactgatgatgtgcttagagaaattcctggggctttcttcgttgtagatcagaatttcaccagggagtaaaattacctgaaaacgtaagaagttttaaacagcttttcacacaaattagatgcaactgttcccatgtctgagtacttatttaaaagaaaggtaaagattggcctgttagaaaaagcataatgtgagctttggattactggattttttttttttttaaacacacctggagaggacatttgaaaacactgttcttaccctcgaaccctgatgtggttccattatgtaaatatttcaaatattaaaaatgtatatatttga

SEQ ID NO: 17514 - DNA, 441 bp, Homo sapiens
  source 1..441: mol_type = unassigned DNA
aacatagtgataaatgacaagataatgcttgttatacatttacatgtagagagcacactctggtgtgttccgtagatacagaacattaagacattctttaacctcttagcatgcaggttgtaatgttgaaaagaggtgctgttggagatgtcatgtttacttctcaatgatcggagtattaaatgaagccttttatcattcacttttacagaggaagtgctcttcagaaaaggttgcgtgatagagaaaaggaaatggaagcagatgaacgagataggaagagagagaaggaggagcttgaggaaatcaggcagcgccttctggcagaagggcatccagatccagatgcagagctccagaggatggaacaagaggctgagaggcgcaggcagccacaaataaagcaagagccagaatcagaagaggaggaagaagaaaagc

SEQ ID NO: 17515 - DNA, 4243 bp, Homo sapiens
  source 1..4243: mol_type = unassigned DNA
agatcgggttcaacggcagggattgggtaaggtgagaatctggcttggcggctccggccccggccatctggttcccttgggctccggccgccaccatccactcgacggctctcggcccgaacgcttggtcgcaccgcctgccgaggtcctagatgaatcgcttcaggcctggaaacgaggaagccgtctccggagaccatcgccaacgctgacgcccgcggtctgaggtcgccatgggaagagcggtaggccaccctgctcctctgatcaccggaggacagggacacattgttcagggccatattcaaacactgcccgcagtacttgcgttacgtccctttgtgaaggcaggcccttcgcggctccccagatcagtccagcctgtgtcggacccgatgactaagcacacaggaacccataactgagcctgcggaagagccagaagccgccttgcctttaacgaggggtatcctggcgagcatgcgcagaccgtccgcgcacgtcgtcgcccgctgagagcaagcgcaacgggcgttttcgtttgtgacgccagggagcgtgaggacgtggggcttccgtgaatgcgcagtgggtgcgtcggccacgaccttttggccaggttagggagggggcgacgctgagatgggggcggcggcggcggaagcggatcgcactctctttgtgggcaaccttgaaacgaaagtgaccgaggagctccttttcgagcttttccaccaggctgggccagtaataaaggtgaaaattccaaaagataaggatggtaaaccaaagcagtttgcgtttgtgaatttcaaacatgaagtgtctgttccttatgcaatgaatctacttaatggaatcaaactttatggaaggcctatcaaaattcaatttagatcaggaagtagtcatgccccacaagatgtcagtttgtcatatccccaacatcatgttggaaattcaagccctacctccacatctcctagcaggtacgaaaggactatggataacatgacttcatcagcacagataattcagagatctttctcttctccagaaaattttcagagacaagcagtgatgaacagtgctttgagacaaatgtcatatggtggaaaatttggttcttcacctctggatcaatcaggattttcaccatcagttcaatcacacagtcatagtttcaatcagtcttcaagctcccagtggcgccaaggtacaccatcatcacagcgtaaagtcagaatgaattcttatccctacctagcagatagacattatagccgggaacagcgttacactgatcatgggtctgaccatcattacagaggaaagagagatgatttcttctatgaagacaggaatcatgatgactggagccatgactatgataacagaagagacagtagtagagatggaaaatggcgctcatctcgacactaacacatgttaaaaggacattgtttttatagggtcattttaggccctttgactaagttgatatggaaatattttgttgaaaaactgtacagagcagctttacaagttgtcacatttctttataaatttttttaaagctacagtttaatacaaaatgaattgcggttttattacattaataacctttcacctcagggttttatgaagaggaaagggttttatgcaaaagaaagtgctacaattcctaatcattttagacactttaggagggggtgaagttgtatgataaagcagatattttaattatttgttatctttttgtattgcaagaaatttcttgctagtgaatcaagaaaacatccaggttgacagtctaaaatggctactggtattttagttaattcaaaaatgaaacttttcagtgattcactttactaacattctatttgagaaggcttattggtaaagtttggggataaaggcattgcttaacttcttatataatttaggtataaattctgtgacatgctcttgagctttaccctagttgaacatacatgtgtagatttacacatactgtttcattctaaaatttagaaattgttcattaaatcccatttgaggtataagtcactcaggaagttaaaatatctctacacgtatatttttacattaaaaatacagtgttagcataaatccccttttcaggaagaacaaaaatgtcagtgcatagttagataaaatggtaaaatgttttactgaaagcatacttttttggaaaatagattcatgaagcctttaagtgctgcttctgtcagtcaaacgttaaaaactttaacattttcaaagtgcccagactgtgtacaaagacacatgtaatggagattgtacaggttgtttttttgtttgaacctttgaaagagtttaatcttaacgttttctaattttaaaattttaaaatcttgtttaacaaaagcttgtattaagatactgttttcatttcattacagaattgtttataaaagttcatttgttgaaaaataaggatcctttttaataccacagcatttgtactgttcctttttaatatactgaaaatataaaaggaagggtgtgtgttatttttttttttttatgtcactgacttcagagacattgtacacaaagaattaacatacttttattcactgattgcctgctgtttagaatatcagttctttaattttgagcatcctgaaatacatcttttgtacatatagagcatgatgtttcacaatcagattttcagtgacccctcgattatagcttggagtactttagttaccctcagtggtctctaggagttaaagtacacttagatttcctgtttataaatgaattcagtttttctgtttctaagtaaatgtagctattcaactactcactatagaattaagataaacaatttgtttgcttaagcattttcacagaatttgtttccaatgagattattatttttgggtatcttatccatatgaaaacttagtaggtttgtagatgttaacgaagattaatactgcatgtttgtttttgttttttttttgagacagagtcttgctacgacacccaggctagagtgcaatggcgggatctcaggtcactgcaacctccatatcccgggttcaagtgattctcctgccttagcctcccgagtagctgggattacaggcacccaccaccacgcctggctagtttttgtatttttagtagagatggggtttcaccacattggccaggctggtctcaaactcctgacctcaagtgatccacctaccttggcctaccgaggtgctggaattacaggtgtgagccaccgcgcctggcctaatactgctttattacaacgttatctgtgggtcggatccttttatattggttaacagatgaccctgactcagaataatctttttcaatggctttttgagggaagcttgtgaagttctggtgaatcttctttttcacttcactttcagtgagctgaaagtaaccaaactaaatacatgtattgtgtaaagggacaggacaagacagccttaaaaaattgaatatagttggtgagacaactcagaagtacaggtttgagcatcccttattcaaaatgcttgagaagtgttttgggttctggaatatttgcattaatgcttgccagttgagcatcccaggtccggaaatccacagtgctccaatgagcctttcccctgagtgtcacatctgtattggcactcaaaaagtttcatattttggagcatttcagatttcagatttgggatgcttcatctatattgacagctgcaagaacagaaaggaagaagagattatttttgtgggagaacagtttctcccatagtgtttcctgtggaatgctagtgtctcataaagtcttctaaaaaaaagaaaaaaaaaatcaaatgtttggaagccattttgtgttactgtgtgactttcttttactcaaaaacagcaccataaaatttctgacaagtactataggtaaagaaatccctttatacttaacctagtattttctacctttccccatctaaaataaaatttttataccactttctaattatgttgtgtgtgcccactttccccatacctactgctaccatcttagagtaggcaattttctcaagaggattattccaagaacaccctaatgttttcctgcttccagtcttctttcctcaaatttattccacactcttaagaattgaagatgtaaatctgtcactcgcctgaataaagcttcagtggcctctga

SEQ ID NO: 17516 - DNA, 2064 bp, Homo sapiens
  source 1..2064: mol_type = unassigned DNA
acgtcgtcgcccgctgagagcaagcgcaacgggcgttttcgtttgtgacgccagggagcgtgaggacgtggggcttccgtgaatgcgcagtgggtgcgtcggccacgaccttttggccaggttagggagggggcgacgctgagatgggggcggcggcggcggaagcggatcgcactctctttgtgggcaaccttgaaacgaaagtgaccgaggagctccttttcgagcttttccaccaggctgggccagtaataaaggtgaaaattccaaaagataaggatggtaaaccaaagcagtttgcgtttgtgaatttcaaacatgaagtgtctgttccttatgcaatgaatctacttaatggaatcaaactttatggaaggcctatcaaaattcaatttagatcaggaagtagtcatgccccacaagatgtcagtttgtcatatccccaacatcatgttggaaattcaagccctacctccacatctcctagcagcaggtacgaaaggactatggataacatgacttcatcagcacagataattcagagatctttctcttctccagaaaattttcagagacaagcagtgatgaacagtgctttgagacaaatgtcatatggtggaaaatttggttcttcacctctggatcaatcaggattttcaccatcagttcaatcacacagtcatagtttcaatcagtcttcaagctcccagtggcgccaaggtacaccatcatcacagcgtaaagtcagaatgaattcttatccctacctagcagatagacattatagccgggaacagcgttacactgatcatgggtctgaccatcattacagaggaaagagagatgatttcttctatgaagacaggaatcatgatgactggagccatgactatgataacagaagagacagtagtagagatggaaaatggcgctcatctcgacactaacacatgttaaaaggacattgtttttatagggtcattttaggccctttgactaagttgatatggaaatattttgttgaaaaactgtacagagcagctttacaagttgtcacatttctttataaatttttttaaagctacagtttaatacaaaatgaattgcggttttattacattaataacctttcacctcagggttttatgaagaggaaagggttttatgcaaaagaaagtgctacaattcctaatcattttagacactttaggagggggtgaagttgtatgataaagcagatattttaattatttgttatctttttgtattgcaagaaatttcttgctagtgaatcaagaaaacatccaggttgacagtctaaaatggctactggtattttagttaattcaaaaatgaaacttttcagtgattcactttactaacattctatttgagaaggcttattggtaaagtttggggataaaggcattgcttaacttcttatataatttaggtataaattctgtgacatgctcttgagctttaccctagttgaacatacatgtgtagatttacacatactgtttcattctaaaatttagaaattgttcattaaatcccatttgaggtataagtcactcaggaagttaaaatatctctacacgtatatttttacattaaaaatacagtgttagcataaatccccttttcaggaagaacaaaaatgtcagtgcatagttagataaaatggtaaaatgttttactgaaagcatacttttttggaaaatagattcatgaagcctttaagtgctgcttctgtcagtcaaacgttaaaaactttaacattttcaaagtgcccagactgtgtacaaagacacatgtaatggagattgtacaggttgtttttttgtttgaacctttgaaagagtttaatcttaacgttttctaattttaaaattttaaaatcttgtttaacaaaagcttgtattaagatactgttttcatttcattacagaattgtttataaaagttcatttgttgaaaaataaggatcctttttaataccacagcatttgtactgttcctttttaatatactgaaaatataaaaggaagggtgtgtgtt

SEQ ID NO: 17517 - DNA, 6725 bp, Homo sapiens
  source 1..6725: mol_type = unassigned DNA
gtgaatgcgcagtgggtgcgtcggccacgaccttttggccaggttagggagggggcgacgctgagatgggggcggcggcggcggaagcggatcgcactctctttgtgggcaaccttgaaacgaaagtgaccgaggagctccttttcgagcttttccaccaggctgggccagtaataaaggtgaaaattccaaaagataaggatggtaaaccaaagcagtttgcgtttgtgaatttcaaacatgaagtgtctgttccttatgcaatgaatctacttaatggaatcaaactttatggaaggcctatcaaaattcaatttagatcaggaagtagtcatgccccacaagatgtcagtttgtcatatccccaacatcatgttggaaattcaagccctacctccacatctcctagcagcaggtacgaaaggactatggataacatgacttcatcagcacagataattcagagatctttctcttctccagaaaattttcagagacaagcagtggtaggttgactatttttcaacttgaattgccaaaaaaaaatcatccttagttaaaatgttcgcattgtatcaaataactggtttttaattaactttgttaagttggaggttttgttcctttagtcctcaaggcgtaagtgaactttttagataactttttctcaaatttttgttagactagcatgatttgtagattgagcactcattttagttttcactgggctgaaatatatacttaaaagactgaagataaatagaagtaaaactgcttttacatttgtttttcttttcaaccatcatttactcattgtctgatgctcctgtaccctatcctgagtgacttatcataaacttgggtcttctagaccagttccattttaaacttaaccttttctttttttggtggtggtaacatcatcatgagactaggcttaaaatcttagctatctttcactgtttcatctttgtcatcatttgttcaagtaggaagctgttggtaactatttggtgcctaaatcatgatcttgacttgtagtccccaggcttttgtatttcataggtctgcaaaatgaaatatagaagtcaaaataaatttgagagaccagtataaaggatgttaacttttatgtacatattgcctatttttctaattgtaccgtagactattaaaataaaaatgatcatatactaatatttatccacaggcagaatttgggaaccaccggtctagtcaattatgcccccattttcccctcactagttcatcttgcacaccatttcagaattaatattacaattctgttttgcttatcttccttgcacattgactttccattgtttgtaagatgaagtcagattcctctagcccaattattagggattcttattgtctgattccagtaaaccctgtagccttacctttaattgttcactgcttattaagatctgaaggccgggtgcggtggctaacgcctgtaaccccagcactttgggaggctgaggtgggtggatcacgaggtcaggagttcgagaccagcctggccaagatggtgaaaccccgtctctactaaaaatacaaaaattagccgggcgtggtggcacaggcctgtagtcccagctacttgggaggctgaggcaggagaatcgcttgaacccgggaggtggagcttgcagtgagccgagatctgtaacctgtctcaaagaattacttggtattctatgaacctgttctgtgtttccctgttatttttgtttgtgcaatttccttttcttggcatatctctcccttaaaatatgaaaatattccatccattgttttaatacccagatcatatgccaccttcatgaaacctttcctaatgatactgatctcctgattctttgttttttacacagtgattttgcattatagtcattttgtgtgacttattctgagttgcattcttgaggacaaagagtagtatttatgtatatatatgtatcttgtaggtatacattggaatgattgaagctattgtactgctttagttgtggatccatctaggcaagagtgactttattttctttcattttctgttaactgaccaaatacatattagctttgatatctagaagtattaacatttccacttttcctattcctcagatgaacagtgctttgagacaaatgtcatatggtggaaaatttggttcttcacctctggatcaatcaggattttcaccatcagttcaatcacacagtcatagtttcaatcagtcttcaagctcccagtggcgccaaggtacaccatcatcacagcgtaaagtcagaatgaattcttatccctacctagcagatagacattatagccgggaacagcgttacactgatcatgggtctgaccatcattacagaggaaagagagatgatttcttctatgaagacaggaatcatgatgactggagccatgactatgataacagaagagacagtagtagagatggaaaatggcgctcatctcgacactaacacatgttaaaaggacattgtttttatagggtcattttaggccctttgactaagttgatatggaaatattttgttgaaaaactgtacagagcagctttacaagttgtcacatttctttataaatttttttaaagctacagtttaatacaaaatgaattgcggttttattacattaataacctttcacctcagggttttatgaagaggaaagggttttatgcaaaagaaagtgctacaattcctaatcattttagacactttaggagggggtgaagttgtatgataaagcagatattttaattatttgttatctttttgtattgcaagaaatttcttgctagtgaatcaagaaaacatccaggttgacagtctaaaatggctactggtattttagttaattcaaaaatgaaacttttcagtgattcactttactaacattctatttgagaaggcttattggtaaagtttggggataaaggcattgcttaacttcttatataatttaggtataaattctgtgacatgctcttgagctttaccctagttgaacatacatgtgtagatttacacatactgtttcattctaaaatttagaaattgttcattaaatcccatttgaggtataagtcactcaggaagttaaaatatctctacacgtatatttttacattaaaaatacagtgttagcataaatccccttttcaggaagaacaaaaatgtcagtgcatagttagataaaatggtaaaatgttttactgaaagcatacttttttggaaaatagattcatgaagcctttaagtgctgcttctgtcagtcaaacgttaaaaactttaacattttcaaagtgcccagactgtgtacaaagacacatgtaatggagattgtacaggttgtttttttgtttgaacctttgaaagagtttaatcttaacgttttctaattttaaaattttaaaatcttgtttaacaaaagcttgtattaagatactgttttcatttcattacagaattgtttataaaagttcatttgttgaaaaataaggatcctttttaataccacagcatttgtactgttcctttttaatatactgaaaatataaaaggaagggtgtgtgttatttttttttttttatgtcactgacttcagagacattgtacacaaagaattaacatacttttattcactgattgcctgctgtttagaatatcagttctttaattttgagcatcctgaaatacatcttttgtacatatagagcatgatgtttcacaatcagattttcagtgacccctcgattatagcttggagtactttagttaccctcagtggtctctaggagttaaagtacacttagatttcctgtttataaatgaattcagtttttctgtttctaagtaaatgtagctattcaactactcactatagaattaagataaacaatttgtttgcttaagcattttcacagaatttgtttccaatgagattattatttttgggtatcttatccatatgaaaacttagtaggtttgtagatgttaacgaagattaatactgcatgtttgtttttgttttttttttgagacagagtcttgctacgacacccaggctagagtgcaatggcgggatctcaggtcactgcaacctccatatcccgggttcaagtgattctcctgccttagcctcccgagtagctgggattacaggcacccaccaccacgcctggctagtttttgtatttttagtagagatggggtttcaccacattggccaggctggtctcaaactcctgacctcaagtgatccacctaccttggcctaccgaggtgctggaattacaggtgtgagccaccgcgcctggcctaatactgctttattacaacgttatctgtgggtcggatccttttatattggttaacagatgaccctgactcagaataatctttttcaatggctttttgagggaagcttgtgaagttctggtgaatcttctttttcacttcactttcagtgagctgaaagtaaccaaactaaatacatgtattgtgtaaagggacaggacaagacagccttaaaaaattgaatatagttggtgagacaactcagaagtacaggtttgagcatcccttattcaaaatgcttgagaagtgttttgggttctggaatatttgcattaatgcttgccagttgagcatcccaggtccggaaatccacagtgctccaatgagcctttcccctgagtgtcacatctgtattggcactcaaaaagtttcatattttggagcatttcagatttcagatttgggatgcttcatctatattgacagctgcaagaacagaaaggaagaagagattatttttgtgggagaacagtttctcccatagtgtttcctgtggaatgctagtgtctcataaagtcttctaaaaaaaagaaaaaaaaaatcaaatgtttggaagccattttgtgttactgtgtgactttcttttactcaaaaacagcaccataaaatttctgacaagtactataggtaaagaaatccctttatacttaacctagtattttctacctttccccatctaaaataaaatttttataccactttctaattatgttgtgtgtgcccactttccccatacctactgctaccatcttagagtaggcaattttctcaagaggattattccaagaacaccctaatgttttcctgcttccagtcttctttcctcaaatttattccacactcttaagaattgaagatgtaaatctgtcactcgcctgaataaagcttcagtggcctctgacttaagtacaaaattctcaacttaatatgacccctatttggcatgtgctacttcagtctcctctgatgacttccccactttagttctcatagtaactgcccttcactgctcaatctatgcattacttcctctagaaagcctttccagagctctgaaatccagattcagtgccaagttatgtattccccaaatatctttttcttttatcatagcctttagactgtattataattttctttttacttgtctgtctctgtagacagctctatgaagacagaccttatcttattcatcactgcattcccaggatccagtgcctggcatatatttaacagtgaaactttttgatgaaaggaagaacgtctgttaattgaataaggaaaaggaggattcaacacataaaactttgaataggctctctaaacctaaaacattgcatcctgagaattacatgtcacagtacatgtattctagaattctatttgttcattttgtcaaacttcaaaaagttttggatctgtattcatgaataatgtgtgactttgtttttattttattttaatttatttatggcagagcctcactctgtcacccaggctggagtagagtggcacaatctcagctcactgctacctccgcctcctgggttccagtgattctctcacctcagcctcccgagtagctggaattacaggcacccaccaccacgcctggctaatttttgtatttgtaatagagacgggttttccccatgttggccatgctggtcttgaactcccaacctcaggtgatctgcctgactcggcctcccaaagtgctgggattacaggcatgagtcactgtaccagcctgattttgttttttaattgtattatcttagtttggtttaggagtatggttctgctagccttataaaataaattggcaagcttatcatcttctatgcccccccccaaatttgaataataaaggaattagccgtttctgcaagatgtgttgaactcatttatacaactatctgggtttgctttggaaatagctctttgattgctttatcaatttcctttagagttatcttttcaggtttgctactttctcaggaaacaatttggataatttatacttttcaagaaaatcaaccattccctttttctgaatatattgctatagagttgtacatagtatttcttataatttttgtaaaactcctaatattgtcaatagtgcagttttagtttctgacgatatattttaccttccctctcatcctcagatgagactggctgtgctgttttggcatacatcttacatttatatatgttataagccccacactaccttgtttttgttaggcagattcttaaataatagaaaattatatataatacttaagaaaaaataggaaaaaaaa

SEQ ID NO: 17518 - DNA, 712 bp, Homo sapiens
  source 1..712: mol_type = unassigned DNA
gcgcagtgggtgcgtcggccacgaccttttggccaggttagggagggggcgacgctgagatgggggcggcggcggcggaagcggatcgcactctctttgtgggcaaccttgaaacgaaagtgaccgaggagctccttttcgagcttttccaccaggaagtagtcatgccccacaagatgtcagtttgtcatatccccaacatcatgttggaaattcaagccctacctccacatctcctagcagcaggtacgaaaggactatggataacatgacttcatcagcacagataattcagagatctttctcttctccagaaaattttcagagacaagcagtgatgaacagtgctttgagacaaatgtcatatggtggaaaatttggttcttcacctctggatcaatcaggattttcaccatcagttcaatcacacagtcatagtttcaatcagtcttcaagctcccagtggcgccaaggtacaccatcatcacagcgtaaagtcagaatgaattcttatccctacctagcagatagacattatagccgggaacagcgttacactgatcatgggtctgaccatcattacagaggaaagagagatgatttcttctatgaagacaggaatcatgatgactggagccatgactatgataacagaagagacagtagtagagatggaaaatggcgctcatctcgacactaacacatgttaaaa

SEQ ID NO: 17519 - DNA, 1908 bp, Homo sapiens
  source 1..1908: mol_type = unassigned DNA
gctgagatgggggcggcggcggcggaagcggatcgcactctctttgtgggcaaccttgaaacgaaagtgaccgaggagctccttttcgagcttttccaccaggctgggccagtaataaaggtgaaaattccaaaagataaggatggtaaaccaaagcagtttgcgtttgtgaatttcaaacatgaagtgtctgttccttatgcaatgaatctacttaatggaatcaaactttatggaaggcctatcaaaattcaatttagatcagtagtcatgccccacaagatgtcagtttgtcatatccccaacatcatgttggaaattcaagccctacctccacatctcctagcagcaggtacgaaaggactatggataacatgacttcatcagcacagataattcagagatctttctcttctccagaaaattttcagagacaagcagtgatgaacagtgctttgagacaaatgtcatatggtggaaaatttggttcttcacctctggatcaatcaggattttcaccatcagttcaatcacacagtcatagtttcaatcagtcttcaagctcccagtggcgccaaggtacaccatcatcacagcgtaaagtcagaatgaattcttatccctacctagcagatagacattatagccgggaacagcgttacactgatcatgggtctgaccatcattacagaggaaagagagatgatttcttctatgaagacaggaatcatgatgactggagccatgactatgataacagaagagacagtagtagagatggaaaatggcgctcatctcgacactaacacatgttaaaaggacattgtttttatagggtcattttaggccctttgactaagttgatatggaaatattttgttgaaaaactgtacagagcagctttacaagttgtcacatttctttataaatttttttaaagctacagtttaatacaaaatgaattgcggttttattacattaataacctttcacctcagggttttatgaagaggaaagggttttatgcaaaagaaagtgctacaattcctaatcattttagacactttaggagggggtgaagttgtatgataaagcagatattttaattatttgttatctttttgtattgcaagaaatttcttgctagtgaatcaagaaaacatccaggttgacagtctaaaatggctactggtattttagttaattcaaaaatgaaacttttcagtgattcactttactaacattctatttgagaaggcttattggtaaagtttggggataaaggcattgcttaacttcttatataatttaggtataaattctgtgacatgctcttgagctttaccctagttgaacatacatgtgtagatttacacatactgtttcattctaaaatttagaaattgttcattaaatcccatttgaggtataagtcactcaggaagttaaaatatctctacacgtatatttttacattaaaaatacagtgttagcataaatccccttttcaggaagaacaaaaatgtcagtgcatagttagataaaatggtaaaatgttttactgaaagcatacttttttggaaaatagattcatgaagcctttaagtgctgcttctgtcagtcaaacgttaaaaactttaacattttcaaagtgcccagactgtgtacaaagacacatgtaatggagattgtacaggttgtttttttgtttgaacctttgaaagagtttaatcttaacgttttctaattttaaaattttaaaatcttgtttaacaaaagcttgtattaagatactgttttcatttcattacagaattgtttataaaagttcatttgttgaaaaataaggatcctttttaataccacagcatttgtactgttcctttttaatatactgaaaatataaaa

SEQ ID NO: 17520 - DNA, 692 bp, Homo sapiens
  source 1..692: mol_type = unassigned DNA
gctgagatgggggcggcggcggcggaagcggatcgcactctctttgtgggcaaccttgaaacgaaagtgaccgaggagctccttttcgagcttttccaccaggctgggccagtaataaaggtgaaaattccaaaagataaggatggtaaaccaaagcagtttgcgtttgtgaatttcaaacatgaagtgtctgttccttatgcaatgaatctacttaatggaatcaaactttatggaaggcctatcaaaattcaatttagatcaggaagtagtcatgccccacaagatgtcagtttgtcatatccccaacatcatgttggaaattcaagccctacctccacatctcctagcaggtacgaaaggactatggataacatgacttcatcagcacagataattcagagatctttctcttctccagaaaattttcagagacaagcagtggtagtttcttcaaacctgtatactgatcagctgtctcatgaatacgggagaaaacctgcaggtctccgagagttctctccctgtgcaacttatcgcttttcagtgctgtgtaccggccattccagctgcctttgtttcgctggactctcagctgtgtcttctgaactcagtgagtttgccaggctctgcctgccctgtcccccaaccccacacaatgcagcctaaacgttccctcaaggtagcacgca

SEQ ID NO: 17521 - DNA, 867 bp, Homo sapiens
  source 1..867: mol_type = unassigned DNA
gggggcggcggcggcggaagcggatcgcactctctttgtgggcaaccttgaaacgaaagtgaccgaggagctccttttcgagcttttccaccagcaggtacgaaaggactatggataacatgacttcatcagcacagataattcagagatctttctcttctccagaaaattttcagagacaagcagtgatgaacagtgctttgagacaaatgtcatatggtggaaaatttggttcttcacctctggatcaatcaggattttcaccatcagttcaatcacacagtcatagtttcaatcagtcttcaagctcccagtggcgccaaggtacaccatcatcacagcgtaaagtcagaatgaattcttatccctacctagcagatagacattatagccgggaacagcgttacactgatcatgggtctgaccatcattacagaggaaagagagatgatttcttctatgaagacaggaatcatgatgactggagccatgactatgataacagaagagacagtagtagagatggaaaatggcgctcatctcgacactaacacatgttaaaaggacattgtttttatagggtcattttaggccctttgactaagttgatatggaaatattttgttgaaaaactgtacagagcagctttacaagttgtcacatttctttataaatttttttaaagctacagtttaatacaaaatgaattgcggttttattacattaataacctttcacctcagggttttatgaagaggaaagggttttatgcaaaagaaagtgctacaattcctaatcattttagacactttaggagggggtgaagttgtatgataaagcagatattttaattatttgttatctttt

SEQ ID NO: 17522 - DNA, 566 bp, Homo sapiens
  source 1..566: mol_type = unassigned DNA
gcactctctttgtgggcaaccttgaaacgaaagtgaccgaggagctccttttcgagcttttccaccaggctgggccagtaataaaggtgaaaattccaaaagataaggatggtaaaccaaagcagtttgcgtttgtgaatttcaaacatgaagtgtctgttccttatgcaatgaatctacttaatggaatcaaactttatggaaggcctatcaaaattcaatttagatcaggtaactgcccaatgaggttcggggggcattgtttcctgctgtttttaaatttattattcagttttaaagaacctcttatttgtagatgaaacttctttcttaagcattgtgaatagtaaactttatatagcaaactttatatatccctgaaaacgggtaacattgacacatggattttgaaattagaatttcaaaactgagcttaaagtttcattttgggttagtgaaaaaacataaactgtatcactaagagagctgggcttgggtactctgaaaagagctaggtttattttctgaaaatacttctcctggctgctttgtaattacttttatat

SEQ ID NO: 17523 - DNA, 3587 bp, Homo sapiens
  source 1..3587: mol_type = unassigned DNA
acgtcgtcgcccgctgagagcaagcgcaacgggcgttttcgtttgtgacgccagggagcgtgaggacgtggggcttccgtgaatgcgcagtgggtgcgtcggccacgaccttttggccaggttagggagggggcgacgctgagatgggggcggcggcggcggaagcggatcgcactctctttgtgggcaaccttgaaacgaaagtgaccgaggagctccttttcgagcttttccaccaggaagtagtcatgccccacaagatgtcagtttgtcatatccccaacatcatgttggaaattcaagccctacctccacatctcctagcagcaggtacgaaaggactatggataacatgacttcatcagcacagataattcagagatctttctcttctccagaaaattttcagagacaagcagtgatgaacagtgctttgagacaaatgtcatatggtggaaaatttggttcttcacctctggatcaatcaggattttcaccatcagttcaatcacacagtcatagtttcaatcagtcttcaagctcccagtggcgccaaggtacaccatcatcacagcgtaaagtcagaatgaattcttatccctacctagcagatagacattatagccgggaacagcgttacactgatcatgggtctgaccatcattacagaggaaagagagatgatttcttctatgaagacaggaatcatgatgactggagccatgactatgataacagaagagacagtagtagagatggaaaatggcgctcatctcgacactaacacatgttaaaaggacattgtttttatagggtcattttaggccctttgactaagttgatatggaaatattttgttgaaaaactgtacagagcagctttacaagttgtcacatttctttataaatttttttaaagctacagtttaatacaaaatgaattgcggttttattacattaataacctttcacctcagggttttatgaagaggaaagggttttatgcaaaagaaagtgctacaattcctaatcattttagacactttaggagggggtgaagttgtatgataaagcagatattttaattatttgttatctttttgtattgcaagaaatttcttgctagtgaatcaagaaaacatccaggttgacagtctaaaatggctactggtattttagttaattcaaaaatgaaacttttcagtgattcactttactaacattctatttgagaaggcttattggtaaagtttggggataaaggcattgcttaacttcttatataatttaggtataaattctgtgacatgctcttgagctttaccctagttgaacatacatgtgtagatttacacatactgtttcattctaaaatttagaaattgttcattaaatcccatttgaggtataagtcactcaggaagttaaaatatctctacacgtatatttttacattaaaaatacagtgttagcataaatccccttttcaggaagaacaaaaatgtcagtgcatagttagataaaatggtaaaatgttttactgaaagcatacttttttggaaaatagattcatgaagcctttaagtgctgcttctgtcagtcaaacgttaaaaactttaacattttcaaagtgcccagactgtgtacaaagacacatgtaatggagattgtacaggttgtttttttgtttgaacctttgaaagagtttaatcttaacgttttctaattttaaaattttaaaatcttgtttaacaaaagcttgtattaagatactgttttcatttcattacagaattgtttataaaagttcatttgttgaaaaataaggatcctttttaataccacagcatttgtactgttcctttttaatatactgaaaatataaaaggaagggtgtgtgttatttttttttttttatgtcactgacttcagagacattgtacacaaagaattaacatacttttattcactgattgcctgctgtttagaatatcagttctttaattttgagcatcctgaaatacatcttttgtacatatagagcatgatgtttcacaatcagattttcagtgacccctcgattatagcttggagtactttagttaccctcagtggtctctaggagttaaagtacacttagatttcctgtttataaatgaattcagtttttctgtttctaagtaaatgtagctattcaactactcactatagaattaagataaacaatttgtttgcttaagcattttcacagaatttgtttccaatgagattattatttttgggtatcttatccatatgaaaacttagtaggtttgtagatgttaacgaagattaatactgcatgtttgtttttgttttttttttgagacagagtcttgctacgacacccaggctagagtgcaatggcgggatctcaggtcactgcaacctccatatcccgggttcaagtgattctcctgccttagcctcccgagtagctgggattacaggcacccaccaccacgcctggctagtttttgtatttttagtagagatggggtttcaccacattggccaggctggtctcaaactcctgacctcaagtgatccacctaccttggcctaccgaggtgctggaattacaggtgtgagccaccgcgcctggcctaatactgctttattacaacgttatctgtgggtcggatccttttatattggttaacagatgaccctgactcagaataatctttttcaatggctttttgagggaagcttgtgaagttctggtgaatcttctttttcacttcactttcagtgagctgaaagtaaccaaactaaatacatgtattgtgtaaagggacaggacaagacagccttaaaaaattgaatatagttggtgagacaactcagaagtacaggtttgagcatcccttattcaaaatgcttgagaagtgttttgggttctggaatatttgcattaatgcttgccagttgagcatcccaggtccggaaatccacagtgctccaatgagcctttcccctgagtgtcacatctgtattggcactcaaaaagtttcatattttggagcatttcagatttcagatttgggatgcttcatctatattgacagctgcaagaacagaaaggaagaagagattatttttgtgggagaacagtttctcccatagtgtttcctgtggaatgctagtgtctcataaagtcttctaaaaaaaagaaaaaaaaaatcaaatgtttggaagccattttgtgttactgtgtgactttcttttactcaaaaacagcaccataaaatttctgacaagtactataggtaaagaaatccctttatacttaacctagtattttctacctttccccatctaaaataaaatttttataccactttctaattatgttgtgtgtgcccactttccccatacctactgctaccatcttagagtaggcaattttctcaagaggattattccaagaacaccctaatgttttcctgcttccagtcttctttcctcaaatttattccacactcttaagaattgaagatgtaaatctgtcactcgcctgaataaagcttcagtggcctctgactt

SEQ ID NO: 17524 - DNA, 2144 bp, Homo sapiens
  source 1..2144: mol_type = unassigned DNA
tgctgatccatttgggagcattatggaattcaaagcccagaataatgggctctatttaatattgaacaggttcttgataacccgccatttctctccagagctgcttgaaagtccctcctggacgtgcagagttgcagtggcagttcccatgaagttgtaagctactacccaggatcaagtggtgttaaattgagaagtcatcctgttcacctgactagtggtgaaccctgatttaagaatttccaaggctaccctcgccatctctatttaaatttatagacgcaacgcactgcctgccctggggtcaccaccgaagcctcctggtggagccctgccctgctgaggacgctcttccagcacagaactcaccaccaaaaagagacggcgcccagctggcgcccgccccgggcacattgcagtaaatgcctggcagcgacttctcgcttctccttcctcctaccccatcgaccctctgttgccgacctttacgccaaactccggcgcgccgcgagactcgcgtcctcgctgtccccgaggggccccaccccttcccggttctaacctgcgacctggccagaggcaaggtgaatgggaagatggagatggatgttgagggagtttctccgcgcccggagcccatcccccgctcccagggggctggcggagcctgccaggcgccgccacagccgccccagccccagccgccgcctcagcagctggctcaggatgaactgcccggcgagagtgcaggcgctgaggacagcgacgatcccgagacgagacccaacggcgagaaaggagagagcaagtatttcagtgacatcatccactcaggagagttggggcgaggctggctgaggttctcaaggagctgagttttgagttcaggtgctcgtgtagcagtggaatgatgcctcctgacctttcagacctttgagacctctgggcggtcttagaaatcacttcaagcctccagtccaggatacgactgcctaggggaattccagggaaaggtggcagagatgccatggactacaaggtgatgaataccactatgagctcactacaagatctcaaagatttcaagccactggctgttacaaagcataaagccacccttctggagcagcggcgggaggcaggctgggaggaggccccaagttttggccagacgatagaccacctccttaggtgtccggggagctgctgaaacataatgaggaagatgctgctgatccaaaggataaaaacacagaaactagaaccaagaagcacctaaagtggactcatgcccagcatccctgcagactgactttctctgagctatagttctgcattggactgtttttcctttgctatcacctgcccaacacacaatcctggatgcttttgattggttggatttcttttttttttttcctgccttttctttttctttccttgaccctgggaattataaacgagaaattgctttaaaaagtattgttctgtgctaaaattagccttgtttatgaacaagttttatccctagggatttcctgaattgcaatcccagattaccttgtaaatggggctgtgttgtttgatttgtatagtactgatctgtaggttaaaatacgtttcctttcttttgtttcattctttttttaaaagtctggatccaggtaatggcctgagtcacatttgcttagctactgaagcgatctcaatatgttatcgcttagagttgaaacataatcaaacatacgttatacctggggctcttgcacactatttgatatatatatgttactctacaaagaaacacaaaccttgtatgttgaaatgtaattcctgtttgatcctgcagctagaatgctaaagaaattgcaaatatcaaaagtgacttcaaataccctgaatataagctagtcaacagtaagtggatggttccagaataccatattctaagacaaagcaggaattagagatcaactgacctcatccataatgttgctcaggtctgtctgtggatctgtccattttggagtaaaaaacaaggcatgcttctgtgattgtgtttatgaaaactgtagtatttcagatttatgttttgcaattgtgcctgccttgcaataaaacaccttcagttgactcagcaataa

SEQ ID NO: 17525 - DNA, 562 bp, Homo sapiens
  source 1..562: mol_type = unassigned DNA
aggatgaactgcccggcgagagtgcaggcgctgaggacagcgacgatcccgagacgagacccaacggcgagaaaggagagagcaagtcaggccactcttccatagggctgctgcagtttgctgggggtctgcttcagaccctagttgcctccatttttcccatgcctggaggtatcaccagtgaagcctgcaaaacagcaaagatggcaccctgctcctttttctggaatctccgtcccagagatgccatggactacaaggtgatgaataccactatgagctcactacaagatctcaaagatttcaagccactggctgttacaaagcataaagccacccttctggagcagcggcgggaggcaggctgggaggaggccccaagttttggccagacgatagaccacctccttaggtgtccggggagctgctgaaacataatgaggaagatgctgctgatccaaaggataaaaacacagaaactagaaccaagaagcacctaaagtggactcatgcccagcatccctgcagactgactttctctgagctatagttctgcattgga

SEQ ID NO: 17526 - DNA, 448 bp, Homo sapiens
  source 1..448: mol_type = unassigned DNA
gagagtgcaggcgctgaggacagcgacgatcccgagacgagacccaacggcgagaaaggagagagcaagagatgccatggactacaaggtgatgaataccactatgagctcactacaagatctcaaagatttcaagccactggctgttacaaagcataaagccacccttctggagcagcggcgggaggcaggctgggaggaggccccaagttttggccagacgatagaccacctccttaggtgtccggggagctgctgaaacataatgaggaagatgctgctgatccaaaggataaaaacacagaaactagaaccaagaagcacctaaagtggactcatgcccagcatccctgcagactgactttctctgagctatagttctgcattggactgtttttcctttgctatcacctgcccaacacacaatcctggatgcttttgattggtt

SEQ ID NO: 17527 - DNA, 1682 bp, Homo sapiens
  source 1..1682: mol_type = unassigned DNA
gagacccaacggcgagaaaggagagagcaagagaacttcagccaacaagtcttcaggtgctccttcctatagcagatggtccagttcacagccacatcagtctagctccacagtgagagcctatcaaactagtaagtcacgagtgaccatgagccctggcttcagctcccagtggaacagcagccaaccagcctggaatacatactcctttccaagagccagcctgcactaccagtcccatgccagctatacctactgtactggacaccctgcttcctatgcaccagctccccaccccatggctcctcccagccccagcacaaacagcagcagcaacaacagcagcaacaacagcagcggggaacagttgagtaaaaccaacctgtacattcgaggcctcccaccaggcaccactgaccaggacctaatcaagctgtgccaaccgtatggaaaaattgtatctacaaaggcaattcttgacaaaaacacaaatcagtgcaaaggttatggttttgtagattttgacagtcctgcagccgcacagaaagcggtagcatctctcaaggcaaatggcgtgcaggcacagatggctaagcaacaagagcaagacccaacaaacctatacatctcaaatctccccatttctatggatgagcaggagcttgagaatatgctgaaaccctttggacatgtcatttccacaagaatactaagagacgctaatggagtcagcagaggtgttggctttgccagaatggagtctactgaaaaatgtgaagtggtaattcaacattttaatggaaaatatctgaaaacaccaccaggcatcccagcccccagtgagcctttgctgtgcaaattcgctgatggaggacaaaagaagcgacagaatcaaagcaaatatacccagaatgggaggccttggcccagggaaggagaggctggcatggctttgacctatgaccccacagctgccatacagaatggattttattcttcaccgtacagtattgcaaccaaccgcatgattccacagacatctatcacgccattcattgctgcttcccctgtctccacataccaggtccagagtacttcatggatgcctcatccgccatacgttatgcaaccaacaggtgctgtgattacaccaaccatggaccatcccatgtcaatgcagccagccaacatgatgggcccactgacacagcagatgaatcacctttcgttgggcacaacaggaacgattcaatcccaagacaggattatgatactccaccagctgttgtgtcagtatatgactgctgctgctcctatgcaagggacctacattcctcagtacacgcctgtgcctccgacagctgtttctattgaaggtgttgttgctgatacctctccccagacagtggcaccttcatcccaggacaccagtggtcagcagcaacagatagcagtggacacatccaacgaacatgcacctgcatattcttaccaacagtctaaaccataaacaggactgaagaatgtctgtctgaatctttgccttgaatgaagaaacttcattgaacaagaagttggcttccagtttgcacagacgtcaatggaatgcatttttttgttgttgttgttgttttttttttagtgttataccttacccaatgaaagcaaagtttttatgtgct

SEQ ID NO: 17528 - DNA, 4662 bp, Homo sapiens
  source 1..4662: mol_type = unassigned DNA
gagctccatgggaagaggcccgaggaatgagcacagtcttgacagtttcagtgtgggctgactgtgtcctgaagaatgggctgggaagcagctttacattcagcccctcgaggaaggtgactcatctgggtttgttgccctgtctgatgctcccctacttgggacactgagaacttcagccaacaagtcttcaggtgctccttcctatagcagatggtccagttcacagccacatcagtctagctccacagtgagagcctatcaaactagtaagtcacgagtgaccatgagccctggcttcagctcccagtggaacagcagccaaccagcctggaatacatactcctttccaagagccagcctgcactaccagtcccatgccagctatacctactgtactggacaccctgctttttcagccagatggagccaaggcagaagcccactggtggaacctaggcagatgccagcagacacagaaacctgggaaacaggctgcacattgagtcatcctctaatggaagatgggatggcaaggaatggacacaagggagaactgacgagggatctacacgtgtaggaacttttctctggatgagaaaaatgtaaatccattcagaaacatttcttctctatcagtgaagctctacttatatttaggggaatagaaacatttgagggtatctaaaatatctggtaatagaggaaatttaatatattatttggtgtgctttttacccagtgaacagttgaacccattatttacaacttagcattactttagctgaaaaggtatctggagattaagaaaaattatactgatcataatattaaaaatgtaacttattttttattttgtgtttccagagttagaggataccctgtagtgttctagcccacccatatctttctaatttttaagtgtgatcaccattagaacatgaacattaccaaatggggattaggcttattcatatgtttcatttattttaacctacttgaacactgaactttctttccttataatttgcaaagacaaagtcaacatctggaggaggccatgctgatcccatctatgccataacctttacactgctggctcaactgtgagattgcaaagggatcagtgaactagatcgcagacccccagctccttctggccatttctcacctgctctcttcttcctgcccttcatctgcccacctgtccctctatttttctctctgctgctttcagaccacaaagaaaattgagtgcagtgtcaccttatgatatggattggatgtttgtcctctccaaacctcataatgaaatgtgacctccagtgttttgaggttggcctggtgggaggtattggatgatgagggtggatccattatgaatggcttagtgctattcccttggtgatgagtgaattcatcagttaattcacaagagatctggttgtttaagagtctaggacatcccccttctttctctctttctcctgtttttaccatgtaatgtgtttactcctccttccccgtgctccataattggaagcttcctgaggccttcaccagaaggagatgcagcactattcttggtgtacagcccacagcactatgagccaattaagcctcctttctttataaattactccaccttaggtatttctttatagtaatgcaaaaatagactaatagacatcttacctactcatgccactgtttcagaagccacccccgttccacttaaatatcatacatgatggaaaacaaaacaatacacaaggtagaaaacatcctagatagcagctcctgagggaaggtacacttctacaaaataaaaatcaatgagtttatattttggtagcctgtgatgttatacagaatagacagagattctacttaggattccaattcccttaggcccattaagtagggcagatggacattagaagagatgccttcaaaagtggacattaatgtactcttaaaagtaatgggtctgacctataaatcatgggaggaatgtagtacaaaatagtgaatgaaatatttatacgttccattgaagcttcgtgtatattctagagggagaagtcccagagagatgggtcttcccctttgttctgaatctattttccaattgctctgacacagctgttggcttcacagtcattctgaagttgattagatcagaaagcagaggcctgcctgcccagcatgaccaatgaaaaacataaagtttgtcgctgtttcaagcctggagcatgtattttgaagttgttttggtgtgcatgggccttcgaagtggttctttaaatttcagtgctgctgcgtttgtacatcatctgtgtcccaaacagtgcagcaaaatgtgcagtgcatagacttgcataaaatctaccaatcacatttggaaatggctgtcagatttatggagcatggctgtaattacattcacagaaatgctcagttgaaagcagtaacgaaggcttattacttttgttttgtttgttttaataaaacaaaacacttgagtttaaggaaataaattgttacctatggagaaatcttttgacttgttgttggaatgatttagtgtttctaaaacatgtgctgtaggtgagcctaaatgcagattcgtttttgtctgaaggtcagaaaggtttgtaacaactgctaacagtaatatgagatattatgctaactgcttttcaacaattatttcatttaatcttcaaaattaaaaggcaaggagggagtatgattttcattctccacttacagaatccctcctccctaccagccgagtctgtccttcaccgtattctgatcccaggtccctctaagcacaaagtcatatagataggggagccttttagtgaagccctatcctccttcgaaaagaattctcctaagtgaatactggcctctaggcccctgtgactatgggcacaacctgggatgctttggggcttcatcgatgggaaacttgagtggcactttgccagcaacagcaacacttccacttgcctttctcgtttagttgccaacttggctccttgaaagccttatgagctgggtacggtggctcatgcctataatcccagagctttgggaggccaagtcgggcagatcacctgaggtcgggagttcgagaccagcctgaccaatatggagaaaccccgtctctactaaaaaatatacaaaattagccaggcatggtggcacacgcctgtaatcccagctactcgggaggctgaggcaggagaatcgcttgaacccaggaggcggaggttgtggtgagccaagatcgtgccattgcactccagcctgggcaacaagagtgaaactctgtctataaaaagaaaaaaaaaaaagcctgatgttgccaaagttacctagtctctaaatataggatccagtaccaacaacattttaactatgtcatcgggagtggtcagctgaattattgagtcatacaattttagagttggtatgaccttaaatttcatgtggtctgcacccctccatcttcagctgaggaggctggccttcaaggagttggggggattttactaagccatataagtggggagggtagtctggaataagaaacaacatatattcactcccagttctgaacttttccttatactgtattgccagaacacaccatgaaatttcgctctgcaatagataagagtttcttcttgatactatattttactatgttgatactatattatggaaacaataaatatatatacataataagttttaatttattaatctttacagaaaagagctggcttttcatttatcattttaaactttatacttgaaaattcacttttttctttttttttgaggcagaatctcactctgttgcccaggctggagtgcagtggcgcaatcttggctcactgcaacctccacctcccaggttcaagtgattcttctgcctcagcctctcgaatagctgggattacaggcacccgccaccacacctggctaatttttgcacttttagagtgcaaaaattagtagagacagggtttttccatgttagccaggctgatctcaaactccttacctcaggtcatctgcccaccttggcctcccaaagtgctgggattacaggcgtgaacccccatacctggctgaaaattctttattatctcccttcaaagagacaaacagaaaatgaaattgttgtcttagaatatcttacaataaagattagcttacagaaaaccaagactggtcatgaggttttctttctctactctttcacatgttatatgttttgtaggaattttggccaagaatctagaggctaaatctgtatacatggttttaaaaaactgatataactgcaccaaaaactggagagagggcagtggggacatcacatcctagatattgacatttcaaatggagatactttctttacaagtgtagattcctaacctttaatgcattctgagaatttgacatggatttgttttatagctctcaaagtattcaatttagaacaacaacaaaaattgcattagaaaacatactatgctgggcccggcgaagtggctcacacttgtaatcccagcactttgggaggccaggtgggcagatcacctgaggtcaggagtttgaaaccagcttggccaccat

SEQ ID NO: 17529 - DNA, 1192 bp, Homo sapiens
  source 1..1192: mol_type = unassigned DNA
taggtctaaaaatagtaaggcaatcctaggctgtcctaatattaatgtagagagtgttttctgagaagtctccctataaatcttggaattatctcatgttgtagctggaaggatctagggtcatctactccagtggtggctaatttgaatgtctttcgaggccagacagagaacttcagccaacaagtcttcaggtgctccttcctatagcagatggtccagttcacagccacatcaggataaatataggctgaatctgggagaaatacacatttttcctcacagatcacaaccacagaaggtaaaaaaggagaaagatacagagattcttaagaaataacaagcaaacgagtctagctccacagtgagagcctatcaaactagtaagtcacgagtgaccatgagccctggcttcagctcccagtggaacagcagccaaccagcctggaatacatactcctttccaagagccagcctgcactaccagtcccatgccagctatacctactgtactggacaccctgctgataatcaaagcaaagaagccatttttcacctcttttccattataaattctcccttggtaatccttttgtgatttttgtattggaaattgagggttggctaattgaagtcagatgttcagtgcagagtgttgcagcgtatcccaatttgttgccttgtttctctgttctctctttgtatgatctatggagactccaaaaagttatctggggaagaacaatggcacatttaactcagattctattccagacaagcttatcaaacaatttctgtggaacaagtacagtgttattcctgatagaattctgtcgagatagataggacacataggacttatcaaagagggaagcccgtcacctttattagtctggaacttccttttcttcaatcaacaacatatgtgaaccttcttttcttgctagaaatatagaatatatcttccttttgatttttgcataaagtataataatatagctttacagtaaagtatttaaatcttcccttattaggaaccaaaaggtgttttccagttgttctttaatttcataatgatataatgaatgcaggtgtatgtaacatagtgtatatatgtgtatgtgtatatgtacatgtcagtatgtatatatctccatatgtttgtgatatggcttccttataattgtattag

SEQ ID NO: 17530 - DNA, 1458 bp, Homo sapiens
  source 1..1458: mol_type = unassigned DNA
agaacttcagccaacaagtcttcaggtgctccttcctatagcagatggtccagttcacagccacatcaggatcagactgttaatttcttctgtaaagaagccagctggcatttggataggaattgtgttgattctgtagatcactttgtctagctccacagtgagagcctatcaaactagtaagtcacgagtgaccatgagccctggcttcagctcccagtggaacagcagccaaccagcctggaatacatactcctttccaagagccagcctgcactaccagtcccatgccagctatacctactgtactggacaccctgctcagtcctatgcaccagctccccaccccatggctcctcccagccccagcacaaacagcagcagcaacaacagcagcaacaacagcagcggggaacagttgagtaaaaccaacctgtacattcgaggcctcccaccaggcaccactgaccaggacctaatcaagctgtgccaaccgtatggaaaaattgtatctacaaaggcaattcttgacaaaaacacaaatcagtgcaaaggttatggttttgtagattttgacagtcctgcagccgcacagaaagcggtagcatctctcaaggcaaatggcgtgcaggcacagatggctaagcaacaagagcaagacccaacaaacctatacatctcaaatctccccatttctatggatgagcaggagcttgagaatatgctgaaaccctttggacatgtcatttccacaagaatactaagagacgctaatggagtcagcagaggtgttggctttgccagaatggagtctactgaaaaatgtgaagtggtaattcaacattttaatggaaaatatctgaaaacaccaccaggcatcccagcccccagtgagcctttgctgtgcaaattcgctgatggaggacaaaagaagcgacagaatcaaagcaaatatacccagaatgggaggccttggcccagggaaggagaggctggcatggctttgacctatgaccccacagctgccatacagaatggattttattcttcaccgtacagtattgcaaccaaccgcatgattccacagacatctatcacgccattcattgctgcttcccctgtctccacataccaggtccagagtacttcatggatgcctcatccgccatacgttatgcaaccaacaggtgctgtgattacaccaaccatggaccatcccatgtcaatgcagccagccaacatgatgggcccactgacacagcagatgaatcacctttcgttgggcacaacaggaacgtatatgactgctgctgctcctatgcaagggacctacattcctcagtacacgcctgtgcctccgacagctgtttctattgaaggtgttgttgctgatacctctccccagacagtggcaccttcatcccaggacaccagtggtcagcagcaacagatagcagt

SEQ ID NO: 17531 - DNA, 8540 bp, Homo sapiens
  source 1..8540: mol_type = unassigned DNA
acgctgctccctggagaggctctctcggttccacccaccggctggaaggaggggaagtgaatgaaaggacaggacaagccccgaacaccatgtcactctgggagggagacagcagcaactaagctgtacaaggttttttttttttttttttcttcctttttttctttttttttttctttttcccctttctttttctttctttctttctttttctttctttctttctctttctctctctcttttttctttttctttaaggtggggaaagagacaaccaagagacaggaagctgatctgcaaggattcggagttgtgctaaaaggactttgatttttttccccctttacgaacgctggcaattgacatcactacagacagcctggttagagaacaaactgcctcatcccaagtggaccccggcagctgggggaagccaggcaagatctgggaaggctgtgtgtgggtgttttttctacagatctcactcctcgccctttttttttttcctttggtgtgtgttttttgttttgttttgttttttaaaaaaattcttgctgtgttggaactagcgagtggtggagtctctgaagcctcatcagtcaccgggactgtcaggaatagtggtttaagaggaagctcggcctggggcactataccctgtcatccagttccctgcctcggagataaagattccagctacatgggcaaacgcctggatcagccacaaatgtacccccagtacacttactactatcctcattatctccaaaccaagtcctatgcaccagctccccaccccatggctcctcccagccccagcacaaacagcagcagcaacaacagcagcaacaacagcagcggggaacagttgagtaaaaccaacctgtacattcgaggcctcccaccaggcaccactgaccaggacctaatcaagctgtgccaaccgtatggaaaaattgtatctacaaaggcaattcttgacaaaaacacaaatcagtgcaaaggttatggttttgtagattttgacagtcctgcagccgcacagaaagcggtagcatctctcaaggcaaatggcgtgcaggcacagatggctaagcaacaagagcaagacccaacaaacctatacatctcaaatctccccatttctatggatgagcaggagcttgagaatatgctgaaaccctttggacatgtcatttccacaagaatactaagagacgctaatggagtcagcagaggtgttggctttgccagaatggagtctactgaaaaatgtgaagtggtaattcaacattttaatggaaaatatctgaaaacaccaccaggcatcccagcccccagtgagcctttgctgtgcaaattcgctgatggaggacaaaagaagcgacagaatcaaagcaaatatacccagaatgggaggccttggcccagggaaggagaggctggcatggctttgacctatgaccccacagctgccatacagaatggattttattcttcaccgtacagtattgcaaccaaccgcatgattccacagacatctatcacgccattcattgctgcttcccctgtctccacataccaggtccagagtacttcatggatgcctcatccgccatacgttatgcaaccaacaggtgctgtgattacaccaaccatggaccatcccatgtcaatgcagccagccaacatgatgggcccactgacacagcagatgaatcacctttcgttgggcacaacaggaacgattcaatcccaagacaggattatgatactccaccagctgttgtgtcagtatatgactgctgctgctcctatgcaagggacctacattcctcagtacacgcctgtgcctccgacagctgtttctattgaaggtgttgttgctgatacctctccccagacagtggcaccttcatcccaggacaccagtggtcagcagcaacagatagcagtggacacatccaacgaacatgcacctgcatattcttaccaacagtctaaaccataaacaggactgaagaatgtctgtctgaatctttgccttgaatgaagaaacttcattgaacaagaagttggcttccagtttgcacagacgtcaatggaatgcatttttttgttgttgttgttgttttttttttagtgttataccttacccaatgaaagcaaagtttttatgtgctgtgcaaatggtcttcatgtggtctgacaatttatttttgccatcatttttttaattaaagaaaaaatttccagaagaggaaaaaaaaactacaaaaaacaaaacattgaaggttgatattttatgtggaagaacatttgaattgaattcagaatttttctgaaggtgtagatactttttttttttttttaacagaaaacctgatgtcaagaggtgggcaatagaaatggaaacaaattgtcttcctcaataattaagctactttctctttttcccttcttgttttaatctagtgggttttttattttattttttcttagaaatatgtaggtaaggtttatcttgaatcttaattgccttaattttaaggacgtcaaaggctctcgaggcaagctgtcaacgtcttgttgaaaacaaaaatcaagaaagaattgaaatactgtgccggctttcactggcacagaagtttaagactatgagtttttagggtgaagaaaaaactgtacagtttaaatgaaaatgtttttcttcatttgaagaaaatttgttgataaaccatggcaactgcaagaattggaaaaatgctgggacttttcatgaactttgtcttaagtgttgacatgaatcattctaaaaggctaaaacattttacagtaaagttattaaggttggtttaaaaacaactgcattagaaataatgcgtgtttggggggcagaatgcagatttttttaatttacaaagcgtgatcgctagcaaaagcattagtgctttttatctgcagtcttttttatgagctttacaaagtttttagtcagctttgcttgtcacattgcaaaacctagcttaagagcattaaaaaaaaaaacttaagtagataggagcttatggtcaaaaagtgcaaaaaaaaaaacaaaaaaaaagcaatagatagagaaattgttgacaatttctgtagtctttcctagttgtgatcaaattcagcctatggatggcctattttataccaaagatgaagtgacaccctattacagtccagaagatagaggttgttttcgtttcttttctttttaaaaaaaaaaaaatttatttgaccgacatggccggaccagttctttctttgttgtttgtttaaactaccttccactggtgttttacatagtgcaaaaaaaaaaagagggtggggggagttgtctctcttttctttaaatgtgtattcattgatagcagaagcttgtacctgctgtgtttagcagtttcagcatgaagagttctggatatgaactgattcatagagccaagtggctttaaattctgtgagcttttctggtttctcactagctgtcttgaatagtgaaacctgtattgatggccactagtaaaccaagatgcttatttaacaggtggaatattctttatatgaaatttcagctaaagacactttctggacctggtctgaaaggtcatttgtcaaaaaagcttagggatattctgtgaaatggtgagtggtctcctggaaaggtctcattgtatttgaacaatagtcttccctctaaattacaacacctctgggttttgtctttacacctctgtctttgtcatcacctaccatgaatagtcaccttggttttgcaaatggggagggggtatcatctttttgcctgttttcactgtatttttgtatattggtgttgccgaaagaactttttctttcagtttaattctttgaggcatgtaggaccaataagattgagaattctattggtggaatttagggaagtccttaaaatgctagttgacaatcaaggaacagtatgatttatatcaataagaaccaaaagaattaggtttgatcaatcatttaagccaaggaggaatacttgcatttagaacaatgcaaaactttgtctaaaatgaattaaattgacccacctgtaaaatatatctacatttttaattcatgagatgatatgtgttcaacctttacagttttacctgaaattaaggacaatggaatagaatttgttaagtgaaccattcactagattgctttctgaatgaatcctttgaatcaaataggtgaaactcttttcaaaaactaagtcagtcacaggagcctgtcttagtccaaaagaagcagggaaatgtatttaagtgtactataaaacagggtaggctttttaaaaactaaaaagttttaaaggtaaatcatattcccattaggtcaacatgagtaataaggttgactcatgtgaaattgtcaatattctactatttctgtaaactctggttctcttatttgcaaccccatgcactggaagcccaaatcagagaatgactccatatatttatggtcacattggagacaaaagtgtatccaagaaaatgtagtgtgcgttatagagaaattccaactggtcacactcaccattatggtttttcatgctttagagaaaatgctagatttatactgtcttttgttccatccttcagcttcccatgcattataaaggtggcacttaagtttttatctttgaaaagtgggccccaaagttttttggggtacaaaaagacatgtatgagaaccatattttctgtttctctttttcactctctaaactctttttgtataaataaggattatcctgggcataattcatttgaatatgaaaccaacatactttctttcatttttgtgaaaaaataaccaaaaacatgtattaatgtgatacaaagaaagtctcattcacacaatcaacaatgaggctaagaggtagctaccatgtggctaatgaatgtgcctaggtaacttcctgtttctattcaaaactgctgctttatttgtacattcagaaatatttttttcaactatgaaatttcaatatcaattttttaagccagtttctgcaaaaggaaatgacctgtcatttgatgtgttcatgtgtgttttgtgtttggatagtttatatcatgccattctataaaatgtatgttttcaaaccaaaaagaaaaaaaatagaaggaaaacaacggcacatactcaaatttgccctgctttgtctgttgtcttacctaagacttgttttgaagagccaagtctgggagagaaaaaaaagcatcaacaggtaagcagcattacattgtgtggtaataaaccaaaataagttttcaatatatacagacaacagaattcaaatttaatcaacaaaatatattgtagtgatttgtttgtttgtttgtttgagacggagtctcgctctgtcgcccatcctaactaggactataatctttttttttttctttaagttgaagttaattttctgtgcattctggtccaccagattttcaagcatttatttggatgtttccatttttccttttgactttaatagccaagacttagcttaaacatcaggaaacaaactaaagccacaatccaaatgagagaaacactgtctcgtctaaactctagtttcatggtcagtgcaacagtgagttttcttttaataatggtatggtattgtcaagggaggcaaagtgttcatggtaacttggagctccccaatacatggccatgtcttctaaagacaacgtaatgagcccaagtgaactgaaggtcatactggcaggtgctgatgacagtttgtccttgaatgctgacatgtcttgaatattgcaaatgtcataatactcttttaaaacagtcctctacctgactctagttttgcgaggattagtttgtttccttggtagatttcaacatttcagaatgttacctccaaatttcacttgaattacttcctcctgtgaccttagcagatctgtcacatttgaaagcatatgactcacttccacccccttctaatgaaaaactgcatggtgttaaaagcactctcattagaaatataaggctgagaactgaagaaggctgtttaaagcaggaatttcactttattttactatgcctaaaaatacatctttggaccccttgcaaagtgctttaaaagtactttcaatttatgcatgactccaaaaaagtaatttttttttcccaaaaaaacctctttatttaaataattgggatatttgctaaatacctatttttttttacagtggcctaaaacccctattaatgaaaagtgaaatttgatttaattaggactcttgcagtcatcttcacgactgaggagaagtttcaataggctgtctagacattatgatgttaataggagattaaaatacatttggcaattcattttcattcttaatttgagtgcatgaaccactgcagatgagctgataagcagaaattctcaagtgggtttcactaataaatgtttttttatatgatttgaaatcaagtaaagggacaatgtttatgtacgtgtataacaacattcagcacatttgaggaatcacacactataataaagcttaaacctgtcatagaaccttgatctatattactttgtcttcagtaaaaagtgaaggatgagattttgtctttcatgttattgtagctggcatgcttcaaaattttgagcttactgggactgacagcctctcacttcaatctgagggattgacagaatttaaacaggctcattgattctgtacactctacccttcctgtggcaagtgataatgggatttcattaatgaatcaatttgttttacaaatgacatccactgtggcattggaagacagttgggtctgactcaagtttaacatttcttaccaaacattcttaagtatgaaattggtcctttaatccaaatgctcttggtcatggctgtcctttgcggattacatagcattcaggaaagtacaaaaactaaacactaaatccccaactggccccaaagaccttttatgatgtgagagacaagagttcaccccagattaatttcttttatcattggctttatactctaacatatagatactctctatagcaaaaaagggatgaatggctttcaatattcatttctgtttatttttgtgagggaaaataatatatcaagaaaattttcttccacttagaaagctttaaagctgaagtagaggtgcagtcaagcttggatctgcaggaagaaccactaggccactgagtcatacttgagcttttcttactactgccccaatttctaaattgtgcataaatacaatcactctcaatttttgaagggctaattatctactttgtgggtgtgttttgttttttcttttcagcgtgtagggcttgggctctgtttccttttattagcatgtcacctgagggtggaacaaacaattggaaataaaatttgattattttatttcttataaagtattaatttcttaagggggtttgaaatcattggtaaaattaatatcagtacattatatgtcataaattttgattatctataatgtcttttcttatctaccacaaataattgagagttggctaaattcttgcagaatatatgggaaaaaaatcatagcaaagaattcagcttccctcaaaagaaagctatttttgtttccttcactccactaaatttgaaccagtagcacggatcaacacgacttctgcaatgagagtataacggtagctcttggtacagtcatattcatatttttaaatctttctttgaccaaaactattgcattgttttcattacattttgactgcgttacttattaaggccgaatgactttgacacccccgtggattatttttatgatcacatcaaatttaaacaatgtccaaagtgtaactttaatgttatattttgtttcaaaccctctggtctaagattattgagaaagatgttttttcctcctccctcaaatatgttatctcttcatatataaaaaaataagttattccatgcttttcaggaactgtaaaaattatttcaaaaagatatttgaaaaagttttctctattctggacacaaatgcttccatttatttcaaaagaagaagaagaaaaatggaatcttaatttaaaaaaatatatgtagtagtatctgctatgagatattcagtctctataaaaaaaaaaagggacacagcttcttttaaaacccttgtttcagtccatattcaacttcatggaacttctgaaacatcattcaattttgaactttatttaagagcatttttgtactgctgtctctgactgtcatggaaagttctgtaattctaaggtgtttctggttttatttttaatttcttcatctgtaccacagtcaaattagcaaccatctcccccatcccttgggctttctgtagatcagtggatgttaggtttaaacttctgttttctttgatgaagctttcaataaaaaatgaaaataaaatcaattgaa

SEQ ID NO: 17532 - DNA, 841 bp, Homo sapiens
  source 1..841: mol_type = unassigned DNA
gtcactctgggagggagacagcagcaactaagctgtacaaggttttttttttttttttttcttcctttttttctttttttttttctttttcccctttctttttctttctttctttctttttctttctttctttctctttctctctctcttttttctttttctttaaggtggggaaagagacaaccaagagacaggaagctgatctgcaaggattcggagttgtgctaaaaggactttgatttttttccccctttacgaacgctggcaattgacatcactacagacagcctggttagagaacaaactgcctcatcccaagtggaccccggcagctgggggaagccaggcaagatctgggaaggctgtgtcgagtggtggagtctctgaagcctcatcagtcaccgggactgtcaggaatagtggtttaagaggaagctcggcctggggcactataccctgtcatccagttccctgcctcggagataaagattccagctacatgggcaaacgcctggatcagccacaaatgtacccccagtacacttactactatcctcattatctccaaaccaagcagtcctatgcaccagctccccaccccatggctcctcccagccccagcacaaacagcagcagcaacaacagcagcaacaacagcagcggggaacagttgagtaaaaccaacctgtacattcgaggcctcccaccaggcaccactgaccaggacctaatcaagctgtgccaaccgtaagtgtccttctgctgcccgtgctgtttctcactcccatacttgccttggtgggcaggatgtgttatttcagtcaatgtactcatccactgg

SEQ ID NO: 17533 - DNA, 1864 bp, Homo sapiens
  source 1..1864: mol_type = unassigned DNA
atcactacagacagcctggttagagaacaaactgcctcatcccaagtggaccccggcagctgggggaagccaggcaagatctgggaaggctgtgtgtgggtgttttttctacagatctcactcctcgccctttttttttttcctttggtgtgtgttttttgttttgttttgttttttaaaaaaattcttgctgtgttggaactagcgagtggtggagtctctgaagcctcatcagtcaccgggactgtcaggaatagtggtttaagaggaagctcggcctggggcactataccctgtcatccagttccctgcctcggagataaagattccagctacatgggcaaacgcctggatcagccacaaatgtacccccagtacacttactactatcctcattatctccaaaccaagcagtcctatgcaccagctccccaccccatggctcctcccagccccagcacaaacagcagcagcaacaacagcagcaacaacagcagcggggaacagttgagtaaaaccaacctgtacattcgaggcctcccaccaggcaccactgaccaggacctaatcaagctgtgccaaccgtatggaaaaattgtatctacaaaggcaattcttgacaaaaacacaaatcagtgcaaaggttatggttttgtagattttgacagtcctgcagccgcacagaaagcggtagcatctctcaaggcaaatggcgtgcaggcacagatggctaagcaacaagagcaagacccaacaaacctatacatctcaaatctccccatttctatggatgagcaggagcttgagaatatgctgaaaccctttggacatgtcatttccacaagaatactaagagacgctaatggagtcagcagaggtgttggctttgccagaatggagtctactgaaaaatgtgaagtggtaattcaacattttaatggaaaatatctgaaaacaccaccaggcatcccagcccccagtgagcctttgctgtgcaaattcgctgatggaggacaaaagaagcgacagaatcaaagcaaatatacccagaatgggaggccttggcccagggaaggagaggctggcatggctttgacctatgaccccacagctgccatacagaatggattttattcttcaccgtacagtattgcaaccaaccgcatgattccacagacatctatcacgccattcattgctgcttcccctgtctccacataccaggtccagagtacttcatggatgcctcatccgccatacgttatgcaaccaacaggtgctgtgattacaccaaccatggaccatcccatgtcaatgcagccagccaacatgatgggcccactgacacagcagatgaatcacctttcgttgggcacaacaggaacgattcaatcccaagacaggattatgatactccaccagctgttgtgtcagtatatgactgctgctgctcctatgcaagggacctacattcctcagtacacgcctgtgcctccgacagctgtttctattgaaggtgttgttgctgatacctctccccagacagtggcaccttcatcccaggacaccagtggtcagcagcaacagatagcagtggacacatccaacgaacatgcacctgcatattcttaccaacagtctaaaccataaacaggactgaagaatgtctgtctgaatctttgccttgaatgaagaaacttcattgaacaagaagttggcttccagtttgcacagacgtcaatggaatgcatttttttgttgttgttgttgttttttttttagtgttataccttacccaatgaaagcaaagtttttatgtgctgtgcaaatggtcttcatgtggtctgacaatttatttttgcca

SEQ ID NO: 17534 - DNA, 1120 bp, Homo sapiens
  source 1..1120: mol_type = unassigned DNA
caaactgcctcatcccaagtggaccccggcagctgggggaagccaggcaagatctgggaaggctgtgtgtgggtgttttttctacagatctcactcctcgccctttttttttttcctttggtgtgtgttttttgttttgttttgttttttaaaaaaattcttgctgtgttggaactagcgagtggtggagtctctgaagcctcatcagtcaccgggactgtcaggaatagtggtttaagaggaagctcggcctggggcactataccctgtcatccagttccctgcctcggagataaagattccagctacatgggcaaacgcctggatcagccacaaatgtacccccagtacacttactactatcctcattatctccaaaccaagcagtcctatgcaccagctccccaccccatggctcctcccagccccagcacaaacagcagcagcaacaacagcagcaacaacagcagcggggaacagttgagtaaaaccaacctgtacattcgaggcctcccaccaggcaccactgaccaggacctaatcaagctgtgccaaccgtatggaaaaattgtatctacaaaggcaattcttgacaaaaacacaaatcagtgcaaaggttatggttttgtagattttgacagtcctgcagccgcacagaaagcggtagcatctctcaaggcaaatggcgtgcaggcacagatggctaagcaacaagagcaagacccaacaaacctatacatctcaaatctccccatttctatggatgagcaggagcttgagaatatgctgaaaccctttggacatgtcatttccacaagaatactaagagacgctaatggagtcagcagaggtgttggctttgccagaatggagtctactgaaaaatgtgaagtggtaattcaacattttaatggaaaatatctgaaaacaccaccaggcatcccagcccccagtgagcctttgctgtgcaaattcgctgatggaggacaaaagaagcgacagaatcaaagcaaatatacccagaatgggaggccttggcccagggaaggagaggctggcatggctttgacctatgaccccacagctgccatacagaatgggtaagtagatcacattttct

SEQ ID NO: 17535 - DNA, 1598 bp, Homo sapiens
  source 1..1598: mol_type = unassigned DNA
ttctacagatctcactcctcgccctttttttttttcctttggtgtgtgttttttgttttgttttgttttttaaaaaaattcttgctgtgttggaactagcgagtggtggagtctctgaagcctcatcagtcaccgggactgtcaggaatagtggtttaagaggaagctcggcctggggcactataccctgtcatccagttccctgcctcggagataaagattccagctacatgggcaaacgcctggatcagccacaaatgtacccccagtacacttactactatcctcattatctccaaaccaagcagtcctatgcaccagctccccaccccatggctcctcccagccccagcacaaacagcagcagcaacaacagcagcaacaacagcagcggggaacagttgagtaaaaccaacctgtacattcgaggcctcccaccaggcaccactgaccaggacctaatcaagctgtgccaaccgtatggaaaaattgtatctacaaaggcaattcttgacaaaaacacaaatcagtgcaaaggttatggttttgtagattttgacagtcctgcagccgcacagaaagcggtagcatctctcaaggcaaatggcgtgcaggcacagatggctaagcaacaagagcaagacccaacaaacctatacatctcaaatctccccatttctatggatgagcaggagcttgagaatatgctgaaaccctttggacatgtcatttccacaagaatactaagagacgctaatggagtcagcagaggtgttggctttgccagaatggagtctactgaaaaatgtgaagtggtaattcaacattttaatggaaaatatctgaaaacaccaccaggcatcccagcccccagtgagcctttgctgtgcaaattcgctgatggaggacaaaagaagcgacagaatcaaagcaaatatacccagaatgggaggccttggcccagggaaggagaggctggcatggctttgacctatgaccccacagctgccatacagaatggattttattcttcaccgtacagtattgcaaccaaccgcatgattccacagacatctatcacgccattcattgctgcttcccctgtctccacataccaggtccagagtacttcatggatgcctcatccgccatacgttatgcaaccaacaggtgctgtgattacaccaaccatggaccatcccatgtcaatgcagccagccaacatgatgggcccactgacacagcagatgaatcacctttcgttgggcacaacaggaacgtatatgactgctgctgctcctatgcaagggacctacattcctcagtacacgcctgtgcctccgacagctgtttctattgaaggtgttgttgctgatacctctccccagacagtggcaccttcatcccaggacaccagtggtcagcagcaacagatagcagtggacacatccaacgaacatgcacctgcatattcttaccaacagtctaagtaagtctgggctgtgctaagctcttttcctcaagatcagccatcttgacatcactctctcatgttgtatgtgttagcttttgctgaaatataaaccatcccaaactta

SEQ ID NO: 17536 - DNA, 2757 bp, Homo sapiens
  source 1..2757: mol_type = unassigned DNA
ttctacagatctcactcctcgccctttttttttttcctttggtgtgtgttttttgttttgttttgttttttaaaaaaattcttgctgtgttggaactagcgagtggtggagtctctgaagcctcatcagtcaccgggactgtcaggaatagtggtttaagaggaagctcggcctggggcactataccctgtcatccagttccctgcctcggagataaagattccagctacatgggcaaacgcctggatcagccacaaatgtacccccagtacacttactactatcctcattatctccaaaccaagtcctatgcaccagctccccaccccatggctcctcccagccccagcacaaacagcagcagcaacaacagcagcaacaacagcagcggggaacagttgagtaaaaccaacctgtacattcgaggcctcccaccaggcaccactgaccaggacctaatcaagctgtgccaaccgtatggaaaaattgtatctacaaaggcaattcttgacaaaaacacaaatcagtgcaaaggttatggttttgtagattttgacagtcctgcagccgcacagaaagcggtagcatctctcaaggcaaatggcgtgcaggcacagatggctaagcaacaagagcaagacccaacaaacctatacatctcaaatctccccatttctatggatgagcaggagcttgagaatatgctgaaaccctttggacatgtcatttccacaagaatactaagagacgctaatggagtcagcagaggtgttggctttgccagaatggagtctactgaaaaatgtgaagtggtaattcaacattttaatggaaaatatctgaaaacaccaccaggcatcccagcccccagtgagcctttgctgtgcaaattcgctgatggaggacaaaagaagcgacagaatcaaagcaaatatacccagaatgggaggccttggcccagggaaggagaggctggcatggctttgacctatgaccccacagctgccatacagaatggattttattcttcaccgtacagtattgcaaccaaccgcatgattccacagacatctatcacgccattcattgctgcttcccctgtctccacataccagggtgctgtgattacaccaaccatggaccatcccatgtcaatgcagccagccaacatgatgggcccactgacacagcagatgaatcacctttcgttgggcacaacaggaacgattcaatcccaagacaggattatgatactccaccagctgttgtgtcagtatatgactgctgctgctcctatgcaagggacctacattcctcagtacacgcctgtgcctccgacagctgtttctattgaaggtgttgttgctgatacctctccccagacagtggcaccttcatcccaggacaccagtggtcagcagcaacagatagcagtggacacatccaacgaacatgcacctgcatattcttaccaacagtctaaaccataaacaggactgaagaatgtctgtctgaatctttgccttgaatgaagaaacttcattgaacaagaagttggcttccagtttgcacagacgtcaatggaatgcatttttttgttgttgttgttgttttttttttagtgttataccttacccaatgaaagcaaagtttttatgtgctgtgcaaatggtcttcatgtggtctgacaatttatttttgccatcatttttttaattaaagaaaaaatttccagaagaggaaaaaaaaactacaaaaaacaaaacattgaaggttgatattttatgtggaagaacatttgaattgaattcagaatttttctgaaggtgtagatactttttttttttttttaacagaaaacctgatgtcaagaggtgggcaatagaaatggaaacaaattgtcttcctcaataattaagctactttctctttttcccttcttgttttaatctagtgggttttttattttattttttcttagaaatatgtaggtaaggtttatcttgaatcttaattgccttaattttaaggacgtcaaaggctctcgaggcaagctgtcaacgtcttgttgaaaacaaaaatcaagaaagaattgaaatactgtgccggctttcactggcacagaagtttaagactatgagtttttagggtgaagaaaaaactgtacagtttaaatgaaaatgtttttcttcatttgaagaaaatttgttgataaaccatggcaactgcaagaattggaaaaatgctgggacttttcatgaactttgtcttaagtgttgacatgaatcattctaaaaggctaaaacattttacagtaaagttattaaggttggtttaaaaacaactgcattagaaataatgcgtgtttggggggcagaatgcagatttttttaatttacaaagcgtgatcgctagcaaaagcattagtgctttttatctgcagtcttttttatgagctttacaaagtttttagtcagctttgcttgtcacattgcaaaacctagcttaagagcattaaaaaaaaaaacttaagtagataggagcttatggtcaaaaagtgcaaaaaaaaaaacaaaaaaaaagcaatagatagagaaattgttgacaatttctgtagtctttcctagttgtgatcaaattcagcctatggatggcctattttataccaaagatgaagtgacaccctattacagtccagaagatagaggttgttttcgtttcttttctttttaaaaaaaaaaaaatttatttgaccga

SEQ ID NO: 17537 - DNA, 1547 bp, Homo sapiens
  source 1..1547: mol_type = unassigned DNA
gagtggtggagtctctgaagcctcatcagtcaccgggactgtcaggaatagtggtttaagaggaagctcggcctggggcactataccctgtcatccagttccctgcctcggagataaagattccagctacatgggcaaacgcctggatcagccacaaatgtacccccagtacacttactactatcctcattatctccaaaccaagcagtcctatgcaccagctccccaccccatggctcctcccagccccagcacaaacagcagcagcaacaacagcagcaacaacagcagcggggaacagttgagtaaaaccaacctgtacattcgaggcctcccaccaggcaccactgaccaggacctaatcaagctgtgccaaccgtatggaaaaattgtatctacaaaggcaattcttgacaaaaacacaaatcagtgcaaaggttatggttttgtagattttgacagtcctgcagccgcacagaaagcggtagcatctctcaaggcaaatggcgtgcaggcacagatggctaagcaacaagagcaagacccaacaaacctatacatctcaaatctccccatttctatggatgagcaggagcttgagaatatgctgaaaccctttggacatgtcatttccacaagaatactaagagacgctaatggagtcagcagaggtgttggctttgccagaatggagtctactgaaaaatgtgaagtggtaattcaacattttaatggaaaatatctgaaaacaccaccaggcatcccagcccccagtgagcctttgctgtgcaaattcgctgatggaggacaaaagaagcgacagaatcaaagcaaatatacccagaatgggaggccttggcccagggaaggagaggctggcatggctttgacctatgaccccacagctgccatacagaatggattttattcttcaccgtacagtattgcaaccaaccgcatgattccacagacatctatcacgccattcattgctgcttcccctgtctccacataccaggtccagagtacttcatggatgcctcatccgccatacgttatgcaaccaacaggtgctgtgattacaccaaccatggaccatcccatgtcaatgcagccagccaacatgatgggcccactgacacagcagatgaatcacctttcgttgggcacaacaggaacgtatatgactgctgctgctcctatgcaagggacctacattcctcagtacacgcctgtgcctccgacagctgtttctattgaaggtgttgttgctgatacctctccccagacagtggcaccttcatcccaggacaccagtggtcagcagcaacagatagcagtggacacatccaacgaacatgcacctgcatattcttaccaacagtctaaaccataaacaggactgaagaatgtctgtctgaatctttgccttgaatgaagaaacttcattgaacaagaagttggcttccagtttgcacagacgtcaatggaatgcatttttttgttgttgttgttgttttttttttagtgttataccttacccaatg

SEQ ID NO: 17538 - DNA, 1394 bp, Homo sapiens
  source 1..1394: mol_type = unassigned DNA
agctcggcctggggcactataccctgtcatccagttccctgcctcggagataaagattccagctacatgggcaaacgcctggatcagccacaaatgtacccccagtacacttactactatcctcattatctccaaaccaagcagtcctatgcaccagctccccaccccatggctcctcccagccccagcacaaacagcagcagcaacaacagcagcaacaacagcagcggggaacagttgagtaaaaccaacctgtacattcgaggcctcccaccaggcaccactgaccaggacctaatcaagctgtgccaaccgtatggaaaaattgtatctacaaaggcaattcttgacaaaaacacaaatcagtgcaaaggttatggttttgtagattttgacagtcctgcagccgcacagaaagcggtagcatctctcaaggcaaatggcgtgcaggcacagatggctaagcaacaagagcaagacccaacaaacctatacatctcaaatctccccatttctatggatgagcaggagcttgagaatatgctgaaaccctttggacatgtcatttccacaagaatactaagagacgctaatggagtcagcagaggtgttggctttgccagaatggagtctactgaaaaatgtgaagtggtaattcaacattttaatggaaaatatctgaaaacaccaccaggcatcccagcccccagtgagcctttgctgtgcaaattcgctgatggaggacaaaagaagcgacagaatcaaagcaaatatacccagaatgggaggccttggcccagggaaggagaggtactcagaggcaggactgtccctaggcaaaatcgtgaagctggcatggctttgacctatgaccccacagctgccatacagaatggattttattcttcaccgtacagtattgcaaccaaccgcatgattccacagacatctatcacgccattcattgctgcttcccctgtctccacataccaggtccagagtacttcatggatgcctcatccgccatacgttatgcaaccaacaggtgctgtgattacaccaaccatggaccatcccatgtcaatgcagccagccaacatgatgggcccactgacacagcagatgaatcacctttcgttgggcacaacaggaacgtatatgactgctgctgctcctatgcaagggacctacattcctcagtacacgcctgtgcctccgacagctgtttctattgaaggtgttgttgctgatacctctccccagacagtggcaccttcatcccaggacaccagtggtcagcagcaacagatagcagtggacacatccaacgaacatgcacctgcatattcttaccaacagtctaagtaagtctgggctgtgctaagctcttttcc

SEQ ID NO: 17539 - DNA, 413 bp, Homo sapiens
  source 1..413: mol_type = unassigned DNA
tacattcgaggcctcccaccaggcaccactgaccaggacctaatcaagctgtgccaaccgtatggaaaaattgtatctacaaaggcaattcttgacaaaaacacaaatcagtgcaaaggttatggttttgtagattttgacagtcctgcagccgcacagaaagcggtagcatctctcaaggcaaatggcgtgcaggcacagatggctaagcaacaagagcaagacccaacaaacctatacatctcaaatctccccatttctatggatgagcaggagcttgagaatatgctgaaaccctttggacatgtcatttccacaagaatactaagagacgctaatggagtcagcagaggtgttggctttgccaggtaaaattctttctttgtatgtaatcgttctttcctcattgttcc

SEQ ID NO: 17540 - DNA, 556 bp, Homo sapiens
  source 1..556: mol_type = unassigned DNA
cacaggacttcaattttataagagtccagaaagttctgagtaatgcacagaattctacatacacagcaaatgcagccatggcaaaatgtagtccctggtgagggaggcaaacagagaatcaacaatcctttgcttttattggaataataaaaccggagcagtttgtgtctgaatgtgctgtaaaccagattttttttttcatgtaaattctatagccaggatatcacagacattgccatgaaagtggtaaatggagaaatacagtctttggaggaatcttgacttctcagcactctttgtttattcatttaaatgtgcctatttttatggatggtgggtcaagatggcggattcaatgaaatagtatttcataacaaaatgagcatgaagagaatttgggcatgtctaccaaaacacgaaggacaacaacaagagcaagacccaacaaacctatacatctcaaatctccccatttctatggatgagcaggagcttgagaatatgctgaaaccctttggacatgtcatttccacaagaatactaagagacgctaatg

SEQ ID NO: 17541 - DNA, 483 bp, Homo sapiens
  source 1..483: mol_type = unassigned DNA
gaaaaatgtgaagtggtaattcaacattttaatggaaaatatctgaaaacaccaccaggcatcccagcccccagtgagcctttgctgtgcaaattcgctgatggaggacaaaagaagcgacagaatcaaagcaaatatacccagaatgggaggccttggcccagggaaggagaggctggcatggctttgacctatgaccccacagctgccatacagaatggattttattcttcaccgtacagtattgcaaccaaccgcatgattccacagacatctatcacgccattcattgctgcttcccctgtctccacataccaggtccagagtacttcatggatgcctcatccgccatacgttatgcaaccaacaatttagaaaaaaaatactctgggaagaaaggatagatgtctctttgcatggattataattctgatgttttggaaagaaaagagatttctgttactggaccctgggaacttattg

SEQ ID NO: 17542 - DNA, 849 bp, Homo sapiens
  source 1..849: mol_type = unassigned DNA
cttgaacctgggaggcggagattgcagtgagccaagatcacatcattgcattccagcctgggcaacaagagcgaaactccatctcaggaaaaaaagaaaaaaaaaaaaagagagagagagagaacagatttaaaggaatttgtgatgttctgacaagacttgactcctgactgagttttatggctgatgagggagaaggaaacgatcaagatgacttaggagtttctttgttattctgagaatcgagcagagaagaaagaatactctgagaatgaaagaggaagacagcattcagagcgggacatagtagttttgaggtacatgggattcggtcagtagttggaaatttggatcatgaattcagaagaaacaccaaggcaagaaagacttttttaaaactttaatttttaaactaattatagcacttttgattaatcaagtcttaacaagcgggaatattttggaattttacttctaacaccttatttttatgggtgctgtgattacaccaaccatggaccatcccatgtcaatgcagccagccaacatgatgggcccactgacacagcagatgaatcacctttcgttgggcacaacaggaacgattcaatcccaagacaggattatgatactccaccagctgttgtgtcagtatatgactgctgctgctcctatgcaagggacctacattcctcagtacacgcctgtgcctccgacagctgtttctattgaaggtgttgttgctgatacctctccccagacagtggcaccttcatcccaggacaccagtggtcagcagcaacagatagcagtggacacatccaacgaacatgcacctgcatattctta

SEQ ID NO: 17543 - DNA, 785 bp, Homo sapiens
  source 1..785: mol_type = unassigned DNA
gtggtatttaataattttctcactggttgcagctcaaagttcacatgcatttttctttgattctctctagtatatgactgctgctgctcctatgcaagggacctacattcctcagtacacgcctgtgcctccgacagctgtttctattgaaggtgttgttgctgatacctctccccagacagtggcaccttcatcccaggacaccagtggtcagcagcaacagatagcagtggacacatccaacgaacatgcacctgcatattcttaccaacagtctaagtaagtctgggctgtgctaagctcttttcctcaagatcagccatcttgacatcactctctcatgttgtatgtgttagcttttgctgaaatataaaccatcccaaacttagcaacaggcatttatttagctcatgattatgtgggtttgaaatttgggctaactttgggtggatggttcttctgatcttgacaggaatcaaacatctaggaacagctgctgattatctatgcatctctgcttctgggtgttgctagctgttggatgtgtgatggaagtgactaggccatatgtttctgatcctccagcaggctaattcacatggaagtctcagaatttcaagaatagtaaagagcaagcccaaatgtacaagcactcttaattctgtttattactaattttctactgtctcattagccaaagcaagtcacttggccaaacagtcaatgtagcagttcactttgaaaaagcttgatatagagagaggcactgcagccattaaaaaaaa

SEQ ID NO: 17544 - DNA, 694 bp, Homo sapiens
  source 1..694: mol_type = unassigned DNA
ctgcagcctgctccttgccatccaccacaaaccctcaccgaaccagtggccaccaccatgacaagggaccagaatggaacctgggagatggagagtaatgaaaactttgagggctacatgaaggccctggatattgattttgccacccgcaagattgcagtacgtctcactcagacgaaggttattgatcaagatggtgataacttcaagacaaaaaccactagcacattccgcaactatgatgtggatttcactgttggagtagagtttgacgagtacacaaagagcctggataaccggcatgttaaggcactggtcacctgggaaggtgatgtccttgtgtgtgtgcaaaagggggagaaggagaaccgcggctggaagcagtggattgagggggacaagctgtacctggagctgacctgtggtgaccaggtgtgccgtcaagtgttcaaaaagaaatgatggcgacgtgggaggcctgccaagcacaagctccccactgcccacactgagtggtctactggctttgagaaacagctgtggggaccttcccactcttgacagagccccattaaggcatctgggtgggttttaaacagaatgcctatgtagcagtgatagacatattcccctcctttgaaacctagcattaaatggaaaaacaaaaattactcccatattttgaaacccttta

SEQ ID NO: 17545 - DNA, 489 bp, Homo sapiens
  source 1..489: mol_type = unassigned DNA
ctgctgcagtcagatgctcccaaggacagcagtctccagaaagcttcttgtaacctggaaagattggttatagttgatcattttcctccatcttaaaagtcacctgaagaattccacaaggacttagcctgctccttgccatccaccacaaaccctcaccgaaccagtggccaccaccatgacaagggaccagaatggaacctgggagatggagagtaatgaaaactttgagggctacatgaaggccctggatattgattttgccacccgcaagattgcagtacgtctcactcagacgaaggttattgatcaagatggtgataacttcaagacaaaaaccactagcacattccgcaactatgatgtggatttcactgttggagtagagtttgacgagtacacaaagagcctggataaccggcatgttaaggcactggtcacctgggaaggtgatgtccttgtgtgtgtgcaaaagggggagaaggagaa

SEQ ID NO: 17546 - DNA, 180 bp, Homo sapiens
  source 1..180: mol_type = unassigned DNA
tagggagccagcccaggagcccagctgctgcagtcagatgctcccaaggacagcagcctgctccttgccatccaccacaaaccctcaccgaaccagtggccaccaccatgacaagggaccagaatggaacctgggagatggagagtaatgaaaactttgagggctacatgaaggccctgg

SEQ ID NO: 17547 - DNA, 1623 bp, Homo sapiens
  source 1..1623: mol_type = unassigned DNA
ggttccagcgacagcagcactggactcgtccagagggcggcgggtgagcggctggggccccgtggagccaccatggaccccgcaggggcagcagacccctcagtgcctcccaatcctttgactcacctgagcctgcaggacagatcagagatgcagctgcagagcgaagccgacaggcggagcctcccgggcacttggaccaggtcatccccagagcacaccaccattctgaggggaggcgtgcgcaggtgcctgcagcaacagtgtgaacagactgtgcggatcctgcatgccaaggtggcccagaaatcatacggaaatgagaagcggttcttctgccccccgccctgtgtctacctctcggggcctggctggagggtgaagccagggcaggatcaagctcaccaggcgggggaaacggggcccacggtctgcggttacatgggactggacagcgcgtccggcagcgccactgagacgcagaagctgaatttcgagcagcagccggactccagggaattcggctgcgccaagaccctgtacatctcagatgcagacaagaggaagcactttcggctggtgctgcggctggtgctgcgcgggggccgggagctgggtaccttccacagccgccttatcaaggtcatctcgaagccctcgcagaagaagcagtcgctgaaaaacaccgatctgtgcatatcctccggctcaaaggtctccctcttcaaccgcctgcgctctcagacggtctccacacgctacctctctgtggaggatggggcctttgtggccagtgcacgacagtgggctgccttcacgctccacctggctgatgggcactctgcccaaggagacttcccaccgcgagagggctacgttcgctatggctccctggtgcagctcgtctgcacggtcaccggcatcacactacctcccatgatcatccgtaaagtagcaaaacagtgtgcgctccttgatgtggatgagcccatctcccagctgcacaagtgtgcattccagtttccaggcagtcccccaggagggggtggcacctacttatgccttgccacagagaaggtggtgcaatttcaggcctctccctgccccaaggaggcgaacagggctctgcttaacgacagctcttgctggaccatcatcggcaccgagtcggtggaattttccttcagcaccagcctggcgtgtaccctggagccggtcactccggtgcctctcatcagcaccctagagctgagcggcgggggcgacgtggccacgctggagctccacggagagaacttccacgcggggctcaaggtgtggtttggggacgtggaggcagaaaccatgtacagcccgcggtccctggtgtgcgtggtgccggacgtggcggccttctgcagcgactggcgctggctgcgcgctcccatcacaatccccatgagcctggtgcgcgccgacgggctcttctaccctagtgccttctccttcacctacaccccggaatacagcgtgcggccgggtcaccccggcgtccccgagcccgccaccgacgccgacgcgctcctggagagcatccatcaggagttcacgcgcaccaacttccacctcttcatccagacttag

SEQ ID NO: 17548 - DNA, 1636 bp, Homo sapiens
  source 1..1636: mol_type = unassigned DNA
ggttccagcgacagcagcactggactcgtccagagggcggcgggtgagcggctggggccccgtggagccaccatggaccccgcaggggcagcagacccctcagtgcctcccaatcctttgactcacctgagcctgcaggacagatcagagatgcagctgcagagcgaagccgacaggcggagcctcccgggcacttggaccaggtcatccccagagcacaccaccattctgaggggaggcgtgcgcaggtgcctgcagcaacagtgtgaacagactgtgcggatcctgcatgccaaggtggcccagaaatcatacggaaatgagaagcggttcttctgccccccgccctgtgtctacctctcggggcctggctggagggtgaagccagggcaggatcaagctcaccaggcgggggaaacggggcccacggtctgcggttacatgggactggacagcgcgtccggcagcgccactgagacgcagaagctgaatttcgagcagcagccggactccagggaattcggctgcgccaagaccctgtacatctcagatgcagacaagaggaagcactttcggctggtgctgcggctggtgctgcgcgggggccgggagctgggtaccttccacagccgccttatcaaggtcatctcgaagccctcgcagaagaagcagtcgctgaaaaacaccgatctgtgcatatcctccggctcaaaggtctccctcttcaaccgcctgcgctctcagacggtctccacacgctacctctctgtggaggatggggcctttgtggccagtgcacgacagtgggctgccttcacgctccacctggctgatgggcactctgcccaaggagacttcccaccgcgagagggctacgttcgctatggctccctggtgcagctcgtctgcacggtcaccggcatcacactacctcccatgatcatccgtaaagtagcaaaacagtgtgcgctccttgatgtggatgagcccatctcccagctgcacaagtgtgcattccagtttccaggcagtcccccaggagggggtggcacctacttatgccttgccacagagaaggtggtgcaatttcaggcctctccctgccccaaggaggcgaacagggctctgcttaacgacagctcttgctggaccatcatcggcaccgagtcggtggaattttccttcagcaccagcctggcgtgtaccctggagccggtcactccggtgcctctcatcagcaccctagagctgagcggcgggggcgacgtggccacgctggagctccacggagagaacttccacgcggggctcaaggtgtggtttggggacgtggaggcagaaaccatgtacaggtacggggtggagcccgcggtccctggtgtgcgtggtgccggacgtggcggccttctgcagcgactggcgctggctgcgcgctcccatcacaatccccatgagcctggtgcgcgccgacgggctcttctaccctagtgccttctccttcacctacaccccggaatacagcgtgcggccgggtcaccccggcgtccccgagcccgccaccgacgccgacgcgctcctggagagcatccatcaggagttcacgcgcaccaacttccacctcttcatccagacttag

SEQ ID NO: 17549 - DNA, 2489 bp, Homo sapiens
  source 1..2489: mol_type = unassigned DNA
ggttccagcgacagcagcactggactcgtccagagggcggcgggtgagcggctggggccccgtggagccaccatggaccccgcaggggcagcagacccctcagtgcctcccaatcctttgactcacctgagcctgcaggacagatcagagatgcagctgcagagcgaagccgacaggcggagcctcccgggcacttggaccaggtcatccccagagcacaccaccattctgaggggaggcgtgcgcaggtgcctgcagcaacagtgtgaacagactgtgcggatcctgcatgccaaggtggcccagaaatcatacggaaatgagaagcggttcttctgccccccgccctgtgtctacctctcggggcctggctggagggtgaagccagggcaggatcaagctcaccaggcgggggaaacggggcccacggtctgcggttacatgggactggacagcgcgtccggcagcgccactgagacgcagaagctgaatttcgagcagcagccggactccagggaattcggctgcgccaagaccctgtacatctcagatgcagacaagaggaagcactttcggctggtgctgcggctggtgctgcgcgggggccgggagctgggtaccttccacagccgccttatcaaggtcatctcgaagccctcgcagaagaagcagtcgctgaaaaacaccgatctgtgcatatcctccggctcaaaggtctccctcttcaaccgcctgcgctctcagacggtctccacacgctacctctctgtggaggatggggcctttgtggccagtgcacgacagtgggctgccttcacgctccacctggctgatgggcactctgcccaaggagacttcccaccgcgagagggctacgttcgctatggctccctggtgcagctcgtctgcacggtcaccggcatcacactacctcccatgatcatccgtaaagtagcaaaacagtgtgcgctccttgatgtggatgagcccatctcccagctgcacaagtgtgcattccagtttccaggcagtcccccaggagggggtggcacctacttatgccttgccacagagaaggtggtgcaatttcaggcctctccctgccccaaggaggcgaacagggctctgcttaacgacagctcttgctggaccatcatcggcaccgagtcggtggaattttccttcagcaccagcctggcgtgtaccctggagccggtcactccggtgcctctcatcagcaccctagagctgagcggcgggggcgacgtggccacgctggagctccacggagagaacttccacgcggggctcaaggtgtggtttggggacgtggaggcagaaaccatgtacaggagcccgcggtccctggtgtgcgtggtgccggacgtggcggccttctgcagcgactggcgctggctgcgcgctcccatcacaatccccatgagcctggtgcgcgccgacgggctcttctaccctagtgccttctccttcacctacaccccggaatacagcgtgcggccgggtcaccccggcgtccccgagcccgccaccgacgccgacgcgctcctggagagcatccatcaggagttcacgcgcaccaacttccacctcttcatccagacttaggcgcgcccggtagccccggctgcccaccctggagggctgcgcccgcgccaggcgcggggacgtgtttctgggttctaggccctgcttccttgcccctttgctgcagaagggcagctgaaggctcaccctagaaaccgggcctggtgggtcttacccggctcactccctcccttgtccttacacatacaggaagacaagacctgagtggtgctgtctttgtgtccgtcgtgtatggctctccctgtcttcatttcttctcactctgtctctaaacctctctctctctcccttccccctcagtacttagtctacagacctatgtgcgtgtccctatccttctgtccttttctctcttcagctctccctgcctctcacacacaattttacatgccccgaggagccaagtttgggacatttaccctccaggcatctgtgtcccctcttgaagagaaaacacacagcttcacacatccaggcatagggggcaagctcttggggcatcaggaccctggagcaccaggtccttcctggaatattagatccacctggagcaccgggtctctctaagtctcacctggggaattcggtcccacctggggcaccagttcccacctagagcactgtgtcctgccctagagcacaaagacctgctcctcccgagactctctctgactgcagccaggcatagtacctttgcctgtgtttgctccctggtccacagatttggtggctgggcaggtgcctggacagtgatgaggtcttgccgccttaactgtcccccccagtcacttctcccacaggcccagcaggacgcagtcctgaggatcagggattctacagctgcattaaaatcaatcctatcc

SEQ ID NO: 17550 - DNA, 702 bp, Homo sapiens
  source 1..702: mol_type = unassigned DNA
ctgatgggcactctgcccaaggagacttcccaccgcgagagggctacgttcgctatggctccctggtgcagctcgtctgcacggtcaccggcatcacactacctcccatgatcatccgtaaagtagcaaaacagtgtgcgctccttgatgtggatgagcccatctcccagctgcacaagtgtgcattccagtttccaggcagtcccccaggagggggtggcacctacttatgccttgccacagagaaggtggtgcaatttcagcaccagcctggcgtgtaccctggagccggtcactccggtgcctctcatcagcaccctagagctgagcggcgggggcgacgtggccacgctggagctccacggagagaacttccacgcggggctcaaggtgtggtttggggacgtggaggcagaaaccatgtacaggagcccgcggtccctggtgtgcgtggtgccggacgtggcggccttctgcagcgactggcgctggctgcgcgctcccatcacaatccccatgagcctggtgcgcgccgacgggctcttctaccctagtgccttctccttcacctacaccccggaatacagcgtgcggccgggtcaccccggcgtccccgagcccgccaccgacgccgacgcgctcctggagagcatccatcaggagttcacgcgcaccaacttccacctcttcatccagacttag

SEQ ID NO: 17551 - DNA, 1661 bp, Homo sapiens
  source 1..1661: mol_type = unassigned DNA
aaaagaaaaggaaggaaggaaggaaaataaagaaaaaagaaagaagaaagaagaaagaagaaatcagctagctcaacaagctttcttaacgctaagtgagagaacttaagggcactgtccaagctgaggggacaagtgaaccccagagcctaggattagtatccagttcggtctaacgcagaagcccacgcgccatgctggctccctacactggtggccaccatgagaagcttcggcctcgtccccttgggtctcctcccaggcctctccctgccccaaggaggcgaacagggctctgcttaacgacagctcttgctggaccatcatcggcaccgagtcggtggaattttccttcagcaccagcctggcgtgtaccctggagccggtcactccggtgcctctcatcagcaccctagagctgagcggcgggggcgacgtggccacgctggagctccacggagagaacttccacgcggggctcaaggtgtggtttggggacgtggaggcagaaaccatgtacaggagcccgcggtccctggtgtgcgtggtgccggacgtggcggccttctgcagcgactggcgctggctgcgcgctcccatcacaatccccatgagcctggtgcgcgccgacgggctcttctaccctagtgccttctccttcacctacaccccggaatacagcgtgcggccgggtcaccccggcgtccccgagcccgccaccgacgccgacgcgctcctggagagcatccatcaggagttcacgcgcaccaacttccacctcttcatccagacttaggcgcgcccggtagccccggctgcccaccctggagggctgcgcccgcgccaggcgcggggacgtgtttctgggttctaggccctgcttccttgcccctttgctgcagaagggcagctgaaggctcaccctagaaaccgggcctggtgggtcttacccggctcactccctcccttgtccttacacatacaggaagacaagacctgagtggtgctgtctttgtgtccgtcgtgtatggctctccctgtcttcatttcttctcactctgtctctaaacctctctctctctcccttccccctcagtacttagtctacagacctatgtgcgtgtccctatccttctgtccttttctctcttcagctctccctgcctctcacacacaattttacatgccccgaggagccaagtttgggacatttaccctccaggcatctgtgtcccctcttgaagagaaaacacacagcttcacacatccaggcatagggggcaagctcttggggcatcaggaccctggagcaccaggtccttcctggaatattagatccacctggagcaccgggtctctctaagtctcacctggggaattcggtcccacctggggcaccagttcccacctagagcactgtgtcctgccctagagcacaaagacctgctcctcccgagactctctctgactgcagccaggcatagtacctttgcctgtgtttgctccctggtccacagatttggtggctgggcaggtgcctggacagtgatgaggtcttgccgccttaactgtcccccccagtcacttctcccacaggcccagcaggacgcagtcctgaggatcagggattctacagctgcattaaaatcaatcctatccaa

SEQ ID NO: 17552 - DNA, 1746 bp, Homo sapiens
  source 1..1746: mol_type = unassigned DNA
gttttccatcgggatgacaccgggagagctcgctcgaagcagtgggtaggggactgctgaagcacgtgcattcgttacttgaacattgtccggacactgtttgtcagcggcctccctgtggacattaaacccagagaactctacttgctcttccggccgttcaaggggtatgaagggtccctgatcaagctcactgcaagacagcctgttggttttgtgatctttgacagccgtgcaggagcagaagcggccaagaatgcgctgaacggtattcgctttgatcccgaaaatccacagactctgaggctagagtttgccaaagccaacaccaagatggccaagagcaagctaatggcaactccaaatcccagcaacgtgcaccccgccctaggagcacacttcatcgcacgggacccctatgacctgatgggggctgctctgatccctgcatccccagaggcctgggccccctaccctttgtacaccacagagctgaccccagccatctcccatgctgcgttcacctacccaactgccactgccgctgccgccgccctccacgctcaggtgcgctggtacccttcctctgacaccacccagcaaggatggaagtaccgtcagttctgttagtttttcagtctggtcaccggggaggtggttctggtaatctgtggtggtgccgggacaggcgccccgagttcccactgcccccgggcggcctgcacagagctgctgccctccagagactgtgaatcccaagcctgactcagtggactgcttcctgttcccctccctcctcttcctcaccttgttctgcaccctcaagcctttctccaatgcctcccaggaggatttggggactttctccctggggcgcccagatccagctcggaggcctcactgggacctggcaaggcctgacctcccgcccaaacttgcttctgtagctccccctcgaggaagtgaggtgtttaattttgcatgttttctggcatgaattaagacacttatacttgtatatatgagtgtacagtttgttctcacactgtcaccatagcgacaggtcctggctcccagtggttcatcctgcctgcccctctctcctcgccccgcccctgcacccaccccgcttcagggaggcccaagttccgtggccccacacgcttccaggctcagctcccacctccacccaacagatagatggggtttgctttttcatttcacatggggctcctccgctcctgccttctcggatgggccaacagtcgtaagaaagccctctctgcccgttctgttcacctctccacagcgcaccccgcccgccgctgctcctcattctttccaaacctcgaaaccaaccaaaacgtgagaagtatttttgtaccctgtgtaacaaaatatttatgcatcataaaggatttttcatgtgcgtaccattaattattaaagcgacctcgttcgccctgtcagataagtttaatgtttagtttgaggcatgaagaagaaaagggtttccattcttcagcagtacgcctttgtgtctggcatttgtttaagaaaatgaaatgaaggaaacactgtgcaatgttttttgttttgagcatatcagtgctttactgtcagccgcagctgtgaccgtctggccatttcagacttgggagatgaggcggctgttgtcattgctgatcctgtgagaatgtgaaactggataatatatgaaatgcaaaataaaacaaaaccaaaatg

SEQ ID NO: 17553 - DNA, 2008 bp, Homo sapiens
  source 1..2008: mol_type = unassigned DNA
actcgccggtcgcagtgaaaaggcggaggcggcggcccctccggctcccactgcctcccccgccgcaccccctccccaccttccgcacccgccaaacttgatgtgaccctggcccgacgcggaggctgcccctctcactgccccgtgggtcccccgccacccgctccgcacccgcgagcgcaccgctccccgcgccccttcccacttcccgcggggccggcgccgcgctcgccctcgcgttccttcccgccgccccctcccccgcaccatgagcaacctgaagccggacggcgagcacggcggcagcaccggcaccggctccggcgcgggctccggcggcgccctggaggaggaggtccggacactgtttgtcagcggcctccctgtggacattaaacccagagaactctacttgctcttccggccgttcaaggggtatgaagggtccctgatcaagctcactgcaagacagcctgttggttttgtgatctttgacagccgtgcaggagcagaagcggccaagaatgcgctgaacggtattcgctttgatcccgaaaatccacagactctgaggctagagtttgccaaagccaacaccaagatggccaagagcaagctaatggcaactccaaatcccagcaacgtgcaccccgccctaggagcacacttcatcgcacgggacccctatgacctgatgggggctgctctgatccctgcatccccagaggcctgggccccctaccctttgtacaccacagagctgaccccagccatctcccatgctgcgttcacctacccaactgccactgccgctgccgccgccctccacgctcaggtgcgctggtacccttcctctgacaccacccagcaaggatggaagtaccgtcagttctgttagtttttcagtctggtcaccggggaggtggttctggtaatctgtggtggtgccgggacaggcgccccgagttcccactgcccccgggcggcctgcacagagctgctgccctccagagactgtgaatcccaagcctgactcagtggactgcttcctgttcccctccctcctcttcctcaccttgttctgcaccctcaagcctttctccaatgcctcccaggaggatttggggactttctccctggggcgcccagatccagctcggaggcctcactgggacctggcaaggcctgacctcccgcccaaacttgcttctgtagctccccctcgaggaagtgaggtgtttaattttgcatgttttctggcatgaattaagacacttatacttgtatatatgagtgtacagtttgttctcacactgtcaccatagcgacaggtcctggctcccagtggttcatcctgcctgcccctctctcctcgccccgcccctgcacccaccccgcttcagggaggcccaagttccgtggccccacacgcttccaggctcagctcccacctccacccaacagatagatggggtttgctttttcatttcacatggggctcctccgctcctgccttctcggatgggccaacagtcgtaagaaagccctctctgcccgttctgttcacctctccacagcgcaccccgcccgccgctgctcctcattctttccaaacctcgaaaccaaccaaaacgtgagaagtatttttgtaccctgtgtaacaaaatatttatgcatcataaaggatttttcatgtgcgtaccattaattattaaagcgacctcgttcgccctgtcagataagtttaatgtttagtttgaggcatgaagaagaaaagggtttccattcttcagcagtacgcctttgtgtctggcatttgtttaagaaaatgaaatgaaggaaacactgtgcaatgttttttgttttgagcatatcagtgctttactgtcagccgcagctgtgaccgtctggccatttcagacttgggagatgaggcggctgttgtcattgctgatcctgtgagaatgtgaaactggataatatatgaaatgcaaaataaaacaaaacc

SEQ ID NO: 17554 - DNA, 3188 bp, Homo sapiens
  source 1..3188: mol_type = unassigned DNA
ctctgctgtgctgcctcagacgcggagggctgcgtgcagtgggagcgggctccaggagcccgagcctccagccgtccccagagcaaggcagcaccgaggcctggccacagcaatatccatctggaagctcttcccttcactcccaactctgaggttgcctaactctttattaaaaattcagaagggggaatgccagcccctagcatggactgtgatgtttccactctggttgcctgtgtggtggatgtcgaggtctttaccaatcaggaggttaaggaaaaatttgagggactgtttcggacttatgatgactgtgtgacgttccagctatttaagagtttcagacgtgtccgtataaacttcagcaatcctaaatctgcagcccgagctaggatagagcttcatgaaacccaattcagagggaaaaaattaaagctctactttgcacaggttcagactccagagacagatggagacaaactgcacttggctccaccccagcctgccaaacagtttctcatctcgcccccttcctccccacctgttggctggcagcccatcaacgatgccacgccagtcctcaactatgacctcctctatgctgtggccaaactaggaccaggagagaagtatgagctccatgcagggactgagtccaccccaagtgtcgtcgtgcacgtgtgcgacagtgacatagaggaagaagaggacccaaagacttccccaaagccaaaaatcatccaaactcggcgtcctggcctgccaccctccgtgtccaactgagctgcctgctccttctcgataatagccgtctcctctttatcatgctttttccccctgttgtttgtcaaaaaaaattgcctttaaattcctgggtgtttggttgtttgagattccttccttgttatcaagcctctcggacaaaagggctaggaaaaggtgatatgtctcctgatcatatcatacccattaagtataacccattatttagaaggttctagggaaaaaagtagtattttcttattaaacaatcagcacagcctatatctttgttctctcatgttgatccaagccagagacatcagtaacaaatagcacctgtgttgtttgtgagctgtttcagtcccagtcctgatgtgtgtgcgttgttctctcctggccacttaaataggaccatatgtaaacttgactttgactgcatgagatatccctatctggtctcactcagtcctctgcatcccaacattcccaggacatgcatgatcaccagcatttattttcattatttgaggatatcttataactcacagattgtcagcatccagccatgtcctatctagattaggaaaatgatcagaatattccagctcaacaagtctgggtatattcactattgtgagtcaatacaccatagctctgttgaaattcctggaggcaaaattgaccttggccccaaagatattcctcaatagatttcaaacaccactcccctgtagaactctcccagcctcgttggggaggcttgtccagggtgatagagactgatttcagacaaacctatttattacaaaagtttcatggtgtctgaatgattgttttctctctttgtatatttgtacaaatgtttcagctgtgcttttaaaaaatctggatgttttttatttagtgattgttcgacaattagctgcttcaaaacataatgtgcattgcttatgaatgccttcatatactaatacagatactctgataatattacactctaataaggataatgctgaattttgaaaggacacaaaacatctaatgccaatatatacatgattagccaacatctttgctatcaagaccacttgtttttaaataaagatgcaagtgtcagttgtagattattgggatgaagctaaatccccagaatgcagcagcagctgagcatgttaaaatggggaaggatgatagctacatgtatgccggtcctactcacgcgacacccgtgtgctcaaaaaagttatttgtttttgttacgtgtgatttttctatttctctagcccaaagtgcattacagaagatacacctatagaaccattaccttctgctatgtgtgccaggcctcatctactcctgtacattaatgaattactttagatgcaaacgcagattacaatggagtggggaagtactttcattacccaagcctcagaaaaacacacaagaacaataacacagcaaacagattgagggattgttgtggtttttgactaaggtgtatgttagtttcatcagaaacttaaaacatagactgatcactcagaaattaaagtccgttttactgtgaatatagcaatatagtactggacacagtactggtgaaactgaggagagcattgcttgtaaaatcctgagtttccataaggaaaatgaaaactccttttaaaaataaaatctgaggagtgtacaataagcatatgctttgactttcctttgctgtggaggtttttggtttttcattgatgataaacgactacagacttagtagtggagaaatggtgtcctctagtggaagaaatagtaggctccgctattcagatgcagagcactgcagcatccagcctttcaaagctgactcttctcaatcatctgtgggtcatttgacttgattttttaagctaccctgaatttccagaatgcaggttctaaagaaatctagatgagagaaagtatttgaaaatgatttttaaatgttttttaaaagacacatctgacatttttaacaacttagtaaaagttgaaatgaccattctgtgtagtcataaaagaaacacaatgaagtgtatggcctctggagttagtcttagtaaaacttattgctctgtgtcaatgttaacctgtctcagatcaagtaattctttcactaggttgggtttggggaggggggaaaagaggggcttttcctaggagaacgataagaaatggaaagactccttgaagtgttgcaagggaacctcctagcactgtgaaagtcagaatcgcctcagcatttccatgacgcacattatgcaaatctctttagcactattttaagtttgaaaactttaacaatgaaggggaaggggaagatttccaccaactgaatcatttgtgcacgtgtatagctcaaagagcttagacttcaaatatatctggtgaatgac

SEQ ID NO: 17555 - DNA, 3327 bp, Homo sapiens
  source 1..3327: mol_type = unassigned DNA
agagggaggcggggcgcgccgcgccgcgtacggccccacgcaaaggcccgcgggcaccgcgccgcccccacgcgctcgcaccggcgggcaggtgagcaggcagcgccgcgcgctagcagctggcccccgtagacgccccagccgccgcctccgcctccgcctccgccggcgcatcgcggacgcccagcaggaatgaggggagaatcatacttcatcggaatgaggagcccagggcagcagggacacgtccctgaagatggaggacttttcttactgtgctgcatagacagggactgggctgtcactcgttgttttgcagaagaagcctttcaagcaatcactgacttcaatgacctccccaactcgttgtttgcgtgcaatgttcaccagtcagtgtttgaaggagaagagagcaaggaaaaatttgagggactgtttcggacttatgatgactgtgtgacgttccagctatttaagagtttcagacgtgtccgtataaacttcagcaatcctaaatctgcagcccgagctaggatagagcttcatgaaacccaattcagagggaaaaaattaaagctctactttgcacaggttcagactccagagacagatggagacaaactgcacttggctccaccccagcctgccaaacagtttctcatctcgcccccttcctccccacctgttggctggcagcccatcaacgatgccacgccagtcctcaactatgacctcctctatgctgtggccaaactaggaccaggagagaagtatgagctccatgcagggactgagtccaccccaagtgtcgtcgtgcacgtgtgcgacagtgacatagaggaagaagaggacccaaagacttccccaaagccaaaaatcatccaaactcggcgtcctggcctgccaccctccgtgtccaactgagctgcctgctccttctcgataatagccgtctcctctttatcatgctttttccccctgttgtttgtcaaaaaaaattgcctttaaattcctgggtgtttggttgtttgagattccttccttgttatcaagcctctcggacaaaagggctaggaaaaggtgatatgtctcctgatcatatcatacccattaagtataacccattatttagaaggttctagggaaaaaagtagtattttcttattaaacaatcagcacagcctatatctttgttctctcatgttgatccaagccagagacatcagtaacaaatagcacctgtgttgtttgtgagctgtttcagtcccagtcctgatgtgtgtgcgttgttctctcctggccacttaaataggaccatatgtaaacttgactttgactgcatgagatatccctatctggtctcactcagtcctctgcatcccaacattcccaggacatgcatgatcaccagcatttattttcattatttgaggatatcttataactcacagattgtcagcatccagccatgtcctatctagattaggaaaatgatcagaatattccagctcaacaagtctgggtatattcactattgtgagtcaatacaccatagctctgttgaaattcctggaggcaaaattgaccttggccccaaagatattcctcaatagatttcaaacaccactcccctgtagaactctcccagcctcgttggggaggcttgtccagggtgatagagactgatttcagacaaacctatttattacaaaagtttcatggtgtctgaatgattgttttctctctttgtatatttgtacaaatgtttcagctgtgcttttaaaaaatctggatgttttttatttagtgattgttcgacaattagctgcttcaaaacataatgtgcattgcttatgaatgccttcatatactaatacagatactctgataatattacactctaataaggataatgctgaattttgaaaggacacaaaacatctaatgccaatatatacatgattagccaacatctttgctatcaagaccacttgtttttaaataaagatgcaagtgtcagttgtagattattgggatgaagctaaatccccagaatgcagcagcagctgagcatgttaaaatggggaaggatgatagctacatgtatgccggtcctactcacgcgacacccgtgtgctcaaaaaagttatttgtttttgttacgtgtgatttttctatttctctagcccaaagtgcattacagaagatacacctatagaaccattaccttctgctatgtgtgccaggcctcatctactcctgtacattaatgaattactttagatgcaaacgcagattacaatggagtggggaagtactttcattacccaagcctcagaaaaacacacaagaacaataacacagcaaacagattgagggattgttgtggtttttgactaaggtgtatgttagtttcatcagaaacttaaaacatagactgatcactcagaaattaaagtccgttttactgtgaatatagcaatatagtactggacacagtactggtgaaactgaggagagcattgcttgtaaaatcctgagtttccataaggaaaatgaaaactccttttaaaaataaaatctgaggagtgtacaataagcatatgctttgactttcctttgctgtggaggtttttggtttttcattgatgataaacgactacagacttagtagtggagaaatggtgtcctctagtggaagaaatagtaggctccgctattcagatgcagagcactgcagcatccagcctttcaaagctgactcttctcaatcatctgtgggtcatttgacttgattttttaagctaccctgaatttccagaatgcaggttctaaagaaatctagatgagagaaagtatttgaaaatgatttttaaatgttttttaaaagacacatctgacatttttaacaacttagtaaaagttgaaatgaccattctgtgtagtcataaaagaaacacaatgaagtgtatggcctctggagttagtcttagtaaaacttattgctctgtgtcaatgttaacctgtctcagatcaagtaattctttcactaggttgggtttggggaggggggaaaagaggggcttttcctaggagaacgataagaaatggaaagactccttgaagtgttgcaagggaacctcctagcactgtgaaagtcagaatcgcctcagcatttccatgacgcacattatgcaaatctctttagcactattttaagtttgaaaactttaacaatgaaggggaaggggaagatttccaccaactgaatcatttgtgcacgtgtatagctcaaagagcttagacttcaaatatatctggtgaatg

SEQ ID NO: 17556 - DNA, 3240 bp, Homo sapiens
  source 1..3240: mol_type = unassigned DNA
ccagagggcgccagcgcccaccaagcgcagaagcccgggaggaccatccaggggctccccgacatttcctcagttagccagagtcggggggctcagacatctggaatgaggggagaatcatacttcatcggaatgaggagcccagggcagcagggacacgtccctgaagatggaggacttttcttactgtgctgcatagacagggactgggctgtcactcgttgttttgcagaagaagcctttcaagcaatcactgacttcaatgacctccccaactcgttgtttgcgtgcaatgttcaccagtcagtgtttgaaggagaagagagcaaggaaaaatttgagggactgtttcggacttatgatgactgtgtgacgttccagctatttaagagtttcagacgtgtccgtataaacttcagcaatcctaaatctgcagcccgagctaggatagagcttcatgaaacccaattcagagggaaaaaattaaagctctactttgcacaggttcagactccagagacagatggagacaaactgcacttggctccaccccagcctgccaaacagtttctcatctcgcccccttcctccccacctgttggctggcagcccatcaacgatgccacgccagtcctcaactatgacctcctctatgctgtggccaaactaggaccaggagagaagtatgagctccatgcagggactgagtccaccccaagtgtcgtcgtgcacgtgtgcgacagtgacatagaggaagaagaggacccaaagacttccccaaagccaaaaatcatccaaactcggcgtcctggcctgccaccctccgtgtccaactgagctgcctgctccttctcgataatagccgtctcctctttatcatgctttttccccctgttgtttgtcaaaaaaaattgcctttaaattcctgggtgtttggttgtttgagattccttccttgttatcaagcctctcggacaaaagggctaggaaaaggtgatatgtctcctgatcatatcatacccattaagtataacccattatttagaaggttctagggaaaaaagtagtattttcttattaaacaatcagcacagcctatatctttgttctctcatgttgatccaagccagagacatcagtaacaaatagcacctgtgttgtttgtgagctgtttcagtcccagtcctgatgtgtgtgcgttgttctctcctggccacttaaataggaccatatgtaaacttgactttgactgcatgagatatccctatctggtctcactcagtcctctgcatcccaacattcccaggacatgcatgatcaccagcatttattttcattatttgaggatatcttataactcacagattgtcagcatccagccatgtcctatctagattaggaaaatgatcagaatattccagctcaacaagtctgggtatattcactattgtgagtcaatacaccatagctctgttgaaattcctggaggcaaaattgaccttggccccaaagatattcctcaatagatttcaaacaccactcccctgtagaactctcccagcctcgttggggaggcttgtccagggtgatagagactgatttcagacaaacctatttattacaaaagtttcatggtgtctgaatgattgttttctctctttgtatatttgtacaaatgtttcagctgtgcttttaaaaaatctggatgttttttatttagtgattgttcgacaattagctgcttcaaaacataatgtgcattgcttatgaatgccttcatatactaatacagatactctgataatattacactctaataaggataatgctgaattttgaaaggacacaaaacatctaatgccaatatatacatgattagccaacatctttgctatcaagaccacttgtttttaaataaagatgcaagtgtcagttgtagattattgggatgaagctaaatccccagaatgcagcagcagctgagcatgttaaaatggggaaggatgatagctacatgtatgccggtcctactcacgcgacacccgtgtgctcaaaaaagttatttgtttttgttacgtgtgatttttctatttctctagcccaaagtgcattacagaagatacacctatagaaccattaccttctgctatgtgtgccaggcctcatctactcctgtacattaatgaattactttagatgcaaacgcagattacaatggagtggggaagtactttcattacccaagcctcagaaaaacacacaagaacaataacacagcaaacagattgagggattgttgtggtttttgactaaggtgtatgttagtttcatcagaaacttaaaacatagactgatcactcagaaattaaagtccgttttactgtgaatatagcaatatagtactggacacagtactggtgaaactgaggagagcattgcttgtaaaatcctgagtttccataaggaaaatgaaaactccttttaaaaataaaatctgaggagtgtacaataagcatatgctttgactttcctttgctgtggaggtttttggtttttcattgatgataaacgactacagacttagtagtggagaaatggtgtcctctagtggaagaaatagtaggctccgctattcagatgcagagcactgcagcatccagcctttcaaagctgactcttctcaatcatctgtgggtcatttgacttgattttttaagctaccctgaatttccagaatgcaggttctaaagaaatctagatgagagaaagtatttgaaaatgatttttaaatgttttttaaaagacacatctgacatttttaacaacttagtaaaagttgaaatgaccattctgtgtagtcataaaagaaacacaatgaagtgtatggcctctggagttagtcttagtaaaacttattgctctgtgtcaatgttaacctgtctcagatcaagtaattctttcactaggttgggtttggggaggggggaaaagaggggcttttcctaggagaacgataagaaatggaaagactccttgaagtgttgcaagggaacctcctagcactgtgaaagtcagaatcgcctcagcatttccatgacgcacattatgcaaatctctttagcactattttaagtttgaaaactttaacaatgaaggggaaggggaagatttccaccaactgaatcatttgtgcacgtgtatagctcaaagagcttagacttcaaatatatctggtgaatg

SEQ ID NO: 17557 - DNA, 2457 bp, Homo sapiens
  source 1..2457: mol_type = unassigned DNA
gttactctgctgtgctgcctcagacgcggagggctgcgtgcagtgggagcgggctccaggagcccgagcctccagccgtccccagagcaaggcagcaccgaggcctggccacagcaatatccatctggaagctcttcccttcactcccaactctgaggttgcctaactctttattaaaaattcagaagggggaatgccagcccctagcatggactgtgatgtttccactctggttgcctgtgtggtggatgtcgaggtctttaccaatcaggaggttaaggaaaaatttgagggactgtttcggacttatgatgactgtgtgacgttccagctatttaagagtttcagacgtgtccgtataaacttcagcaatcctaaatctgcagcccgagctaggatagagcttcatgaaacccaattcagagggaaaaaattaaagctctactttgcacaggttcagactccagagacagatggagacaaactgcacttggctccaccccagcctgccaaacagtttctcatctcgcccccttcctccccacctgttggctggcagcccatcaacgatgccacgccagtcctcaactatgacctcctctatgctgtggccaaactaggaccaggagagaagtatgagctccatgcagggactgagtccaccccaagtgtcgtcgtgcacgtgtgcgacagtgacatagaggaagaagaggacccaaagacttccccaaagccaaaaatcatccaaactcggcgtcctggcctgccaccctccgtgtccaacgctgcctgctccttctcgataatagccgtctcctctttatcatgctttttccccctgttgtttgtcaaaaaaaattgcctttaaattcctgggtgtttggttgtttgagattccttccttgttatcaagcctctcggacaaaagggctaggaaaaggtgatatgtctcctgatcatatcatacccattaagtataacccattatttagaaggttctagggaaaaaagtagtattttcttattaaacaatcagcacagcctatatctttgttctctcatgttgatccaagccagagacatcagtaacaaatagcacctgtgttgtttgtgagctgtttcagtcccagtcctgatgtgtgtgcgttgttctctcctggccacttaaataggaccatatgtaaacttgactttgactgcatgagatatccctatctggtctcactcagtcctctgcatcccaacattcccaggacatgcatgatcaccagcatttattttcattatttgaggatatcttataactcacagattgtcagcatccagccatgtcctatctagattaggaaaatgatcagaatattccagctcaacaagtctgggtatattcactattgtgagtcaatacaccatagctctgttgaaattcctggaggcaaaattgaccttggccccaaagatattcctcaatagatttcaaacaccactcccctgtagaactctcccagcctcgttggggaggcttgtccagggtgatagagactgatttcagacaaacctatttattacaaaagtttcatggtgtctgaatgattgttttctctctttgtatatttgtacaaatgtttcagctgtgcttttaaaaaatctggatgttttttatttagtgattgttcgacaattagctgcttcaaaacataatgtgcattgcttatgaatgccttcatatactaatacagatactctgataatattacactctaataaggataatgctgaattttgaaaggacacaaaacatctaatgccaatatatacatgattagccaacatctttgctatcaagaccacttgtttttaaataaagatgcaagtgtcagttgtagattattgggatgaagctaaatccccagaatgcagcagcagctgagcatgttaaaatggggaaggatgatagctacatgtatgccggtcctactcacgcgacacccgtgtgctcaaaaaagttatttgtttttgttacgtgtgatttttctatttctctagcccaaagtgcattacagaagatacacctatagaaccattaccttctgctatgtgtgccaggcctcatctactcctgtacattaatgaattactttagatgcaaacgcagattacaatggagtggggaagtactttcattacccaagcctcagaaaaacacacaagaacaataacacagcaaacagattgagggattgttgtggtttttgactaaggtgtatgttagtttcatcagaaacttaaaacatagactgatcactcagaaattaaagtccgttttactgtgaatatagcaatatagtactggacacagtactggtgaaactgaggagagcattgcttgtaaaatcctgagtttccataaggaaaatgaaaactccttttaaaaataaaatctgaggagtgtacaat

SEQ ID NO: 17558 - DNA, 527 bp, Homo sapiens
  source 1..527: mol_type = unassigned DNA
atctgtgtgtggtgcgtgtgtctccgcaccacgactccctctcctgggtctgctcagtccacggaggcagctccccttcagctgttgccagaaaaccggggaggaaagaagattgttgatcgaatcgacaatgatggggatggctttgtcactactgaggagctgaaaacctggatcaaacgggtgcagaaaagatacatctttgataatgtcgccaaagtctggaaggattatgatagggacaaggatgataaaatttcctgggaagaatacaaacaagccacctatggttactacctaggaaaccccgcagagtttcatgattcttcagatcatcacacctttaaaaagatgctgccacgtgatgagagaagattcaaagctgcagacctcaatggtgacctgacagctactcgggaggagttcactgcctttctgcatcctgaagagtttgaacatatgaaggaaattgtggttttggaaaccctggaggacatcgacaagaacggggatgggtttgtggatca

SEQ ID NO: 17559 - DNA, 1191 bp, Homo sapiens
  source 1..1191: mol_type = unassigned DNA
agaggaggtcctcggctcgccctgggcgcggagcgaggactctggtcagaggtaattatgtcaccgcgttttctcgccgtgacagccgaataaacacgatctccaataaacatctctaatgagggaggaggcccgaggatggctgggtttgatttatgactggaggagaaggtccacttcccactgcgaagcaggcgacctgctcgccgcccagctccagggagaggaacccgcggaggagaggatcccggcccaggaagattgttgatcgaatcgacaatgatggggatggctttgtcactactgaggagctgaaaacctggatcaaacgggtgcagaaaagatacatctttgataatgtcgccaaagtctggaaggattatgatagggacaaggatgataaaatttcctgggaagaatacaaacaagccacctatggttactacctaggaaaccccgcagagtttcatgattcttcagatcatcacacctttaaaaagatgctgccacgtgatgagagaagattcaaagctgcagacctcaatggtgacctgacagctactcgggaggagttcactgcctttctgcatcctgaagagtttgaacatatgaaggaaattgtggttttggaaaccctggaggacatcgacaagaacggggatgggtttgtggatcaggatgagtatattgcggatatgttttcccatgaggagaatggccctgagccagactgggttttatcagaacgggagcagtttaacgaattccgggatctgaacaaggacgggaagttagacaaagatgagattcgccactggatcctccctcaagattatgatcatgcacaggctgaggccaggcatctggtatatgaatcagacaaaaacaaggatgagaagctaactaaagaggaaatattggagaactggaacatgtttgtcggaagccaagctaccaattacggggaagatctcacaaaaaatcatgatgagctttgatagacactcaccagaatatggcagactgtcataggcattctgttattgtcttggattgttgctacaattgtctaatttacagcagttgtgatcccacaaaaagcaagtttatacctcagattggggtataaaaattgtttttcgctcagtatttactggaaaatggacatcactagtctttcagtaagatttc

SEQ ID NO: 17560 - DNA, 1658 bp, Homo sapiens
  source 1..1658: mol_type = unassigned DNA
actgcgaagcaggcgacctgctcgccgcccagctccagggagaggaacccgcggaggagaggatcccggcccaggtggggaatccagctgctgcctttctcaaaagaccctcaaattatttctgctggaggagtgtcttccaggaaggactaatggtgcagctccccacagcaccagctctccagctgcccccacacagcctgttttgtgctagggctatcgcgatttgcaaattccttctctagctcaagtgcatggacccagaaaatgcccctgcttgagggccaatgttgaccaaggccctcagcagtaatgtgacctctgtgggagcagcacctcgcagagggcagagtttggctctatgcttgtaccattggtggtaaattctgctgagctctatggatccatctggatgaaaaggtctgtataaatgcaagatcattatcatcatcagctgtcccagttggagcctactgattctcaagcccacagtcaatggggcctttccaacaattccattgtacatggcttggaaaaggtgtaattacacgaagctgaatatcttctggagagacagacacgttcatgtctgtcccaggagtgttggagaggaatctctcaggcctctcattaggcacatggagagaggtgccctccaggcctggcccaggtcagggacaagtcagaagctacatctggagcagatccaggatcttatcctggtgcacacgaggggccagcatcgtgcttgcacatttatagctcaggtgctctctggtgttaccaggaagctgctgggaagagacggaggccggagagtgtcccaggacaatgcttccttcactcatgttcatttttaactttaaaaaatggcctccatgatccccaaaatggtcttttggtgtgagggaagtggttgctgtaaggaaagtctctgctcgacacacacaaaaattctcctccatgactttggaccatgtctctgataaaaagactggctgggtgaggagtccagcctgcagacctcccatttgtcctgagtcctctgttgcagtggtcctcaatccccaggttagggatcagtaccagttcctcttaggaactgggccgcacagcaggaggtgagcagcaggccagccagcaagcattgctgccagagctccgcctcctgtcagatcagtgatggcattagtttctcgtaggagcgtaaaccccattgtgaactggccatgtgaggtatctaggttgcatgctccttatgagaatctaactaatgcctgatgatctgaggcggaacagtttcatcccaaaaccacccccgcccactgtgaactcagagagcacctcagcctatggtcaggtaccatctacagcacttgtgccttaaacacccatcagcagatatgaagatttcccaaagcatgcctcaatttagggttgtgcaaactagtgtagcctcttgcctataaatgaagactaagggctccatccaaccagctcgcttgtctgggtccagtctccagaactcttccagcttccctgtagtaaaagaacacaccttggtgggcattgttcatttatcagtgcacagggccacgttgacaaagtcttaatatttaatggcttacgagtctaataataaaaaaattaaaactcta

SEQ ID NO: 17561 - DNA, 635 bp, Homo sapiens
  source 1..635: mol_type = unassigned DNA
gctgagctctatggatccatctggatgaaaagggaacttatatttgtcagctttgcaagtggggctcagtttcggggaaggggtgagagagaagaaaggaagaaactgatgaagagaatgaaagaggaaaagacctgcctgacacctggatcttagaaacaaacctttcctaacaacagacctccaagcataaagagagtattttcaaacaactcaaaaaatcagtctaaatcaacgatattcaaaaggacaaagaaaaaaataataggggattatgttcttttctcatctgtcttatgttctgaagttattcatttgacaccttctgctcttgtacgatggcaggcctgtattcccaaagatgcccattccagccatctattgctgtgtaacaaatgacgacaatgtatgatggtttaaaatcacaactattttatttcatctctcaatattgtgggtcagagttcaggcttggtgaagtgattcatctgctccatatggcttgaacagtggtctcagagtggtattctgctggtgagttggctggtttcaagggtctaagtgaagtttagaggcttcactcacatgtctgcaccttggcagggatggcttcaaagatggggtccactgggact

SEQ ID NO: 17562 - DNA, 2572 bp, Homo sapiens
  source 1..2572: mol_type = unassigned DNA
agccccgcgcccaccaccccagctggcgacgtggctccgcggccccggcttcccccggcagctcagcgaccaatgggcgcgcgagcggggccgcccgcagcttcccagcccgaggcccaggcgcgcccctctgctccggctcggggcgggcactggcggagggactggccagtcccctcctccgcgccggccccaaccctgtcgctgccgccgcgctccgagtccccattcccgagctgccgctgttgtcgctcgctcagcgtctccctctcggccgccctctcctcgggacgatggcgcgcggtggccgcggccgccgcctggggttagccctggggctgctgctggcgctggtgctggcgccgcgggttctgcgggccaagcccacggtgcgcaaagagcgcgtggtgcggcccgactcggagctgggcgagcggccccctgaggacaaccagagcttccagtacgaccacgaggccttcctgggcaaggaggactccaagaccttcgaccagctcaccccggacgagagcaaggagaggctagggaagattgttgatcgaatcgacaatgatggggatggctttgtcactactgaggagctgaaaacctggatcaaacgggtgcagaaaagatacatctttgataatgtcgccaaagtctggaaggattatgatagggacaaggatgataaaatttcctgggaagaatacaaacaagccacctatggttactacctaggaaaccccgcagagtttcatgattcttcagatcatcacacctttaaaaagatgctgccacgtgatgagagaagattcaaagctgcagacctcaatggtgacctgacagctactcgggaggagttcactgcctttctgcatcctgaagagtttgaacatatgaaggaaattgtggttttggaaaccctggaggacatcgacaagaacggggatgggtttgtggatcaggatgagtatattgcggatatgttttcccatgaggagaatggccctgagccagactgggttttatcagaacgggagcagtttaacgaattccgggatctgaacaaggacgggaagttagacaaagatgagattcgccactggatcctccctcaagattatgatcatgcacaggctgaggccaggcatctggtatatgaatcagacaaaaacaaggatgagaagctaactaaagaggaaatattggagaactggaacatgtttgtcggaagccaagctaccaattacggggaagatctcacaaaaaatcatgatgagctttgatagacactcaccagaatatggcagactgtcataggcattctgttattgtcttggattgttgctacaattgtctaatttacagcagttgtgatcccacaaaaagcaagtttatacctcagattggggtataaaaattgtttttcgctcagtatttactggaaaatggacatcactagtctttcagtaagatttctctcaaaacacgtgaaaaccttggtaaattgcaattctttctggggatatattggtacaacatgacttaaaacttttttttttctattaaaacttaaaggggaacaaaacttgaaaaagccctgttcttcagaaggtgagtgggttgagggaggcagtaatatgaagtgactgctgtgtattttaactaccagattttttatatttgccactgttaaatagttggaaaggggaaattctgattaagcgaaagtggtatcatcctaggtaagcttatttcagaacaagtctaatatttcagattctttcttttcgactttatactctgagttattacttactgtaagtggtgtatatgaaacctccatgcattttccagtatggatctgctaatatgcacagtaaatccatgtctttgtttgtttttctattaaaaagcaatcaagaaagataatgtgaaaaagaaaggaatttagaggtagggaaaagatgaatgtcagacatttgaagaactatagtaaaatgataaacactaaatatacttgagaaaactttcttaatatgccaatgaggtaggcctgatctttgaaatagtgaataggaatacaatgcatttcctcagtgatcactgattagaatgagttggtgggatccttgggaagccaaacggagcggagttctggatcatgtcccatccagtccagtgaatccacgacccgcagacctgtccccccgcaacagcttataccatggaatgaggacaaggtgatactctgagctgtggactgaactggcagacacaacctgtacagattgaaatttcaccttgtaaggaggaagtgaatgaaataaaggatccccctaaggattttctactgtgtcctgtggtgtttgacttcacagatgctatttgtgacattattcatatagcataaaacagtggggttggatcccatgaataacattataaaggttctggggttttttttcatccaattactagaatgttcagaatagactcatatttactaatttaataaatgtatgtacttaatgcctttacttttctaggtcattttaactataaaatc

SEQ ID NO: 17563 - DNA, 494 bp, Homo sapiens
  source 1..494: mol_type = unassigned DNA
ttgctggagggccccgggaccccagcttggagatcgccgccgccgcgccccggccggggtggtttctcgcggggaggcgagaacgtggcagcggccgcgggagccaggacggcgagggcccgccccctcccccaggttgcatcagaagggaggggagagtgcacaaaagaagagtttgtccacagtggcctgaagattgttgatcgaatcgacaatgatggggatggctttgtcactactgaggagctgaaaacctggatcaaacgggtgcagaaaagatacatctttgataatgtcgccaaagtctggaaggattatgatagggacaaggatgataaaatttcctgggaagaatacaaacaagccacctatggttactacctaggaaaccccgcagagtttcatgattcttcagatcatcacacctttaaaaagatgctgccacgtgatgagagaagattcaaagctgcagacctcaatggtgacctgacagc

SEQ ID NO: 17564 - DNA, 2416 bp, Homo sapiens
  source 1..2416: mol_type = unassigned DNA
gtgctgtgtccaccatctggtgtcttcttgctttacgtttcaagtctttgtatccatggtggtgggatttaaaaaaaaaaatcacttatcttttgatttacatacagtttccactttttgccttggacctaagccagaagacatgagttctcaccccagttttaccaaatactggctgtgtaatcttagaagttattccatttctctgggcctcagtttccgttactccaaaatgagggtgctggactacagcagggaagattaataggtttcatcttacagatcagctctgatccgttgataatggccatcaccagagcacagtgctgagaattctgagagcacctctaggtttatcaggacagaggggcacgatccattagcagtgtctgccatcagcactggttgggggaaagcacatcaaccttggaaggataaacttgaagattccttccagcctccttggatcattgattctgttgtagttgtatgtgcattttggattgtgcaggtgtttgatcttttgctggaccagcatcacacaagccttgataatataacagccttgtgcctgtgtgtgggtttctttttttttttttttgtactgcaggaagattgttgatcgaatcgacaatgatggggatggctttgtcactactgaggagctgaaaacctggatcaaacgggtgcagaaaagatacatctttgataatgtcgccaaagtctggaaggattatgatagggacaaggatgataaaatttcctgggaagaatacaaacaagccacctatggttactacctaggaaaccccgcagagtttcatgattcttcagatcatcacacctttaaaaagatgctgccacgtgatgagagaagattcaaagctgcagacctcaatggtgacctgacagctactcgggaggagttcactgcctttctgcatcctgaagagtttgaacatatgaaggaaattgtggttttggaaaccctggaggacatcgacaagaacggggatgggtttgtggatcaggatgagtatattgcggatatgttttcccatgaggagaatggccctgagccagactgggttttatcagaacgggagcagtttaacgaattccgggatctgaacaaggacgggaagttagacaaagatgagattcgccactggatcctccctcaagattatgatcatgcacaggctgaggccaggcatctggtatatgaatcagacaaaaacaaggatgagaagctaactaaagaggaaatattggagaactggaacatgtttgtcggaagccaagctaccaattacggggaagatctcacaaaaaatcatgatgagctttgatagacactcaccagaatatggcagactgtcataggcattctgttattgtcttggattgttgctacaattgtctaatttacagcagttgtgatcccacaaaaagcaagtttatacctcagattggggtataaaaattgtttttcgctcagtatttactggaaaatggacatcactagtctttcagtaagatttctctcaaaacacgtgaaaaccttggtaaattgcaattctttctggggatatattggtacaacatgacttaaaacttttttttttctattaaaacttaaaggggaacaaaacttgaaaaagccctgttcttcagaaggtgagtgggttgagggaggcagtaatatgaagtgactgctgtgtattttaactaccagattttttatatttgccactgttaaatagttggaaaggggaaattctgattaagcgaaagtggtatcatcctaggtaagcttatttcagaacaagtctaatatttcagattctttcttttcgactttatactctgagttattacttactgtaagtggtgtatatgaaacctccatgcattttccagtatggatctgctaatatgcacagtaaatccatgtctttgtttgtttttctattaaaaagcaatcaagaaagataatgtgaaaaagaaaggaatttagaggtagggaaaagatgaatgtcagacatttgaagaactatagtaaaatgataaacactaaatatacttgagaaaactttcttaatatgccaatgaggtaggcctgatctttgaaatagtgaataggaatacaatgcatttcctcagtgatcactgattagaatgagttggtgggatccttgggaagccaaacggagcggagttctggatcatgtcccatccagtccagtgaatccacgacccgcagacctgtccccccgcaacagcttataccatggaatgaggacaaggtgatactctgagctgtggactgaactggcagacacaacctgtacagattgaaatttcaccttgtaaggaggaagtgaatgaaataaaggatccccctaaggatttt

SEQ ID NO: 17565 - DNA, 714 bp, Homo sapiens
  source 1..714: mol_type = unassigned DNA
accttttgcttcctaggaaaccctggaggacatcgacaagaacggggatgggtttgtggatcaggatgagtatattgacaaggaaacttcaggctcagtcactgaactaagtcaaaagccgggatttatcttttggcttctaaactcagttctttctactccaccacatggccttcatcatgaataaattactgcatcattatccccaagaagctgcctaccagctgtttgagttaggtctctggattggttgtcgcctttcctaaagctcaggagcggatatgttttcccatgaggagaatggccctgagccagactgggttttatcagaacgggagcagtttaacgaattccgggatctgaacaaggacgggaagttagacaaagatgagattcgccactggatcctccctcaagattatgatcatgcacaggctgaggccaggcatctggtatatgaatcagacaaaaacaaggatgagaagctaactaaagaggaaatattggagaactggaacatgtttgtcggaagccaagctaccaattacggggaagatctcacaaaaaatcatgatgagctttgatagacactcaccagaatatggcagactgtcataggcattctgttattgtcttggattgttgctacaattgtctaatttacagcagttgtgatcccacaaaaagcaagtttatacctcagattggggtata

SEQ ID NO: 17566 - DNA, 737 bp, Homo sapiens
  source 1..737: mol_type = unassigned DNA
ggaaaccctggaggacatcgacaagaacggggatgggtttgtggatcaggatgagtatattgacaaggaaacttcaggctcagtcactgaactaagtcaaaagccgggatttatcttttggcttctaaactcagttctttctactccaccacatggccttcatcatgaataaattactgcatcattatccccaagaagctgcctaccagctgtttgacggatatgttttcccatgaggagaatggccctgagccagactgggttttatcagaacgggagcagtttaacgaattccgggatctgaacaaggacgggaagttagacaaagatgagattcgccactggatcctccctcaagattatgatcatgcacaggctgaggccaggcatctggtatatgaatcagacaaaaacaaggatgagaagctaactaaagaggaaatattggagaactggaacatgtttgtcggaagccaagctaccaattacggggaagatctcacaaaaaatcatgatgagctttgatagacactcaccagaatatggcagactgtcataggcattctgttattgtcttggattgttgctacaattgtctaatttacagcagttgtgatcccacaaaaagcaagtttatacctcagattggggtataaaaattgtttttcgctcagtatttactggaaaatggacatcactagtctttcagtaagatttctctcaaaacacgtgaaaac

SEQ ID NO: 17567 - DNA, 2653 bp, Homo sapiens
  source 1..2653: mol_type = unassigned DNA
tctttacagtgaatagggagagggaggtggaggcgttgcgcttgaaaatcgaatacctagtgactcacaggcagaggaaacccaatgtattgactcgtcatttcacttctcggggaggcttctcttcaagcggcaccaagtggaaagtgtgtggtggggggtggtagtaggaagagcactggaattaggaaccctaccttcaccaattagctgtgtgaccctggggtaatcatgtaatggcttcaaacctcagcttcctcatctgtaaaatgggggaaaaaaagtgagcccatttttacaggattcgatgaagctcgaattagctaatacatattacaactctttctcaaaaacaatgtagacatgtcagttaggggtctaccttgtagtcaagggtcttgtctttttttttccttcacttactacctgcttcattcaccacctgacatttccaagctctgcttccgtgacagagaaactgcctgcagggtatctctcttttccaagagctactgacacacacacaatgcaaaaacgtttcctttttcttttccttgccattttgtacaatggggataatgacccatcttgtagaattgttataaggatgaaatataatgacaagtgaaagccctttggaaatgatataaacaatagtactaaacacagtggctaagactctgggttgaaagcagagtgaccatgttcctgtgcagcctccagctcatatgagctgtgggtcattgggtaagactttacctcattgttttcatctgtaaaatgggaattataacagcactcactttgtaaggctgttatgtgaaaatcaaatgaaaactgtgtgtagaacactttatacagtatctggaccatagtgttcaatgttagtcattattattagttttcgcttatgtagtgccagtttgggttgtagagggcttttacatcaaaatggcacatttgatcataatagccccatgatttataaattatcatctccattttacagacaaggaaacttcaggctcagtcactgaactaagtcaaaagccgggatttatcttttggcttctaaactcagttctttctactccaccacatggccttcatcatgaataaattactgcatcattatccccaagaagctgcctaccagctgtttgagttaggtctctggattggttgtcgcctttcctaaagctcaggaggtcaagtttgttttatgggggtgggggaggtttaccttcccactttcctttgtaaccaacaataaccttcccttctagcggatatgttttcccatgaggagaatggccctgagccagactgggttttatcagaacgggagcagtttaacgaattccgggatctgaacaaggacgggaagttagacaaagatgagattcgccactggatcctccctcaagattatgatcatgcacaggctgaggccaggcatctggtatatgaatcagacaaaaacaaggatgagaagctaactaaagaggaaatattggagaactggaacatgtttgtcggaagccaagctaccaattacggggaagatctcacaaaaaatcatgatgagctttgatagacactcaccagaatatggcagactgtcataggcattctgttattgtcttggattgttgctacaattgtctaatttacagcagttgtgatcccacaaaaagcaagtttatacctcagattggggtataaaaattgtttttcgctcagtatttactggaaaatggacatcactagtctttcagtaagatttctctcaaaacacgtgaaaaccttggtaaattgcaattctttctggggatatattggtacaacatgacttaaaacttttttttttctattaaaacttaaaggggaacaaaacttgaaaaagccctgttcttcagaaggtgagtgggttgagggaggcagtaatatgaagtgactgctgtgtattttaactaccagattttttatatttgccactgttaaatagttggaaaggggaaattctgattaagcgaaagtggtatcatcctaggtaagcttatttcagaacaagtctaatatttcagattctttcttttcgactttatactctgagttattacttactgtaagtggtgtatatgaaacctccatgcattttccagtatggatctgctaatatgcacagtaaatccatgtctttgtttgtttttctattaaaaagcaatcaagaaagataatgtgaaaaagaaaggaatttagaggtagggaaaagatgaatgtcagacatttgaagaactatagtaaaatgataaacactaaatatacttgagaaaactttcttaatatgccaatgaggtaggcctgatctttgaaatagtgaataggaatacaatgcatttcctcagtgatcactgattagaatgagttggtgggatccttgggaagccaaacggagcggagttctggatcatgtcccatccagtccagtgaatccacgacccgcagacctgtccccccgcaacagcttataccatggaatgaggacaaggtgatactctgagctgtggactgaactggcagacacaacctgtacagattgaaatttcaccttgtaaggaggaagtgaatgaaataaaggatccccctaagg

SEQ ID NO: 17568 - DNA, 549 bp, Homo sapiens
  source 1..549: mol_type = unassigned DNA
gaaatattggagaactggaacatgtttgtcggaagccaagctaccaattacggggaagatctcacaaaaaatcatgatgagctttgatagacactcaccagaatatggcagactgtcataggcattctgttattgtcttggattgttgctacaattgtctaatttacagcagttgtgatcccacaaaaagcaagtttatacctcagattggggtataaaaattgtttttcgctcagtatttactggaaaatggacatcactagtctttcagtaagatttctctcaaaacacgtgaaaaccttgtgatcactgattagaatgagttggtgggatccttgggaagccaaacggagcggagttctggatcatgtcccatccagtccagtgaatccacgacccgcagacctgtccccccgcaacagcttataccatggaatgaggacaaggtgatactctgagctgtggactgaactggcagacacaacctgtacagattgaaatttcaccttgtaaggaggaagtgaatgaaataaaggatccccctaagga

SEQ ID NO: 17569 - DNA, 6347 bp, Homo sapiens
  source 1..6347: mol_type = unassigned DNA
atataggcctcctcctggcgcgcctccgcaccgcattggtggaccggcccccagcccgtccatgggcgttgtggccgccaccgcaggttccgcctcccgttccctccgccctcaacgtacgtcgcaccgcctctctgtagccgcccgcggagcatcgcagccggcccgggcccccgccagcctccctcctcgcgtccctcggtgtcctccgcgggccggcgcgatgcggctgggcccgaggaccgcggcgttggggctgctgctgctgtgcgccgccgcggccggcgccggcaaggccgaggagctgcactacccgctgggcgagcgccgcagcgactacgaccgcgaggcgctgctgggcgtccaggaagatgtggatgaatatgttaaactcggccacgaagagcagcaaaaaagactgcaggcgatcataaagaaaatcgacttggactcagatggctttctcactgaaagtgaactcagttcatggattcagatgtcttttaagcattatgctatgcaagaagcaaaacaacagtttgttgaatatgataaaaacagtgatgatactgtgacttgggatgaatataacattcagatgtatgatcgtgtgattgactttgatgagaacactgctctggatgatgcagaagaggagtcctttaggaagcttcacttaaaggacaagaagcgatttgaaaaagctaaccaggattcaggtcccggtttgagtcttgaagaatttattgcttttgagcatcctgaagaagttgattatatgacggaatttgtcattcaagaagctttagaagaacatgacaaaaatggtgatggatttgttagtttggaagaatttcttggtgattacaggtgggatccaactgcaaatgaagatccagaatggatacttgttgagaaagacagattcgtgaatgattatgacaaagataacgatggcaggcttgatccccaagagctgttaccttgggtagtacctaataatcagggcattgcacaagaggaggcgcttcatctaattgatgaaatggatttgaatggtgacaaaaagctctctgaagaagagattctggaaaacccggacttgtttctcaccagtgaagccacagattatggcagacagctccatgatgactatttctatcatgatgagctttaatctctgagcctgtctcagtagagtactggctccttttataatttgttaccagctttacttttgtgataaaatattgatgttgtattttacactcttaagtcttaaccacagtcagaattatcttaatgtagattataattttggtcttttaggaaaaaaaaacaaaaatctgatatttatttcaaaatgtattgaagcaacaaaatattaatattgtgccatatgacaacaaagtctttcctaaatactccatctgtttagtactgtattgtggaatatttgagttctatttccatacttgaaaacatggaggattttagagatgcctgaacaatattatttaagtagtatgtgaccgagctataaatttttgtttttgttctaagtagatttaatttgggaactgacaggacaatgtttttaggtttagcattttgtttaaaaacctttaaagaaacctttagaaggacttagacctcacatattaatgttgagaagttctgcttaattttaaaatggtttctataaagggttttattgtatgaaatagaactttatatttttgcatatgtatagatagtaattatatttaatgtataactatagcattatggtgagtggaatttgacattgtccaaacctttttcatttttgagtgattaaaaatgaaatgtcctttgtatatgtttgtttgcttttctttaactttcagataaatattgaatttagcataggttttgtggtattgtacattatcttgcctcatccattcctttatgtggatagttcccaaaactgtcaaattattcttgctgcattttcttattttttttttaaataagagaatcatgttataatataattgaatgtgcacctgacacattttaataattggtgttgtagcaaatgtggttttgctctttggggctataaataatcttgagtaacgcaggttggaattaccaatagagctggtcagttatcaacagtagagctcagtatcaattttactgaaattaaaatcatacttgataagcatgataatcaattttaacctaattcagcaggtcaacttatttaactttggtggaggtgggatagggaaaagtgaagggaggaattaatttttttctagttctgatgtacagagattgtttttcattcttttttttttttttttttttgtgacagagtcttgctctgtggcccaggctggagtgcaggggcactatctcggctcactgcaagctctgcctcctgggttcacgccattctcctgcctcagcctcccgagtagctgggactacaggcgcctgccaccacacccggctaatttttttgtatttttagtagagaccgggtttcaccgtgttagccaggatggtttcgatctcctgacctcatgatcagcccacctcggcctcccaaggtgctggaattacaggcgtgagccaacgcgcacggcctctagtttttcattctttaaatcacttttatttgtgggtgaagaggtcagctatgcattctcttaatcactttccagcctaaagttgtctcatatacagcacactgggggctcaacaagtacctatgactatttgagaagacatgaaactcttctctgatagaatcgactgcacctatatacctctctactgccgcatctttgctgatgtgaggtgtgcttgcaaattgtaagcttccacaccttaatgactgcttgcttgggtatctacatggttttcattttaacctacactatatgtctggctatagcagttttagaattacagatttaccactatcactcatctgtcatttgtcagactcactgaagctggcatatttgaaatcaccagtttgactagttaactatttgtttttctctctagcttctccaaaatctatgccagaatagatcatcagatatggattatatttcaatcctttgcagaaatgcaatgtctgtactactttccttcctagcataaagaaaactacacttcccagccctcttgtaggtaggcgatggctagttctgaccagttaaacatgggtggaagtagtgtgtgtcactatcagactatctcatgacaaacccttttcctctgccacagcactgtgcaggaggcctcagctgaaatggtgcagccacaagatgaaagtggctttgatcttgagtctgtgtaggtcagctggatccacagtgggctttgtatgatcaaaaaataagcttttaattatgttaagccactgagatttggttgtgcttttttgtttttaaccacagcagagcccatcctgctgtgactgagtgaagatttcacatttaacaataggcttttaataagcatgcagagaaaaagaatcatctgcttgaacagagatgctatatctactgctgagtcaaaatagaaaattttaaggctttttttagatttgaattttaaataagacttttaaaataaagcttttattttggttttaatataattaggataatttgaatttatccttgagcatgagagtaaaaatagtttgagactttctgaatcattggctgattctgcctgaaggacttaatgacttccattatttgagttcaggtacaacttcaaaggggaaaattgaatgggatgtgcacatgttggctcatatgtagttctgattgggccaatttgcaggacagaaaatgatgtctagattatgatataaatttaaaggaagccaggacgttcagaggaaaagctagcatatcatgtttgccttacttagttctttcctttgcagttttaaaaataggctttttttttttttagtgtagttttatgttcacagcaaaattgagcaaaaagtagtatagagagtttcaatatgtcccctgccccacatacgtacagcctcccccactatcctatcctatatgtcatgagatagtacctaccagagtggtacatttgttaaaatcgatgaaactgttaacatatcattgtcacccaaagtgcatagtttacattagggttcactcttggtgctgcacatgctctgggtttggacaaatgtataattacatattcccaccattgtagtgtggtagaatatttcccttgccctaaagtctttctgctccacctattcatccctcccttccctgtaaccccaagcaatactgatctttttactgttcataattttttagattgtagtaaaatacacataacaaaattcatcttaacagtttttaattgtacagttcggtggtatggtattaaatacagtcaaaatgtgaaactattaccaccttccatctccatgaacttcatttgtaaaacggaaatttatacccattaaacaataaagccccctttccccttcccttcagcacctggcaaacaccattctagtttttttgtttgagatggagtcttgctcttgttgcccaggctggagtgcaatggcatgatttcggctcactgcaacctctgtctcttggggtcaagcgattctcctgcctcagcctcccgactaggtgggattacaggcgggcaccaccatgccccctaattttttgtatttagtagaaatggggtttcaccatgttggtcaagctggtctcgaactcctgatctcaggtgatccacctgcctcagcctcccaaagtgctggaattacaggcgtgagccaccgtgcccagcctcccattctagttttctttttctttcttttttgagacggagtctcactcttgtcatccaggctggagtgcagtggtgcgatctcggctcactgcaacctccacctcccaggttcaagcgattctcctgcctcagcctcccaagtagctgggattatagatgcccgctaccacgcccggctaatttttgtacttttagtagagacggggtttcgccatgttggcatggctggtctcgaactcttgacctcaggtgatccacctgcctcggcctcccaaagtgctgagattacgggcatgagccaccgcgcccagccccattctagtttgtgtctattaaaatagactcatatagtatttgtctttttgtgagtggcttcacttagcataacgtccccaaagttcacccatattgttaccagaatttctttcgtcaggctgaacaatactttattgtttgcatataccacattttgcttatccattcaccctttgatggacacaggttgcttccaccttttattgtgaataatgctgccatgaatatgggtgtacaaatatttctttgagatcctgcttttagttcttttggatatatattatacatagaagtgggattgctggatcatatagtaattctatatatatatatatatatatatatatatatatatatattttttttttttttttttttttttttttttttgagacggagtctcgctctgtcgcccaggctggagtgcagtggcgcgatctcggctcactgcaggctccgcctcccgggttcacaccattctcctgcctcagcctcccgagtagctgggactataggcgcctgccaccgcacccggctaattttttgtatttttagtagagacggggtttcaccgtgttagccaggatggtcttgatctgctgacctcgtgatccgcccgccttggcctcccaaagtgctgggattacaggcgtgagccaccgcgcccgactagtaattctatttttaatattttgaggaactgccatagtgtttcccacagcagctgtgccattttgcatttccaccaatagtgcacaagagttccagtttctttacatccttaccaacacttgctattttctgtttttttttttttcttttttttttttaatagtagccatcctgttgggtgagacgtggtatctcgttgtggctttgatttgcatttccctaatggtctgtctctacagttttgcctgttccagaatatcattcctttgcaatttaaatgtgaggataaatgtatgctattgtttctcaaacgtttttgtgttacaatacctccttttgagtgagaaatgtcaactcaaacttacactttttcacttaggaagatgatttaggaaagccacttagagtaaaagtttttaaacaactgtaaaaactaatttgcttcattgcaacatttgagttctgtcgaataaatatttggccag

SEQ ID NO: 17570 - DNA, 1750 bp, Homo sapiens
  source 1..1750: mol_type = unassigned DNA
cgtcgcaccgcctctctgtagccgcccgcggagcatcgcagccggcccgggcccccgccagcctccctcctcgcgtccctcggtgtcctccgcgggccggcgcgatgcggctgggcccgaggaccgcggcgttggggctgctgctgctgtgcgccgccgcggccggcgccggcaaggccgaggagctgcactacccgctgggcgagcgccgcagcgactacgaccgcgaggcgctgctgggcgtccaggaagatgtggatgaatatgttaaactcggccacgaagagcagcaaaaaagactgcaggcgatcataaagaaaatcgacttggactcagatggctttctcactgaaagtgaactcagttcatggattcagatgtcttttaagcattatgctatgcaagaagcaaaacaacagtttgttgaatatgataaaaacagtgatgatactgtgacttgggatgaatataacattcagatgtatgatcgtgtgattgactttgatgagaacactgctctggatgatgcagaagaggagtcctttaggaaggaatttgccatttgtaaaaaacagtctttctgtttttggcttcttcgatttaatcttcacttaaaggacaagaagcgatttgaaaaagctaaccaggattcaggtcccggtttgagtcttgaagaatttattgcttttgagcatcctgaagaagttgattatatgacggaatttgtcattcaagaagctttagaagaacatgacaaaaatggtgatggatttgttagtttggaagaatttcttggtgattacaggtgggatccaactgcaaatgaagatccagaatggatacttgttgagaaagacagattcgtgaatgattatgacaaagataacgatggcaggcttgatccccaagagctgttaccttgggtagtacctaataatcagggcattgcacaagaggaggcgcttcatctaattgatgaaatggatttgaatggtgacaaaaagctctctgaagaagagattctggaaaacccggacttgtttctcaccagtgaagccacagattatggcagacagctccatgatgactatttctatcatgatgagctttaatctctgagcctgtctcagtagagtactggctccttttataatttgttaccagctttacttttgtgataaaatattgatgttgtattttacactcttaagtcttaaccacagtcagaattatcttaatgtagattataattttggtcttttaggaaaaaaaaacaaaaatctgatatttatttcaaaatgtattgaagcaacaaaatattaatattgtgccatatgacaacaaagtctttcctaaatactccatctgtttagtactgtattgtggaatatttgagttctatttccatacttgaaaacatggaggattttagagatgcctgaacaatattatttaagtagtatgtgaccgagctataaatttttgtttttgttctaagtagatttaatttgggaactgacaggacaatgtttttaggtttagcattttgtttaaaaacctttaaagaaacctttagaaggacttagacctcacatattaatgttgagaagttctgcttaattttaaaatggtttctataaagggttttattgtatgaaatagaactttatatttttgcatatgtatagatagtaattatatttaatgtataactatagcattatggtgagtggaatttgacattgtccaa

SEQ ID NO: 17571 - DNA, 1366 bp, Homo sapiens
  source 1..1366: mol_type = unassigned DNA
gtagccgcccgcggagcatcgcagccggcccgggcccccgccagcctccctcctcgcgtccctcggtgtcctccgcgggccggcgcgatgcggctgggcccgaggaccgcggcgttggggctgctgctgctgtgcgccgccgcggccggcgccggcaaggccgaggagctgcactacccgctgggcgagcgccgcagcgactacgaccgcgaggcgctgctgggcgtccagcttcacttaaaggacaagaagcgatttgaaaaagctaaccaggattcaggtcccggtttgagtcttgaagaatttattgcttttgagcatcctgaagaagttgattatatgacggaatttgtcattcaagaagctttagaagaacatgacaaaaatggtgatggatttgttagtttggaagaatttcttggtgattacaggtgggatccaactgcaaatgaagatccagaatggatacttgttgagaaagacagattcgtgaatgattatgacaaagataacgatggcaggcttgatccccaagagctgttaccttgggtagtacctaataatcagggcattgcacaagaggaggcgcttcatctaattgatgaaatggatttgaatggtgacaaaaagctctctgaagaagagattctggaaaacccggacttgtttctcaccagtgaagccacagattatggcagacagctccatgatgactatttctatcatgatgagctttaatctctgagcctgtctcagtagagtactggctccttttataatttgttaccagctttacttttgtgataaaatattgatgttgtattttacactcttaagtcttaaccacagtcagaattatcttaatgtagattataattttggtcttttaggaaaaaaaaacaaaaatctgatatttatttcaaaatgtattgaagcaacaaaatattaatattgtgccatatgacaacaaagtctttcctaaatactccatctgtttagtactgtattgtggaatatttgagttctatttccatacttgaaaacatggaggattttagagatgcctgaacaatattatttaagtagtatgtgaccgagctataaatttttgtttttgttctaagtagatttaatttgggaactgacaggacaatgtttttaggtttagcattttgtttaaaaacctttaaagaaacctttagaaggacttagacctcacatattaatgttgagaagttctgcttaattttaaaatggtttctataaagggttttattgtatgaaatagaactttatatttttgcatatgtatagatagtaattatatttaatgtataactatagcattatggtgagtggaatttga

SEQ ID NO: 17572 - DNA, 691 bp, Homo sapiens
  source 1..691: mol_type = unassigned DNA
ggggctgctgctgctgtgcgccgccgcggccggcgccggcaaggccgaggagctgcactacccgctgggcgagcgccgcagcgactacgaccgcgaggcgctgctgggcgtccaggaagatgtggatgaatatgttaaactcggccacgaagagcagcaaaaaagactgcaggcgatcataaagaaaatcgacttggactcagatggctttctcactgaaagtgaactcagttcatggattcagatgtcttttaagcattatgctatgcaagaagcaaaacaacagtttgttgaatatgataaaaacagtgatgatactgtgacttgggatgaatataacattcagatgtatgatcgtgtgattgactttgatgagaacactgctctggatgatgcagaagaggagtcctttaggaagcatcaatgtggaggtttggggctccatcctcagagccagtctgcttagcttcacatttagctccagcacttcacggttgtgtaactttggcttcacttaaaggacaagaagcgatttgaaaaagctaaccaggattcaggtcccggtttgagtcttgaagaatttattgcttttgagcatcctgaagaagttgattatatgacggaatttgtcattcaagaagctttagaagaacatgacaaaaatggtgatggatttgttagtttggaagaa

SEQ ID NO: 17573 - DNA, 3936 bp, Homo sapiens
  source 1..3936: mol_type = unassigned DNA
ttctagtatcacacattatatatttcctcatgtagaatcattagtctaccaaaagatggcagttttgttcctcacaagtttctgttgtaatctaaaaataaatgattatggtagcttttttattactgtacctaacactttttaccctctactagaatacaaagtttttatatacaagaaaaaaaaagagtgttgaagttttatgaaactgaccatcttttttgttatttttttaggaatttgccatttgtaaaaaacagtctttctgtttttggcttcttcgatttaatgtgagctattcttattttgtgttcttcaaatggccgtgaaatgtgaaccagaaaaagctacccccttcactttttttttttttaaagaaatctcagcttgttgaaagagatcctttctttccataggcaaatttggccaaatttagctcttctcctgaaacatggacctttttgctccaaagtgaagggttctttcataaggaaatcaaagcacttggtattttgaataatggtttattcaaaaagaacttgattgactcagcaaagtacctcaaattcttgtttgtctgcttttaccatgttaaacctgaacataaaatgcaaattatttggtctagttatttaaaattttgaaacattaagttaaaagctatttggaaacaagttattattttttcttttctgtcatgattgggtgaatataactggcttgtagagtctgatgttaataaaacaaattctttggggaaagaggtgagcctctccgctgtaaatcagtaattgtaaaagaactagtgtttaggtaaatgactgctacctgacctctattattctagaagactgaagagggtatttttattcagtagtgaaacacttaaaagcttctaaaatatttgaaattgtgctttaaaaaaatgcacagtttaatacatatcagtttataggaaggaaagctattcccagaaattctcaaaacagaaattatgcaggattagcagtatagcattattggctcccaaggctcttggttacagaattaccattgaaaattttatcaaaagcagccttgtccctgatagctgccgaatcatttttaaaaaggggggtggatgggaagatgggagagaaagtagaaaaggatatgtgtttattaaaccttaacatgggatccatttaaacttttgatgttatttatatctgaatatacagaattaacactataaagagcctgctaagactagacttccaggctgagcacggtgactcatgcctgtagtcccagcattttgggaggctgaggcaggtggatagcctgagctcaggagtttgagaccagcctgggcaacatagtgaaaccccatctctatcaaaaatacaaaaaattagctgggtgtggtggcacatgcctgtggtccccactacttgggaggctggggtgggaggatcacttgaacctgggcggtggaggtttcagtaagccgagattgcaccactgtactccaacctggatgacggagtgagacctcatctccccaccccccaaaaaagaaaagatttccaaatattaggtacatatactaatattatgagattctcaacataagaagactgtttttctgaaacaataatgtatttttgaaaagtcacttagaggaccagaaacattttttaaaagccctaccaagatttaatacatggtataaagttattgatttttgggcattcaaaaaagtattgagattaattattaaagtagacagtatagtactgtagaaagaatagggaggatccaagttcagtagttttgtttgttttttgagtcagggtcttgctatggtgtgaaggctggccttgaacttctgggctcatgcagtcttcccaagttgctggaactacaggcgtgcgccactatgccatgctcagtattttttagctgtatttctgacttttatcaaatcattcaatctgcttttctatcaataatagtatataacactaaatacttaaggtttattaatggtgtggtagggattctcatcccaattgcttattagagatttttatcccagtttgatagatgaggaaaccagagaggttaagcagtttgcgctgacaccacagctagtaagtggcattgctggaattcaggtctgggtctatatgactctagagcttgtgagtctatcctgcccctaatacatgtatttgtgtagcttaccttcaaagggacgatgtgaagataaatgagataacggatgggaatgtactttaaatttcacatagtttgtatttttcaaagtatttaaaatgatgtggtatactaatgagaaattttaattttcaaagcttcacttaaaggacaagaagcgatttgaaaaagctaaccaggattcaggtcccggtttgagtcttgaagaatttattgcttttgagcatcctgaagaagttgattatatgacggaatttgtcattcaagaagctttagaagaacatgacaaaaatggtgatggatttgttagtttggaagaatttcttggtgattacaggtgggatccaagtaagtcacctgggagaatgtgaaaagagaaaaggaattgaagaaagacattgaaagacagccttgctcattgaaagctctcttcaacaggaaatgtaatgaggatctgtgtctgatcctacttgtttcgttaactgtaatacaagttcaacaaatggatttatagcttatctgagaacgctgtcttgcttacttttacttccgtgtctagagtcaaacatttttctttcttttcaaacaaatctaattttattatcagtttaaatggggaaggaagtaaggtagatatttttaaacaaaatcctgtgctgttgcaggtggatcttaaaagagatagaaacataaaacactacaaatactggtgtaaacacagtatcagaagcttagtagaaggtgaataagtgtttgaaattaagagtttgcttttatataagcagctgttttttcagaattgttgcttaaagacaccaaacaatgccatttttaaattggtcaccagttttacttattctgattgtcactttaaaattacacatggcattactttgtgaaaacatgtaagaaactttgtatagaaacatgatatacagtaaaacattacccacctcacatctgggaaaactagatatcggaacaaatagcagttaacaaaattactagtttgtgaaaacatccaatgattttaaaactgggttgtttagactcgtgtcacttttgaaaatgactatatatttgttcttatgtcaggacttttcagttaagtagttctgttttattgggctttctttagtaaactttaaattcacttcctttattctagggatataccaaacttcttattggatacatgtgatattcttgtgtatgtatatttgtgtttttttatattaagctgcaaatgaagatccagaatggatacttgttgagaaagacagattcgtgaatgattatgacaaagataacgatggcaggcttgatccccaagagctgttaccttgggtagtacctaataatcagggcattgcacaagaggaggtaagtgttacagaacaactgtttctctccaccccctccccccgaatttggtgctgttgataggaaaagaagttcaaaatcttaagccaaagaaagaagtaatggagttatttgggattgatgcattactatgttttgaatttacgaactgtttagattgtcagggagacgaggaagttaagattgtgtcatgtattaatttgagagtacagtgaatagaataatagtttgtatttacctacagggactcaaaacaggttataataatttttcattgccttgatatatcctggattggatttgagtggagagagacagaacccagcagaaatg

SEQ ID NO: 17574 - DNA, 683 bp, Homo sapiens
  source 1..683: mol_type = unassigned DNA
aggaaaccagagaggttaagcagtttgcgctgacaccacagctagtaagtggcattgctggaattcaggtctgggtctatatgactctagagcttgtgagtctatcctgcccctaatacatgtatttgtgtagcttaccttcaaagggacgatgtgaagataaatgagataacggatgggaatgtactttaaatttcacatagtttgtatttttcaaagtatttaaaatgatgtggtatactaatgagaaattttaattttcaaagcttcacttaaaggacaagaagcgatttgaaaaagctaaccaggattcaggtcccggtttgagtcttgaagaatttattgcttttgagcatcctgaagaagttgattatatgacggaatttgtcattcaagaagctttagaagaacatgacaaaaatggtgatggatttgttagtttggaagaatttcttggtgattacaggtgggatccaactgcaaatgaagatccagaatggatacttgttgagaaagacagattcgtgaatgattatgacaaagataacgatggcaggcttgatccccaagagctgttaccttgggtagtacctaataatcagggcattgcacaagaggaggtaagtgttacagaacaactgtttctctccaccccctccccccgaatttggtgctgttgatag

SEQ ID NO: 17575 - DNA, 4888 bp, Homo sapiens
  source 1..4888: mol_type = unassigned DNA
gatgaacccttgtcagggggccgtgtctgcgggaggccgaaggatcccgggtgacatgctttctttgggtgcgaggcagcgtctcggcagaaagaatattgcgagtattactgagggtacatgaaggagagaagcccctttggttcggccttggactaagcccttgttctcaggtgaacttgcagtgtgatcttgagtaaggtcagtctcctctctcacctcagtggcccgaaacctcaggaggtggcagaggttttctaatgactctcccagctctgacatcctctgacttcactctgggagaacgtgggctggtggactcctggcagaagccgacacacagttgggccataacaaagagccctggtacggggcacgttcccgcccccgggaggttttggaaacactgtgaggcagggggcggggcttgagcgggccgcagccagtcaccaaagggccgggcgctgggggcggggcctcgcgcgagcggcggcggtagcggcggcagcggctgcggccaagctgggtccgagcatcccgcggctctggagccgcccggcccggacatggcgaccgtccgggcctctctgcgaggtgcgctgctccttctgctggccgtggcgggggtcgcggaggtggcagggggcctggctccgggcagtgcgggtgcattgtgttgtaatcattcaaaggataaccaaatgtgccgtgatgtatgtgaacagattttctcctcaaaaagtgaatcccgactaaaacatctgttgcagcgagccccagattattgcccagagacaatggttgaaatttggaattgtatgaattcatctttgccaggtgtgtttaagaagtctgatggctgggttggcttaggctgctgtgaactggctattgccttggagtgtcgacaggcatgcaagcaggcatcttcaaagaatgatatttccaaagtttgcagaaaagaatatgagaatgctcttttcagttgcattagcagaaatgaaatgggctcggtttgttgcagttatgcaggtcatcacacaaactgccgagaatactgtcaagccatttttcgaacagactcttctcctggtccatctcagataaaagcagtggaaaattattgcgcctctattagtccacaattaatacattgtgtgaacaattatactcaatcttatccaatgaggaacccaacggatagtttatattgctgtgacagagctgaagaccatgcttgccaaaatgcctgcaagagaatcctgatgtccaagaaaacggaaatggagattgttgatggtctcatcgagggttgtaagacccagcccttgcctcaagatcctctttggcaatgttttcttgaaagctcacaatctgttcaccctggagtcactgtacaccctcctccctctacaggcctcgatggggctaaattgcattgttgttctaaagcaaacacttcaacatgtagggaactctgcactaaactttacagcatgagctggggcaatacacagagttggcaagagtttgatcgcttttgtgaatataatccagtggaagtgtccatgttgacctgtttagcggatgtccgggaaccttgccagttgggctgtagaaaccttacttactgtactaattttaacaacaggccaacagaacttttcaggagttgtaatgcacagtcagatcaaggagccatgaatgacatgaagttgtgggagaaaggaagcataaagatgccatttatcaatatacctgttcttgatattaaaaagtgccagccagagatgtggaaagcaatagcttgttcactgcagattaaaccttgtcatagtaaatctcggggaagtattatttgcaaatcagattgtgtggagattcttaaaaaatgtggagaccagaacaaattccctgaagaccacacagctgaaagtatttgtgagcttctgtcacctacagatgatctgaagaattgtatacctttggatacatacctcaggccaagtactttaggtaacattgtagaagaagtgactcatccctgtaacccaaatccttgccctgccaatgagctctgtgaagtaaaccgaaaaggatgtccatctggagatccctgtcttccatacttttgtgttcaaggttgcaaactgggagaagcttctgatttcattgtccgtcaagggacactaatccaggtgccatcatctgcaggggaagttggttgttataaaatctgttcatgtggacaaagtggactcttagaaaactgtatggaaatgcactgtatagacctccagaagtcttgtattgttggaggaaaaagaaaaagtcatggaacatcctttagtattgactgcaatgtctgttcttgttttgctggcaatttggtgtgctctacccgcctttgcctcagtgagcacagttcagaagatgaccgtcgtaccttcacaggtctgccctgtaactgtgcagatcagtttgtccctgtatgtgggcagaatgggcgcacttaccccagtgcctgcattgctcgctgtgtgggcctccaagaccatcagtttgagtttggatcatgcatgtcaaaggatccatgtaatcctaatccctgccaaaaaaaccaaaggtgcatacccaaaccacaggtctgcctgacgacttttgataaatttggatgtagccagtatgagtgtgtaccaagacagctcgcgtgtgaccaggtccaagatcctgtttgtgacacagaccacatggagcacaacaatctctgcactttataccaaagaggaaaaagcctctcttacaaaggtccctgccagcccttttgcagagcaaccgagcccgtatgtgggcacaatggtgagacctacagcagtgtgtgtgctgcctactcggatcgcgtggcagtcgattactatggggactgccaggccgtcggagtcctctcagagcacagctccgtcgccgagtgtgcttctgtcaagtgtccttcgctcttggcagctggatgcaaacccatcatcccaccgggtgcttgttgcccattatgtgctgggatgttaagagttttatttgacaaagaaaaactggatactattgctaaggtaacaaataaaaagccaataacagttctggaaatacttcagaaaatccgcatgcacgtgtctgtcccacagtgtgatgtgtttggatacttcagcattgaatcagaaattgtgatcctgatcattcccgtcgatcactatccaaaagctctgcagattgaagcctgcaataaagaagcagagaagattgagtcccttatcaactctgacagcccgactttggcgtcccatgtccctctctctgccctcatcatttcccaggtacaggtctccagcagtgtgccatcggccggtgtcagggccaggccttcttgccactccctcctccttcccctcagcttgggccttgccttgcacttgctctggacatataactgactgcccacggaaagtgcagaatgctcctccacctcactctcctgccttgaaaaagacattcaggactgctggtttgtagttgaatattggccaaggaaaggcacatgtcacctctattcgccacacagtatttttttttttaatccgccaatattagtaggatttttgttttgtttttacaaatgttaaaatgtgttgttccaaatactaatgaaaacagaatgtctcttcctggtagaccactgccatatgatttacatttcctcaccataagggtcccccactctaaagcaaatttatcgctgggaaatgagatgaccactttttagaaagataattcactgtactatcaggttcacaaacttcatttcagagttctttttgaagtatttaaggttcccgttgcatttgttttgtttacagataattacctactctggctagaagctaggggtcccagtgaagagccactgccattaaagaatatgaaacatagataaaacatctttgaaattatgtaaattatgtaaattatcaggcaaatttgcattaaattacagaaatttaattcagaaccccaactactgtgttatgcaaaagcaagctgattaaatgacactcatataattatatgttgtaagcaacaggctcactggtcacggatttgtgtctgtgacttttgtgaaagggagaagtgacattgcatcaaagcatcttgcattatgcaatttttatattaaccagatatatattcatcggtattcatccaagttaaatgtagagtttttaaacatcaatctttaaaccaattgctgctacttatataattgccaaaaagtgaaataatgtgtagttcatgtaaataatacattatatttctattttattatgaagaaggtgaatagccatatttgtaaaatgacaatcatgtgtgttaacccagtgctttccattcgtgaaaacacatttgctttttgtgatatgcacaatgtagataagtgttctgtctgactttcttttttgatatagaagtataaagaattgtggtttatatatttaaaagtgtcaagctgagtattaaaatgtatgcatgttgtctaagaaattgaatactttgaatgtgtttcacagtttgaaataagctatttgatgtaatacttcttgtgtgtatgcacatgaacttagattttacatgaagtattttttcagtattatatgtaccctctgaaatacatagggatatgcgtattataccaaaatgttgctgaaaaatgggcacttaaagctttcagaatatgtcagtgctgatgtagcatgcttgttgcaattgccttttttctgtataaatgtctttaatgcaatatactggaaagcttttctattttaataaaaataatttttatatg

SEQ ID NO: 17576 - DNA, 1128 bp, Homo sapiens
  source 1..1128: mol_type = unassigned DNA
ggcggtagcggcggcagcggctgcggccaagctgggtccgagcatcccgcggctctggagccgcccggcccggacatggcgaccgtccgggcctctctgcgaggtgcgctgctccttctgctggccgtggcgggggtcgcggaggtggcagggggcctggctccgggcagtgcgggtgcattgtgttgtaatcattcaaaggataaccaaatgtgccgtgatgtatgtgaacagcattcatggattttaccgtctcagctatttgcagattttctcctcaaaaagtgaatcccgactaaaacatctgttgcagcgagccccagattattgcccagagacaatggttgaaatttggaattgtatgaattcatctttgccaggtgtgtttaagaagtctgatggctgggttggcttaggctgctgtgaactggctattgccttggagtgtcgacaggcatgcaagcaggcatcttcaaagaatgatatttccaaagtttgcagaaaagaatatgagcctgtcctccgttattttagtgtgcttccttctcttgtctggatttctgcattgccctaggaagtctgccagtatgtgttgatgaaggacaagacaggaaagaatgctcttttcagttgcattagcagaaatgaaatgggctcggtttgttgcagttatgcaggtcatcacacaaactgccgagaatactgtcaagccatttttcgaacagactcttctcctggtccatctcagataaaagcagtggaaaattattgcgcctctattagtccacaattaatacattgtgtgaacaattatactcaatcttatccaatgaggaacccaacggatagcagatctgtgctctctgacatttagtctatacgagatactgctggagctaaggagatggcagctcaataaaaaagcagaaagaggttttaagggtagaacaaccgtctccatctttgccaatacagaggaatctggaaaagaaggcgccaaacagatatgcacagatttcttccaaagtcagagaaaactacttcaaagaagcccttctgaattctgtaatatggttgaaagtgtttttttatttctgattctttgagaaaattaaaggcagagccaaa

SEQ ID NO: 17577 - DNA, 1717 bp, Homo sapiens
  source 1..1717: mol_type = unassigned DNA
gcggctgcggccaagctgggtccgagcatcccgcggctctggagccgcccggcccggacatggcgaccgtccgggcctctctgcgaggtgcgctgctccttctgctggccgtggcgggggtcgcggaggtggcagggggcctggctccgggcagtgcgggtgcattgtgttgtaatcattcaaaggataaccaaatgtgccgtgatgtatgtgaacagattttctcctcaaaaagtgaatcccgactaaaacatctgttgcagcgagccccagattattgcccagagacaatggttgaaatttggaattgtatgaattcatctttgccaggtgtgtttaagaagtctgatggctgggttggcttaggctgctgtgaactggctattgccttggagtgtcgacaggcatgcaagcaggcatcttcaaagaatgatatttccaaagtttgcagaaaagaatatgagaatgctcttttcagttgcattagcagaaatgaaatgggctcggtttgttgcagttatgcaggtcatcacacaaactgccgagaatactgtcaagccatttttcgaacagactcttctcctggtccatctcagataaaagcagtggaaaattattgcgcctctattagtccacaattaatacattgtgtgaacaattatactcaatcttatccaatgaggaacccaacggatatgtttgaattttttgccaatgagcaattattacttttgtaattaaaaagtcataacaatgagaagagagcctgatatcttttaaaaattagggcctcctgatgaagctgcacctgaaatggctcttcagagtctccgctttgtacatcctggaatccattttcttcacctagaggtgaccagatttataaaaactgactgattgaccaaactgaccaaagactgatttataagatgtcaatgttttgatttacactgtgatattgaaagaggctctgtggcttatgtctgtaatctcagcgctttgtgatgctgaggcaggagaattgcttgaggccaagagtttgagaccagcctgggtaacaaagtgagaacccagctctacaaaaaaataataataataattagctgggtgtggtgacacacccagctcctcaggaggctgatgctggaggatcgcttgagcccaagagttcaaggttgcagtgagccatcatcacttcactgcactccagccagggcaacaaagcaagaccctgcctcggggggaaaaaaaaagatgaaaagaaagaaagacttgttttttgtaactcagtagcagtactgtgtgccttgtttggccaccatctaaatcagaactctaatggcttttgacatcctttggtgtagctgtgtggtcaaaatcagaggatgaagcattgccccaataaccttcatttgttttaaaggcagatctgtgctctctgacatttagtctatacgagatactgctggagctaaggagatggcagctcaataaaaaagcagaaagaggttttaagggtagaacaaccgtctccatctttgccaatacagaggaatctggaaaagaaggcgccaaacagatatgcacagatttcttccaaagtcagagaaaactacttcaaagaagcccttctgaattctgtaatatggttgaaagtgtttttttatttctgattctttgagaaaattaaaggcagagccaaactgatatcttgtca

SEQ ID NO: 17578 - DNA, 3857 bp, Homo sapiens
  source 1..3857: mol_type = unassigned DNA
aacgccgggcagggcggcgggcgcgctcagtctggcggcggctgccgtgagctgactgacgttccgggaacgccgcagcagcccgcgccgcccgcagcctagccgagccgcgccgcccgggcctcgcccgcccgcctgcccgccatggtgtcatggatcatctccaggctggtggtgcttatatttggcaccctttaccctgcgtattattcctacaaggctgtgaaatcaaaggacattaaggaatatgtcaaatggatgatgtactggattatatttgcacttttcaccacagcagagacattcacagacatcttcctttgttggtttccattctattatgaactaaaaatagcatttgtagcctggctgctgtctccctacacaaaaggctccagcctcctgtacaggaagtttgtacatcccacgctatcttcaaaagaaaaggaaatcgatgattgtctggtccaagcaaaagaccgaagttacgatgcccttgtgcacttcgggaagcggggcttgaacgtggccgccacagcggctgtgatggctgcttccaagggacagggtgccttatcggagagactgcggagcttcagcatgcaggacctcaccaccatcaggggagacggcgcccctgctccctcgggccccccaccaccggggtctgggcgggccagcggcaaacacggccagcctaagatgtccaggagtgcttctgagagcgctagcagctcaggcaccgcctagaatccttcgatctcgcttcaggaagaaaagtacctcatcctcggccaccgaaaccacgtgagtgagatgagccaacagcaccggatccacagaatgtttcttctctgccttaaagagctattcactaataacatagaaatccgcaagctgggtgtgctttgagtgtgcagcctcacaaacatggccttttctctctccccttccacttttaaggatttatttttttcccccttttctttattttgctggggagaggctaaagggaaaggtagtaggggcgggggtggtgacctttaagtcttctgaggttggtaattttccacaattggattgtcattatagacagcagtgtgttttttagaaagataagagaatcacccctatgctgctgagatgtacatttgtaatttatctgttgcatacttagtttttagtcctgtaaatgcaaacacagcattttttacaactttctttgttcttggtacttatactttgaactatgatgtacatatttatggcttttggcttttaatataatggacttgcaagggctgccagaggttctgatatgtaagaaaactgcaaaaacaaatatagacaaatattttgattctagagaacgtctcagatgtgcttataaagcttccaaatacaactccagtaagacatccctttccctgcaggagtgtggtctatattctttagatagttgtttagtcaaaagaccagacaagttacaaactaagagaaacaatatttcacaacacagtaaagtgtgatgagaggtcaggggaacatcccagtaaaagagaagagtcacaggaagctcatctcctccctggattctggattaggagcttctgaatcttttccagggataggcaggtagctcactcttggtgcaatttcttgaggatgggaacatgtagagctgctggaaggagtaattctgtgcttgacaaaggacgatttctcctttatcgtgaccagtgctgccgatttcctgacagaggagcttacactctgagcaccttgttttagcgaactctagcaaaacttgtttagcttagcaaaaacaaacacacaaaaaactgagaactctgctgtttcagatatgccataacatacatctgaaacacatgtgtaacaatcaaaatggtgggctctagaatggttttggagctcgagatcttcatgggttagacttgctggtcagacccaggagcacctgtggctcacaccttctgttcccctcctggcctgtgcagaatgtaaacagcagactcatactcaatgggcactacaggccttatcagacgttttatacaagcctggattgcttagtaggggaataaggcattctctgagggggctttccacttagattgagaattttatttgaaaagaatctggtttaaatggcattgtggtccgaggtagctgctctccccactgagagctgagccgaaatataagaataatatatttgtgcttcgagttggtgtttctttcagtgtaatgcatgcagtggtcacaacccagttactcataatatttggattgtatttgttcgtagatatgcccagaagactagagaattagtgttatataccatatagaacttactgtcagtcaactataaacaggcccaattaaaaactgttccattactacgcaaacacatattagaggcctttgctgatgacacattagctggatcttagccaccccagaaagggtttgatttgaagctgattgttgccagatatgcatattggaatcccatctacccatagttcctctgaaggtgattttgtaatttgcaaaagggtataggaaaatatacctaaaagcgaatttgtggctgagaggataaacagaagctgtttgctcatgttctgtgccccacacccaccaatacctaaatctgttaaggaagacagaaaatgttttctttgtgctcattgagtagttccagacagaagaagaatatactctttaaaatgtatttacctgttagttggaagtacccagaattatcagaaacgaatgcaaaaaaaaaaaaaaaaaaaaaaagcttacacagcttcttagcaatttttttttttttgccgaaacaataaattgcctttagcagcagtttaaaatcctatcgtgaacaacctatattttcgccattttacaatggagagttgtgacaagtacaggttatcaagtttgcacttaactatgccaaaaaaagtttgaagcgctctattctcagacatgctgtattattacttctcattcaagattgaaaaatataaaggtatccaaactctgtcttaatgtaaatgtaactatttttccttcaagtgttgactagggagtcggtttctctcttaaagacactcactgtacaactgaaagcagctgtcatatttctggcaaaatgtgtttacgtatctgacaagttgtacatttgtgtatgaactgacataaaatgtgaaagcctgtaagtgtacatgtagtggtgtggtgttctgtctagaggatacaactgaatgtttttaatttgctgacttacagacacaggctgtttacaaaatgctagctggaaagtctgtaatgttcatgtcataacttttagttaattgccattgagcacctgttctgaggaggtgagatgtggacttgtgcttataaactggagagtttagtcataatccctcctggctttgtgtgaatagcttgctcactttgctggcctttgaaatgtgttctccgtgataagctatccatgtgtttgtgataagagtgcttgtcaaccatgaccatctttgagccttcctagtcctccacctggcacagtatttgaaatggcaaaggatgtgcttcatcctctaacagtgtacactcccagagctgatattctggattttgactgtgcacatttcctctagttcatgtctgtagtccctatagaatgatctgtaataaaatagtatactggactgtgcatcaaagggatgtaaaattacagtattccaaaggttgaagttctgctgttttgttataatgcctgatacacatcttgaataaagtcttaacatttttcttttaaaaaa

SEQ ID NO: 17579 - DNA, 1702 bp, Homo sapiens
  source 1..1702: mol_type = unassigned DNA
agtctggcggcggctgccgtgagctgactgacgttccgggaacgccgcagcagcccgcgccgcccgcagcctagccgagccgcgccgcccgggcctcgcccgcccgcctgcccgccatggtgtcatggatcatctccaggctggtggtgcttatatttggcaccctttaccctgcgtattattcctacaaggctgtgaaatcaaaggacattaaggaatatgtcaaatggatgatgtactggattatatttgcacttttcaccacagcagagacattcacagacatcttcctttgttggtttccattctattatgaactaaaaatagcatttgtagcctggctgctgtctccctacacaaaaggctccagcctcctgtacaggaagtttgtacatcccacgctatcttcaaaagaaaaggaaatcgatgattgtctggtccaagcaaaagaccgaagttacgatgcccttgtgcacttcgggaagcggggcttgaacgtggccgccacagcggctgtgatggctgcttccaagggacagggtgccttatcggagagactgcggagcttcagcatgcaggacctcaccaccatcaggggagacggcgcccctgctccctcgggccccccaccaccggggtctgggcgggccagcggcaaacacggccagcctaagatgtccaggagtgcttctgagagcgctagcagctcagtgtgtacctgctgctccacctgcaggacctggaaagtggttgagggagatgtgaatgagggtggtatgaaggcatgggagccccaccaggtccaaaacccattggcgttttctgacgacgaggaggaagacctgctggatttcatgtacaagtataaagcacctcgaaggatggaattgcccctggaggcaccgcctagaatccttcgatctcgcttcaggaagaaaagtacctcatcctcggccaccgaaaccacgtgagtgagatgagccaacagcaccggatccacagaatgtttcttctctgccttaaagagctattcactaataacatagaaatccgcaagctgggtgtgctttgagtgtgcagcctcacaaacatggccttttctctctccccttccacttttaaggatttatttttttcccccttttctttattttgctggggagaggctaaagggaaaggtagtaggggcgggggtggtgacctttaagtcttctgaggttggtaattttccacaattggattgtcattatagacagcagtgtgttttttagaaagataagagaatcacccctatgctgctgagatgtacatttgtaatttatctgttgcatacttagtttttagtcctgtaaatgcaaacacagcattttttacaactttctttgttcttggtacttatactttgaactatgatgtacatatttatggcttttggcttttaatataatggacttgcaagggctgccagaggttctgatatgtaagaaaactgcaaaaacaaatatagacaaatattttgattctagagaacgtctcagatgtgcttataaagcttccaaatacaactccagtaagacatccctttccctgcaggagtgtggtctatattctttagatagttgtttagtcaaaagaccagacaagttacaaactaagagaaacaatatttcacaacacagtaaagtgtgatgagaggtcaggg

SEQ ID NO: 17580 - DNA, 1196 bp, Homo sapiens
  source 1..1196: mol_type = unassigned DNA
cagtctggcggcggctgccgtgagctgactgacgttccgggaacgccgcagcagcccgcgccgcccgcagcctagccgagccgcgccgcccgggcctcgcccgcccgcctgcccgccatggtgtcatggatcatctccaggctggtggtgtcaaatggatgatgtactggattatatttgcacttttcaccacagcagagacattcacagacatcttcctttgttggtttccattctattatgaactaaaaatagcatttgtagcctggctgctgtctccctacacaaaaggctccagcctcctgtacaggaagtttgtacatcccacgctatcttcaaaagaaaaggaaatcgatgattgtctggtccaagcaaaagaccgaagttacgatgcccttgtgcacttcgggaagcggggcttgaacgtggccgccacagcggctgtgatggctgcttccaagggacagggtgccttatcggagagactgcggagcttcagcatgcaggacctcaccaccatcaggggagacggcgcccctgctccctcgggccccccaccaccggggtctgggcgggccagcggcaaacacggccagcctaagatgtccaggagtgcttctgagagcgctagcagctcaggcaccgcctagaatccttcgatctcgcttcaggaagaaaagtacctcatcctcggccaccgaaaccacgtgagtgagatgagccaacagcaccggatccacagaatgtttcttctctgccttaaagagctattcactaataacatagaaatccgcaagctgggtgtgctttgagtgtgcagcctcacaaacatggccttttctctctccccttccacttttaaggatttatttttttcccccttttctttattttgctggggagaggctaaagggaaaggtagtaggggcgggggtggtgacctttaagtcttctgaggttggtaattttccacaattggattgtcattatagacagcagtgtgttttttagaaagataagagaatcacccctatgctgctgagatgtacatttgtaatttatctgttgcatacttagtttttagtcctgtaaatgcaaacacagcattttttacaactttctttgttcttggtacttatactttgaactatgatgtacatatttatggcttttggcttttaatataatggacttgc

SEQ ID NO: 17581 - DNA, 969 bp, Homo sapiens
  source 1..969: mol_type = unassigned DNA
gggaacgccgcagcagcccgcgccgcccgcagcctagccgagccgcgccgcccgggcctcgcccgcccgcctgcccgccatggtgtcatggatcatctccaggctggtggtgcttatatttggcaccctttaccctgcgtattattcctacaaggctgtgaaatcaaaggacattaaggaatatgtcaaatggatgatgtactggattatatttgcacttttcaccacagcagagacattcacagacatcttcctttgttgggacagggtgccttatcggagagactgcggagcttcagcatgcaggacctcaccaccatcaggggagacggcgcccctgctccctcgggccccccaccaccggggtctgggcgggccagcggcaaacacggccagcctaagatgtccaggagtgcttctgagagcgctagcagctcaggcaccgcctagaatccttcgatctcgcttcaggaagaaaagtacctcatcctcggccaccgaaaccacgtgagtgagatgagccaacagcaccggatccacagaatgtttcttctctgccttaaagagctattcactaataacatagaaatccgcaagctgggtgtgctttgagtgtgcagcctcacaaacatggccttttctctctccccttccacttttaaggatttatttttttcccccttttctttattttgctggggagaggctaaagggaaaggtagtaggggcgggggtggtgacctttaagtcttctgaggttggtaattttccacaattggattgtcattatagacagcagtgtgttttttagaaagataagagaatcacccctatgctgctgagatgtacatttgtaatttatctgttgcatacttagtttttagtcctgtaaatgcaaacacagcattttttacaactttctttgttcttggtacttatactttgaactatgatgtacatatttatggc

SEQ ID NO: 17582 - DNA, 940 bp, Homo sapiens
  source 1..940: mol_type = unassigned DNA
gtttcttatgcagaaagtgctgagcaacggacagactgaagaggttaggtctggatccaggcttatatttggcaccctttaccctgcgtattattcctacaaggctgtgaaatcaaaggacattaaggaatatgtcaaatggatgatgtactggattatatttgcacttttcaccacagcagagacattcacagacatcttcctttgttggtttccattctattatgaactaaaaatagcatttgtagcctggctgctgtctccctacacaaaaggctccagcctcctgtacaggaagtttgtacatcccacgctatcttcaaaagaaaaggaaatcgatgattgtctggtccaagcaaaagaccgaagttacgatgcccttgtgcacttcgggaagcggggcttgaacgtggccgccacagcggctgtgatggctgcttccaagggacagggtgccttatcggagagactgcggagcttcagcatgcaggacctcaccaccatcaggggagacggcgcccctgctccctcgggccccccaccaccggggtctgggcgggccagcggcaaacacggccagcctaagatgtccaggagtgcttctgagagcgctagcagctcaggcaccgcctagaatccttcgatctcgcttcaggaagaaaagtacctcatcctcggccaccgaaaccacgtgagtgagatgagccaacagcaccggatccacagaatgtttcttctctgccttaaagagctattcactaataacatagaaatccgcaagctgggtgtgctttgagtgtgcagcctcacaaacatggccttttctctctccccttccacttttaaggatttatttttttcccccttttctttattttgctggggagaggctaaagggaaaggtagtaggggcgggggtggtgacctttaagtcttctga

SEQ ID NO: 17583 - DNA, 566 bp, Homo sapiens
  source 1..566: mol_type = unassigned DNA
gttttcaaagagaggcgttggggttgtactgtgtgtgtgcaagtgtgtgccctcaccttcataggtggaggacagaggaatctgggaaacttgcagccacatgcaagcaggagaggcgtccttgccacccaccgggtctcatccttcaaaagggcagtgttgctgagaacctaacagaacttgtgttttcatctctctctccaggtttccattctattatgaactaaaaatagcatttgtagcctggctgctgtctccctacacaaaaggctccagcctcctgtacaggaagtttgtacatcccacgctatcttcaaaagaaaaggaaatcgatgattgtctggtccaagcaaaagaccgaagttacgatgcccttgtgcacttcgggaagcggggcttgaacgtggccgccacagcggctgtgatggctgcttccaagggacagggtgccttatcggagagactgcggagcttcagcatgcaggacctcaccaccatcaggggagacggcgcccctgctccctcgggccccccaccaccggggtctgggcgggccagcggcaaac

SEQ ID NO: 17584 - DNA, 576 bp, Homo sapiens
  source 1..576: mol_type = unassigned DNA
cttctcccccgcgcccctccgtcccctccctccccgcccccggccccgggctgcgcgcgcccctacagcgcccggtcccagtggctcgggctattaatacccggcgcagctaaatttagcaggcttatatttggcaccctttaccctgcgtattattcctacaaggctgtgaaatcaaaggacattaaggaatatgtcaaatggatgatgtactggattatatttgcacttttcaccacagcagagacattcacagacatcttcctttgttggtttccattctattatgaactaaaaatagcatttgtagcctggctgctgtctccctacacaaaaggctccagcctcctgtacaggaagtttgtacatcccacgctatcttcaaaagaaaaggaaatcgatgattgtctggtccaagcaaaagaccgaagttacgatgcccttgtgcacttcgggaagcggggcttgaacgtggccgccacagcggctgtgatggctgcttccaagggacagggtgccttatcggagagactgcggagcttcagcatgcaggacctcaccaccatcaggggagac

SEQ ID NO: 17585 - DNA, 958 bp, Homo sapiens
  source 1..958: mol_type = unassigned DNA
attcctacaaggctgtgaaatcaaaggacattaaggaatatgtcaaatggatgatgtactggattatatttgcacttttcaccacagcagagacattcacagacatcttcctttgttggtttccattctattatgaactaaaaatagcatttgtagcctggctgctgtctccctacacaaaaggctccagcctcctgtacaggaagtttgtacatcccacgctatcttcaaaagaaaaggaaatcgatgattgtctggtccaagcaaaagaccgaagttacgatgcccttgtgcacttcgggaagcggggcttgaacgtggccgccacagcggctgtgatggctgcttccaaggtactgtgctggaagtaccacaactacatgagtctcagtccctctagtgtgccctgctcatcacctgtgcgaccacacagaacaggctaaggaccaatcagtggtttttcatcttttaggggtccttttgaaaatctgatggaaaaaaatgctgaatcttgccccagaaaattctcaccccccaacacacatgcccacatacttgcaatatcaagaggttcccagagcccctgaagctcatctgtgcgtcccaggttaagaatttctaacttatccaaccccactggaaacaagaaaataatagaatttctaacttacttggcacttaggcctgggagaaacagaagagggcaggggagagagggagagagtgcttctctgcagtttcctagggtgcactgggagagtcgcctaaatgcagtggacaggtggagagactacctgagcaagcgggtggactcactcacgatcatgtggcccagcagatccaggggaaggaacccaggtcctagaataagttgagtggtccagacatggaggtcagtaatgtgccaagccataacaactgaagtggaggaggtttgaaataaacaccagtctgtggg

SEQ ID NO: 17586 - DNA, 465 bp, Homo sapiens
  source 1..465: mol_type = unassigned DNA
agcttttgtcaggtggaaaggacagcgcagacgaaccaggggcgctgcctggagggtcagcgcggaacgggtggagaggcagaggcggggctcccagtggggttggaaaaatcctcctttttaggtgtctgcatcgacagcggcaaaggcagctgggacatgggaagacgcatgtgaatcttggagtaaacgcctggagcccccggctccgactccttttgcaggggattgagagacaggggcaggtacctccaggaatgcacgggaaattttcaagtgacagccacccgcatggtggcgatgacacctcccaggccttgcaggagagcgcagagtcatctagggcttatatttggcaccctttaccctgcgtattattcctacaaggctgtgaaatcaaaggacattaaggaatatgtcaaatggatgatgtactggattatatttgcacttttcaccacagca

SEQ ID NO: 17587 - DNA, 11571 bp, Homo sapiens
  source 1..11571: mol_type = unassigned DNA
ctcggcgggggcccgctcccaggcccgctcccgagcccgttccgctcccgtccgccttcttctcgccttctctccgcgtggctcctccgtcccggcgtctccaaaactgaatgagcgagcggcgcgtagggcgcgcggcggcggcggcggcggcggcggcatggagcgcagtggctgggcccggcagactttcctcctagcgctgttgctgggggcgacgctgagggcgcgcgcggcggctggctattacccccgcttttcgcccttctttttcctgtgcacccaccacggggagctggaaggggatggggagcagggcgaggtgctcatttccctgcatattgcgggcaaccccacctactacgttccgggacaagaataccatgtgacaatttcaacaagcaccttttttgacggcttgctggtgacaggactatacacatctacaagtgttcaggcatcacagagcattggaggttccagtgctttcggatttgggatcatgtctgaccaccagtttggtaaccagtttatgtgcagtgtggtagcctctcacgtgagtcacctgcccacaaccaacctcagtttcatctggattgctccacctgcgggcacaggctgtgtgaatttcatggctacagcaacacaccggggccaggttattttcaaagatgctttagcccagcagttgtgtgaacaaggagctccaacagatgtcactgtgcacccacatctagctgaaatacatagtgacagcattatcctgagagatgactttgactcctaccaccaactgcaattaaatccaaatatatgggttgaatgtaacaactgtgagactggagaacagtgtggcgcgattatgcatggcaatgccgtcaccttctgtgaaccatatggcccacgagaactgattaccacaggccttaatacaacaacagcttctgtcctccaattttccattgggtcaggttcatgtcgctttagttattcagaccccagcatcatcgtgttatatgccaagaataactctgcggactggattcagctagagaaaattagagccccttccaatgtcagcacaatcatccatatcctctaccttcctgaggacgccaaaggggagaatgtccaatttcagtggaagcaggaaaatcttcgtgtaggtgaagtgtatgaagcctgctgggccttagataacatcttgatcatcaattcagctcacagacaagtcgttttagaagatagtctcgacccagtggacacaggcaactggcttttcttcccaggagctacagttaagcatagctgtcagtcagatgggaactccatttatttccatggaaatgaaggcagcgagttcaattttgccaccaccagggatgtagatctttccacagaagatattcaagagcaatggtcagaagaatttgagagccagcctacaggatgggatgtcttgggagctgtcattggtacagaatgtggaacgatagaatcaggcttatcaatggtcttcctcaaagatggagagaggaaattatgcactccatccatggacactaccggttatgggaacctgaggttttactttgtgatgggaggaatttgtgaccctggaaattctcatgaaaatgacataatcctgtatgcaaaaattgaaggaagaaaagagcatataacactggataccctttcctattcctcatataaggttccgtctttggtttctgtggtcatcaatcctgaacttcagactcctgctaccaaattttgtctcaggcaaaagaaccatcaaggacataataggaatgtctgggctgtagactttttccatgtcttgcctgttctcccttctacaatgtctcacatgatacagttttccatcaatctgggatgtggaacgcatcagcctggtaacagtgtcagcttggaattttctaccaaccatgggcgctcctggtccctccttcacactgaatgcttacctgagatctgtgctggaccccacctcccccacagcactgtctactcctctgaaaactacagtgggtggaaccgaataacaattccccttcctaacgcagcactaacccggaacaccaggattcgctggagacaaacaggaccaatccttggaaacatgtgggcaattgataatgtttatattggcccgtcatgtctcaaattctgttctggcagaggacagtgcactagacatggttgcaagtgtgaccctggattttctggcccagcttgtgagatggcatcccagacattcccaatgtttatttctgaaagctttggcagttccaggctctcctcttaccataacttttactctatccgtggtgctgaagtcagctttggttgtggtgtcttggccagtggtaaggccctggttttcaacaaagatgggcggcgtcagctaattacatctttccttgacagctcacaatccaggtttctccagttcacactgagactggggagcaaatctgttctgagcacgtgcagagcccctgatcagcctggtgaaggagttttgttgcattattcttatgataatgggataacttggaaactcctggagcattattcatatctcagctatcatgagcccagaataatctccgtagaactaccaggtgatgcaaagcagtttggaattcagttcagatggtggcaaccgtatcattcttcccagagagaagatgtatgggctattgatgagattatcatgacatctgtgcttttcaacagcattagtcttgactttaccaatcttgtggaggtcactcagtctctgggattctaccttggaaatgttcagccatactgtggccacgactggaccctttgttttacaggagattctaaacttgcctcaagtatgcgctatgtggaaacacaatcaatgcagataggagcatcctatatgattcagttcagtttggtgatgggatgtggccagaaatacaccccacacatggacaaccaggtgaagctggagtactcaaccaaccacggccttacctggcacctcgtccaagaagaatgccttccaagtatgccaagttgtcaggaatttacatcagcaagtatttaccatgccagtgagtttacacagtggaggagagtcatagtgcttcttccccagaaaacttggtccagtgctacccgtttccgctggagccagagctattacacagctcaagacgagtgggctttggacagcatttacattgggcagcagtgccccaacatgtgcagtgggcatggctcatgcgatcatggcatatgcaggtgtgaccaggggtaccaaggcactgaatgccacccagaagctgcccttccgtccacaattatgtcagattttgagaaccagaatggctgggagtctgactggcaagaagttattgggggagaaattgtaaaaccagaacaagggtgtggtgtcatctcttctggatcatctctgtacttcagcaaggctgggaaaagacagctggtgagttgggacctggatacttcttgggtggactttgtccagttctacatccagataggcggagagagtgcttcatgcaacaagcctgacagcagagaggagggcgtcctccttcagtacagcaacaatgggggcatccagtggcacctgctagcagagatgtacttttcagacttcagcaaacccagatttgtctatctggagcttccagctgctgccaagaccccttgcaccaggttccgctggtggcagcccgtgttctcaggggaggactatgaccagtgggcagtcgatgacatcatcattctgtccgagaagcagaagcagatcatcccagttatcaatccaactttacctcagaacttttatgagaagccagcttttgattaccctatgaatcagatgagtgtgtggttgatgttggctaatgaaggaatggttaaaaatgaaaccttctgtgctgccacaccatcagcaatgatatttggaaaatcagatggagatcgatttgcagtaactcgagatttgaccctgaaacctggatatgtgctacagttcaagctaaacataggttgtgccaatcaattcagcagtactgctccagttcttcttcagtactctcatgatgctggtatgtcctggtttctggtgaaagaaggctgttacccggcttctgcaggcaaaggatgcgaaggaaactccagagaactaagtgagcccaccatgtatcacacaggggactttgaagaatggacaagaatcaccattgttattccaaggtctcttgcatccagcaagaccagattccgatggatccaggagagcagctcacagaaaaacgtgcctccatttggtttagatggagtgtacatatccgagccttgtcccagttactgcagtggccatggggactgcatttcaggagtgtgtttctgtgacctgggatatactgctgcacaaggaacctgtgtgtcaaatgtccccaatcacaatgagatgttcgataggtttgaggggaagctcagccctctgtggtacaagataacaggtgcccaggttggaactggctgtggaacacttaacgatggcaaatctctctacttcaatggccctgggaaaagggaagcccggacggtccctctggacaccaggaatatcagacttgttcaattttatatacaaattggaagcaaaacttcaggcattacctgcatcaaaccaagaactagaaatgaagggcttattgttcagtattcaaatgacaatgggatactctggcatttgcttcgagagttggacttcatgtccttcctggaaccacagatcatttccattgacctgccacaggacgcgaagacacctgcaacggcatttcgatggtggcaaccgcaacatgggaagcattcagcccagtgggctttggatgatgttcttataggaatgaatgacagctctcaaactggatttcaagacaaatttgatggctctatagatttgcaagccaactggtatcgaatccaaggaggtcaagttgatattgactgtctctctatggatactgctctgatattcactgaaaacataggaaaacctcgttatgctgagacctgggattttcatgtgtcagcatctacctttttgcagtttgaaatgagcatgggctgtagcaagcccttcagcaactcccacagtgtacagctccagtattctctgaacaatggcaaggactggcatcttgtcaccgaagagtgtgttcctccaaccattggctgtctgcattacacggaaagttcaatttacacctcggaaagattccagaattggaagcggatcactgtctaccttccactctccaccatttctcccaggacccggttcagatggattcaggccaactacactgtgggggctgattcctgggcgattgataatgttgtactggcctcagggtgcccttggatgtgctcaggacgagggatttgtgatgctggacgctgtgtgtgtgaccggggctttggtggaccctattgtgttcctgttgttcctctgccctcgattcttaaagacgatttcaatgggaatttacatcctgacctttggcctgaagtgtatggtgcagagagggggaatctgaatggtgaaaccatcaaatctggaacatctctaatttttaaaggggaaggactaaggatgcttatttcaagagatctagattgtacaaatacaatgtatgtccagttttcacttagatttatagcaaaaagtaccccagagagatctcactctattctgttacaattctccatcagtggaggaatcacttggcacctgatggatgaattttactttcctcaaacaacgaatatacttttcatcaatgttcccttgccatacactgcccaaaccaatgctacaagattcagactctggcaaccttataataacggtaagaaagaagaaatctggattgttgatgacttcattatcgatggaaataatgtaaacaaccctgtgatgctcttggatacatttgattttgggcccagagaagacaattggtttttctatcctggtggtaacatcggtctttattgtccatattcttcaaagggggcacctgaagaagattcagctatggtgtttgtttcaaatgaagttggtgagcattccattaccacccgtgacctaaatgtgaatgagaacaccatcatacaatttgagatcaacgttggctgttcgactgatagctcatccgcggatccagtgagactggaattttcaagggacttcggggcgacctggcaccttctgctgcccctctgctaccacagcagcagccacgtcagctctttatgctccaccgagcaccaccccagcagcacctactacgcaggaaccatgcagggctggaggagggaggtcgtgcactttgggaagctgcacctttgtggatctgtccgtttcagatggtaccagggattttaccctgccggctctcagccagtgacatgggccattgataatgtctacatcggtccccagtgtgaggagatgtgtaatggacaggggagctgtatcaatggaaccaaatgtatatgtgaccctggctactcaggtccaacctgtaaaataagcaccaaaaatcctgattttctcaaagatgatttcgaaggtcagctagaatctgatagattcttattaatgagtggtgggaaaccatctcgaaagtgtggaatcctttctagtggaaacaacctctttttcaatgaagatggcttgcgcatgttgatgacacgagacctggatttatcacatgctagatttgtgcagttcttcatgagactgggatgtggtaaaggcgttcctgaccccaggagtcaacccgtgctcctacagtattctctcaacggtggcctctcgtggagtcttcttcaggagttccttttcagcaattccagcaatgtgggcaggtacattgccctggagatacccttgaaagcccgttctggttctactcgccttcgctggtggcaaccgtctgagaatgggcacttctacagcccctgggttatcgatcagattcttattggaggaaatatttctggtaatacggtcttggaagatgatttcacaacccttgatagtaggaaatggctgcttcacccaggaggcaccaagatgcccgtgtgtggctctactggtgatgccctggtcttcattgaaaaggccagcacccgttacgtggtcagcacagacgttgccgtgaatgaggattccttcctacagatagacttcgctgcctcctgctcagtcacagactcttgttatgcgattgaattggaatactcagtagatcttggattgtcatggcacccattggtaagggactgtctgcctaccaatgtggaatgcagtcgctatcatctgcaacggatcctggtgtcagacactttcaacaagtggactagaatcactctgcctctccctccttataccaggtcccaagccactcgtttccgttggcatcaaccagctccttttgacaagcagcagacatgggcaatagataatgtctatatcggggatggctgcatagacatgtgcagtggccatgggagatgcatccagggaaactgcgtctgtgatgaacagtggggtggcctgtactgtgatgaccccgagacctctcttccaacccaactcaaagacaacttcaatcgagctccatccagtcagaactggctgactgtgaacggagggaaattgagtacagtgtgtggagccgtggcgtcgggaatggctctccatttcagtgggggttgtagtcgattattagtcactgtggatctaaacctcactaatgctgagttcatccaattttacttcatgtatgggtgcctgattacaccaaacaaccgtaaccaaggtgttctcttggaatattctgtcaatggaggcattacctggaacctgctcatggagattttctatgaccagtacagtaagcccggatttgtgaatatccttctccctcctgatgctaaagagattgccactcgcttccgctggtggcagccaagacatgacggcctggatcagaacgactgggccattgacaatgtcctcatctcaggctctgctgaccaaaggaccgttatgctggacaccttcagcagcgccccagtaccccagcatgagcgctcccctgcagatgccggccctgtcgggaggatcgcctttgacatgtttatggaagacaaaacttcagtgaatgagcactggctattccatgatgattgtacagtagaaagattctgtgactcccctgatggtgtgatgctctgtggcagtcatgatggacgggaggtgtatgcagtgacccatgacctgactcccactgaaggctggattatgcaattcaagatctcagttggatgtaaggtgtctgaaaaaattgcccagaatcaaattcatgtgcagtattctactgacttcggtgtgagttggaattatctggtccctcagtgcttgcctgctgacccaaaatgctctggaagtgtttctcagccatctgtattctttccaactaaagggtggaaaaggatcacctacccacttcctgaaagcttagtgggaaatccggtaaggtttaggttctatcagaagtactcagacatgcagtgggcaatcgataatttctacctgggccctggatgcttggacaactgcaggggccatggagattgcttaagggaacagtgcatctgtgatccgggatactcagggccaaactgctacttgacccacactctgaagactttcctgaaggaacgctttgacagtgaagaaatcaaacctgacttatggatgtccttagaaggtggaagtacttgcactgagtgtggaattcttgccgaggacactgcactctattttgggggatccactgtgagacaagcggttacacaagatttggatcttcgaggtgcaaagttcctgcaatactgggggcgcatcggtagtgagaacaacatgacctcttgccatcgtcccatctgccggaaggaaggcgtgctgttggactactctaccgatggaggaattacctggactttgctccatgagatggattaccagaaatacatttctgttagacacgactacatacttcttcctgaagatgccctcaccaacacaactcgacttcgctggtggcagccttttgtgatcagcaatggaattgtggtctctggggtggagcgtgctcagtgggcactggacaacattttgattggtggagcagaaatcaatcccagccaattggtggacacttttgatgatgaaggcacttcccatgaagaaaactggagtttttaccctaatgctgtaaggacagcaggattttgtggcaatccatcctttcacctctattggccaaataaaaagaaggacaagactcacaatgctctctcctcccgagaactcattatacagccaggatacatgatgcagtttaaaattgtggtgggttgtgaagccacttcttgtggtgaccttcattccgtaatgctggaatacactaaggatgcaagatcggattcctggcagctcgtacagacccagtgccttccttcctcttctaacagcattggctgctcccctttccagttccatgaagccaccatctacaactctgtcaacagctcaagctggaaaagaatcaccatccagctgcctgaccatgtctcctctagtgcaacacagttccgctggatccagaagggagaagaaactgagaagcaaagctgggcaattgaccacgtgtacattggagaggcttgccccaagctctgcagcgggcacggatactgcacgaccggtgccatctgcatctgcgacgagagcttccaaggtgatgactgctctgttttcagtcacgaccttcccagttatattaaagataattttgagtccgcaagagtcaccgaggcaaactgggagaccattcaaggtggagtcataggaagtggctgtgggcagctggccccctacgcccatggagactcactgtactttaatggctgtcagatcaggcaagcagctaccaagcctctggatctcactcgagcaagcaaaatcatgtttgttttgcaaattgggagcatgtcgcagacggacagctgcaacagtgacctgagtggcccccacgctgtggacaaggcagtgctgctgcaatacagcgtcaacaacgggatcacctggcatgtcatcgcccagcaccagccaaaggacttcacacaagctcagagagtgtcttacaatgtccccctggaggcacggatgaaaggagtcttactgcgctggtggcaaccacgccacaatggaacaggtcatgatcaatgggctttggaccatgtggaggtcgtcctatttagcactcgcaaacaaaattacatgatgaatttttcacgacaacatgggctcagacatttctacaacagaagacgaaggtcacttaggcgatacccatgaagaatcaaaaagtttattttttttcttccaacatgtgatgtgttgctctccattcttttaaatctcgcactacatctgatatcaggaaatatctgtgaaggacttggtgattacctgaaagcccttctcaagaccgagtgtacaccactttcccacactgtgaactaatgacaagtgacttatttgctcataagtaaatgtcttcatgttgatgtgtccgtgaaagttgtgatctgttgtaatatcagttacagtggcagtattgacaataagaaacagtttaacagaaaaatgaaatttaagcacaaaaaatttaagagattttatgtttaaaatggcatttagcacagtatttaacattcttggtcacaaagctatttaagtggactgtatttcggctatgtctcatgttttatatgattaaattatcattgtttgtcctttatgtattctcttctacaatacaacacattgaaactgtatttacttgttatgttgtaatattttgctgctgaatttggggctacttatattctgcagaaaattaattgaaatacctattcaagaagatagttgtaaagatattgtatctcctttaatatactccttaaaaatgtatgttggtttagcgttgttttgtggataagaaaaatgcttgaccctgaaatattttctactttaaattgtggatgaagaccctatctcccacaaataagttcccatttccttgtctaaagatctttttttaagtgttctgtggctgatttactaacagtaactgccattttttgtctgtgataacagagtgatttgtaaaacagtggttgttttttcattgtgttttcttcgtggattgttttttctgcgggtcatattcataccttctgatgaagttgtacaacaccagcaacattataatggccctgtagctctgaatgctatttgtgtaactgaaaggttgcactctagggtgaaccaagctataaaagcccatgcttaaataaaaattatgtccaaaagccattgaa

SEQ ID NO: 17588 - DNA, 688 bp, Homo sapiens
  source 1..688: mol_type = unassigned DNA
actttaatggctgtcagatcaggcaagcagctaccaagcctctggatctcactcgagcaagcaaaatcatgtttgttttgcaaattgggagcatgtcgcagacggacagctgcaacagtgacctgagtggcccccacgctgtggacaaggcagtgctgctgcaatacagcgtcaacaacgggatcacctggcatgtcatcgcccagcaccagccaaaggacttcacacaagctcagagagtgtcttacaatgtccccctggaggcacggatgaaaggagtcttactgcgctggtggcaaccacgccacaatggaacaggtcatgatcaatgggctttggaccatgtggaggtcgtcctttcctgtagaactggaatgcttatgtctcgacgggttcggactgatggctccaagtggttggcaaggagaggtgaatcttctcggtagataggttcaaatgttcattctgtttaccaaatccaaaatgaaatcagtcccttggctgatttcagtcaatttgcaagcaaatttaagtgattaattggtaggaaaactaccagatttgttttggttcagtcatagccatgagctgaattttccagtcttgagctagccctcgtcttagttttcactgaggcacctgcttgcatggcatccatatcaacccccaaatccaagagcaacctggt

SEQ ID NO: 17589 - DNA, 612 bp, Homo sapiens
  source 1..612: mol_type = unassigned DNA
aagagcattctgaaaggcccctcacattctgctggccgtccagtgccagttctgagcaggccaacagatcaaaacaaacaaacaaacaaacgaaaaaggcagaactttccatttcttaaaactaaatggaaaatttgggattttttaaaaatacatttcagattcttattggaggaaatatttctggtaatacggtcttggaagatgatttcacaacccttgatagtaggaaatggctgcttcacccaggaggcaccaagatgcccgtgtgtggctctactggtgatgccctggtcttcattgaaaaggccagcacccgttacgtggtcagcacagacgttgccgtgaatgaggattccttcctacagatagacttcgctgcctcctgctcagtcacagactcttgttatgcgattgaattggaatactcagtagatcttggattgtcatggcacccattggtaagggactgtctgcctaccaatgtggaatgcagtcgctatcatctgcaacggatcctggtgtcagacactttcaacaagtggactagaatcactctgcctctccctccttataccaggtcccaagccactcgtttccgttggcatcaac

SEQ ID NO: 17590 - DNA, 641 bp, Homo sapiens
  source 1..641: mol_type = unassigned DNA
ggaattcagttcagatggtggcaaccgtatcattcttcccagagagaagatgtatgggctattgatgagattatcatgacatctgtgcttttcaacagcattagtcttgactttaccaatcttgtggaggtcactcagtctctgggattctaccttggaaatgttcagccatactgtggccacgactggaccctttggctggagtgcaatggtgcgatctcaactcactgcaacctctgcctcccgggctcaaacgacacattttctatttgatagcctcagatgcttgtttttacagatgttctttcttagtcctggagactttaaagaagataaacgattaaagcaaagaaggtgtaaagatgtagaacaaaatgagatttcttagaattttatgcttctgaacatttaaattgacctgaattgacagtaattcaaactgatcatgtaccgtaaactatatccttcaagtttgtatagaagagttttttcctaacacttctaatataacaaagaatcatatcatgaatgcaagtcctgtatcatgtttattttcataaatagttagcatctgctcagataaatgcaaaagttgctgagcattttaatttaacacttgcattgaatgcatgataacagca

SEQ ID NO: 17591 - DNA, 891 bp, Homo sapiens
  source 1..891: mol_type = unassigned DNA
tactgcgctggtggcaaccacgccacaatggaacaggtcatgatcaatgggctttggaccatgtggaggtcgtcctagatgaaaaatcctatattgcgtctaaacctgatcagacttttatgactaatcacagtgctgcatgcattgaaaggcattttttaacttgtgttatatttcattatttgctgtcattggttttccactagagtaagcactcgcaaacaaaattacatgatgaatttttcacgacaacatgggctcagacatttctacaacagaagacgaaggtcacttaggcgatacccatgaagaatcaaaaagtttattttttttcttccaacatgtgatgtgttgctctccattcttttaaatctcgcactacatctgatatcaggaaatatctgtgaaggacttggtgattacctgaaagcccttctcaagaccgagtgtacaccactttcccacactgtgaactaatgacaagtgacttatttgctcataagtaaatgtcttcatgttgatgtgtccgtgaaagttgtgatctgttgtaatatcagttacagtggcagtattgacaataagaaacagtttaacagaaaaatgaaatttaagcacaaaaaatttaagagattttatgtttaaaatggcatttagcacagtatttaacattcttggtcacaaagctatttaagtggactgtatttcggctatgtctcatgttttatatgattaaattatcattgtttgtcctttatgtattctcttctacaatacaacacattgaaactgtatttacttgttatgttgtaatattttgctgctgaatttggggctacttatattctgcagaaaattaattgaaatacctattcaagaagatagttgtaaaga

SEQ ID NO: 17592 - DNA, 11565 bp, Homo sapiens
  source 1..11565: mol_type = unassigned DNA
ctcggcgggggcccgctcccaggcccgctcccgagcccgttccgctcccgtccgccttcttctcgccttctctccgcgtggctcctccgtcccggcgtctccaaaactgaatgagcgagcggcgcgtagggcgcgcggcggcggcggcggcggcggcggcatggagcgcagtggctgggcccggcagactttcctcctagcgctgttgctgggggcgacgctgagggcgcgcgcggcggctggctattacccccgcttttcgcccttctttttcctgtgcacccaccacggggagctggaaggggatggggagcagggcgaggtgctcatttccctgcatattgcgggcaaccccacctactacgttccgggacaagaataccatgtgacaatttcaacaagcaccttttttgacggcttgctggtgacaggactatacacatctacaagtgttcaggcatcacagagcattggaggttccagtgctttcggatttgggatcatgtctgaccaccagtttggtaaccagtttatgtgcagtgtggtagcctctcacgtgagtcacctgcccacaaccaacctcagtttcatctggattgctccacctgcgggcacaggctgtgtgaatttcatggctacagcaacacaccggggccaggttattttcaaagatgctttagcccagcagttgtgtgaacaaggagctccaacagatgtcactgtgcacccacatctagctgaaatacatagtgacagcattatcctgagagatgactttgactcctaccaccaactgcaattaaatccaaatatatgggttgaatgtaacaactgtgagactggagaacagtgtggcgcgattatgcatggcaatgccgtcaccttctgtgaaccatatggcccacgagaactgattaccacaggccttaatacaacaacagcttctgtcctccaattttccattgggtcaggttcatgtcgctttagttattcagaccccagcatcatcgtgttatatgccaagaataactctgcggactggattcagctagagaaaattagagccccttccaatgtcagcacaatcatccatatcctctaccttcctgaggacgccaaaggggagaatgtccaatttcagtggaagcaggaaaatcttcgtgtaggtgaagtgtatgaagcctgctgggccttagataacatcttgatcatcaattcagctcacagacaagtcgttttagaagatagtctcgacccagtggacacaggcaactggcttttcttcccaggagctacagttaagcatagctgtcagtcagatgggaactccatttatttccatggaaatgaaggcagcgagttcaattttgccaccaccagggatgtagatctttccacagaagatattcaagagcaatggtcagaagaatttgagagccagcctacaggatgggatgtcttgggagctgtcattggtacagaatgtggaacgatagaatcaggcttatcaatggtcttcctcaaagatggagagaggaaattatgcactccatccatggacactaccggttatgggaacctgaggttttactttgtgatgggaggaatttgtgaccctggaaattctcatgaaaatgacataatcctgtatgcaaaaattgaaggaagaaaagagcatataacactggataccctttcctattcctcatataaggttccgtctttggtttctgtggtcatcaatcctgaacttcagactcctgctaccaaattttgtctcaggcaaaagaaccatcaaggacataataggaatgtctgggctgtagactttttccatgtcttgcctgttctcccttctacaatgtctcacatgatacagttttccatcaatctgggatgtggaacgcatcagcctggtaacagtgtcagcttggaattttctaccaaccatgggcgctcctggtccctccttcacactgaatgcttacctgagatctgtgctggaccccacctcccccacagcactgtctactcctctgaaaactacagtgggtggaaccgaataacaattccccttcctaacgcagcactaacccggaacaccaggattcgctggagacaaacaggaccaatccttggaaacatgtgggcaattgataatgtttatattggcccgtcatgtctcaaattctgttctggcagaggacagtgcactagacatggttgcaagtgtgaccctggattttctggcccagcttgtgagatggcatcccagacattcccaatgtttatttctgaaagctttggcagttccaggctctcctcttaccataacttttactctatccgtggtgctgaagtcagctttggttgtggtgtcttggccagtggtaaggccctggttttcaacaaagatgggcggcgtcagctaattacatctttccttgacagctcacaatccaggtttctccagttcacactgagactggggagcaaatctgttctgagcacgtgcagagcccctgatcagcctggtgaaggagttttgttgcattattcttatgataatgggataacttggaaactcctggagcattattcatatctcagctatcatgagcccagaataatctccgtagaactaccaggtgatgcaaagcagtttggaattcagttcagatggtggcaaccgtatcattcttcccagagagaagatgtatgggctattgatgagattatcatgacatctgtgcttttcaacagcattagtcttgactttaccaatcttgtggaggtcactcagtctctgggattctaccttggaaatgttcagccatactgtggccacgactggaccctttgttttacaggagattctaaacttgcctcaagtatgcgctatgtggaaacacaatcaatgcagataggagcatcctatatgattcagttcagtttggtgatgggatgtggccagaaatacaccccacacatggacaaccaggtgaagctggagtactcaaccaaccacggccttacctggcacctcgtccaagaagaatgccttccaagtatgccaagttgtcaggaatttacatcagcaagtatttaccatgccagtgagtttacacagtggaggagagtcatagtgcttcttccccagaaaacttggtccagtgctacccgtttccgctggagccagagctattacacagctcaagacgagtgggctttggacagcatttacattgggcagcagtgccccaacatgtgcagtgggcatggctcatgcgatcatggcatatgcaggtgtgaccaggggtaccaaggcactgaatgccacccagaagctgcccttccgtccacaattatgtcagattttgagaaccagaatggctgggagtctgactggcaagaagttattgggggagaaattgtaaaaccagaacaagggtgtggtgtcatctcttctggatcatctctgtacttcagcaaggctgggaaaagacagctggtgagttgggacctggatacttcttgggtggactttgtccagttctacatccagataggcggagagagtgcttcatgcaacaagcctgacagcagagaggagggcgtcctccttcagtacagcaacaatgggggcatccagtggcacctgctagcagagatgtacttttcagacttcagcaaacccagatttgtctatctggagcttccagctgctgccaagaccccttgcaccaggttccgctggtggcagcccgtgttctcaggggaggactatgaccagtgggcagtcgatgacatcatcattctgtccgagaagcagaagcagatcatcccagttatcaatccaactttacctcagaacttttatgagaagccagcttttgattaccctatgaatcagatgagtgtgtggttgatgttggctaatgaaggaatggttaaaaatgaaaccttctgtgctgccacaccatcagcaatgatatttggaaaatcagatggagatcgatttgcagtaactcgagatttgaccctgaaacctggatatgtgctacagttcaagctaaacataggttgtgccaatcaattcagcagtactgctccagttcttcttcagtactctcatgatgctggtatgtcctggtttctggtgaaagaaggctgttacccggcttctgcaggcaaaggatgcgaaggaaactccagagaactaagtgagcccaccatgtatcacacaggggactttgaagaatggacaagaatcaccattgttattccaaggtctcttgcatccagcaagaccagattccgatggatccaggagagcagctcacagaaaaacgtgcctccatttggtttagatggagtgtacatatccgagccttgtcccagttactgcagtggccatggggactgcatttcaggagtgtgtttctgtgacctgggatatactgctgcacaaggaacctgtgtgtcaaatgtccccaatcacaatgagatgttcgataggtttgaggggaagctcagccctctgtggtacaagataacaggtgcccaggttggaactggctgtggaacacttaacgatggcaaatctctctacttcaatggccctgggaaaagggaagcccggacggtccctctggacaccaggaatatcagacttgttcaattttatatacaaattggaagcaaaacttcaggcattacctgcatcaaaccaagaactagaaatgaagggcttattgttcagtattcaaatgacaatgggatactctggcatttgcttcgagagttggacttcatgtccttcctggaaccacagatcatttccattgacctgccacaggacgcgaagacacctgcaacggcatttcgatggtggcaaccgcaacatgggaagcattcagcccagtgggctttggatgatgttcttataggaatgaatgacagctctcaaactggatttcaagacaaatttgatggctctatagatttgcaagccaactggtatcgaatccaaggaggtcaagttgatattgactgtctctctatggatactgctctgatattcactgaaaacataggaaaacctcgttatgctgagacctgggattttcatgtgtcagcatctacctttttgcagtttgaaatgagcatgggctgtagcaagcccttcagcaactcccacagtgtacagctccagtattctctgaacaatggcaaggactggcatcttgtcaccgaagagtgtgttcctccaaccattggctgtctgcattacacggaaagttcaatttacacctcggaaagattccagaattggaagcggatcactgtctaccttccactctccaccatttctcccaggacccggttcagatggattcaggccaactacactgtgggggctgattcctgggcgattgataatgttgtactggcctcagggtgcccttggatgtgctcaggacgagggatttgtgatgctggacgctgtgtgtgtgaccggggctttggtggaccctattgtgttcctgttgttcctctgccctcgattcttaaagacgatttcaatgggaatttacatcctgacctttggcctgaagtgtatggtgcagagagggggaatctgaatggtgaaaccatcaaatctggaacatctctaatttttaaaggggaaggactaaggatgcttatttcaagagatctagattgtacaaatacaatgtatgtccagttttcacttagatttatagcaaaaagtaccccagagagatctcactctattctgttacaattctccatcagtggaggaatcacttggcacctgatggatgaattttactttcctcaaacaacgaatatacttttcatcaatgttcccttgccatacactgcccaaaccaatgctacaagattcagactctggcaaccttataataacggtaagaaagaagaaatctggattgttgatgacttcattatcgatggaaataatgtaaacaaccctgtgatgctcttggatacatttgattttgggcccagagaagacaattggtttttctatcctggtggtaacatcggtctttattgtccatattcttcaaagggggcacctgaagaagattcagctatggtgtttgtttcaaatgaagttggtgagcattccattaccacccgtgacctaaatgtgaatgagaacaccatcatacaatttgagatcaacgttggctgttcgactgatagctcatccgcggatccagtgagactggaattttcaagggacttcggggcgacctggcaccttctgctgcccctctgctaccacagcagcagccacgtcagctctttatgctccaccgagcaccaccccagcagcacctactacgcaggaaccatgcagggctggaggagggaggtcgtgcactttgggaagctgcacctttgtggatctgtccgtttcagatggtaccagggattttaccctgccggctctcagccagtgacatgggccattgataatgtctacatcggtccccagtgtgaggagatgtgtaatggacaggggagctgtatcaatggaaccaaatgtatatgtgaccctggctactcaggtccaacctgtaaaataagcaccaaaaatcctgattttctcaaagatgatttcgaaggtcagctagaatctgatagattcttattaatgagtggtgggaaaccatctcgaaagtgtggaatcctttctagtggaaacaacctctttttcaatgaagatggcttgcgcatgttgatgacacgagacctggatttatcacatgctagatttgtgcagttcttcatgagactgggatgtggtaaaggcgttcctgaccccaggagtcaacccgtgctcctacagtattctctcaacggtggcctctcgtggagtcttcttcaggagttccttttcagcaattccagcaatgtgggcaggtacattgccctggagatacccttgaaagcccgttctggttctactcgccttcgctggtggcaaccgtctgagaatgggcacttctacagcccctgggttatcgatcagattcttattggaggaaatatttctggtaatacggtcttggaagatgatttcacaacccttgatagtaggaaatggctgcttcacccaggaggcaccaagatgcccgtgtgtggctctactggtgatgccctggtcttcattgaaaaggccagcacccgttacgtggtcagcacagacgttgccgtgaatgaggattccttcctacagatagacttcgctgcctcctgctcagtcacagactcttgttatgcgattgaattggaatactcagtagatcttggattgtcatggcacccattggtaagggactgtctgcctaccaatgtggaatgcagtcgctatcatctgcaacggatcctggtgtcagacactttcaacaagtggactagaatcactctgcctctccctccttataccaggtcccaagccactcgtttccgttggcatcaaccagctccttttgacaagcagcagacatgggcaatagataatgtctatatcggggatggctgcatagacatgtgcagtggccatgggagatgcatccagggaaactgcgtctgtgatgaacagtggggtggcctgtactgtgatgaccccgagacctctcttccaacccaactcaaagacaacttcaatcgagctccatccagtcagaactggctgactgtgaacggagggaaattgagtacagtgtgtggagccgtggcgtcgggaatggctctccatttcagtgggggttgtagtcgattattagtcactgtggatctaaacctcactaatgctgagttcatccaattttacttcatgtatgggtgcctgattacaccaaacaaccgtaaccaaggtgttctcttggaatattctgtcaatggaggcattacctggaacctgctcatggagattttctatgaccagtacagtaagcccggatttgtgaatatccttctccctcctgatgctaaagagattgccactcgcttccgctggtggcagccaagacatgacggcctggatcagaacgactgggccattgacaatgtcctcatctcaggctctgctgaccaaaggaccgttatgctggacaccttcagcagcgccccagtaccccagcatgagcgctcccctgcagatgccggccctgtcgggaggatcgcctttgacatgtttatggaagacaaaacttcagtgaatgagcactggctattccatgatgattgtacagtagaaagattctgtgactcccctgatggtgtgatgctctgtggcagtcatgatggacgggaggtgtatgcagtgacccatgacctgactcccactgaaggctggattatgcaattcaagatctcagttggatgtaaggtgtctgaaaaaattgcccagaatcaaattcatgtgcagtattctactgacttcggtgtgagttggaattatctggtccctcagtgcttgcctgctgacccaaaatgctctggaagtgtttctcagccatctgtattctttccaactaaagggtggaaaaggatcacctacccacttcctgaaagcttagtgggaaatccggtaaggtttaggttctatcagaagtactcagacatgcagtgggcaatcgataatttctacctgggccctggatgcttggacaactgcaggggccatggagattgcttaagggaacagtgcatctgtgatccgggatactcagggccaaactgctacttgacccacactctgaagactttcctgaaggaacgctttgacagtgaagaaatcaaacctgacttatggatgtccttagaaggtggaagtacttgcactgagtgtggaattcttgccgaggacactgcactctattttgggggatccactgtgagacaagcggttacacaagatttggatcttcgaggtgcaaagttcctgcaatactgggggcgcatcggtagtgagaacaacatgacctcttgccatcgtcccatctgccggaaggaaggcgtgctgttggactactctaccgatggaggaattacctggactttgctccatgagatggattaccagaaatacatttctgttagacacgactacatacttcttcctgaagatgccctcaccaacacaactcgacttcgctggtggcagccttttgtgatcagcaatggaattgtggtctctggggtggagcgtgctcagtgggcactggacaacattttgattggtggagcagaaatcaatcccagccaattggtggacacttttgatgatgaaggcacttcccatgaagaaaactggagtttttaccctaatgctgtaaggacagcaggattttgtggcaatccatcctttcacctctattggccaaataaaaagaaggacaagactcacaatgctctctcctcccgagaactcattatacagccaggatacatgatgcagtttaaaattgtggtgggttgtgaagccacttcttgtggtgaccttcattccgtaatgctggaatacactaaggatgcaagatcggattcctggcagctcgtacagacccagtgccttccttcctcttctaacagcattggctgctcccctttccagttccatgaagccaccatctacaactctgtcaacagctcaagctggaaaagaatcaccatccagctgcctgaccatgtctcctctagtgcaacacagttccgctggatccagaagggagaagaaactgagaagcaaagctgggcaattgaccacgtgtacattggagaggcttgccccaagctctgcagcgggcacggatactgcacgaccggtgccatctgcatctgcgacgagagcttccaaggtgatgactgctctgttttcagtcacgaccttcccagttatattaaagataattttgagtccgcaagagtcaccgaggcaaactgggagaccattcaaggtggagtcataggaagtggctgtgggcagctggccccctacgcccatggagactcactgtactttaatggctgtcagatcaggcaagcagctaccaagcctctggatctcactcgagcaagcaaaatcatgtttgttttgcaaattgggagcatgtcgcagacggacagctgcaacagtgacctgagtggcccccacgctgtggacaaggcagtgctgctgcaatacagcgtcaacaacgggatcacctggcatgtcatcgcccagcaccagccaaaggacttcacacaagctcagagagtgtcttacaatgtccccctggaggcacggatgaaaggagtcttactgcgctggtggcaaccacgccacaatggaacaggtcatgatcaatgggctttggaccatgtggaggtcgtcctcactcgcaaacaaaattacatgatgaatttttcacgacaacatgggctcagacatttctacaacagaagacgaaggtcacttaggcgatacccatgaagaatcaaaaagtttattttttttcttccaacatgtgatgtgttgctctccattcttttaaatctcgcactacatctgatatcaggaaatatctgtgaaggacttggtgattacctgaaagcccttctcaagaccgagtgtacaccactttcccacactgtgaactaatgacaagtgacttatttgctcataagtaaatgtcttcatgttgatgtgtccgtgaaagttgtgatctgttgtaatatcagttacagtggcagtattgacaataagaaacagtttaacagaaaaatgaaatttaagcacaaaaaatttaagagattttatgtttaaaatggcatttagcacagtatttaacattcttggtcacaaagctatttaagtggactgtatttcggctatgtctcatgttttatatgattaaattatcattgtttgtcctttatgtattctcttctacaatacaacacattgaaactgtatttacttgttatgttgtaatattttgctgctgaatttggggctacttatattctgcagaaaattaattgaaatacctattcaagaagatagttgtaaagatattgtatctcctttaatatactccttaaaaatgtatgttggtttagcgttgttttgtggataagaaaaatgcttgaccctgaaatattttctactttaaattgtggatgaagaccctatctcccacaaataagttcccatttccttgtctaaagatctttttttaagtgttctgtggctgatttactaacagtaactgccattttttgtctgtgataacagagtgatttgtaaaacagtggttgttttttcattgtgttttcttcgtggattgttttttctgcgggtcatattcataccttctgatgaagttgtacaacaccagcaacattataatggccctgtagctctgaatgctatttgtgtaactgaaaggttgcactctagggtgaaccaagctataaaagcccatgcttaaataaaaattatgtccaaaagccattgaa

SEQ ID NO: 17593 - DNA, 11571 bp, Homo sapiens
  source 1..11571: mol_type = unassigned DNA
ctcggcgggggcccgctcccaggcccgctcccgagcccgttccgctcccgtccgccttcttctcgccttctctccgcgtggctcctccgtcccggcgtctccaaaactgaatgagcgagcggcgcgtagggcgcgcggcggcggcggcggcggcggcggcatggagcgcagtggctgggcccggcagactttcctcctagcgctgttgctgggggcgacgctgagggcgcgcgcggcggctggctattacccccgcttttcgcccttctttttcctgtgcacccaccacggggagctggaaggggatggggagcagggcgaggtgctcatttccctgcatattgcgggcaaccccacctactacgttccgggacaagaataccatgtgacaatttcaacaagcaccttttttgacggcttgctggtgacaggactatacacatctacaagtgttcaggcatcacagagcattggaggttccagtgctttcggatttgggatcatgtctgaccaccagtttggtaaccagtttatgtgcagtgtggtagcctctcacgtgagtcacctgcccacaaccaacctcagtttcatctggattgctccacctgcgggcacaggctgtgtgaatttcatggctacagcaacacaccggggccaggttattttcaaagatgctttagcccagcagttgtgtgaacaaggagctccaacagatgtcactgtgcacccacatctagctgaaatacatagtgacagcattatcctgagagatgactttgactcctaccaccaactgcaattaaatccaaatatatgggttgaatgtaacaactgtgagactggagaacagtgtggcgcgattatgcatggcaatgccgtcaccttctgtgaaccatatggcccacgagaactgattaccacaggccttaatacaacaacagcttctgtcctccaattttccattgggtcaggttcatgtcgctttagttattcagaccccagcatcatcgtgttatatgccaagaataactctgcggactggattcagctagagaaaattagagccccttccaatgtcagcacaatcatccatatcctctaccttcctgaggacgccaaaggggagaatgtccaatttcagtggaagcaggaaaatcttcgtgtaggtgaagtgtatgaagcctgctgggccttagataacatcttgatcatcaattcagctcacagacaagtcgttttagaagatagtctcgacccagtggacacaggcaactggcttttcttcccaggagctacagttaagcatagctgtcagtcagatgggaactccatttatttccatggaaatgaaggcagcgagttcaattttgccaccaccagggatgtagatctttccacagaagatattcaagagcaatggtcagaagaatttgagagccagcctacaggatgggatgtcttgggagctgtcattggtacagaatgtggaacgatagaatcaggcttatcaatggtcttcctcaaagatggagagaggaaattatgcactccatccatggacactaccggttatgggaacctgaggttttactttgtgatgggaggaatttgtgaccctggaaattctcatgaaaatgacataatcctgtatgcaaaaattgaaggaagaaaagagcatataacactggataccctttcctattcctcatataaggttccgtctttggtttctgtggtcatcaatcctgaacttcagactcctgctaccaaattttgtctcaggcaaaagaaccatcaaggacataataggaatgtctgggctgtagactttttccatgtcttgcctgttctcccttctacaatgtctcacatgatacagttttccatcaatctgggatgtggaacgcatcagcctggtaacagtgtcagcttggaattttctaccaaccatgggcgctcctggtccctccttcacactgaatgcttacctgagatctgtgctggaccccacctcccccacagcactgtctactcctctgaaaactacagtgggtggaaccgaataacaattccccttcctaacgcagcactaacccggaacaccaggattcgctggagacaaacaggaccaatccttggaaacatgtgggcaattgataatgtttatattggcccgtcatgtctcaaattctgttctggcagaggacagtgcactagacatggttgcaagtgtgaccctggattttctggcccagcttgtgagatggcatcccagacattcccaatgtttatttctgaaagctttggcagttccaggctctcctcttaccataacttttactctatccgtggtgctgaagtcagctttggttgtggtgtcttggccagtggtaaggccctggttttcaacaaagatgggcggcgtcagctaattacatctttccttgacagctcacaatccaggtttctccagttcacactgagactggggagcaaatctgttctgagcacgtgcagagcccctgatcagcctggtgaaggagttttgttgcattattcttatgataatgggataacttggaaactcctggagcattattcatatctcagctatcatgagcccagaataatctccgtagaactaccaggtgatgcaaagcagtttggaattcagttcagatggtggcaaccgtatcattcttcccagagagaagatgtatgggctattgatgagattatcatgacatctgtgcttttcaacagcattagtcttgactttaccaatcttgtggaggtcactcagtctctgggattctaccttggaaatgttcagccatactgtggccacgactggaccctttgttttacaggagattctaaacttgcctcaagtatgcgctatgtggaaacacaatcaatgcagataggagcatcctatatgattcagttcagtttggtgatgggatgtggccagaaatacaccccacacatggacaaccaggtgaagctggagtactcaaccaaccacggccttacctggcacctcgtccaagaagaatgccttccaagtatgccaagttgtcaggaatttacatcagcaagtatttaccatgccagtgagtttacacagtggaggagagtcatagtgcttcttccccagaaaacttggtccagtgctacccgtttccgctggagccagagctattacacagctcaagacgagtgggctttggacagcatttacattgggcagcagtgccccaacatgtgcagtgggcatggctcatgcgatcatggcatatgcaggtgtgaccaggggtaccaaggcactgaatgccacccagaagctgcccttccgtccacaattatgtcagattttgagaaccagaatggctgggagtctgactggcaagaagttattgggggagaaattgtaaaaccagaacaagggtgtggtgtcatctcttctggatcatctctgtacttcagcaaggctgggaaaagacagctggtgagttgggacctggatacttcttgggtggactttgtccagttctacatccagataggcggagagagtgcttcatgcaacaagcctgacagcagagaggagggcgtcctccttcagtacagcaacaatgggggcatccagtggcacctgctagcagagatgtacttttcagacttcagcaaacccagatttgtctatctggagcttccagctgctgccaagaccccttgcaccaggttccgctggtggcagcccgtgttctcaggggaggactatgaccagtgggcagtcgatgacatcatcattctgtccgagaagcagaagcagatcatcccagttatcaatccaactttacctcagaacttttatgagaagccagcttttgattaccctatgaatcagatgagtgtgtggttgatgttggctaatgaaggaatggttaaaaatgaaaccttctgtgctgccacaccatcagcaatgatatttggaaaatcagatggagatcgatttgcagtaactcgagatttgaccctgaaacctggatatgtgctacagttcaagctaaacataggttgtgccaatcaattcagcagtactgctccagttcttcttcagtactctcatgatgctggtatgtcctggtttctggtgaaagaaggctgttacccggcttctgcaggcaaaggatgcgaaggaaactccagagaactaagtgagcccaccatgtatcacacaggggactttgaagaatggacaagaatcaccattgttattccaaggtctcttgcatccagcaagaccagattccgatggatccaggagagcagctcacagaaaaacgtgcctccatttggtttagatggagtgtacatatccgagccttgtcccagttactgcagtggccatggggactgcatttcaggagtgtgtttctgtgacctgggatatactgctgcacaaggaacctgtgtgtcaaatgtccccaatcacaatgagatgttcgataggtttgaggggaagctcagccctctgtggtacaagataacaggtgcccaggttggaactggctgtggaacacttaacgatggcaaatctctctacttcaatggccctgggaaaagggaagcccggacggtccctctggacaccaggaatatcagacttgttcaattttatatacaaattggaagcaaaacttcaggcattacctgcatcaaaccaagaactagaaatgaagggcttattgttcagtattcaaatgacaatgggatactctggcatttgcttcgagagttggacttcatgtccttcctggaaccacagatcatttccattgacctgccacaggacgcgaagacacctgcaacggcatttcgatggtggcaaccgcaacatgggaagcattcagcccagtgggctttggatgatgttcttataggaatgaatgacagctctcaaactggatttcaagacaaatttgatggctctatagatttgcaagccaactggtatcgaatccaaggaggtcaagttgatattgactgtctctctatggatactgctctgatattcactgaaaacataggaaaacctcgttatgctgagacctgggattttcatgtgtcagcatctacctttttgcagtttgaaatgagcatgggctgtagcaagcccttcagcaactcccacagtgtacagctccagtattctctgaacaatggcaaggactggcatcttgtcaccgaagagtgtgttcctccaaccattggctgtctgcattacacggaaagttcaatttacacctcggaaagattccagaattggaagcggatcactgtctaccttccactctccaccatttctcccaggacccggttcagatggattcaggccaactacactgtgggggctgattcctgggcgattgataatgttgtactggcctcagggtgcccttggatgtgctcaggacgagggatttgtgatgctggacgctgtgtgtgtgaccggggctttggtggaccctattgtgttcctgttgttcctctgccctcgattcttaaagacgatttcaatgggaatttacatcctgacctttggcctgaagtgtatggtgcagagagggggaatctgaatggtgaaaccatcaaatctggaacatctctaatttttaaaggggaaggactaaggatgcttatttcaagagatctagattgtacaaatacaatgtatgtccagttttcacttagatttatagcaaaaagtaccccagagagatctcactctattctgttacaattctccatcagtggaggaatcacttggcacctgatggatgaattttactttcctcaaacaacgaatatacttttcatcaatgttcccttgccatacactgcccaaaccaatgctacaagattcagactctggcaaccttataataacggtaagaaagaagaaatctggattgttgatgacttcattatcgatggaaataatgtaaacaaccctgtgatgctcttggatacatttgattttgggcccagagaagacaattggtttttctatcctggtggtaacatcggtctttattgtccatattcttcaaagggggcacctgaagaagattcagctatggtgtttgtttcaaatgaagttggtgagcattccattaccacccgtgacctaaatgtgaatgagaacaccatcatacaatttgagatcaacgttggctgttcgactgatagctcatccgcggatccagtgagactggaattttcaagggacttcggggcgacctggcaccttctgctgcccctctgctaccacagcagcagccacgtcagctctttatgctccaccgagcaccaccccagcagcacctactacgcaggaaccatgcagggctggaggagggaggtcgtgcactttgggaagctgcacctttgtggatctgtccgtttcagatggtaccagggattttaccctgccggctctcagccagtgacatgggccattgataatgtctacatcggtccccagtgtgaggagatgtgtaatggacaggggagctgtatcaatggaaccaaatgtatatgtgaccctggctactcaggtccaacctgtaaaataagcaccaaaaatcctgattttctcaaagatgatttcgaaggtcagctagaatctgatagattcttattaatgagtggtgggaaaccatctcgaaagtgtggaatcctttctagtggaaacaacctctttttcaatgaagatggcttgcgcatgttgatgacacgagacctggatttatcacatgctagatttgtgcagttcttcatgagactgggatgtggtaaaggcgttcctgaccccaggagtcaacccgtgctcctacagtattctctcaacggtggcctctcgtggagtcttcttcaggagttccttttcagcaattccagcaatgtgggcaggtacattgccctggagatacccttgaaagcccgttctggttctactcgccttcgctggtggcaaccgtctgagaatgggcacttctacagcccctgggttatcgatcagattcttattggaggaaatatttctggtaatacggtcttggaagatgatttcacaacccttgatagtaggaaatggctgcttcacccaggaggcaccaagatgcccgtgtgtggctctactggtgatgccctggtcttcattgaaaaggccagcacccgttacgtggtcagcacagacgttgccgtgaatgaggattccttcctacagatagacttcgctgcctcctgctcagtcacagactcttgttatgcgattgaattggaatactcagtagatcttggattgtcatggcacccattggtaagggactgtctgcctaccaatgtggaatgcagtcgctatcatctgcaacggatcctggtgtcagacactttcaacaagtggactagaatcactctgcctctccctccttataccaggtcccaagccactcgtttccgttggcatcaaccagctccttttgacaagcagcagacatgggcaatagataatgtctatatcggggatggctgcatagacatgtgcagtggccatgggagatgcatccagggaaactgcgtctgtgatgaacagtggggtggcctgtactgtgatgaccccgagacctctcttccaacccaactcaaagacaacttcaatcgagctccatccagtcagaactggctgactgtgaacggagggaaattgagtacagtgtgtggagccgtggcgtcgggaatggctctccatttcagtgggggttgtagtcgattattagtcactgtggatctaaacctcactaatgctgagttcatccaattttacttcatgtatgggtgcctgattacaccaaacaaccgtaaccaaggtgttctcttggaatattctgtcaatggaggcattacctggaacctgctcatggagattttctatgaccagtacagtaagcccggatttgtgaatatccttctccctcctgatgctaaagagattgccactcgcttccgctggtggcagccaagacatgacggcctggatcagaacgactgggccattgacaatgtcctcatctcaggctctgctgaccaaaggaccgttatgctggacaccttcagcagcgccccagtaccccagcatgagcgctcccctgcagatgccggccctgtcgggaggatcgcctttgacatgtttatggaagacaaaacttcagtgaatgagcactggctattccatgatgattgtacagtagaaagattctgtgactcccctgatggtgtgatgctctgtggcagtcatgatggacgggaggtgtatgcagtgacccatgacctgactcccactgaaggctggattatgcaattcaagatctcagttggatgtaaggtgtctgaaaaaattgcccagaatcaaattcatgtgcagtattctactgacttcggtgtgagttggaattatctggtccctcagtgcttgcctgctgacccaaaatgctctggaagtgtttctcagccatctgtattctttccaactaaagggtggaaaaggatcacctacccacttcctgaaagcttagtgggaaatccggtaaggtttaggttctatcagaagtactcagacatgcagtgggcaatcgataatttctacctgggccctggatgcttggacaactgcaggggccatggagattgcttaagggaacagtgcatctgtgatccgggatactcagggccaaactgctacttgacccacactctgaagactttcctgaaggaacgctttgacagtgaagaaatcaaacctgacttatggatgtccttagaaggtggaagtacttgcactgagtgtggaattcttgccgaggacactgcactctattttgggggatccactgtgagacaagcggttacacaagatttggatcttcgaggtgcaaagttcctgcaatactgggggcgcatcggtagtgagaacaacatgacctcttgccatcgtcccatctgccggaaggaaggcgtgctgttggactactctaccgatggaggaattacctggactttgctccatgagatggattaccagaaatacatttctgttagacacgactacatacttcttcctgaagatgccctcaccaacacaactcgacttcgctggtggcagccttttgtgatcagcaatggaattgtggtctctggggtggagcgtgctcagtgggcactggacaacattttgattggtggagcagaaatcaatcccagccaattggtggacacttttgatgatgaaggcacttcccatgaagaaaactggagtttttaccctaatgctgtaaggacagcaggattttgtggcaatccatcctttcacctctattggccaaataaaaagaaggacaagactcacaatgctctctcctcccgagaactcattatacagccaggatacatgatgcagtttaaaattgtggtgggttgtgaagccacttcttgtggtgaccttcattccgtaatgctggaatacactaaggatgcaagatcggattcctggcagctcgtacagacccagtgccttccttcctcttctaacagcattggctgctcccctttccagttccatgaagccaccatctacaactctgtcaacagctcaagctggaaaagaatcaccatccagctgcctgaccatgtctcctctagtgcaacacagttccgctggatccagaagggagaagaaactgagaagcaaagctgggcaattgaccacgtgtacattggagaggcttgccccaagctctgcagcgggcacggatactgcacgaccggtgccatctgcatctgcgacgagagcttccaaggtgatgactgctctgttttcagtcacgaccttcccagttatattaaagataattttgagtccgcaagagtcaccgaggcaaactgggagaccattcaaggtggagtcataggaagtggctgtgggcagctggccccctacgcccatggagactcactgtactttaatggctgtcagatcaggcaagcagctaccaagcctctggatctcactcgagcaagcaaaatcatgtttgttttgcaaattgggagcatgtcgcagacggacagctgcaacagtgacctgagtggcccccacgctgtggacaaggcagtgctgctgcaatacagcgtcaacaacgggatcacctggcatgtcatcgcccagcaccagccaaaggacttcacacaagctcagagagtgtcttacaatgtccccctggaggcacggatgaaaggagtcttactgcgctggtggcaaccacgccacaatggaacaggtcatgatcaatgggctttggaccatgtggaggtcgtcctagtaagcactcgcaaacaaaattacatgatgaatttttcacgacaacatgggctcagacatttctacaacagaagacgaaggtcacttaggcgatacccatgaagaatcaaaaagtttattttttttcttccaacatgtgatgtgttgctctccattcttttaaatctcgcactacatctgatatcaggaaatatctgtgaaggacttggtgattacctgaaagcccttctcaagaccgagtgtacaccactttcccacactgtgaactaatgacaagtgacttatttgctcataagtaaatgtcttcatgttgatgtgtccgtgaaagttgtgatctgttgtaatatcagttacagtggcagtattgacaataagaaacagtttaacagaaaaatgaaatttaagcacaaaaaatttaagagattttatgtttaaaatggcatttagcacagtatttaacattcttggtcacaaagctatttaagtggactgtatttcggctatgtctcatgttttatatgattaaattatcattgtttgtcctttatgtattctcttctacaatacaacacattgaaactgtatttacttgttatgttgtaatattttgctgctgaatttggggctacttatattctgcagaaaattaattgaaatacctattcaagaagatagttgtaaagatattgtatctcctttaatatactccttaaaaatgtatgttggtttagcgttgttttgtggataagaaaaatgcttgaccctgaaatattttctactttaaattgtggatgaagaccctatctcccacaaataagttcccatttccttgtctaaagatctttttttaagtgttctgtggctgatttactaacagtaactgccattttttgtctgtgataacagagtgatttgtaaaacagtggttgttttttcattgtgttttcttcgtggattgttttttctgcgggtcatattcataccttctgatgaagttgtacaacaccagcaacattataatggccctgtagctctgaatgctatttgtgtaactgaaaggttgcactctagggtgaaccaagctataaaagcccatgcttaaataaaaattatgtccaaaagccattgaa

SEQ ID NO: 17594 - DNA, 1078 bp, Homo sapiens
  source 1..1078: mol_type = unassigned DNA
cgtctgaaccagattcacatgtttgatatttggatgcagagaaaatggggcagaaagcatcgcaacagttggctctgaaggacagcaaagaggtgcccgtcgtctgtgaggtggtcagtgaagctatagtccatgcagctcagaaactgaaggagtaccttggatttgaatatcctccaagtaaactctgcccagctgcaaatactctgaatgagatcttcttaatccatttcatcactttctgccaagaaaagggagttgatgagtggctgaccaccaccaagatgaccaagcaccaagccttcctgtttggtgcagactggatttggaccttttggggatccaacaagcaaataaagcttcagctcgcagtacagactctgcagatgtcttcacctcctcctgtggaatctaagccttgtgacctttccaatccagaatcaagggtagaggagtcttcctggaagaaaagtagatttgataagctggaagaattctgtaacttaataggagaggattgcctgggtctgtttatcatctttggtatgccaggaaagcctaaagacatcaggggagttgtcctggacagtgtcaaaagtcagatggtgaggagccatctgccaggagggaaggctgtggctcagtttgtcctggaaactgaagattgtgtgttcatcaaagagctgctcagaaattgtctgagtaagaaagacgggctgagagaggtgggcaaggtttatatcagcattctctgacttggatatgtattatgtgagtggcctgtaagaggaaaagaaaaaaagattctaataagcaagctcacctatttgcatcattccagcatgggattttttttcatttgttttcccattgattgaaaatgattactgggatcaaagtacattcatgtcgcaattacagagagagagagaaaaaaagaaaaccctggctctgcctatgatttaaaaacagttcaggaaaagttataatttagtttaatatttcattcacttattcaataataaaaatggaagagagataataaagtcacatttaaagtttgatttgcaaaaaaaaa

SEQ ID NO: 17595 - DNA, 583 bp, Homo sapiens
  source 1..583: mol_type = unassigned DNA
agaggaagcccagcaacttctgctctttcttaatttctagaaaagagtgaagagaggccttttcaaagttcgcaggatcgggcctttttgtgctccactttggaacaaatcggaagctagggccttccagcagaggaagaaccgatgctggaacgtcgttgcaggggccccctggccatgggcctggcccagccccgactcctttctgggccctcccaggagtcaccccagaccctggggaaggagtcccgcgggctgaggcaacaaggcacgtcagtggcccagtctggtgcccaagccccaggcagggcccatcgctgtgcccactgtcgaaggcacttccctggctgggtggctctgtggcttcacacccgccggtgccaggcccggctgcccttgccctgccctgagtgtggccgtcgctttcgccatgcccccttcttagcactgcaccgccaggtccatgctgctgccaccccagacctgggctttgcctgccacctctgtgggcagagcttccgaggctgggtggccctggttctgcatctgcgggcccattcagctgcaaagcggcccatcgctt

SEQ ID NO: 17596 - DNA, 464 bp, Homo sapiens
  source 1..464: mol_type = unassigned DNA
aaaagagtgaagagaggccttttcaaagttcgcaggatcgggcctttttgtgctccactttggaacaaatcggaagctagggccttccaggtaaggctggcctctctgcagtcagaggtctgagctctgccatggggataggggtgtctttattactgcagttttctctaacacctgggggctaccggagtgtgggccgaagcaggcgctgcagccgcggaagtatccccaggaacatccccaagaggagctggaaaaagcctcatccccagctctgcagtctccagggtagagtctggcctttgctgtgctcccaaaccacgccacaacaggggtgcacgggcgtccccatcccggcggaaggaaatggccctttctcatatcctggggtcttccctgtgcacagtctgacactgggaatgagtgacctttgtgttccctgagaagagagagtgcgctctagg

SEQ ID NO: 17597 - DNA, 3182 bp, Homo sapiens
  source 1..3182: mol_type = unassigned DNA
ctttttgtgctccactttggaacaaatcggaagctagggccttccaggtaaggctggcctctctgcagtcagaggtctgagctctgccatggggataggggtgtctttattactgcagttttctctaacacctgggggctaccggagtgtgggccgaagcaggcgctgcagccgcggaagtatccccaggaacatccccaagaggagctggaaaaagcctcatccccagctctgcagtctccaggggagctcagtgtctgtttgtccagcttctcagagttgctgtgcagctcggatgtggcataggaaacagcagacacagggagagggcagcataaggcactgtagggagcagtggccacattttctgcagaggaagaaccgatgctggaacgtcgttgcaggggccccctggccatgggcctggcccagccccgactcctttctgggccctcccaggagtcaccccagaccctggggaaggagtcccgcgggctgaggcaacaaggcacgtcagtggcccagtctggtgcccaagccccaggcagggcccatcgctgtgcccactgtcgaaggcacttccctggctgggtggctctgtggcttcacacccgccggtgccaggcccggctgcccttgccctgccctgagtgtggccgtcgctttcgccatgcccccttcttagcactgcaccgccaggtccatgctgctgccaccccagacctgggctttgcctgccacctctgtgggcagagcttccgaggctgggtggccctggttctgcatctgcgggcccattcagctgcaaagcggcccatcgcttgtcccaaatgcgagagacgcttctggcgacgaaagcagcttcgagctcatctgcggcggtgccaccctcccgccccggaggcccggcccttcatatgcggcaactgtggccggagctttgcccagtgggaccagctagttgcccacaagcgggtgcacgtagctgaggccctggaggaggccgcagccaaggctctggggccccggcccaggggccgccccgcggtgaccgccccccggcccggtggagatgccgtcgaccgccccttccagtgtgcctgttgtggcaagcgcttccggcacaagcccaacttgatcgctcaccgccgcgtgcacacgggcgagcggccccaccagtgccccgagtgcgggaagcgctttaccaataagccctatctgacttcgcaccggcgcatccacaccggcgagaagccctacccgtgcaaagagtgcggccgccgcttccggcacaaacccaacctgctgtctcacagcaagattcacaagcgatccgaggggtcggcccaggccgcccccggcccggggagcccccagctgccagccggcccccaggagtccgcggccgagcccaccccggcggtacctctgaaaccggcccaggagccgccgccaggggccccgccagagcacccgcaggacccgatcgaagcccccccctccctctacagctgcgacgactgcggcaggagcttccggctggagcgcttcctgcgggcccaccagcggcagcacaccggggagcggcccttcacctgcgccgagtgcgggaagaacttcggcaagaagacgcacctggtggcgcactcgcgcgtgcactccggcgagcggcccttcgcctgcgaggagtgcggccgccgcttctcccagggcagccatctggcggcgcatcggcgcgaccacgcccccgatcggcccttcgtgtgtcccgactgcggcaaggccttccgccacaaaccctacctggcggcgcaccggcgcatccacaccggcgagaagccctacgtctgccccgactgcggcaaagccttcagccagaagtccaacctggtgtcgcaccggcgcatccacacgggcgagcggccctacgcctgtcccgactgcgaccgcagcttcagccagaagtccaacctcatcacccaccgcaagagccacatccgggacggcgccttctgctgtgccatctgtggccagaccttcgacgacgaggagagactcctggcccaccagaagaagcacgatgtctgagacggtgggcggggccgtgttggctgagagagggctggggtccttcgtggtgggagtcgcagtgggctgggggtgcctgcctagtgctggagtaggggacaatgggaatcctagaggggatggaagacgcggggagtgagctgggtgggccctgctagcgagagaggtcaaccccggtggccagggaacccacttccaagcgcagggacgccggcctccagctggtgtgtgctaaggctccgtcctgactgccctgtgccctggaaaagcagcaatagcatccgccccttagagccctctggctagaggagccaccagtggaaaggaagaccctccatcctctggtattaacgccttaatgcccctgtcttttactgtaagttacttaagatcatttttggaagcaggcgtggtagagtcctgtaaatgaatgctctgggctagatacagcttggagaacctgctggccttgttagacagcacttgggcctttgccagcagcaagaggtgaagcgaagccactcttacctctcccttcccctcccacctgccccctgcgtaggcacccagacttggagagacccgtctgctgttaatacttccatcctcttccttcccaaagagcagatcccaaggcatttactccttggtctgtctcgctttatctgtcgcccctcccagcgctgagagcctcccctggctgtcagcagcactgtgtccaggctcttgtctgaacaccgcagcccctccttcgctccttccagagctcagcatgtcacggcaaggactgccgcattggtgatggagggccagctgaggggaagttgctggtgagtttccttttctccatttctagcatatggacacctggcctctgcttgagcacttaggtgacaggaacttccgcacctcctgaggccctggatgattctaattgttagaaattctaattgttagaaatccttccttataatgaatgaattctgctttcctataatttctacctattgggccttgttctgttctctggaactaaacagaacaaccatttacccctccttttcaaactagagaataaagatttggttttagaa

SEQ ID NO: 17598 - DNA, 1022 bp, Homo sapiens
  source 1..1022: mol_type = unassigned DNA
cggcggggggaggttggggacgggcctggcagttgtgaactcgaacctgccgctgtcgccgcggcggggcggggagcgagagtgggccgcggaggccggccttcgggctccatggacgggcgccgcgtccctgcacagcccgccgcagagcagaggaagaaccgatgctggaacgtcgttgcaggggccccctggccatgggcctggcccagccccgactcctttctgggccctcccaggagtcaccccagaccctggggaaggagtcccgcgggctgaggcaacaaggcacgtcagtggcccagtctggtgcccaagccccaggcagggcccatcgctgtgcccactgtcgaaggcacttccctggctgggtggctctgtggcttcacacccgccggtgccaggcccggctgcccttgccctgccctgagtgtggccgtcgctttcgccatgcccccttcttagcactgcaccgccaggtccatgctgctgccaccccagacctgggctttgcctgccacctctgtgggcagagcttccgaggctgggtggccctggttctgcatctgcgggcccattcagctgcaaagcggcccatcgcttgtcccaaatgcgagagacgcttctggcgacgaaagcagcttcgagctcatctgcggcggtgccaccctcccgccccggaggcccggcccttcatatgcggcaactgtggccggagctttgcccagtgggaccagctagttgcccacaagcgggtgcacgtagctgaggccctggaggaggccgcagccaaggctctggggccccggcccaggggccgccccgcggtgaccgccccccggcccggtggagatgccgtcgaccgccccttccagtgtgcctgttgtggcaagcgcttccggcacaagcccaacttgatcgctcaccgccgcgtgcacacgggcgagcggccccaccagtgccccgagtgcgggaagcgctttaccaataagccctatctgacttcgcaccggcgcatccac

SEQ ID NO: 17599 - DNA, 2058 bp, Homo sapiens
  source 1..2058: mol_type = unassigned DNA
ggaggttggggacgggcctggcagttgtgaactcgaacctgccgctgtcgccgcggcggggcggggagcgagagtgggccgcggaggccggccttcgggctccatggacgggcgccgcgtccctgcacagcccgccgcagaggtaaggctggcctctctgcagtcagaggtctgagctctgccatggggataggggtgtctttattactgcagttttctctaacacctgggggctaccggagtgtgggccgaagcaggcgctgcagccgcggaagtatccccaggaacatccccaagaggagctggaaaaagcctcatccccagctctgcagtctccaggcagaggaagaaccgatgctggaacgtcgttgcaggggccccctggccatgggcctggcccagccccgactcctttctgggccctcccaggagtcaccccagaccctggggaaggagtcccgcgggctgaggcaacaaggcacgtcagtggcccagtctggtgcccaagccccaggcagggcccatcgctgtgcccactgtcgaaggcacttccctggctgggtggctctgtggcttcacacccgccggtgccaggcccggctgcccttgccctgccctgagtgtggccgtcgctttcgccatgcccccttcttagcactgcaccgccaggtccatgctgctgccaccccagacctgggctttgcctgccacctctgtgggcagagcttccgaggctgggtggccctggttctgcatctgcgggcccattcagctgcaaagcggcccatcgcttgtcccaaatgcgagagacgcttctggcgacgaaagcagcttcgagctcatctgcggcggtgccaccctcccgccccggaggcccggcccttcatatgcggcaactgtggccggagctttgcccagtgggaccagctagttgcccacaagcgggtgcacgtagctgaggccctggaggaggccgcagccaaggctctggggccccggcccaggggccgccccgcggtgaccgccccccggcccggtggagatgccgtcgaccgccccttccagtgtgcctgttgtggcaagcgcttccggcacaagcccaacttgatcgctcaccgccgcgtgcacacgggcgagcggccccaccagtgccccgagtgcgggaagcgctttaccaataagccctatctgacttcgcaccggcgcatccacaccggcgagaagccctacccgtgcaaagagtgcggccgccgcttccggcacaaacccaacctgctgtctcacagcaagattcacaagcgatccgaggggtcggcccaggccgcccccggcccggggagcccccagctgccagccggcccccaggagtccgcggccgagcccaccccggcggtacctctgaaaccggcccaggagccgccgccaggggccccgccagagcacccgcaggacccgatcgaagcccccccctccctctacagctgcgacgactgcggcaggagcttccggctggagcgcttcctgcgggcccaccagcggcagcacaccggggagcggcccttcacctgcgccgagtgcgggaagaacttcggcaagaagacgcacctggtggcgcactcgcgcgtgcactccggcgagcggcccttcgcctgcgaggagtgcggccgccgcttctcccagggcagccatctggcggcgcatcggcgcgaccacgcccccgatcggcccttcgtgtgtcccgactgcggcaaggccttccgccacaaaccctacctggcggcgcaccggcgcatccacaccggcgagaagccctacgtctgccccgactgcggcaaagccttcagccagaagtccaacctggtgtcgcaccggcgcatccacacgggcgagcggccctacgcctgtcccgactgcgaccgcagcttcagccagaagtccaacctcatcacccaccgcaagagccacatccgggacggcgccttctgctgtgccatctgtggccagaccttcgacgacgaggagagactcctggcccaccagaagaagcacgatgtctga

SEQ ID NO: 17600 - DNA, 1192 bp, Homo sapiens
  source 1..1192: mol_type = unassigned DNA
ggacgggcctggcagttgtgaactcgaacctgccgctgtcgccgcggcggggcggggagcgagagtgggccgcggaggccggccttcgggctccatggacgggcgccgcgtccctgcacagcccgccgcagagttttctctaacacctgggggctaccggagtgtgggccgaagcaggcgctgcagccgcggaagtatccccaggaacatccccaagaggagctggaaaaagcctcatccccagctctgcagtctccaggaggaagaaccgatgctggaacgtcgttgcaggggccccctggccatgggcctggcccagccccgactcctttctgggccctcccaggagtcaccccagaccctggggaaggagtcccgcgggctgaggcaacaaggcacgtcagtggcccagtctggtgcccaagccccaggcagggcccatcgctgtgcccactgtcgaaggcacttccctggctgggtggctctgtggcttcacacccgccggtgccaggcccggctgcccttgccctgccctgagtgtggccgtcgctttcgccatgcccccttcttagcactgcaccgccaggtccatgctgctgccaccccagacctgggctttgcctgccacctctgtgggcagagcttccgaggctgggtggccctggttctgcatctgcgggcccattcagctgcaaagcggcccatcgcttgtcccaaatgcgagagacgcttctggcgacgaaagcagcttcgagctcatctgcggcggtgccaccctcccgccccggaggcccggcccttcatatgcggcaactgtggccggagctttgcccagtgggaccagctagttgcccacaagcgggtgcacgtagctgaggccctggaggaggccgcagccaaggctctggggccccggcccaggggccgccccgcggtgaccgccccccggcccggtggagatgccgtcgaccgccccttccagtgtgcctgttgtggcaagcgcttccggcacaagcccaacttgatcgctcaccgccgcgtgcacacgggcgagcggccccaccagtgccccgagtgcgggaagcgctttaccaataagccctatctgacttcgcaccggcgcatccacaccggcgagaagccctacccgtgcaaagagtgcggccgccgcttccggcacaaacccaacctg

SEQ ID NO: 17601 - DNA, 1064 bp, Homo sapiens
  source 1..1064: mol_type = unassigned DNA
gacgggcctggcagttgtgaactcgaacctgccgctgtcgccgcggcggggcggggagcgagagtgggccgcggaggccggccttcgggctccatggacgggcgccgcgtccctgcacagcccgccgcagaggtaaggctggcctctctgcagtcagaggtctgagctctgccatggggataggggtgtctttattactgcagttttctctaacacctgggggctaccggagtgtgggccgaagcaggcgctgcagccgcggaagtatccccaggaacatccccaagaggagctggaaaaagcctcatccccagctctgcagtctccagggtagagtctggcctttgctgtgctcccaaaccacgccacaacaggggtgcacgggcgtccccatcccggcggaaggaaatggccctttctcatatcctggggtcttccctgtgcacagtctgacactgggaatgagtgacctttgtgttccctgagaagagagagtgcgctctagggaatttagaaggatgtgtctggagcttgtgagcaggcacagaagggcccttaggagcctaactgcttccttcctccttccgcggaggaggctcctgtgcaggaatctgggctcccctgagctgtggaagagctgaacatggggcagcccctggcgaggttggggcaggaccgggcaggggactgagattgcagtctcatcttccctccccttctattgccccagtaatctccagcaccccgagggaggcagagccggtgatcaggccccgagggcagcaggctgtgggtgttccttggattcagggagagccttccttcctgcaatgtcctaatttgtgtgggtggaagagggcaggcgggcagaatgggggcacagtctgggcaggcggtggtctggcgttagactgccgggagtagcacccagggctctgctcctgttccccgagaagggctgttctcacttgtcctccagcctcctacggagactgcagttagtgatgctgaaagtgcctcccctgtggggctaggaatgaaaagctatagacacctttttctct

SEQ ID NO: 17602 - DNA, 1029 bp, Homo sapiens
  source 1..1029: mol_type = unassigned DNA
cgggcctggcagttgtgaactcgaacctgccgctgtcgccgcggcggggcggggagcgagagtgggccgcggaggccggccttcgggctccatggacgggcgccgcgtccctgcacagcccgccgcagaggtaaggctggcctctctgcagtcagaggtctgagctctgccatggggataggggtgtctttattactgcagttttctctaacacctgggggctaccggagtgtgggccgaagcaggcgctgcagccgcggaagtatccccaggaacatccccaagaggagctggaaaaagcctcatccccagctctgcagtctccaggggagctcagtgtctgtttgtccagcttctcagagttgctgtgcagctcggatgtggcataggaaacagcagacacagggagagggcagcataaggcactgtagggagcagtggccacattttctgcagaggaagaaccgatgctggaacgtcgttgcaggggccccctggccatgggcctggcccagccccgactcctttctgggccctcccaggagtcaccccagaccctggggaaggagtcccgcgggctgaggcaacaaggcacgtcagtggcccagtctggtgcccaagccccaggcagggcccatcgctgtgcccactgtcgaaggcacttccctggctgggtggctctgtggcttcacacccgccggtgccaggcccggctgcccttgccctgccctgagtgtggccgtcgctttcgccatgcccccttcttagcactgcaccgccaggtccatgctgctgccaccccagacctgggctttgcctgccacctctgtgggcagagcttccgaggctgggtggccctggttctgcatctgcgggcccattcagctgcaaagcggcccatcgcttgtcccaaatgcgagagacgcttctggcgacgaaagcagcttcgagctcatctgcggcggtgccaccctcccgccccggaggcccggcccttcatatgcggcaactgtggccggagctttgccc

SEQ ID NO: 17603 - DNA, 1262 bp, Homo sapiens
  source 1..1262: mol_type = unassigned DNA
agttgtgaactcgaacctgccgctgtcgccgcggcggggcggggagcgagagtgggccgcggaggccggccttcgggctccatggacgggcgccgcgtccctgcacagcccgccgcagagttttctctaacacctgggggctaccggagtgtgggccgaagcaggcgctgcagccgcggaagtatccccaggaacatccccaagaggagctggaaaaagcctcatccccagctctgcagtctccaggcagaggaagaaccgatgctggaacgtcgttgcaggggccccctggccatgggcctggcccagccccgactcctttctgggccctcccaggagtcaccccagaccctggggaaggagtcccgcgggctgaggcaacaaggcacgtcagtggcccagtctggtgcccaagccccaggcagggcccatcgctgtgcccactgtcgaaggcacttccctggctgggtggctctgtggcttcacacccgccggtgccaggcccggctgcccttgccctgccctgagtgtggccgtcgctttcgccatgcccccttcttagcactgcaccgccaggtccatgctgctgccaccccagacctgggctttgcctgccacctctgtgggcagagcttccgaggctgggtggccctggttctgcatctgcgggcccattcagctgcaaagcggcccatcgcttgtcccaaatgcgagagacgcttctggcgacgaaagcagcttcgagctcatctgcggcggtgccaccctcccgccccggaggcccggcccttcatatgcggcaactgtggccggagctttgcccagtgggaccagctagttgcccacaagcgggtgcacgtagctgaggccctggaggaggccgcagccaaggctctggggccccggcccaggggccgccccgcggtgaccgccccccggcccggtggagatgccgtcgaccgccccttccagtgtgcctgttgtggcaagcgcttccggcacaagcccaacttgatcgctcaccgccgcgtgcacacgggcgagcggccccaccagtgccccgagtgcgggaagcgctttaccaataagccctatctgacttcgcaccggcgcatccacaccggcgagaagccctacccgtgcaaagagtgcggccgccgcttccggcacaaacccaacctgctgtctcacagcaagattcacaagcgatccgaggggtcggcccaggccgcccccggcccggggagcccccagctgccagc

SEQ ID NO: 17604 - DNA, 672 bp, Homo sapiens
  source 1..672: mol_type = unassigned DNA
gtgaactcgaacctgccgctgtcgccgcggcggggcggggagcgagagtgggccgcggaggccggccttcgggctccatggacgggcgccgcgtccctgcacagcccgccgcagaggtacggccggggcaggggcgcggggccaccgcgggcccgcggggggccgctccacctgcggggcgcgtgaccgtgagtgtgcgcgaccgtgtgtaaggctggcctctctgcagtcagaggtctgagctctgccatggggataggggtgtctttattactgcagttttctctaacacctgggggctaccggagtgtgggccgaagcaggcgctgcagccgcggaagtatccccaggaacatccccaagaggagctggaaaaagcctcatccccagctctgcagtctccagggtagagtctggcctttgctgtgctcccaaaccacgccacaacaggggtgcacgggcgtccccatcccggcggaaggaaatggccctttctcatatcctggggtcttccctgtgcacagtctgacactgggaatgagtgacctttgtgttccctgagaagagagagtgcgctctagggaatttagaaggatgtgtctggagcttgtgagcaggcacagaagggcccttaggagcctaactgcttccttcctccttccgcggaggagg

SEQ ID NO: 17605 - DNA, 899 bp, Homo sapiens
  source 1..899: mol_type = unassigned DNA
gccgctgtcgccgcggcggggcggggagcgagagtgggccgcggaggccggccttcgggctccatggacgggcgccgcgtccctgcacagcccgccgcagaggtacggccggggcaggggcgcggggccaccgcgggcccgcggggggccgctccacctgcggggcgcgtgaccgtaaggctggcctctctgcagtcagaggtctgagctctgccatggggataggggtgtctttattactgcagttttctctaacacctgggggctaccggagtgtgggccgaagcaggcgctgcagccgcggaagtatccccaggaacatccccaagaggagctggaaaaagcctcatccccagctctgcagtctccaggggagctcagtgtctgtttgtccagcttctcagagttgctgtgcagctcggatgtggcataggaaacagcagacacagggagagggcagcataaggcactgtagggagcagtggccacattttctgaggaagaaccgatgctggaacgtcgttgcaggggccccctggccatgggcctggcccagccccgactcctttctgggccctcccaggagtcaccccagaccctggggaaggagtcccgcgggctgaggcaacaaggcacgtcagtggcccagtctggtgcccaagccccaggcagggcccatcgctgtgcccactgtcgaaggcacttccctggctgggtggctctgtggcttcacacccgccggtgccaggcccggctgcccttgccctgccctgagtgtggccgtcgctttcgccatgcccccttcttagcactgcaccgccaggtccatgctgctgccaccccagacctgggctttgcctgccacctctgtgggcagagcttccgaggctgggtggccc

SEQ ID NO: 17606 - DNA, 910 bp, Homo sapiens
  source 1..910: mol_type = unassigned DNA
tgtcgccgcggcggggcggggagcgagagtgggccgcggaggccggccttcgggctccatggacgggcgccgcgtccctgcacagcccgccgcagaggtacggccggggcaggggcgcggggccaccgcgggcccgcggggggccgctccacctgcggggcgcgtgaccgtaaggctggcctctctgcagtcagaggtctgagctctgccatggggataggggtgtctttattactgcagttttctctaacacctgggggctaccggagtgtgggccgaagcaggcgctgcagccgcggaagtatccccaggaacatccccaagaggagctggaaaaagcctcatccccagctctgcagtctccagggtagagtctggcctttgctgtgctcccaaaccacgccacaacaggggtgcacgggcgtccccatcccggcggaaggaaatggccctttctcatatcctggggtcttccctgtgcacagtctgacactgggaatgagtgacctttgtgttccctgagaagagagagtgcgctctagggaatttagaaggatgtgtctggagcttgtgagcaggcacagaagggcccttaggagcctaactgcttccttcctccttccgcggaggaggctcctgtgcaggaatctgggctcccctgagctgtggaagagctgaacatggggcagcccctggcgaggttggggcaggaccgggcaggggactgagattgcagtctcatcttccctccccttctattgccccagtaatctccagcaccccgagggaggcagagccggtgatcaggccccgagggcagcaggctgtgggtgttccttggattcagggagagccttccttcctgcaatgtcctaatttgtgtgggtggaagagggcaggcgggcagaat

SEQ ID NO: 17607 - DNA, 478 bp, Homo sapiens
  source 1..478: mol_type = unassigned DNA
gagtgggccgcggaggccggccttcgggctccatggacgggcgccgcgtccctgcacagcccgccgcagaggtacggccggggcaggggcgcggggccaccgcgggcccgcggggggccgctccacctgcggggcgcgtgaccgtgagtgtgcgcgaccgtgtcagaggaagaaccgatgctggaacgtcgttgcaggggccccctggccatgggcctggcccagccccgactcctttctgggccctcccaggagtcaccccagaccctggggaaggagtcccgcgggctgaggcaacaaggcacgtcagtggcccagtctggtgcccaagccccaggcagggcccatcgctgtgcccactgtcgaaggcacttccctggctgggtggctctgtggcttcacacccgccggtgccaggcccggctgcccttgccctgccctgagtgtggccgtcgctttcgccatgcccccttcttag

SEQ ID NO: 17608 - DNA, 480 bp, Homo sapiens
  source 1..480: mol_type = unassigned DNA
ggctccatggacgggcgccgcgtccctgcacagcccgccgcagaggtacggccggggcaggggcgcggggccaccgcgggcccgcggggggccgctccacctgcggggcgcgtgaccgtaaggctggcctctctgcagtcagaggtctgagctctgccatggggataggggtgtctttattactgcagttttctctaacacctgggggctaccggagtgtgggccgaagcaggcgctgcagccgcggaagtatccccaggaacatccccaagaggagctggaaaaagcctcatccccagctctgcagtctccaggcagaggaagaaccgatgctggaacgtcgttgcaggggccccctggccatgggcctggcccagccccgactcctttctgggccctcccaggagtcaccccagaccctggggaaggagtcccgcgggctgaggcaacaaggcacgtcagtggcccagtctggtgccc

SEQ ID NO: 17609 - DNA, 621 bp, Homo sapiens
  source 1..621: mol_type = unassigned DNA
ctttggccatcagggaaagcccagactctggccacagaatggagaattcgttccgtgaccttaccagggaagaaagtgaccccgaaagacagcagtgtgcttccttgttgaaggggcacattcatttattaatccaatgtccattaaggtcactctgccaggcaggatgtggggcttatggctggtgcgtgtggctttgtggggggaggggttgtggctggtgaggacacaaagctgactgccctagaggagctcagagcctcacttctgttttctcttccctccccacagcagaggaagaaccgatgctggaacgtcgttgcaggggccccctggccatgggcctggcccagccccgactcctttctgggccctcccaggagtcaccccagaccctggggaaggagtcccgcgggctgaggcaacaaggcacgtcagtggcccagtctggtgcccaagccccaggcagggcccatcgctgtgcccactgtcgaaggcacttccctggctgggtggctctgtggcttcacacccgccggtgccaggcccggctgcccttgccctgccctgagtgtggccgtcgctttcgccatgcccccttcttagcactgcaccgccagg

SEQ ID NO: 17610 - DNA, 824 bp, Homo sapiens
  source 1..824: mol_type = unassigned DNA
cttctgttttctcttccctccccacaggtaaggctggcctctctgcagtcagaggtctgagctctgccatggggataggggtgtctttattactgcagttttctctaacacctgggggctaccggagtgtgggccgaagcaggcgctgcagccgcggaagtatccccaggaacatccccaagaggagctggaaaaagcctcatccccagctctgcagtctccagggtctcgtcatctttgatgtctcacagttgcttcatctgttaaacagggagctcagtgtctgtttgtccagcttctcagagttgctgtgcagctcggatgtggcataggaaacagcagacacagggagagggcagcataaggcactgtagggagcagtggccacattttctgcagaggaagaaccgatgctggaacgtcgttgcaggggccccctggccatgggcctggcccagccccgactcctttctgggccctcccaggagtcaccccagaccctggggaaggagtcccgcgggctgaggcaacaaggcacgtcagtggcccagtctggtgcccaagccccaggcagggcccatcgctgtgcccactgtcgaaggcacttccctggctgggtggctctgtggcttcacacccgccggtgccaggcccggctgcccttgccctgccctgagtgtggccgtcgctttcgccatgcccccttcttagcactgcaccgccaggtccatgctgctgccaccccagacctgggctttgcctgccacctctgtgggcagagcttccgaggctgggtggccctggttctgcatctgcgggcccat

SEQ ID NO: 17611 - DNA, 2876 bp, Homo sapiens
  source 1..2876: mol_type = unassigned DNA
gggaggggagaaacaggggcagagtgagttggtctctggagtgactgtgcttttccaccctcagcagaggaagaaccgatgctggaacgtcgttgcaggggccccctggccatgggcctggcccagccccgactcctttctgggccctcccaggagtcaccccagaccctggggaaggagtcccgcgggctgaggcaacaaggcacgtcagtggcccagtctggtgcccaagccccaggcagggcccatcgctgtgcccactgtcgaaggcacttccctggctgggtggctctgtggcttcacacccgccggtgccaggcccggctgcccttgccctgccctgagtgtggccgtcgctttcgccatgcccccttcttagcactgcaccgccaggtccatgctgctgccaccccagacctgggctttgcctgccacctctgtgggcagagcttccgaggctgggtggccctggttctgcatctgcgggcccattcagctgcaaagcggcccatcgcttgtcccaaatgcgagagacgcttctggcgacgaaagcagcttcgagctcatctgcggcggtgccaccctcccgccccggaggcccggcccttcatatgcggcaactgtggccggagctttgcccagtgggaccagctagttgcccacaagcgggtgcacgtagctgaggccctggaggaggccgcagccaaggctctggggccccggcccaggggccgccccgcggtgaccgccccccggcccggtggagatgccgtcgaccgccccttccagtgtgcctgttgtggcaagcgcttccggcacaagcccaacttgatcgctcaccgccgcgtgcacacgggcgagcggccccaccagtgccccgagtgcgggaagcgctttaccaataagccctatctgacttcgcaccggcgcatccacaccggcgagaagccctacccgtgcaaagagtgcggccgccgcttccggcacaaacccaacctgctgtctcacagcaagattcacaagcgatccgaggggtcggcccaggccgcccccggcccggggagcccccagctgccagccggcccccaggagtccgcggccgagcccaccccggcggtacctctgaaaccggcccaggagccgccgccaggggccccgccagagcacccgcaggacccgatcgaagcccccccctccctctacagctgcgacgactgcggcaggagcttccggctggagcgcttcctgcgggcccaccagcggcagcacaccggggagcggcccttcacctgcgccgagtgcgggaagaacttcggcaagaagacgcacctggtggcgcactcgcgcgtgcactccggcgagcggcccttcgcctgcgaggagtgcggccgccgcttctcccagggcagccatctggcggcgcatcggcgcgaccacgcccccgatcggcccttcgtgtgtcccgactgcggcaaggccttccgccacaaaccctacctggcggcgcaccggcgcatccacaccggcgagaagccctacgtctgccccgactgcggcaaagccttcagccagaagtccaacctggtgtcgcaccggcgcatccacacgggcgagcggccctacgcctgtcccgactgcgaccgcagcttcagccagaagtccaacctcatcacccaccgcaagagccacatccgggacggcgccttctgctgtgccatctgtggccagaccttcgacgacgaggagagactcctggcccaccagaagaagcacgatgtctgagacggtgggcggggccgtgttggctgagagagggctggggtccttcgtggtgggagtcgcagtgggctgggggtgcctgcctagtgctggagtaggggacaatgggaatcctagaggggatggaagacgcggggagtgagctgggtgggccctgctagcgagagaggtcaaccccggtggccagggaacccacttccaagcgcagggacgccggcctccagctggtgtgtgctaaggctccgtcctgactgccctgtgccctggaaaagcagcaatagcatccgccccttagagccctctggctagaggagccaccagtggaaaggaagaccctccatcctctggtattaacgccttaatgcccctgtcttttactgtaagttacttaagatcatttttggaagcaggcgtggtagagtcctgtaaatgaatgctctgggctagatacagcttggagaacctgctggccttgttagacagcacttgggcctttgccagcagcaagaggtgaagcgaagccactcttacctctcccttcccctcccacctgccccctgcgtaggcacccagacttggagagacccgtctgctgttaatacttccatcctcttccttcccaaagagcagatcccaaggcatttactccttggtctgtctcgctttatctgtcgcccctcccagcgctgagagcctcccctggctgtcagcagcactgtgtccaggctcttgtctgaacaccgcagcccctccttcgctccttccagagctcagcatgtcacggcaaggactgccgcattggtgatggagggccagctgaggggaagttgctggtgagtttccttttctccatttctagcatatggacacctggcctctgcttgagcacttaggtgacaggaacttccgcacctcctgaggccctggatgattctaattgttagaaattctaattgttagaaatccttccttataatgaatgaattctgctttcctataatttctacctattgggccttgttctgttctctggaactaaacagaacaaccatttacccctccttttcaaactagagaataaagatttggttttagaa

SEQ ID NO: 17612 - DNA, 3292 bp, Homo sapiens
  source 1..3292: mol_type = unassigned DNA
cccggcggggggaggttggggacgggcctggcagttgtgaactcgaacctgccgctgtcgccgcggcggggcggggagcgagagtgggccgcggaggccggccttcgggctccatggacgggcgccgcgtccctgcacagcccgccgcagaggtaaggctggcctctctgcagtcagaggtctgagctctgccatggggataggggtgtctttattactgcagttttctctaacacctgggggctaccggagtgtgggccgaagcaggcgctgcagccgcggaagtatccccaggaacatccccaagaggagctggaaaaagcctcatccccagctctgcagtctccaggggagctcagtgtctgtttgtccagcttctcagagttgctgtgcagctcggatgtggcataggaaacagcagacacagggagagggcagcataaggcactgtagggagcagtggccacattttctgcagaggaagaaccgatgctggaacgtcgttgcaggggccccctggccatgggcctggcccagccccgactcctttctgggccctcccaggagtcaccccagaccctggggaaggagtcccgcgggctgaggcaacaaggcacgtcagtggcccagtctggtgcccaagccccaggcagggcccatcgctgtgcccactgtcgaaggcacttccctggctgggtggctctgtggcttcacacccgccggtgccaggcccggctgcccttgccctgccctgagtgtggccgtcgctttcgccatgcccccttcttagcactgcaccgccaggtccatgctgctgccaccccagacctgggctttgcctgccacctctgtgggcagagcttccgaggctgggtggccctggttctgcatctgcgggcccattcagctgcaaagcggcccatcgcttgtcccaaatgcgagagacgcttctggcgacgaaagcagcttcgagctcatctgcggcggtgccaccctcccgccccggaggcccggcccttcatatgcggcaactgtggccggagctttgcccagtgggaccagctagttgcccacaagcgggtgcacgtagctgaggccctggaggaggccgcagccaaggctctggggccccggcccaggggccgccccgcggtgaccgccccccggcccggtggagatgccgtcgaccgccccttccagtgtgcctgttgtggcaagcgcttccggcacaagcccaacttgatcgctcaccgccgcgtgcacacgggcgagcggccccaccagtgccccgagtgcgggaagcgctttaccaataagccctatctgacttcgcaccggcgcatccacaccggcgagaagccctacccgtgcaaagagtgcggccgccgcttccggcacaaacccaacctgctgtctcacagcaagattcacaagcgatccgaggggtcggcccaggccgcccccggcccggggagcccccagctgccagccggcccccaggagtccgcggccgagcccaccccggcggtacctctgaaaccggcccaggagccgccgccaggggccccgccagagcacccgcaggacccgatcgaagcccccccctccctctacagctgcgacgactgcggcaggagcttccggctggagcgcttcctgcgggcccaccagcggcagcacaccggggagcggcccttcacctgcgccgagtgcgggaagaacttcggcaagaagacgcacctggtggcgcactcgcgcgtgcactccggcgagcggcccttcgcctgcgaggagtgcggccgccgcttctcccagggcagccatctggcggcgcatcggcgcgaccacgcccccgatcggcccttcgtgtgtcccgactgcggcaaggccttccgccacaaaccctacctggcggcgcaccggcgcatccacaccggcgagaagccctacgtctgccccgactgcggcaaagccttcagccagaagtccaacctggtgtcgcaccggcgcatccacacgggcgagcggccctacgcctgtcccgactgcgaccgcagcttcagccagaagtccaacctcatcacccaccgcaagagccacatccgggacggcgccttctgctgtgccatctgtggccagaccttcgacgacgaggagagactcctggcccaccagaagaagcacgatgtctgagacggtgggcggggccgtgttggctgagagagggctggggtccttcgtggtgggagtcgcagtgggctgggggtgcctgcctagtgctggagtaggggacaatgggaatcctagaggggatggaagacgcggggagtgagctgggtgggccctgctagcgagagaggtcaaccccggtggccagggaacccacttccaagcgcagggacgccggcctccagctggtgtgtgctaaggctccgtcctgactgccctgtgccctggaaaagcagcaatagcatccgccccttagagccctctggctagaggagccaccagtggaaaggaagaccctccatcctctggtattaacgccttaatgcccctgtcttttactgtaagttacttaagatcatttttggaagcaggcgtggtagagtcctgtaaatgaatgctctgggctagatacagcttggagaacctgctggccttgttagacagcacttgggcctttgccagcagcaagaggtgaagcgaagccactcttacctctcccttcccctcccacctgccccctgcgtaggcacccagacttggagagacccgtctgctgttaatacttccatcctcttccttcccaaagagcagatcccaaggcatttactccttggtctgtctcgctttatctgtcgcccctcccagcgctgagagcctcccctggctgtcagcagcactgtgtccaggctcttgtctgaacaccgcagcccctccttcgctccttccagagctcagcatgtcacggcaaggactgccgcattggtgatggagggccagctgaggggaagttgctggtgagtttccttttctccatttctagcatatggacacctggcctctgcttgagcacttaggtgacaggaacttccgcacctcctgaggccctggatgattctaattgttagaaattctaattgttagaaatccttccttataatgaatgaattctgctttcctataatttctacctattgggccttgttctgttctctggaactaaacagaacaaccatttacccctccttttcaaactagagaataaagatttggttttagaactggt

SEQ ID NO: 17613 - DNA, 2969 bp, Homo sapiens
  source 1..2969: mol_type = unassigned DNA
cccggcggggggaggttggggacgggcctggcagttgtgaactcgaacctgccgctgtcgccgcggcggggcggggagcgagagtgggccgcggaggccggccttcgggctccatggacgggcgccgcgtccctgcacagcccgccgcagagcagaggaagaaccgatgctggaacgtcgttgcaggggccccctggccatgggcctggcccagccccgactcctttctgggccctcccaggagtcaccccagaccctggggaaggagtcccgcgggctgaggcaacaaggcacgtcagtggcccagtctggtgcccaagccccaggcagggcccatcgctgtgcccactgtcgaaggcacttccctggctgggtggctctgtggcttcacacccgccggtgccaggcccggctgcccttgccctgccctgagtgtggccgtcgctttcgccatgcccccttcttagcactgcaccgccaggtccatgctgctgccaccccagacctgggctttgcctgccacctctgtgggcagagcttccgaggctgggtggccctggttctgcatctgcgggcccattcagctgcaaagcggcccatcgcttgtcccaaatgcgagagacgcttctggcgacgaaagcagcttcgagctcatctgcggcggtgccaccctcccgccccggaggcccggcccttcatatgcggcaactgtggccggagctttgcccagtgggaccagctagttgcccacaagcgggtgcacgtagctgaggccctggaggaggccgcagccaaggctctggggccccggcccaggggccgccccgcggtgaccgccccccggcccggtggagatgccgtcgaccgccccttccagtgtgcctgttgtggcaagcgcttccggcacaagcccaacttgatcgctcaccgccgcgtgcacacgggcgagcggccccaccagtgccccgagtgcgggaagcgctttaccaataagccctatctgacttcgcaccggcgcatccacaccggcgagaagccctacccgtgcaaagagtgcggccgccgcttccggcacaaacccaacctgctgtctcacagcaagattcacaagcgatccgaggggtcggcccaggccgcccccggcccggggagcccccagctgccagccggcccccaggagtccgcggccgagcccaccccggcggtacctctgaaaccggcccaggagccgccgccaggggccccgccagagcacccgcaggacccgatcgaagcccccccctccctctacagctgcgacgactgcggcaggagcttccggctggagcgcttcctgcgggcccaccagcggcagcacaccggggagcggcccttcacctgcgccgagtgcgggaagaacttcggcaagaagacgcacctggtggcgcactcgcgcgtgcactccggcgagcggcccttcgcctgcgaggagtgcggccgccgcttctcccagggcagccatctggcggcgcatcggcgcgaccacgcccccgatcggcccttcgtgtgtcccgactgcggcaaggccttccgccacaaaccctacctggcggcgcaccggcgcatccacaccggcgagaagccctacgtctgccccgactgcggcaaagccttcagccagaagtccaacctggtgtcgcaccggcgcatccacacgggcgagcggccctacgcctgtcccgactgcgaccgcagcttcagccagaagtccaacctcatcacccaccgcaagagccacatccgggacggcgccttctgctgtgccatctgtggccagaccttcgacgacgaggagagactcctggcccaccagaagaagcacgatgtctgagacggtgggcggggccgtgttggctgagagagggctggggtccttcgtggtgggagtcgcagtgggctgggggtgcctgcctagtgctggagtaggggacaatgggaatcctagaggggatggaagacgcggggagtgagctgggtgggccctgctagcgagagaggtcaaccccggtggccagggaacccacttccaagcgcagggacgccggcctccagctggtgtgtgctaaggctccgtcctgactgccctgtgccctggaaaagcagcaatagcatccgccccttagagccctctggctagaggagccaccagtggaaaggaagaccctccatcctctggtattaacgccttaatgcccctgtcttttactgtaagttacttaagatcatttttggaagcaggcgtggtagagtcctgtaaatgaatgctctgggctagatacagcttggagaacctgctggccttgttagacagcacttgggcctttgccagcagcaagaggtgaagcgaagccactcttacctctcccttcccctcccacctgccccctgcgtaggcacccagacttggagagacccgtctgctgttaatacttccatcctcttccttcccaaagagcagatcccaaggcatttactccttggtctgtctcgctttatctgtcgcccctcccagcgctgagagcctcccctggctgtcagcagcactgtgtccaggctcttgtctgaacaccgcagcccctccttcgctccttccagagctcagcatgtcacggcaaggactgccgcattggtgatggagggccagctgaggggaagttgctggtgagtttccttttctccatttctagcatatggacacctggcctctgcttgagcacttaggtgacaggaacttccgcacctcctgaggccctggatgattctaattgttagaaattctaattgttagaaatccttccttataatgaatgaattctgctttcctataatttctacctattgggccttgttctgttctctggaactaaacagaacaaccatttacccctccttttcaaactagagaataaagatttggttttagaactggt

SEQ ID NO: 17614 - DNA, 2264 bp, Homo sapiens
  source 1..2264: mol_type = unassigned DNA
gcagtccctccgccgctagtcggagcgagcgcgagtgaggagacccccgccgggccactggcacttgcttctgcggcgagtcccacccacgaccgcagcccagcaactcgcaaacgcaacctgaagcctgggctgcgcagtgtgggagggcttcgcgatcttgggggacccattccgaacttgcagaggaccgtagctctcctggcctggagagtgtgaacaggattgtggactcttccaagattcacaatgatatggtgaatccaaagactggaaccaaaaagatttactcagtgctttagttttaacaacagtaaattgtctaccaacacccatcatggctaaaagtgcggaggtcaaactggcaatatttgggagagcaggcgtgggcaagtcagctcttgtagtgagatttctgaccaaacggttcatctgggaatatgatcccaccctcgaatcaacctaccgacaccaagcaaccatcgatgatgaagttgtttccatggagatactagacactgctggtcaggaagataccattcagagggaggggcacatgcgatggggggaaggctttgtgctggtctacgacattactgaccgaggaagttttgaggaagtgctgccacttaagaacatcctagatgagatcaaaaagcccaagaatgtgactctcatcttggttggaaacaaagctgacttggaccactccaggcaggttagcacagaagaaggagagaagctggccacagaattggcttgtgctttttacgagtgctctgcctgcactggagaagggaacatcacagagatattctatgaattgtgtcgagaggtgcgtcgccggaggatggtgcagggcaagacgaggcgacgcagctccaccacgcatgtcaagcaagccattaacaagatgctcaccaaaatcagtagttaggcagcccagctgaggtggaccaactaattggaaacactcttccccttctgttcccctttcaaaaataaaacaaaatattgcattctttgtttggattctgagaaatgtctgggcttcccattgtttctggcctctaataggttgggaagttttagcgtgttttatgcaatttcagtgctaacaatttcttcctttcctgcttgaataagatacactctaatggcatttgaacatgtaatcaccagagattctgaaatgactggtttatgttaagctatttttaggcatcttcaccttgctttaagtaggttgaagtttttgcaaaggcatttaaaaattcaatttcttgtcagatactacaaataattttcttaaaagtctaagatagcagaaaatacagtaaaaacacaggagaagaagctgagctattggaacaggaaatagaaggaactctagtttctgtttgaagtgaggattttctgaattatctaatatcatctaggttttctttaaaattttattttgttcttcagttcaagcatcttctcactaatgtttttcactataacagagaattcatttcaatttgagttggttctctcaatgatctattgatcattacaccctaactctccttccttggctcaaacaatattttccctataacaaaggcaataggacacaaaattcacatcctgctgggccttttttcatcaagtcagggtgatataaaaacattggaagtcttttcaccaaaccctgactttattgaatgctagtagaagatgtagaattagagacatctgatttgtttatcaccttagcagaaaaaccacagtccaaaagacaagcaaattaagaatggagcttaaccatgcctccattgggaagtctagactttgagccaggtacagtaagaaaaattagcctctgattcattaagtttgccacatgacttattttgatattttggatacattaactcacttaggagaattcagaaaagaatgggtgattaaagttcattacagctgaataaatgtgtctaaaacagactcttgtattctgaaagtacagtctacaactgataaaaccttatgattcttttctcccccattatgcccctatatatatcaagatttgggtactttattttagtagaaaatatatatcttttacatatgtatgtatttataaatgcatagatatatgtataaaaatttgtaagcgttagcggcattaattcaccaatgcatttggacaacttgatgtaactgactttattttatgtgactataataaaaagcataattttctcattctgtca

SEQ ID NO: 17615 - DNA, 2060 bp, Homo sapiens
  source 1..2060: mol_type = unassigned DNA
gaattcccaaatttcttttgtttaaggattgtggactcttccaagattcacaatgatatggtgaatccaaagactggaaccaaaaagatttactcagtgctttagttttaacaacagtaaattgtctaccaacacccatcatggctaaaagtgcggaggtcaaactggcaatatttgggagagcaggcgtgggcaagtcagctcttgtagtgagatttctgaccaaacggttcatctgggaatatgatcccaccctcgaatcaacctaccgacaccaagcaaccatcgatgatgaagttgtttccatggagatactagacactgctggtcaggaagataccattcagagggaggggcacatgcgatggggggaaggctttgtgctggtctacgacattactgaccgaggaagttttgaggaagtgctgccacttaagaacatcctagatgagatcaaaaagcccaagaatgtgactctcatcttggttggaaacaaagctgacttggaccactccaggcaggttagcacagaagaaggagagaagctggccacagaattggcttgtgctttttacgagtgctctgcctgcactggagaagggaacatcacagagatattctatgaattgtgtcgagaggtgcgtcgccggaggatggtgcagggcaagacgaggcgacgcagctccaccacgcatgtcaagcaagccattaacaagatgctcaccaaaatcagtagttaggcagcccagctgaggtggaccaactaattggaaacactcttccccttctgttcccctttcaaaaataaaacaaaatattgcattctttgtttggattctgagaaatgtctgggcttcccattgtttctggcctctaataggttgggaagttttagcgtgttttatgcaatttcagtgctaacaatttcttcctttcctgcttgaataagatacactctaatggcatttgaacatgtaatcaccagagattctgaaatgactggtttatgttaagctatttttaggcatcttcaccttgctttaagtaggttgaagtttttgcaaaggcatttaaaaattcaatttcttgtcagatactacaaataattttcttaaaagtctaagatagcagaaaatacagtaaaaacacaggagaagaagctgagctattggaacaggaaatagaaggaactctagtttctgtttgaagtgaggattttctgaattatctaatatcatctaggttttctttaaaattttattttgttcttcagttcaagcatcttctcactaatgtttttcactataacagagaattcatttcaatttgagttggttctctcaatgatctattgatcattacaccctaactctccttccttggctcaaacaatattttccctataacaaaggcaataggacacaaaattcacatcctgctgggccttttttcatcaagtcagggtgatataaaaacattggaagtcttttcaccaaaccctgactttattgaatgctagtagaagatgtagaattagagacatctgatttgtttatcaccttagcagaaaaaccacagtccaaaagacaagcaaattaagaatggagcttaaccatgcctccattgggaagtctagactttgagccaggtacagtaagaaaaattagcctctgattcattaagtttgccacatgacttattttgatattttggatacattaactcacttaggagaattcagaaaagaatgggtgattaaagttcattacagctgaataaatgtgtctaaaacagactcttgtattctgaaagtacagtctacaactgataaaaccttatgattcttttctcccccattatgcccctatatatatcaagatttgggtactttattttagtagaaaatatatatcttttacatatgtatgtatttataaatgcatagatatatgtataaaaatttgtaagcgttagcggcattaattcaccaatgcatttggacaacttgatgtaactgactttattttatgtgactataataaaaagcataattttctcat

SEQ ID NO: 17616 - DNA, 2134 bp, Homo sapiens
  source 1..2134: mol_type = unassigned DNA
attggagttgactaatatgaatgtatgttattcaacccaaagagacatgaagaggcccaaaagtgactctctccattgccccactgcatgtgtttgtacactgaatgcttacagatagatggtaaatgattgtggactcttccaagattcacaatgatatggtgaatccaaagactggaaccaaaaagatttactcagtgctttagttttaacaacagtaaattgtctaccaacacccatcatggctaaaagtgcggaggtcaaactggcaatatttgggagagcaggcgtgggcaagtcagctcttgtagtgagatttctgaccaaacggttcatctgggaatatgatcccaccctcgaatcaacctaccgacaccaagcaaccatcgatgatgaagttgtttccatggagatactagacactgctggtcaggaagataccattcagagggaggggcacatgcgatggggggaaggctttgtgctggtctacgacattactgaccgaggaagttttgaggaagtgctgccacttaagaacatcctagatgagatcaaaaagcccaagaatgtgactctcatcttggttggaaacaaagctgacttggaccactccaggcaggttagcacagaagaaggagagaagctggccacagaattggcttgtgctttttacgagtgctctgcctgcactggagaagggaacatcacagagatattctatgaattgtgtcgagaggtgcgtcgccggaggatggtgcagggcaagacgaggcgacgcagctccaccacgcatgtcaagcaagccattaacaagatgctcaccaaaatcagtagttaggcagcccagctgaggtggaccaactaattggaaacactcttccccttctgttcccctttcaaaaataaaacaaaatattgcattctttgtttggattctgagaaatgtctgggcttcccattgtttctggcctctaataggttgggaagttttagcgtgttttatgcaatttcagtgctaacaatttcttcctttcctgcttgaataagatacactctaatggcatttgaacatgtaatcaccagagattctgaaatgactggtttatgttaagctatttttaggcatcttcaccttgctttaagtaggttgaagtttttgcaaaggcatttaaaaattcaatttcttgtcagatactacaaataattttcttaaaagtctaagatagcagaaaatacagtaaaaacacaggagaagaagctgagctattggaacaggaaatagaaggaactctagtttctgtttgaagtgaggattttctgaattatctaatatcatctaggttttctttaaaattttattttgttcttcagttcaagcatcttctcactaatgtttttcactataacagagaattcatttcaatttgagttggttctctcaatgatctattgatcattacaccctaactctccttccttggctcaaacaatattttccctataacaaaggcaataggacacaaaattcacatcctgctgggccttttttcatcaagtcagggtgatataaaaacattggaagtcttttcaccaaaccctgactttattgaatgctagtagaagatgtagaattagagacatctgatttgtttatcaccttagcagaaaaaccacagtccaaaagacaagcaaattaagaatggagcttaaccatgcctccattgggaagtctagactttgagccaggtacagtaagaaaaattagcctctgattcattaagtttgccacatgacttattttgatattttggatacattaactcacttaggagaattcagaaaagaatgggtgattaaagttcattacagctgaataaatgtgtctaaaacagactcttgtattctgaaagtacagtctacaactgataaaaccttatgattcttttctcccccattatgcccctatatatatcaagatttgggtactttattttagtagaaaatatatatcttttacatatgtatgtatttataaatgcatagatatatgtataaaaatttgtaagcgttagcggcattaattcaccaatgcatttggacaacttgatgtaactgactttattttatgtga

SEQ ID NO: 17617 - DNA, 1383 bp, Homo sapiens
  source 1..1383: mol_type = unassigned DNA
gcagtccctccgccgctagtcggagcgagcgcgagtgaggagacccccgccgggccactggcacttgcttctgcggcgagtcccacccacgaccgcagcccagcaactcgcaaacgcaacctgaagcctgggctgcgcagtgtgggagggcttcgcgatcttgggggacccattccgaacttgcagaggaccgtagctctcctggcctggagagtgtgaacaggattgtggactcttccaagattcacaatgatatggtgaatccaaagactggaaccaaaaagatttactcagtgctttagttttaacaacagtaaattgtctaccaacacccatcatggctaaaagtgcggaggtcaaactggcaatatttgggagagcaggcgtgggcaagtcagaatcaacctaccgacaccaagcaaccatcgatgatgaagttgtttccatggagatactagacactgctggtcaggaagataccattcagagggaggggcacatgcgatggggggaaggctttgtgctggtctacgacattactgaccgaggaagttttgaggaagtgctgccacttaagaacatcctagatgagatcaaaaagcccaagaatgtgactctcatcttggttggaaacaaagctgacttggaccactccaggcaggttagcacagaagaaggagagaagctggccacagaattggcttgtgctttttacgagtgctctgcctgcactggagaagggaacatcacagagatattctatgaattgtgtcgagaggtgcgtcgccggaggatggtgcagggcaagacgaggcgacgcagctccaccacgcatgtcaagcaagccattaacaagatgctcaccaaaatcagtagttaggcagcccagctgaggtggaccaactaattggaaacactcttccccttctgttcccctttcaaaaataaaacaaaatattgcattctttgtttggattctgagaaatgtctgggcttcccattgtttctggcctctaataggttgggaagttttagcgtgttttatgcaatttcagtgctaacaatttcttcctttcctgcttgaataagatacactctaatggcatttgaacatgtaatcaccagagattctgaaatgactggtttatgttaagctatttttaggcatcttcaccttgctttaagtaggttgaagtttttgcaaaggcatttaaaaattcaatttcttgtcagatactacaaataattttcttaaaagtctaagatagcagaaaatacagtaaaaacacaggagaagaagctgagctattggaacaggaaatagaaggaactctagtttctgtttgaagtgaggattttctgaattatctaatatcatctagg

SEQ ID NO: 17618 - DNA, 574 bp, Homo sapiens
  source 1..574: mol_type = unassigned DNA
aaatgcgaaagaatgacagccaggtatatcatattcaaacttctcctcagaaattatgcaagcaagaaaagagtgaaatgaaatatctgaagcattttgacaaaaagaaaatccaccgacctagaattctataccctgaaaaattactcttcaaaagtgaaggataaattaagactttcttgggcaacaaaaattgaaggaatttgctgccaataaacctgccttgaaaaaaaaatgatacgatacattcttcagagaaggagaatgatacatctcagaaactggattgtacttaaagaaaggaagagcattacagaaaaaggtaattttaaagctcttgtagtgagatttctgaccaaacggttcatctgggaatatgatcccaccctcgaatcaacctaccgacaccaagcaaccatcgatgatgaagttgtttccatggagatactagacactgctggtcaggaagataccattcagagggaggggcacatgcgatggggggaaggctttgtgctggtctacgacattactgaccgaggaagttttgaggaagtgctgccacttaagaaca

SEQ ID NO: 17619 - DNA, 935 bp, Homo sapiens
  source 1..935: mol_type = unassigned DNA
gccgctagtcggagcgagcgcgagtgaggagacccccgccgggccactggcacttgcttctgcggcgagtcccacccacgaccgcagcccagcaactcgcaaacgcaacctgaagcctgggctgcgcagtgtgggagggcttcgcgatcttgggggacccattccgaacttgcagaggaccgtagctctcctggcctggagagtgtgaacaggattgtggactcttccaagattcacaatgatatggtgaatccaaagactggaaccaaaaagatttactcagtgctttagttttaacaacagtaaattgtctaccaacacccatcatggctaaaagtgcggaggtcaaactggcaatatttgggagagcaggcgtgggcaagtcagctcttgtagtgagatttctgaccaaacggttcatctgggaatatgatcccaccctcgaatcaacctaccgacaccaagcaaccatcgatgatgaagttgtttccatggagatactagacactgctggtcaggtgaataaagagttcagctaaaatatttttctggatcaaataaaactgagaaatctatgctatgaacaaaaataaggcacttttcttcaactaacttttgcatgcctaaaacctttttctctaattaactagccattttatatattaacatatttgtaaatatctgtatattcatccttatataaactgcccagtgtttcaagggggttttgaaaatactataatattcacatatcatctaggttagactctctcacctatattttgtggcatagcaagatattaataagttttcatggtcaaatgtgttttgaaatgctcaaatgaagttaaacaggtgtctttactgaaagaattctcagagcctctaacaggcttgtgtgtgagtctttaagaaagagatttagtatatattgt

SEQ ID NO: 17620 - DNA, 655 bp, Homo sapiens
  source 1..655: mol_type = unassigned DNA
ttttagtagagacggggtttcactgtgttagccaggatggtctcgatctcctgacctcgtgatccgcccgcctcggcctcccaaagtgctgggattacaggcgtcagccaccgcgcccggcctataatttttttttttaactccttcactgttgttggcagaatttagtttcttcctgttacaaggattgaggtcgccatttccttgctggtagtcacctgaggactgttcccagattctagagactgcctgcataccttggcttatcaccttccactgcctgcataccttggcttatgccctttctcctgcatcttccaagccagcaatggaagaggtaaccatccatcacggttttcccagaacaggctgatttgcgtcttctgtcctggcataaggatcccttcactctcggaagtgttccggattgtggactcttccaagattcacaatgatatggtgaatccaaagactggaaccaaaaagatttactcagtgctttagttttaacaacagtaaattgtctaccaacacccatcatggctaaaagtgcggaggtcaaactggcaatatttgggagagcaggcgtgggcaagtcagctcttgtagtgagatttctgaccaaacggttcatctgggaatatgatcccaccct

SEQ ID NO: 17621 - DNA, 582 bp, Homo sapiens
  source 1..582: mol_type = unassigned DNA
gcttcgcgatcttgggggacccattccgaacttgcagaggaccgtagctctcctggcctggagagtgtgaacaggattgtggactcttccaagattcacaatgatatggtgaatccaaagactggaaccaaaaagatttactcagtgctttagttttaacaacagtaaattgtctaccaacacccatcatggctaaaagtgcggaggtcaaactggcaatatttgggagagcaggcgtgggcaagtcaggtaagattttcgttgtggttgttatagtgtgtgtgtgtgggtgagtgtgtttctttattactgtttcttgggattgggcaggtgagtagttggtattcctcctattttcatttcttactcttttagataaagtctcttcatctagaacttttattttgcgtaatcgactgttacgtatccttttgcttatttatgctgaagtagctttgctgataacacacaagataaaggatatatcagaggtcttggcattctgatttttaacaacctccaaagaaatcagatgatggaaattaaaaaatatatatttgttcttttctctatgtatgagat

SEQ ID NO: 17622 - DNA, 562 bp, Homo sapiens
  source 1..562: mol_type = unassigned DNA
atctgggactacgggcgcccgccaccacgcccggttaatttttttgtatttttagtagagacggggtttcactgtgtttttagtagagacggggtttcactgtgttagccaggatggtctcgatctcctgacctcgtgatccgcccgcctcggcctcccaaagtgctgggattacaggcgtcagccaccgcgcccggcctataatttttttttttaactccttcactgttgttggcagaatttagtttcttcctgttacaaggattgaggtcgccatttccttgctggtagtcacctgaggactgttcccagattctagagactgcctgcataccttggcttatcaccttccactgcctgcataccttggcttatgccctttctcctgcatcttccaagccagcaatggtaggaccattcggtattcttgagaaacactggctaatcttctagtcgacaaagtcacacccaaggaaagcaccaaacttctctgaggtcaatattatgttggattgtgcagagcctgttccataaagatctttatgtgcccaacaagctgcag

SEQ ID NO: 17623 - DNA, 5659 bp, Homo sapiens
  source 1..5659: mol_type = unassigned DNA
ccctacccgctcctccggcgcagccggcgcttacctcgcttcagtcccgcgaccgaagcagggcgcgcagcagcgctgagtgccccggaacgtgcgtcgcgcccccagtgtccgtcgcgtccgccgcgccccgggcggggatggggcggccagactgagcgccgcacccgccatccagacccgccggccctagccgcagtccctccagccgtggccccagcgcgcacgggcgatggcgaaggcgacgtccggtgccgcggggctgcgtctgctgttgctgctgctgctgccgctgctaggcaaagtggcattgggcctctacttctcgagggatgcttactgggagaagctgtatgtggaccaggcagccggcacgcccttgctgtacgtccatgccctgcgggacgcccctgaggaggtgcccagcttccgcctgggccagcatctctacggcacgtaccgcacacggctgcatgagaacaactggatctgcatccaggaggacaccggcctcctctaccttaaccggagcctggaccatagctcctgggagaagctcagtgtccgcaaccgcggctttcccctgctcaccgtctacctcaaggtcttcctgtcacccacatcccttcgtgagggcgagtgccagtggccaggctgtgcccgcgtatacttctccttcttcaacacctcctttccagcctgcagctccctcaagccccgggagctctgcttcccagagacaaggccctccttccgcattcgggagaaccgacccccaggcaccttccaccagttccgcctgctgcctgtgcagttcttgtgccccaacatcagcgtggcctacaggctcctggagggtgagggtctgcccttccgctgcgccccggacagcctggaggtgagcacgcgctgggccctggaccgcgagcagcgggagaagtacgagctggtggccgtgtgcaccgtgcacgccggcgcgcgcgaggaggtggtgatggtgcccttcccggtgaccgtgtacgacgaggacgactcggcgcccaccttccccgcgggcgtcgacaccgccagcgccgtggtggagttcaagcggaaggaggacaccgtggtggccacgctgcgtgtcttcgatgcagacgtggtacctgcatcaggggagctggtgaggcggtacacaagcacgctgctccccggggacacctgggcccagcagaccttccgggtggaacactggcccaacgagacctcggtccaggccaacggcagcttcgtgcgggcgaccgtacatgactataggctggttctcaaccggaacctctccatctcggagaaccgcaccatgcagctggcggtgctggtcaatgactcagacttccagggcccaggagcgggcgtcctcttgctccacttcaacgtgtcggtgctgccggtcagcctgcacctgcccagtacctactccctctccgtgagcaggagggctcgccgatttgcccagatcgggaaagtctgtgtggaaaactgccaggcattcagtggcatcaacgtccagtacaagctgcattcctctggtgccaactgcagcacgctaggggtggtcacctcagccgaggacacctcggggatcctgtttgtgaatgacaccaaggccctgcggcggcccaagtgtgccgaacttcactacatggtggtggccaccgaccagcagacctctaggcaggcccaggcccagctgcttgtaacagtggaggggtcatatgtggccgaggaggcgggctgccccctgtcctgtgcagtcagcaagagacggctggagtgtgaggagtgtggcggcctgggctccccaacaggcaggtgtgagtggaggcaaggagatggcaaagggatcaccaggaacttctccacctgctctcccagcaccaagacctgccccgacggccactgcgatgttgtggagacccaagacatcaacatttgccctcaggactgcctccggggcagcattgttgggggacacgagcctggggagccccgggggattaaagctggctatggcacctgcaactgcttccctgaggaggagaagtgcttctgcgagcccgaagacatccaggatccactgtgcgacgagctgtgccgcacggtgatcgcagccgctgtcctcttctccttcatcgtctcggtgctgctgtctgccttctgcatccactgctaccacaagtttgcccacaagccacccatctcctcagctgagatgaccttccggaggcccgcccaggccttcccggtcagctactcctcttccggtgcccgccggccctcgctggactccatggagaaccaggtctccgtggatgccttcaagatcctggaggatccaaagtgggaattccctcggaagaacttggttcttggaaaaactctaggagaaggcgaatttggaaaagtggtcaaggcaacggccttccatctgaaaggcagagcagggtacaccacggtggccgtgaagatgctgaaagagaacgcctccccgagtgagctgcgagacctgctgtcagagttcaacgtcctgaagcaggtcaaccacccacatgtcatcaaattgtatggggcctgcagccaggatggcccgctcctcctcatcgtggagtacgccaaatacggctccctgcggggcttcctccgcgagagccgcaaagtggggcctggctacctgggcagtggaggcagccgcaactccagctccctggaccacccggatgagcgggccctcaccatgggcgacctcatctcatttgcctggcagatctcacaggggatgcagtatctggccgagatgaagctcgttcatcgggacttggcagccagaaacatcctggtagctgaggggcggaagatgaagatttcggatttcggcttgtcccgagatgtttatgaagaggattcctacgtgaagaggagccagggtcggattccagttaaatggatggcaattgaatccctttttgatcatatctacaccacgcaaagtgatgtatggtcttttggtgtcctgctgtgggagatcgtgaccctagggggaaacccctatcctgggattcctcctgagcggctcttcaaccttctgaagaccggccaccggatggagaggccagacaactgcagcgaggagatgtaccgcctgatgctgcaatgctggaagcaggagccggacaaaaggccggtgtttgcggacatcagcaaagacctggagaagatgatggttaagaggagagactacttggaccttgcggcgtccactccatctgactccctgatttatgacgacggcctctcagaggaggagacaccgctggtggactgtaataatgcccccctccctcgagccctcccttccacatggattgaaaacaaactctatggcatgtcagacccgaactggcctggagagagtcctgtaccactcacgagagctgatggcactaacactgggtttccaagatatccaaatgatagtgtatatgctaactggatgctttcaccctcagcggcaaaattaatggacacgtttgatagttaacatttctttgtgaaaggtaatggactcacaaggggaagaaacatgctgagaatggaaagtctaccggccctttctttgtgaacgtcacattggccgagccgtgttcagttcccaggtggcagactcgtttttggtagtttgttttaacttccaaggtggttttacttctgatagccggtgattttccctcctagcagacatgccacaccgggtaagagctctgagtcttagtggttaagcattcctttctcttcagtgcccagcagcacccagtgttggtctgtgtccatcagtgaccaccaacattctgtgttcacatgtgtgggtccaacacttactacctggtgtatgaaattggacctgaactgttggatttttctagttgccgccaaacaaggcaaaaaaatttaaacatgaagcacacacacaaaaaaggcagtaggaaaaatgctggccctgatgacctgtccttattcagaatgagagactgcggggggggcctgggggtagtgtcaatgcccctccagggctggaggggaagaggggccccgaggatgggcctgggctcagcattcgagatcttgagaatgattttttttaaatcatgcaacctttccttaggaagacatttggttttcatcatgattaagatgattcctagatttagcacaatggagagattccatgccatctttactatgtggatggtggtatcagggaagagggctcacaagacacatttgtcccccgggcccaccacatcatcctcacgtgttcggtactgagcagccactacccctgatgagaacagtatgaagaaagggggctgttggagtcccagaattgctgacagcagaggctttgctgctgtgaatcccacctgccaccagcctgcagcacaccccacagccaagtagaggcgaaagcagtggctcatcctacctgttaggagcaggtagggcttgtactcactttaatttgaatcttatcaacttactcataaagggacaggctagctagctgtgttagaagtagcaatgacaatgaccaaggactgctacacctctgattacaattctgatgtgaaaaagatggtgtttggctcttatagagcctgtgtgaaaggcccatggatcagctcttcctgtgtttgtaatttaatgctgctacaagatgtttctgtttcttagattctgaccatgactcataagcttcttgtcattcttcattgcttgtttgtggtcacagatgcacaacactcctccagtcttgtgggggcagcttttgggaagtctcagcagctcttctggctgtgttgtcagcactgtaacttcgcagaaaagagtcggattaccaaaacactgcctgctcttcagacttaaagcactgataggacttaaaatagtctcattcaaatactgtattttatataggcatttcacaaaaacagcaaaattgtggcattttgtgaggccaaggcttggatgcgtgtgtaatagagccttgtggtgtgtgcgcacacacccagagggagagtttgaaaaatgcttattggacacgtaacctggctctaatttgggctgtttttcagatacactgtgataagttcttttacaaatatctatagacatggtaaacttttggttttcagatatgcttaatgatagtcttactaaatgcagaaataagaataaactttctcaaattattaaaaatgcctacacagtaagtgtgaattgctgcaacaggtttgttctcaggagggtaagaactccaggtctaaacagctgacccagtgatggggaatttatccttgaccaatttatccttgaccaataacctaattgtctattcctgagttataaaagtccccatccttattagctctactggaattttcatacacgtaaatgcagaagttactaagtattaagtattactgagtattaagtagtaatctgtcagttattaaaatttgtaaaatctatttatgaaaggtcattaaaccagatcatgttcctttttttgtaatcaaggtgactaagaaaatcagttgtgtaaataaaatcatgtatcataaaa

SEQ ID NO: 17624 - DNA, 729 bp, Homo sapiens
  source 1..729: mol_type = unassigned DNA
cgcgaccgaagcagggcgcgcagcagcgctgagtgccccggaacgtgcgtcgcgcccccagtgtccgtcgcgtccgccgcgccccgggcggggatggggcggccagactgagcgccgcacccgccatccagacccgccggccctagccgcagtccctccagccgtggccccagcgcgcacgggcgatggcgaaggcgacgtccggtgccgcggggctgcgtctgctgttgctgctgctgctgccgctgctaggcaaagatgtggccgaggaggcgggctgccccctgtcctgtgcagtcagcaagagacggctggagtgtgaggagtgtggcggcctgggctccccaacaggcaggtgtgagtggaggcaaggagatggcaaagggatcaccaggaacttctccacctgctctcccagcaccaagacctgccccgacggccactgcgatgttgtggagacccaagacatcaacatttgccctcaggactgcctccggggcagcattgttgggggacacgagcctggggagccccgggggattaaagctggctatggcacctgcaactgcttccctgaggaggagaagtgcttctgcgagcccgaagacatccaggatccactgtgcgacgagctgtgccgcacggtgatcgcagccgctgtcctcttctccttcatcgtctcggtgctgctgtctgccttctgcatccactgctaccacaagtttgccc

SEQ ID NO: 17625 - DNA, 4149 bp, Homo sapiens
  source 1..4149: mol_type = unassigned DNA
ccgaagcagggcgcgcagcagcgctgagtgccccggaacgtgcgtcgcgcccccagtgtccgtcgcgtccgccgcgccccgggcggggatggggcggccagactgagcgccgcacccgccatccagacccgccggccctagccgcagtccctccagccgtggccccagcgcgcacgggcgatggcgaaggcgacgtccggtgccgcggggctgcgtctgctgttgctgctgctgctgccgctgctaggcaaagtggcattgggcctctacttctcgagggatgcttactgggagaagctgtatgtggaccaggcagccggcacgcccttgctgtacgtccatgccctgcgggacgcccctgaggaggtgcccagcttccgcctgggccagcatctctacggcacgtaccgcacacggctgcatgagaacaactggatctgcatccaggaggacaccggcctcctctaccttaaccggagcctggaccatagctcctgggagaagctcagtgtccgcaaccgcggctttcccctgctcaccgtctacctcaaggtcttcctgtcacccacatcccttcgtgagggcgagtgccagtggccaggctgtgcccgcgtatacttctccttcttcaacacctcctttccagcctgcagctccctcaagccccgggagctctgcttcccagagacaaggccctccttccgcattcgggagaaccgacccccaggcaccttccaccagttccgcctgctgcctgtgcagttcttgtgccccaacatcagcgtggcctacaggctcctggagggtgagggtctgcccttccgctgcgccccggacagcctggaggtgagcacgcgctgggccctggaccgcgagcagcgggagaagtacgagctggtggccgtgtgcaccgtgcacgccggcgcgcgcgaggaggtggtgatggtgcccttcccggtgaccgtgtacgacgaggacgactcggcgcccaccttccccgcgggcgtcgacaccgccagcgccgtggtggagttcaagcggaaggaggacaccgtggtggccacgctgcgtgtcttcgatgcagacgtggtacctgcatcaggggagctggtgaggcggtacacaagcacgctgctccccggggacacctgggcccagcagaccttccgggtggaacactggcccaacgagacctcggtccaggccaacggcagcttcgtgcgggcgaccgtacatgactataggctggttctcaaccggaacctctccatctcggagaaccgcaccatgcagctggcggtgctggtcaatgactcagacttccagggcccaggagcgggcgtcctcttgctccacttcaacgtgtcggtgctgccggtcagcctgcacctgcccagtacctactccctctccgtgagcaggagggctcgccgatttgcccagatcgggaaagtctgtgtggaaaactgccaggcattcagtggcatcaacgtccagtacaagctgcattcctctggtgccaactgcagcacgctaggggtggtcacctcagccgaggacacctcggggatcctgtttgtgaatgacaccaaggccctgcggcggcccaagtgtgccgaacttcactacatggtggtggccaccgaccagcagacctctaggcaggcccaggcccagctgcttgtaacagtggaggggtcatatgtggccgaggaggcgggctgccccctgtcctgtgcagtcagcaagagacggctggagtgtgaggagtgtggcggcctgggctccccaacaggcaggtgtgagtggaggcaaggagatggcaaagggatcaccaggaacttctccacctgctctcccagcaccaagacctgccccgacggccactgcgatgttgtggagacccaagacatcaacatttgccctcaggactgcctccggggcagcattgttgggggacacgagcctggggagccccgggggattaaagctggctatggcacctgcaactgcttccctgaggaggagaagtgcttctgcgagcccgaagacatccaggatccactgtgcgacgagctgtgccgcacggtgatcgcagccgctgtcctcttctccttcatcgtctcggtgctgctgtctgccttctgcatccactgctaccacaagtttgcccacaagccacccatctcctcagctgagatgaccttccggaggcccgcccaggccttcccggtcagctactcctcttccggtgcccgccggccctcgctggactccatggagaaccaggtctccgtggatgccttcaagatcctggaggatccaaagtgggaattccctcggaagaacttggttcttggaaaaactctaggagaaggcgaatttggaaaagtggtcaaggcaacggccttccatctgaaaggcagagcagggtacaccacggtggccgtgaagatgctgaaagagaacgcctccccgagtgagctgcgagacctgctgtcagagttcaacgtcctgaagcaggtcaaccacccacatgtcatcaaattgtatggggcctgcagccaggatggcccgctcctcctcatcgtggagtacgccaaatacggctccctgcggggcttcctccgcgagagccgcaaagtggggcctggctacctgggcagtggaggcagccgcaactccagctccctggaccacccggatgagcgggccctcaccatgggcgacctcatctcatttgcctggcagatctcacaggggatgcagtatctggccgagatgaagctcgttcatcgggacttggcagccagaaacatcctggtagctgaggggcggaagatgaagatttcggatttcggcttgtcccgagatgtttatgaagaggattcctacgtgaagaggagccagggtcggattccagttaaatggatggcaattgaatccctttttgatcatatctacaccacgcaaagtgatgtatggtcttttggtgtcctgctgtgggagatcgtgaccctagggggaaacccctatcctgggattcctcctgagcggctcttcaaccttctgaagaccggccaccggatggagaggccagacaactgcagcgaggagatgtaccgcctgatgctgcaatgctggaagcaggagccggacaaaaggccggtgtttgcggacatcagcaaagacctggagaagatgatggttaagaggagagactacttggaccttgcggcgtccactccatctgactccctgatttatgacgacggcctctcagaggaggagacaccgctggtggactgtaataatgcccccctccctcgagccctcccttccacatggattgaaaacaaactctatggtagaatttcccatgcatttactagattctagcaccgctgtcccctttgcactatccttcctctctgtgatgctttttaaaaatgtttctggtctgaacaaaaccaaagtctgctctgaacctttttatttgtaaatgtctgactttgcatccagtttacatttaggcattattgcaactatgtttttctaaaaggatgtgaaaataagtgtaattaccacattgcccagcaacttaggatggtagaggaaaaaacagatcagggcggaactctcaggggagaccaagaacaggttgaataaggcgcttctggggtgggaatcaagtcatagtacttctactttaactaagtggataaatatacaaatctggggaggtattcagttgagaaaggagccaccagcaccactcagcctgcactgggagcacagccaggttcccccagacccctcctgggcaggcaggtgcctctcagaggccacccggcactggcgagcagccactggccaagcctcagccccagtcccagccacatgtcctccatcaggggtagcgaggttgcaggagctggctggccctgggaggacgcacccccactgctgttttcacatcctttcccttacccaccttcaggacggttgtcacttatgaagtcagtgctaaagctggagcagttgctttttgaaagaacatggtctgtggtgctgtggtcttacaatggacagtaaatatggttcttgccaaaactccttcttttgtctttgattaaatactagaaattt

SEQ ID NO: 17626 - DNA, 773 bp, Homo sapiens
  source 1..773: mol_type = unassigned DNA
ggatgcttactgggagaagctgtatgtggaccaggcagccggcacgcccttgctgtacgtccatgccctgcgggacgcccctgaggaggtgcccagcttccgcctgggccagcatctctacggcacgtaccgcacacggctgcatgagaacaactggatctgcatccaggaggacaccggcctcctctaccttaaccggagcctggaccatagctcctgggagaagctcagtgtccgcaatgtggccgatgcccccacagacctgacttctctctgcagaccgcggctttcccctgctcaccgtctacctcaaggtcttcctgtcacccacatcccttcgtgagggcgagtgccagtggccaggctgtgcccgcgtatacttctccttcttcaacacctcctttccagcctgcagctccctcaagccccgggagctctgcttcccagagacaaggccctccttccgcattcgggagaaccgacccccaggcaccttccaccagttccgcctgctgcctgtgcagttcttgtgccccaacatcagcgtggcctacaggctcctggagggtgagtgccgaccttgtggggccgccccacagtgcctgctactgctggtcttgctctgcgagcccttgacacaagccatctggtttattcttcaccttcatgccatcagttcattcaatattccagaagtacctcttgcatgcctgccaggggccaggtactgttctaggagctaaggatataacaatgaacacaacgggttggaa

SEQ ID NO: 17627 - DNA, 608 bp, Homo sapiens
  source 1..608: mol_type = unassigned DNA
ggatgcttactgggagaagctgtatgtggaccaggcagccggcacgcccttgctgtacgtccatgccctgcgggacgcccctgaggaggtgcccagcttccgcctgggccagcatctctacggcacgtaccgcacacggctgcatgagaacaactggatctgcatccaggaggacaccggcctcctctaccttaaccggagcctggaccatagctcctgggagaagctcagtgtccgcacctgcagctccctcaagccccgggagctctgcttcccagagacaaggccctccttccgcattcgggagaaccgacccccaggcaccttccaccagttccgcctgctgcctgtgcagttcttgtgccccaacatcagcgtggcctacaggctcctggagggtgagtgccgaccttgtggggccgccccacagtgcctgctactgctggtcttgctctgcgagcccttgacacaagccatctggtttattcttcaccttcatgccatcagttcattcaatattccagaagtacctcttgcatgcctgccaggggccaggtactgttctaggagctaaggatataacaatgaacacaacgggttggaatctt

SEQ ID NO: 17628 - DNA, 577 bp, Homo sapiens
  source 1..577: mol_type = unassigned DNA
acagtcatcgctgcaaactgcaaactcgtaagcacagtcatcgctgcaaactgcaaactcgtgctccgagcgctgccctcccctgtggagcggaggaggggaggcctggggccgcggcggtgtgcgccccgctctgaccgcagagcccccttcccgaggaaagcggctggcccggtcccggctggtgatcacgcggggcccctgtctgcttggtgcgcaggtgagggtctgcccttccgctgcgccccggacagcctggaggtgagcacgcgctgggccctggaccgcgagcagcgggagaagtacgagctggtggccgtgtgcaccgtgcacgccggcgcgcgcgaggaggtggtgatggtgcccttcccggtgaccgtgtacgacgaggacgactcggcgcccaccttccccgcgggcgtcgacaccgccagcgccgtggtggagttcaagcggaaggaggacaccgtggtggccacgctgcgtgtcttcgatgcagacgtggtacctgcatcaggggagctggtgaggcggtacacaagcacgctgctccccggggacacctgggcccagcaga

SEQ ID NO: 17629 - DNA, 4337 bp, Homo sapiens
  source 1..4337: mol_type = unassigned DNA
agtcccgcgaccgaagcagggcgcgcagcagcgctgagtgccccggaacgtgcgtcgcgcccccagtgtccgtcgcgtccgccgcgccccgggcggggatggggcggccagactgagcgccgcacccgccatccagacccgccggccctagccgcagtccctccagccgtggccccagcgcgcacgggcgatggcgaaggcgacgtccggtgccgcggggctgcgtctgctgttgctgctgctgctgccgctgctaggcaaagtggcattgggcctctacttctcgagggatgcttactgggagaagctgtatgtggaccaggcagccggcacgcccttgctgtacgtccatgccctgcgggacgcccctgaggaggtgcccagcttccgcctgggccagcatctctacggcacgtaccgcacacggctgcatgagaacaactggatctgcatccaggaggacaccggcctcctctaccttaaccggagcctggaccatagctcctgggagaagctcagtgtccgcaaccgcggctttcccctgctcaccgtctacctcaaggtcttcctgtcacccacatcccttcgtgagggcgagtgccagtggccaggctgtgcccgcgtatacttctccttcttcaacacctcctttccagcctgcagctccctcaagccccgggagctctgcttcccagagacaaggccctccttccgcattcgggagaaccgacccccaggcaccttccaccagttccgcctgctgcctgtgcagttcttgtgccccaacatcagcgtggcctacaggctcctggagggtgagggtctgcccttccgctgcgccccggacagcctggaggtgagcacgcgctgggccctggaccgcgagcagcgggagaagtacgagctggtggccgtgtgcaccgtgcacgccggcgcgcgcgaggaggtggtgatggtgcccttcccggtgaccgtgtacgacgaggacgactcggcgcccaccttccccgcgggcgtcgacaccgccagcgccgtggtggagttcaagcggaaggaggacaccgtggtggccacgctgcgtgtcttcgatgcagacgtggtacctgcatcaggggagctggtgaggcggtacacaagcacgctgctccccggggacacctgggcccagcagaccttccgggtggaacactggcccaacgagacctcggtccaggccaacggcagcttcgtgcgggcgaccgtacatgactataggctggttctcaaccggaacctctccatctcggagaaccgcaccatgcagctggcggtgctggtcaatgactcagacttccagggcccaggagcgggcgtcctcttgctccacttcaacgtgtcggtgctgccggtcagcctgcacctgcccagtacctactccctctccgtgagcaggagggctcgccgatttgcccagatcgggaaagtctgtgtggaaaactgcctggcagatctcacaggggatgcagtatctggccgagatgaagctcgttcatcgggacttggcagccagaaacatcctggtagctgaggggcggaagatgaagatttcggatttcggcttgtcccgagatgtttatgaagaggattcctacgtgaagaggagccagggtcggattccagttaaatggatggcaattgaatccctttttgatcatatctacaccacgcaaagtgatgtatggtcttttggtgtcctgctgtgggagatcgtgaccctagggggaaacccctatcctgggattcctcctgagcggctcttcaaccttctgaagaccggccaccggatggagaggccagacaactgcagcgaggagatgtaccgcctgatgctgcaatgctggaagcaggagccggacaaaaggccggtgtttgcggacatcagcaaagacctggagaagatgatggttaagaggagagactacttggaccttgcggcgtccactccatctgactccctgatttatgacgacggcctctcagaggaggagacaccgctggtggactgtaataatgcccccctccctcgagccctcccttccacatggattgaaaacaaactctatggcatgtcagacccgaactggcctggagagagtcctgtaccactcacgagagctgatggcactaacactgggtttccaagatatccaaatgatagtgtatatgctaactggatgctttcaccctcagcggcaaaattaatggacacgtttgatagttaacatttctttgtgaaaggtaatggactcacaaggggaagaaacatgctgagaatggaaagtctaccggccctttctttgtgaacgtcacattggccgagccgtgttcagttcccaggtggcagactcgtttttggtagtttgttttaacttccaaggtggttttacttctgatagccggtgattttccctcctagcagacatgccacaccgggtaagagctctgagtcttagtggttaagcattcctttctcttcagtgcccagcagcacccagtgttggtctgtgtccatcagtgaccaccaacattctgtgttcacatgtgtgggtccaacacttactacctggtgtatgaaattggacctgaactgttggatttttctagttgccgccaaacaaggcaaaaaaatttaaacatgaagcacacacacaaaaaaggcagtaggaaaaatgctggccctgatgacctgtccttattcagaatgagagactgcggggggggcctgggggtagtgtcaatgcccctccagggctggaggggaagaggggccccgaggatgggcctgggctcagcattcgagatcttgagaatgattttttttaaatcatgcaacctttccttaggaagacatttggttttcatcatgattaagatgattcctagatttagcacaatggagagattccatgccatctttactatgtggatggtggtatcagggaagagggctcacaagacacatttgtcccccgggcccaccacatcatcctcacgtgttcggtactgagcagccactacccctgatgagaacagtatgaagaaagggggctgttggagtcccagaattgctgacagcagaggctttgctgctgtgaatcccacctgccaccagcctgcagcacaccccacagccaagtagaggcgaaagcagtggctcatcctacctgttaggagcaggtagggcttgtactcactttaatttgaatcttatcaacttactcataaagggacaggctagctagctgtgttagaagtagcaatgacaatgaccaaggactgctacacctctgattacaattctgatgtgaaaaagatggtgtttggctcttatagagcctgtgtgaaaggcccatggatcagctcttcctgtgtttgtaatttaatgctgctacaagatgtttctgtttcttagattctgaccatgactcataagcttcttgtcattcttcattgcttgtttgtggtcacagatgcacaacactcctccagtcttgtgggggcagcttttgggaagtctcagcagctcttctggctgtgttgtcagcactgtaacttcgcagaaaagagtcggattaccaaaacactgcctgctcttcagacttaaagcactgataggacttaaaatagtctcattcaaatactgtattttatataggcatttcacaaaaacagcaaaattgtggcattttgtgaggccaaggcttggatgcgtgtgtaatagagccttgtggtgtgtgcgcacacacccagagggagagtttgaaaaatgcttattggacacgtaacctggctctaatttgggctgtttttcagatacactgtgataagttcttttacaaatatctatagacatggtaaacttttggttttcagatatgcttaatgatagtcttactaaatgcagaaataagaataaactttctcaaattattaaaaatgcctacacagtaagtgtgaattgctgcaacaggtttgttctcaggagggtaagaactccaggtctaaacagctgacccagtgatggggaatttatccttgaccaatttatccttgaccaataacctaattgtctattcctgagttataaaagtccccatccttattagctctactggaattttcatacacgtaaatgcagaagttactaagtattaagtattactgagtattaagtagtaatctgtcagttattaaaatttgtaaaatctatttatgaaaggtcattaaaccagatcatgttcctttttttgtaatcaaggtgactaagaaaatcagttgtgtaaataaaatcatgtatc

SEQ ID NO: 17630 - DNA, 616 bp, Homo sapiens
  source 1..616: mol_type = unassigned DNA
gtgcagacagactacgtgcccctgctgaactcgctggcggcctatggctggcagctcacctgtgtgctaccaactcccgtcgtcaagactaccagcgaggggagtgtatccaccaagcagattgtctttcttcagagaccttgtctacctcagaaaatcaagaagaaggaatcgaagtttcagtggcgattctccagagaagaaatgcacaacaggcagatgaggaaatcaaaagttacttacggcaataaatcatctatgagttagtgcaccgtgaggattgagtgtttatcgtgtcactaggaacagtcctggcctcatgtccaaaggattccagcccacaccccccattcactataagtttctaactcctggcagcatgatgacgtggtggaggaagacaaagttcccatggaaagctgcagagccagctaggcttgctgtgctttctcgtcatttgtagaaagagatggcaagtggaactcagatgccaccagtttcttcacagctctgagcatcaatcgcctcaagtgtgaaatggggtgaaatggcacccacctctttggatttttgtgaggattaataagatgtgaataaagtgcttggtccatggtaa

SEQ ID NO: 17631 - DNA, 2695 bp, Homo sapiens
  source 1..2695: mol_type = unassigned DNA
ctcgtacagtccttcatcttcatggcagaaaggctgttctgcccctgcgccctccctggcctctctggggatccctgcagctgatgtattgtgatggagcagtggacttggatgctgctgcggagctccctgggtcctcagcagtgaggctggcctccctgcgtgacctgcccgcccagctcctggagctgtaccagcagggcttctcgctggcggccctgcaccccttcgtgcagcccacccatgagcgggagaagacgcccctggagcacatctttagagccatcctgatcaagaaaaccgacagatctcagaaaactgatcttcacaatgaaggctacatcttggaattagattgctgttcctccttagaccacccgacagaccagaaactcatcccagagttcattaagaagatccaggaggctgcaagccagggcctgaaattcgttggtgttatacctcagtaccattcctctgtgaactcggcaggcagcagtgctccggtgtctactgccaacagcaccgaggatgccagagatgcaaaaaacgcacgtggggatcacgcgtcactggagaatgagaaaccggggactggggatgtgtgcagtgctccggctgggagaaaccaaagcccagagcccagctcaggccccagaggggaggtgcccctcgccaagcagcccagctcaccctccggagagggagatggtggagaactttcaccacagggggtgagcaagacactggatggaccggagagcaaccccttggaggtgcatgaagagccactctcagggaaaatggagatcttcacccttttcaacaaaccgaagagccatcagaagtgccggcaatactaccctgtcaccattcctctccatgtctccaagaatggccagacagtgagcggtttggacgccaactggttagagcacatgagcgaccacttccggaaaggaggcatgctggtgaacgcagtcttctaccttggaatagtgaatgattccttacatggcttgacagatggagtattcatctttgaagctgtttccacagaagatagcaaaaccatacagggctatgatgctattgtggttgaacaatggacagtcctggaaggtgtcgaagtgcagacagactacgtgcccctgctgaactcgctggcggcctatggctggcagctcacctgtgtgctaccaactcccgtcgtcaagactaccagcgaggggagtgtatccaccaagcagattgtctttcttcagagaccttgtctacctcagaaaatcaagaagaaggaatcgaagtttcagtggcgattctccagagaagaaatgcacaacaggcagatgaggaaatcaaaaggtaaactcagtgccagagacaaacaacaagcagaagaaaatgagaagaacttagaagaccagtcttccaaagctggagacatgggaaactgtgtttcaggacagcagcaggagggtggagtctccgaggagatgaagggccctgtccaagaggacaagggagaacagctgtcccctggtggcctgctgtgtggggtgggtgtggagggtgaggctgtgcagaatggtcctgccagccacagcagggccctggtggggatttgcactgggcactccaatcctggagaggatgccagggacggggatgctgaggaagtcagagagcttggtacggttgaagaaaactgagtcttgggcaatttgtgctaaaactaggtgagttgccaaacccaaggcatcttaccaacagctggtttgggggctggtttccctggtgttgtgtgttacctaccctttggcttggcttgacctctccttgtgagctcacctgagccctcccagggccaggttcctgacagtgttggtttttgcacatccactggaaaggtgtcattaatgacccagtgttagaatgcaagaggtcaggttattctagccctcatggctgaaggcccagtcctggctccaccactcctccagccagagggtctggaccatccagtgcctgtcctcgccacagggcctccagggagcattcgggtcaaatccatggacaccctgggctacaaaccaaggctgctgttcatcccacatcgtgtggggcagtgtccatcccctgcagctacttggtgacttaacaactccaggagccctgtcagctgccctcctccacctaaaccccttcgactcttctgctttgacaaagaaaatgacattggggaggggaggtgctccgcctcccagcttttctcaaaatagtcctatagatactggtaatctggaaatgaagaagtaattctgtctctgcacctacttttgcagaatgttcaaggaagtattctgtgttagtattaatgccaaaaagttgtttttaaaggttttgtactcagcacatcatacaaaccacattacttctgtcacttcagggcatcgggactggctggcgcccttgttatgtgctattttaatcagtgtaacattggtcaagttgttacccatgtatgctgtgtttatcatgtgtatatcgtccagaaagtattaaggctttaggtagatgcaactggcgaaccttggagagggaatgctgattgtcttgaccaaacccacagcctgtctcttctcttgtttagttacttacggcaataaatcatctatgagttagtgcaccgtga

SEQ ID NO: 17632 - DNA, 2982 bp, Homo sapiens
  source 1..2982: mol_type = unassigned DNA
cgtcggggctggagccggagcgcgccgggcgctgggcgcagcgagcgagagcgcggcggccgcgggctccggcgagggacagacgcaccgatcgccggagggacagacacacgaccacgcggcgccaccgcccacgcctccacccaccggcgcccaagtcctccccgcgccgcctcctctgtatggcacaaactttcctcccgggacggaacacgctgcctcagggagcccgcgaccgcgccttctcctccgccggtcccatacgctgctgaaatgggttgcggattgaacaagttagagaaacgtgatgaaaaacggcctgggaatatttattcaactttgaagaggcctcaggtggaaaccaagatagatgtgtcctatgaataccgcttcctggagttcacgactctgagtgctgcggagctccctgggtcctcagcagtgaggctggcctccctgcgtgacctgcccgcccagctcctggagctgtaccagcagggcttctcgctggcggccctgcaccccttcgtgcagcccacccatgagcgggagaagacgcccctggagcacatctttagagccatcctgatcaagaaaaccgacagatctcagaaaactgatcttcacaatgaaggctacatcttggaattagattgctgttcctccttagaccacccgacagaccagaaactcatcccagagttcattaagaagatccaggaggctgcaagccagggcctgaaattcgttggtgttatacctcagtaccattcctctgtgaactcggcaggcagcagtgctccggtgtctactgccaacagcaccgaggatgccagagatgcaaaaaacgcacgtggggatcacgcgtcactggagaatgagaaaccggggactggggatgtgtgcagtgctccggctgggagaaaccaaagcccagagcccagctcaggccccagaggggaggtgcccctcgccaagcagcccagctcaccctccggagagggagatggtggagaactttcaccacagggggtgagcaagacactggatggaccggagagcaaccccttggaggtgcatgaagagccactctcagggaaaatggagatcttcacccttttcaacaaaccgaagagccatcagaagtgccggcaatactaccctgtcaccattcctctccatgtctccaagaatggccagacagtgagcggtttggacgccaactggttagagcacatgagcgaccacttccggaaaggaggcatgctggtgaacgcagtcttctaccttggaatagtgaatgattccttacatggcttgacagatggagtattcatctttgaagctgtttccacagaagatagcaaaaccatacagggctatgatgctattgtggttgaacaatggacagtcctggaaggtgtcgaagtgcagacagactacgtgcccctgctgaactcgctggcggcctatggctggcagctcacctgtgtgctaccaactcccgtcgtcaagactaccagcgaggggagtgtatccaccaagcagattgtctttcttcagagaccttgtctacctcagaaaatcaagaagaaggaatcgaagtttcagtggcgattctccagagaagaaatgcacaacaggcagatgaggaaatcaaaaggtaaactcagtgccagagacaaacaacaagcagaagaaaatgagaagaacttagaagaccagtcttccaaagctggagacatgggaaactgtgtttcaggacagcagcaggagggtggagtctccgaggagatgaagggccctgtccaagaggacaagggagaacagctgtcccctggtggcctgctgtgtggggtgggtgtggagggtgaggctgtgcagaatggtcctgccagccacagcagggccctggtggggatttgcactgggcactccaatcctggagaggatgccagggacggggatgctgaggaagtcagagagcttggtacggttgaagaaaactgagtcttgggcaatttgtgctaaaactaggtgagttgccaaacccaaggcatcttaccaacagctggtttgggggctggtttccctggtgttgtgtgttacctaccctttggcttggcttgacctctccttgtgagctcacctgagccctcccagggccaggttcctgacagtgttggtttttgcacatccactggaaaggtgtcattaatgacccagtgttagaatgcaagaggtcaggttattctagccctcatggctgaaggcccagtcctggctccaccactcctccagccagagggtctggaccatccagtgcctgtcctcgccacagggcctccagggagcattcgggtcaaatccatggacaccctgggctacaaaccaaggctgctgttcatcccacatcgtgtggggcagtgtccatcccctgcagctacttggtgacttaacaactccaggagccctgtcagctgccctcctccacctaaaccccttcgactcttctgctttgacaaagaaaatgacattggggaggggaggtgctccgcctcccagcttttctcaaaatagtcctatagatactggtaatctggaaatgaagaagtaattctgtctctgcacctacttttgcagaatgttcaaggaagtattctgtgttagtattaatgccaaaaagttgtttttaaaggttttgtactcagcacatcatacaaaccacattacttctgtcacttcagggcatcgggactggctggcgcccttgttatgtgctattttaatcagtgtaacattggtcaagttgttacccatgtatgctgtgtttatcatgtgtatatcgtccagaaagtattaaggctttaggtagatgcaactggcgaaccttggagagggaatgctgattgtcttgaccaaacccacagcctgtctcttctcttgtttagttacttacggcaataaatcatctatgagtta

SEQ ID NO: 17633 - DNA, 1314 bp, Homo sapiens
  source 1..1314: mol_type = unassigned DNA
gtgattattgattgctgaagaactgagctataaatgaaggaaccaaaagctcagcgcctcatcccctgtgccttcttggctgtttggaccgacctgccactccagaaatggagatcttcacccttttcaacaaaccgaagagccatcagaagtgccggcaatactaccctgtcaccattcctctccatgtctccaagaatggccagacagtgagcggtttggacgccaactggttagagcacatgagcgaccacttccggaaaggaggcatgctggtgaacgcagtcttctaccttggaatagtgaatgattccttacatggcttgacagatggagtattcatctttgaagctgtttccacagaagatagcaaaaccatacagggctatgatgctattgtggttgaacaatggacagtcctggaaggtgtcgaagtgcagacagactacgtgcccctgctgaactcgctggcggcctatggctggcagctcacctgtgtgctaccaactcccgtcgtcaagactaccagcgaggggagtgtatccaccaagcagattgtctttcttcagagaccttgtctacctcagaaaatcaagaagaaggaatcgaagtttcagtggcgattctccagagaagaaatgcacaacaggcagatgaggaaatcaaaaggtaaactcagtgccagagacaaacaacaagcagaagaaaatgagaagaacttagaagaccagtcttccaaagctggagacatgggaaactgtgtttcaggacagcagcaggagggtggagtctccgaggagatgaagggccctgtccaagaggacaagggagaacagctgtcccctggtggcctgctgtgtggggtgggtgtggagggtgaggctgtgcagaatggtcctgccagccacagcagggccctggtggggatttgcactgggcactccaatcctggagaggatgccagggacggggatgctgaggaagtcagagagcttggtacggttgaagaaaactgagtcttgggcaatttgtgctaaaactaggtgagttgccaaacccaaggcatcttaccaacagctggtttgggggctggtttccctggtgttgtgtgttacctaccctttggcttggcttgacctctccttgtgagctcacctgagccctcccagggccaggttcctgacagtgttggtttttgcacatccactggaaaggtgtcattaatgacccagtgttagaatgcaagaggtcaggttattctagccctcatggctgaaggcccagtcctggctccaccactcctccagccagagg

SEQ ID NO: 17634 - DNA, 1137 bp, Homo sapiens
  source 1..1137: mol_type = unassigned DNA
atggaccgggtctctggcgggtagtgggaaccgcgcgtggcgcctccctgcaggttgctctttgccggggctccggagctgccagagcagcaccccctggcccgcgtcggatggggacctgggctgatccttgggacgcctggatcttgggccaacttttttttgcggggaacgggtgtaggggagtcattcctggagcgatgtagggagaggcacttcggagcagcctgttgggggtcgtaggctctgcaggctcagaagcgcctaggaaggacgcagaggtgggggagcttggaggctacagctgctgaaatgggttgcggattgaacaagttagagaaacgtgatgaaaaacggcctgggaatatttattcaactttgaagaggcctcaggtggaaaccaagatagatgtgtcctatgaataccgcttcctggagttcacgactctgagtgctgcggagctccctgggtcctcagcagtgaggctggcctccctgcgtgacctgcccgcccagctcctggagctgtaccagcagggcttctcgctggcggccctgcaccccttcgtgcagcccacccatgagcgggagaagacgcccctggagcacatctttagagccatcctgatcaagaaaaccgacagatctcagaaaactgatcttcacaatgaaggctacatcttggaattagattgctgttcctccttagaccacccgacagaccagaaactcatcccagagttcattaagaagatccaggaggctgcaagccagggcctgaaattcgttggtgttatacctcagtaccattcctctgtgaactcggcaggcagcagtgctccggtgtctactgccaacagcaccgaggatgccagagatgcaaaaaacgcacgtggggatcacgcgtcactggagaatgagaaaccggggactggggatgtgtgcagtgctccggctgggagaaaccaaagcccagagcccagctcaggccccagaggggaggtgcccctcgccaagcagcccagctcaccctccggagagggagatggtggagaactttcaccacagggggtgagcaagacactggatggaccggagagcaaccccttggaggtgcatgaagagccactctcaggg

SEQ ID NO: 17635 - DNA, 569 bp, Homo sapiens
  source 1..569: mol_type = unassigned DNA
agtttgtcttttgactttgtttatgctgctttttgccacctagtatttttatatttgctcaatcggagctccctgggtcctcagcagtgaggctggcctccctgcgtgacctgcccgcccagctcctggagctgtaccagcagggcttctcgctggcggccctgcaccccttcgtgcagcccacccatgagcgggagaagacgcccctggagcacatctttagagccatcctgatcaagaaaaccgacagatctcagaaaactgatcttcacaatgaaggctacatcttggaattagattgctgttcctccttagaccacccgacagaccagaaactcatcccagagttcattaagaagatccaggaggctgcaagccagggcctgaaattcgttggtgttatacctcagtaccattcctctgtgaactcggcaggcagcagtgctccggtgtctactgccaacagcaccgaggatgccagagatgcaaaaaacgcacgtggggatcacgcgtcactggagaatgagaaaccggggactggggatgtgtgcagtgctccggctgggaga

SEQ ID NO: 17636 - DNA, 513 bp, Homo sapiens
  source 1..513: mol_type = unassigned DNA
tataaaagaaacttgctaggccaccaagcacttggagctttgcaggatatcttgtagttttactgaacagcaaagccttcactttggctttcttggttcctgaatcttctgtgtgctgtggtgggtttaaactaaattgaagggcttcaacatgaaaaagttcaaagcggagctccctgggtcctcagcagtgaggctggcctccctgcgtgacctgcccgcccagctcctggagctgtaccagcagggcttctcgctggcggccctgcaccccttcgtgcagcccacccatgagcgggagaagacgcccctggagcacatctttagagccatcctgatcaagaaaaccgacagatctcagaaaactgatcttcacaatgaaggctacatcttggaattagattgctgttcctccttagaccacccgacagaccagaaactcatcccagagttcattaagaagatccaggaggctgcaagccagggcctgaaattcgttggtgttatacctca

SEQ ID NO: 17637 - DNA, 566 bp, Homo sapiens
  source 1..566: mol_type = unassigned DNA
gagttctcatcaatgcctcctggtccagtcctcccaccatacacctgtcagaagttcctgcacccctttgggctcctccagcttaacttctttaatgctgtgtcagctgttagggaaatgggaaggaagagaaaagaaaaatggtgaatgcaaagaaccatattcaggaggtgcttggtctctgcttacaaaggctgcagcgagacccccccatatgaagatgctatcgaggattatgtcggagctccctgggtcctcagcagtgaggctggcctccctgcgtgacctgcccgcccagctcctggagctgtaccagcagggcttctcgctggcggccctgcaccccttcgtgcagcccacccatgagcgggagaagacgcccctggagcacatctttagagccatcctgatcaagaaaaccgacagatctcagaaaactgatcttcacaatgaaggctacatcttggaattagattgctgttcctccttagaccacccgacagaccagaaactcatcccagagttcattaagaagatccaggaggctgcaagccagggcctgaaat

SEQ ID NO: 17638 - DNA, 578 bp, Homo sapiens
  source 1..578: mol_type = unassigned DNA
gaggtgctggacgtgtaggagcagacatgccgcgcgctccgaggaagcgccggaaccaccagaagcacagggacgcgggtgccgagagtccccagcactgaaaacggggatctcctcttctctgctgaaatgggttgcggattgaacaagttagagaaacgtgatgaaaaacggcctgggaatatttattcaactttgaagaggcctcaggtggaaaccaagatagatgtgtcctatgaataccgcttcctggagttcacgactctgagtgctgcggagctccctgggtcctcagcagtgaggctggcctccctgcgtgacctgcccgcccagctcctggagctgtaccagcagggcttctcgctggcggccctgcaccccttcgtgcagcccacccatgagcgggagaagacgcccctggagcacatctttagagccatcctgatcaagaaaaccgacagatctcagaaaactgatcttcacaatgaaggctacatcttggaattagattgctgttcctccttagaccacccgacagaccagaaactcatcccagagttcattaagaagatccagga

SEQ ID NO: 17639 - DNA, 599 bp, Homo sapiens
  source 1..599: mol_type = unassigned DNA
gggtttgctctggggacagaggtgctggacgtgtaggagcagacatgccgcgcgctccgaggaagcgccggaaccaccagaagcacagggacgcgggtgccgagagtccccagcactgaaaacggggatctcctcttctcagctgctgaaatgggttgcggattgaacaagttagagaaacgtgatgaaaaacggcctgggaatatttattcaactttgaagaggcctcaggtggaaaccaagatagatgtgtcctatgaataccgcttcctggagttcacgactctgagtgctgcggagctccctgggtcctcagcagtgaggctggcctccctgcgtgacctgcccgcccagctcctggagctgtaccagcagggcttctcgctggcggccctgcaccccttcgtgcagcccacccatgagcgggagaagacgcccctggagcacatctttagagccatcctgatcaagaaaaccgacagatctcagaaaactgatcttcacaatgaaggctacatcttggaattagattgctgttcctccttagaccacccgacagaccagaaactcatcccagagttcattaagaagatccagga

SEQ ID NO: 17640 - DNA, 577 bp, Homo sapiens
  source 1..577: mol_type = unassigned DNA
ggcacaaactttcctcccgggacggaacacgctgcctcagggagcccgcgaccgcgccttctcctccgccggtcccatacgctgctgaaatgggttgcggattgaacaagttagagaaacgtgatgaaaaacggcctgggaatatttattcaactttgaagaggcctcaggtggaaaccaagatagatgtgtcctatgaataccgcttcctggagttcacgactctgagtgctgcggagctccctgggtcctcagcagtgaggctggcctccctgcgtgacctgcccgcccagctcctggagctgtaccagcagggcttctcgctggcggccctgcaccccttcgtgcagcccacccatgagcgggagaagacgcccctggagcacatctttagagccatcctgatcaagaaaaccgacaggaaatcacatctctgccagtagtacccttttattctcactcctttcagaaaattcctttggaatggtgaaatacagcctctcaaatctccagtgctctgtatctcagaaaactgatcttcacaatgaaggctacatcttggaattagattgctgtt

SEQ ID NO: 17641 - DNA, 555 bp, Homo sapiens
  source 1..555: mol_type = unassigned DNA
aaatcttgaaggatccttgtctcccaggcgctcttcctgacagcacacaaccttgattaggaggggctgggagggaggatcgatgagcccctgacccctgggttctgaggctgccagggtcgcttgcagctcggccgcgtggaggtgaccgggcggaactccgagggggcgcggggagagctgggcgggcccaccgctccagcgctgctgaaatgggttgcggattgaacaagttagagaaacgtgatgaaaaacggcctgggaatatttattcaactttgaagaggcctcaggtggaaaccaagatagatgtgtcctatgaataccgcttcctggagttcacgactctgagtgctgcggagctccctgggtcctcagcagtgaggctggcctccctgcgtgacctgcccgcccagctcctggagctgtaccagcagggcttctcgctggcggccctgcaccccttcgtgcagcccacccatgagcgggagaagacgcccctggagcacatctttagagccatcctgatcaagaaaaccgacagatctcagaaaa

SEQ ID NO: 17642 - DNA, 3955 bp, Homo sapiens
  source 1..3955: mol_type = unassigned DNA
atctgacgagcggccattcatcaggccggctggcctatcaatgacattgctcccatcggggctcctataaaatgatgctttttcccatgaaacatccgcaaacattttgacgggtttggctttgcccggctggattactgagtgtccccttgctcgctcgctttttctctctcccccttctccgagctcgctcccttctctccctctctctcctcttttcttctttctcttttctttcctcttctttttcttttcttttcctttcctcctttatccttgtgccccctcactttctgcgtctctctctctccccttctccctccctccctcccttcctccctgggcatctctagcacaggggatccccaaacatcaggacttttggggggcgcctgtgctgtccatgggaagagcatgcattgtgggttactggaggaacccgacatggattccacagagagctggattgaaagatgtctcaacgaaagtgaaaacaaacgttattccagccacacatctctggggaatgtttctaatgatgaaaatgaggaaaaagaaaataatagagcatccaagccccactccactcctgctactctgcaatggctggaggagaactatgagattgcagagggggtctgcatccctcgcagtgccctctatatgcattacctggatttctgcgagaagaatgatacccaacctgtcaatgctgccagctttggaaagatcataaggcagcagtttcctcagttaaccaccagaagactcgggacccgaggacagtcaaagtaccattactatggcattgcagtgaaagaaagctcccaatattatgatgtgatgtattccaagaaaggagctgcctgggtgagtgagacgggcaagaaagaagtgagcaaacagacagtggcatattcaccccggtccaaactcggaacactgctgccagaatttcccaatgtcaaagatctaaatctgccagccagcctgcctgaggagaaggtttctacctttattatgatgtacagaacacactgtcagagaatactggacactgtaataagagccaactttgatgaggttcaaagtttccttctgcacttttggcaaggaatgccgccccacatgctgcctgtgctgggctcctccacggtggtgaacattgtcggcgtgtgtgactccatcctctacaaagctatctccggggtgctgatgcccactgtgctgcaggcattacctgacagcttaactcaggtgattcgaaagtttgccaagcaactggatgagtggctaaaagtggctctccacgacctcccagaaaacttgcgaaacatcaagttcgaattgtcgagaaggttctcccaaattctgagacggcaaacatcactaaatcatctctgccaggcatctcgaacagtgatccacagtgcagacatcacgttccaaatgctggaagactggaggaacgtggacctgaacagcatcaccaagcaaaccctttacaccatggaagactctcgcgatgagcaccggaaactcatcacccaattatatcaggagtttgaccatctcttggaggagcagtctcccatcgagtcctacattgagtggctggataccatggttgaccgctgtgttgtgaaggtggctgccaagagacaagggtccttgaagaaagtggcccagcagttcctcttgatgtggtcctgtttcggcacaagggtgatccgggacatgaccttgcacagcgcccccagcttcgggtcttttcacctaattcacttaatgtttgatgactacgtgctctacctgttagaatctctgcactgtcaggagcgggccaatgagctcatgcgagccatgaagggagaaggaagcactgcagaagtccgagaagagatcatcttgacagaggctgccgcaccaaccccttcaccagtgccatcgttttctccagcaaaatctgccacatctgtggaagtgccacctccctcttcccctgttagcaatccttcccctgagtacactggcctcagcactacaggagcaatgcagtcttacacgtggtctctaacatacacagtgacgacggctgctgggtccccagctgagaactcccaacagctgccctgtatgaggaacactcatgtgccttcttcctccgtcacacacaggataccagtttatccccacagagaggaacatggatacacgggaagctataactatgggagctatggcaaccagcatcctcaccccatgcagagccagtatccggccctccctcatgacacagctatctctgggccactccactatgccccttaccacaggagctctgcacagtacccttttaatagccccacttcccggatggaaccttgtttgatgagcagtactcccagactgcatcctaccccagtcactccccgctggccagaggtgccctcagccaacacgtgctacacaagcccgtctgtgcattctgcgaggtacggaaactctagtgacatgtatacacctctgacaacgcgcaggaattctgaatatgagcacatgcaacactttcctggctttgcttacatcaacggagaggcctctacaggatgggctaaatgactgctatcataggcatccatatttaatattaataataataattaataataataataaacccaacacccatcccccagaagactttatctctatacattgtaactcatgggctattcctaagtgcccattttcctaatgaacatgaggatgggatcaatgtgggatgaataaactttagttcagaaacaggacttactaaaagtcagtgggactgggtttctgtagccaagccagacttgactgtttctgtagagcactatctcgggcaggccattctgtgccttttccctctgttccatgactttgctttgtgttggcaaccacttctagtaagctactgattttcctgttgacaaaatctctttagtcttgaaggatggatactggagacagaatctggtttgtgttcttggatgggcacataatttaccaagagcattcaccttgccatctgtcttgtcattgtactgtacaaggaacagccctcagacgtgttctgcacatcccttcttcctggtggtaccatccctatttcctggagcaccagggctaaatggggagctatctggaaactctagattttctgtcatacccacatctgtcacagtacctgcattgtcttggaatgtaagcactgtcttgagggaaggaagaggtctgttctgtattgccttaagttgattgaggtttgtaggagactggttcttctacatacaaggatttgtcttaagtttgcacaatggctagtgtcagcaaaaggcaggagagggtttttgttttttttttaagttctatgagaatgtggatttatggcattgagtatcacactcagctctgctgtgttaactttgtgaaactggatggaacaaactttaacttaccaagcaccaagtgtgaaagtgactttcacggttccttcataaaactataataatatccgacactttgatagaaaaaaattcaaagctgtgcctttgagcctatactatactgtgtatgtgtggaaataaaaatgtattgtacttttggagaattttttgtaggcatttttctgtcagatttgtagtaatttgtgaggtttgttagagattaatataggttttctttctgtattataaaatgcaccaagcaattatggtggacctattaccctatgggtaagaaataaatggaaatatgacatcggatgtttcagcaactgttctgtaaataaaatctttgatcacaccactcagtgtgataattgtgtctacagctaaaatggaaatagttttatctgtacagttgtgcaagatatgaatggtttcacactcaaataaaaaatattgaaacg

SEQ ID NO: 17643 - DNA, 660 bp, Homo sapiens
  source 1..660: mol_type = unassigned DNA
cggctggattactgagtgtccccttgctcgctcgctttttctctctcccccttctccgagctcgctcccttctctccctctctctcctcttttcttctttctcttttctttcctcttctttttcttttcttttcctttcctcctttatccttgtgccccctcactttctgcgtctctctctctccccttctccctccctccctcccttcctccctgggcatctctagcacaggggatccccaaacatcaggacttttggggggcgcctgtgctgtccatgggaagagcatgcattgtgggttactggaggaacccgacatggattccacagatgaggaaaaagaaaataatagagcatccaagccccactccactcctgctactctgcaatggctggaggagaactatgagattgcagagggggtctgcatccctcgcagtgccctctatatgcattacctggatttctgcgagaagaatgatacccaacctgtcaatgctgccagctttggaaagcaataaatgagagttcctgttgctctacatcctcaccagcatttggtgttgtcagtgttccaggttttggccattctaatagatcataaggcagcagtttcctcagttaaccaccagaagactcgggacccgaggacagtcaaa

SEQ ID NO: 17644 - DNA, 473 bp, Homo sapiens
  source 1..473: mol_type = unassigned DNA
aaagatgcgctggctcgcggcgagctcgaggtgccacttgcagaaactttgccagccgaccgccccctcccggacccaggtcctcctaggagagctggattgaaagatgtctcaacgaaagtgaaaacaaacgttattccagccacacatctctggggaatgtttctaatgatgaaaatgaggaaaaagaaaataatagagcatccaagccccactccactcctgctactctgcaatggctggaggagaactatgagattgcagagggggtctgcatccctcgcagtgccctctatatgcattacctggatttctgcgagaagaatgatacccaacctgtcaatgctgccagctttggaaagatcataaggcagcagtttcctcagttaaccaccagaagactcgggacccgaggacagtcaaagtaccattactatggcattgcagtgaaagaaagctcccaatattatgat

SEQ ID NO: 17645 - DNA, 1053 bp, Homo sapiens
  source 1..1053: mol_type = unassigned DNA
gttattatatcattccgaaaggactggaacaaccgactcacagcaagtgctggggcgaagtaggaaacgtccaggataagagaggccggcgagcggggccaccgtcccttactcttaaaaggaaaatccccgcgaagtgcctcgggcccgggagaacagttttgcaggggccagggctctagtggcctgctttggggccacttcagcatgacctgcggaaacgcgcccctttgttccgcacactgagccaagagctggattgaaagatgtctcaacgaaagtgaaaacaaacgttattccagccacacatctctggggaatgtttctaatgatgaaaatgaggaaaaagaaaataatagagcatccaagccccactccactcctgctactctgcaatggctggaggagaactatgagattgcagagggggtctgcatccctcgcagtgccctctatatgcattacctggatttctgcgagaagaatgatacccaacctgtcaatgctgccagctttggaaagatcataaggcagcagtttcctcagttaaccaccagaagactcgggacccgaggacagtcaaagttcaaagtttccttctgcacttttggcaaggaatgccgccccacatgctgcctgtgctgggctcctccacggtggtgaacattgtcggcgtgtgtgactccatcctctacaaagctatctccggggtgctgatgcccactgtgctgcaggcattacctgacagcttaactcaggtgattcgaaagtttgccaagcaactggatgagtggctaaaagtggctctccacgacctcccagaaaacttgcgaaacatcaagttcgaattgtcgagaaggttctcccaaattctgagacggcaaacatcactaaatcatctctgccaggcatctcgaacagtgatccacagtgcagacatcacgttccaaatgctggaagactggaggaacgtggacctgaacagcatcaccaagcaaaccctttacaccatggaagactctcgcgatgagcaccggaaactcatcacccaat

SEQ ID NO: 17646 - DNA, 2565 bp, Homo sapiens
  source 1..2565: mol_type = unassigned DNA
gttgccatggcaacccactgacctgagccaccccctggagaggccacagctgctggcttcctgggcttctccaaactcctgtgtgtcgccactgccaccggcagggagccaggagagagacagaaaggggctgagacagaatgatcaaaaggagagcccaccctggtgcgggaggcgacaggaccaggcctcgacggcgccgttccactgagagctggattgaaagatgtctcaacgaaagtgaaaacaaacgttattccagccacacatctctggggaatgtttctaatgatgaaaatgaggaaaaagaaaataatagagcatccaagccccactccactcctgctactctgcaatggctggaggagaactatgagattgcagagggggtctgcatccctcgcagtgccctctatatgcattacctggatttctgcgagaagaatgatacccaacctgtcaatgctgccagctttggaaagatcataaggcagcagtttcctcagttaaccaccagaagactcgggacccgaggacagtcaaagtaccattactatggcattgcagtgaaagaaagctcccaatattatgatgtgatgtattccaagaaaggagctgcctgggtgagtgagacgggcaagaaagaagtgagcaaacagacagtggcatattcaccccggtccaaactcggaacactgctgccagaatttcccaatgtcaaagatctaaatctgccagccagcctgcctgaggagaaggtttctacctttattatgatgtacagaacacactgtcagagaatactggacactgtaataagagccaactttgatgaggttcaaagtttccttctgcacttttggcaaggaatgccgccccacatgctgcctgtgctgggctcctccacggtggtgaacattgtcggcgtgtgtgactccatcctctacaaagctatctccggggtgctgatgcccactgtgctgcaggcattacctgacagcttaactcaggtgattcgaaagtttgccaagcaactggatgagtggctaaaagtggctctccacgacctcccagaaaacttgcgaaacatcaagttcgaattgtcgagaaggttctcccaaattctgagacggcaaacatcactaaatcatctctgccaggcatctcgaacagtgatccacagtgcagacatcacgttccaaatgctggaagactggaggaacgtggacctgaacagcatcaccaagcaaaccctttacaccatggaagactctcgcgatgagcaccggaaactcatcacccaattatatcaggagtttgaccatctcttggaggagcagtctcccatcgagtcctacattgagtggctggataccatggttgaccgctgtgttgtgaaggtggctgccaagagacaagggtccttgaagaaagtggcccagcagttcctcttgatgtggtcctgtttcggcacaagggtgatccgggacatgaccttgcacagcgcccccagcttcgggtcttttcacctaattcacttaatgtttgatgactacgtgctctacctgttagaatctctgcactgtcaggagcgggccaatgagctcatgcgagccatgaagggagaaggaagcactgcagaagtccgagaagagatcatcttgacagaggctgccgcaccaaccccttcaccagtgccatcgttttctccagcaaaatctgccacatctgtggaagtgccacctccctcttcccctgttagcaatccttcccctgagtacactggcctcagcactacaggagcaatgcagtcttacacgtggtctctaacatacacagtgacgacggctgctgggtccccagctgagaactcccaacagctgccctgtatgaggaacactcatgtgccttcttcctccgtcacacacaggataccagtttatccccacagagaggaacatggatacacgggaagctataactatgggagctatggcaaccagcatcctcaccccatgcagagccagtatccggccctccctcatgacacagctatctctgggccactccactatgccccttaccacaggagctctgcacagtacccttttaatagccccacttcccggatggaaccttgtttgatgagcagtactcccagactgcatcctaccccagtcactccccgctggccagaggtgccctcagccaacacgtgctacacaagcccgtctgtgcattctgcgaggtacggaaactctagtgacatgtatacacctctgacaacgcgcaggaattctgaatatgagcacatgcaacactttcctggctttgcttacatcaacggagaggcctctacaggatgggctaaatgactgctatcataggcatccatatttaatattaataataataattaataataataataaacccaacacccatcccccagaagactttatctctatacattgtaactcatgggctattcctaagtgcccattttcctaatgaacatgaggatgggatcaatgtgggatgaataaactttagttcagaaacagg

SEQ ID NO: 17647 - DNA, 1228 bp, Homo sapiens
  source 1..1228: mol_type = unassigned DNA
accccctggagaggccacagctgctggcttcctgggcttctccaaactcctgtgtgtcgccactgccaccggcagggagccaggagagagacagaaaggggctgagacagaatgatcaaaaggagagcccaccctggtgcgggaggcgacaggaccaggcctcgacggcgccgttccactgagagctggattgaaagatgtctcaacgaaagtgaaaacaaacgttattccagccacacatctctggggaatgtttctaatgatgaaaatgaggaaaaagaaaataatagagcatccaagccccactccactcctgctactctgcaatggctggaggagaactatgagattgcagagggggtctgcatccctcgcagtgccctctatatgcattacctggatttctgcgagaagaatgatacccaacctgtcaatgctgccagctttggaaagatcataaggcagcagtttcctcagttaaccaccagaagactcgggacccgaggacagtcaaagtaccattactatggcattgcagtgaaagaaagctcccaatattatgatgtgatgtattccaagaaaggagctgcctgggtgagtgagacgggcaagaaagaagtgagcaaacagacagtggcatattcaccccggtccaaactcggaacactgctgccagaatttcccaatgtcaaagatctaaatctgccagccagcctgcctgaggagaaggtttctacctttattatgatgtacagaacacactgtcagagaatactggacactgtaataagagccaactttgatgaggaatgccgccccacatgctgcctgtgctgggctcctccacggtggtgaacattgtcggcgtgtgtgactccatcctctacaaagctatctccggggtgctgatgcccactgtgctgcaggcattacctgacagcttaactcaggtgattcgaaagtttgccaagcaactggatgagtggctaaaagtggctctccacgacctcccagaaaacttgcgaaacatcaagttcgaattgtcgagaaggttctcccaaattctgagacggcaaacatcactaaatcatctctgccaggcatctcgaacagtgatccacagtgcagacatcacgttccaaatgctggaagactggaggaacgtggacctgaacagcatcaccaagcaaaccctttacaccatggaagactctcgcgatgagcaccg

SEQ ID NO: 17648 - DNA, 2186 bp, Homo sapiens
  source 1..2186: mol_type = unassigned DNA
tggagaggccacagctgctggcttcctgggcttctccaaactcctgtgtgtcgccactgccaccggcagggagccaggagagagacagaaaggggctgagacagaatgatcaaaaggagagcccaccctggtgcgggaggcgacaggaccaggcctcgacggcgccgttccactgagagctggattgaaagatgtctcaacgaaagtgaaaacaaacgttattccagccacacatctctggggaatgtttctaatgatgaaaatgaggaaaaagaaaataatagagcatccaagccccactccactcctgctactctgcaatggctggaggagaactatgagattgcagagggggtctgcatccctcgcagtgccctctatatgcattacctggatttctgcgagaagaatgatacccaacctgtcaatgctgccagctttggaaagatcataaggcagcagtttcctcagttaaccaccagaagactcgggacccgaggacagtcaaagtaccattactatggcattgcagtgaaagaaagctcccaatattatgatgtgatgtattccaagaaaggagctgcctgggtgagtgagacgggcaagaaagaagtgagcaaacagacagtggcatattcaccccggtccaaactcggaacactgctgccagaatttcccaatgtcaaagatctaaatctgccagccagcctgcctgaggagaaggtttctacctttattatgatgtacagaacacactgtcagagaatactggacactgtaataagagccaactttgatgaggttcaaagtttccttctgcacttttggcaaggaatgccgccccacatgctgcctgtgctgggctcctccacggtggtgaacattgtcggcgtgtgtgactccatcctctacaaagctatctccggggtgctgatgcccactgtgctgcaggcattacctgacagcttaactcaggtgattcgaaagtttgccaagcaactggatgagtggctaaaagtggctctccacgacctcccagaaaacttgcgaaacatcaagttcgaattgtcgagaaggttctcccaaattctgagacggcaaacatcactaaatcatctctgccaggcatctcgaacagtgatccacagtgcagacatcacgttccaaatgctggaagactggaggaacgtggacctgaacagcatcaccaagcaaaccctttacaccatggaagactctcgcgatgagcaccggaaactcatcacccaattatatcaggagtttgaccatctcttggaggagcagtctcccatcgagtcctacattgagtggctggataccatggttgaccgctgtgttgtgaaggtggctgccaagagacaagggtccttgaagaaagtggcccagcagttcctcttgatgtggtcctgtttcggcacaagggtgatccgggacatgaccttgcacagcgcccccagcttcgggtcttttcacctaattcacttaatgtttgatgactacgtgctctacctgttagaatctctgcactgtcaggagcgggccaatgagctcatgcgagccatgaagggagaaggaagcactgcagaagtccgagaagagatcatcttgacagaggctgccgcaccaaccccttcaccagtgccatcgttttctccagcaaaatctgccacatctgtggaagtgccacctccctcttcccctgttagcaatccttcccctgagtacactggcctcagcactacaggtaatggaaagtccttcaaaaactttgggtagttaatgtttgaagaaagggctttctgccagcctgggcaacatagtgagacttcatttccacacacacaaaaagccagacatcttggctcacacctgtagtcccagctacttgggaggctgaggtgggagaattgcttgagcccaggagctacgatcgcaccactgcattctagccttagtgatacagtgagaccttgtctcaaaaaaagaaaaacagggctttctggaaaaacattcttctcccacaatctccaaaagataatgccaaaacctgggtatcttcctggatttgtgaatgacgtacaggtattcatttattcattggtacacattctgtatgctgctgttttcaagttggcaaattaagcatatgataaaatcccaaaact

SEQ ID NO: 17649 - DNA, 1659 bp, Homo sapiens
  source 1..1659: mol_type = unassigned DNA
atgaggaaaaagaaaataatagagcatccaagccccactccactcctgctactctgcaatggctggaggagaactatgagattgcagagggggtctgcatccctcgcagtgccctctatatgcattacctggatttctgcgagaagaatgatacccaacctgtcaatgctgccagctttggaaagatcataaggcagcagtttcctcagttaaccaccagaagactcgggacccgaggacagtcaaagtaagcaccggacggccattccacctgcagagcgcacatctatgggcctcgagacaggccacacccttggctctttatcctgagctctgtctgcaggcctggcagaagtctgtgcctagagggaatatggaagagctttatgacggccagggcccctctctcaggactcctgaaagagaggttgtccaaaagcccaagacgagttggctctgctgctttaaggaatctgattttgtaccaccctgcttttaggcatattttgtaaaatagtcttgggcatcattgaaaggattgccttgtggcctcttggaggatcaccaggttatctggactgttttgctgagcaaactctgctctgatagtatgcagtagaccagagaagcaaaactgtactattccctgcatgggagatggggcagaaaggtccagctgcaccatggtccatgagggttcacggcttcccattcatcagtttcatcaagcaaccaaccaactcatgctttatactttctgtgtgtcacatatgtggtgctaggtactgggaacacaggagcaaatcagttgctgccctcatggagcatagattccggtgggaaacagacaaaacagagaatcagattgtgacaaagttgtagcagagagcaacaaaagaggaatggccagggaaggtctttcagaggaggttacatttaagtaaagactaggggagtgcagaaggctgtgcagacacttgtctgctaggtgtgagtcagtgggaagggaatctcttcctgtactgctcgaccttcattaaaatctgcatttataggacttgcctctaaggatgtttcaaaaattgttggacgataataggtgttccatgaagaagagcagcaggccctataagtttggttaacactaagtttaaacagtttcctttactgcaagacttctcagaacccttattatgctaatgtacaaggtgactccactagagggtgccttattatgcagcatttctaagcattttgaccacgttgagcaggtcagcacatagtgacctataaaacactgtaactttttagaaaggcaaccatataggacttttaagacttgtcttgaaggatgtgtcaaaagcatgtccagtgctctcaccctgggccaaacccctgtccctcaccagctcctctcatccctgggcagcacattcccatcctccaagggtgggtttgattttggagccaaggtagggaaagaaaatggatgatcgaactgggaaaaacccttttttggtattctgaaaataatgagactaatttttttggtgtagctcagaagcttttgaaccagtctctaaaggaatttccagaagactgttgaacaaaggacctcttggaataaattcctaataattttccaagatgactattctg

SEQ ID NO: 17650 - DNA, 798 bp, Homo sapiens
  source 1..798: mol_type = unassigned DNA
tgccactagatgtgactgtgtccctccggatgacctcagctacagatggagaaaggctggaggagaactatgagattgcagagggggtctgcatccctcgcagtgccctctatatgcattacctggatttctgcgagaagaatgatacccaacctgtcaatgctgccagctttggaaagatcataaggcagcagtttcctcagttaaccaccagaagactcgggacccgaggacagtcaaagtaccattactatggcattgcagtgaaagaaagctcccaatattatgatgtgatgtattccaagaaaggagctgcctgggtgagtgagacgggcaagaaagaagtgagcaaacagacagtggcatattcaccccggtccaaactcggaacactgctgccagaatttcccaatgtcaaagatctaaatctgccagccagcctgcctgaggagaaggtttctacctttattatgatgtacagaacacactgtcagagaatactggacactgtaataagagccaactttgatgaggttcaaagtttccttctgcacttttggcaaggaatgccgccccacatgctgcctgtgctgggctcctccacggtggtgaacattgtcggcgtgtgtgactccatcctctacaaagctatctccggggtgctgatgcccactgtgctgcaggcattacctgacagcttaactcaggtgattcgaaagtttgccaagcaactggatgagtggctaaaagtggctctccacgacctcccagaaaacttgcgaaacatcaagttcgaat

SEQ ID NO: 17651 - DNA, 599 bp, Homo sapiens
  source 1..599: mol_type = unassigned DNA
agagtgagttccaggtgggaaggcagttatgacagttgagaagtagtagaagacacggaaggcacagaaggcagacttcgctcagcacaaagaattttctgataaccatactggcaaaatgaactgggctgccttcggagggtctgaattcttcatcccagaaggcattcagatagattcgagatgcccactaagcagaaatatcacggaatggtaccattactatggcattgcagtgaaagaaagctcccaatattatgatgtgatgtattccaagaaaggagctgcctgggtgagtgagacgggcaagaaagaagtgagcaaacagacagtggcatattcaccccggtccaaactcggaacactgctgccagaatttcccaatgtcaaagatctaaatctgccagccagcctgcctgaggagaaggtttctacctttattatgatgtacagaacacactgtcagagaatactggacactgtaataagagccaactttgatgagatccagtccactgggagatcctgtcagctccaccttctgcagggaaacactgcatctgtccatttcatgcctaacttccaagccttagtgcttg

SEQ ID NO: 17652 - DNA, 3378 bp, Homo sapiens
  source 1..3378: mol_type = unassigned DNA
agagtgagttccaggtgggaaggcagttatgacagttgagaagtagtagaagacacggaaggcacagaaggcagacttcgctcagcacaaagaattttctgataaccatactggcaaaatgaactgggctgccttcggagggtctgaattcttcatcccagaaggcattcagatagattcgagatgcccactaagcagaaatatcacggaatggtaccattactatggcattgcagtgaaagaaagctcccaatattatgatgtgatgtattccaagaaaggagctgcctgggtgagtgagacgggcaagaaagaagtgagcaaacagacagtggcatattcaccccggtccaaactcggaacactgctgccagaatttcccaatgtcaaagatctaaatctgccagccagcctgcctgaggagaaggtttctacctttattatgatgtacagaacacactgtcagagaatactggacactgtaataagagccaactttgatgaggttcaaagtttccttctgcacttttggcaaggaatgccgccccacatgctgcctgtgctgggctcctccacggtggtgaacattgtcggcgtgtgtgactccatcctctacaaagctatctccggggtgctgatgcccactgtgctgcaggcattacctgacagcttaactcaggtgattcgaaagtttgccaagcaactggatgagtggctaaaagtggctctccacgacctcccagaaaacttgcgaaacatcaagttcgaattgtcgagaaggttctcccaaattctgagacggcaaacatcactaaatcatctctgccaggcatctcgaacagtgatccacagtgcagacatcacgttccaaatgctggaagactggaggaacgtggacctgaacagcatcaccaagcaaaccctttacaccatggaagactctcgcgatgagcaccggaaactcatcacccaattatatcaggagtttgaccatctcttggaggagcagtctcccatcgagtcctacattgagtggctggataccatggttgaccgctgtgttgtgaaggtggctgccaagagacaagggtccttgaagaaagtggcccagcagttcctcttgatgtggtcctgtttcggcacaagggtgatccgggacatgaccttgcacagcgcccccagcttcgggtcttttcacctaattcacttaatgtttgatgactacgtgctctacctgttagaatctctgcactgtcaggagcgggccaatgagctcatgcgagccatgaagggagaaggaagcactgcagaagtccgagaagagatcatcttgacagaggctgccgcaccaaccccttcaccagtgccatcgttttctccagcaaaatctgccacatctgtggaagtgccacctccctcttcccctgttagcaatccttcccctgagtacactggcctcagcactacaggagcaatgcagtcttacacgtggtctctaacatacacagtgacgacggctgctgggtccccagctgagaactcccaacagctgccctgtatgaggaacactcatgtgccttcttcctccgtcacacacaggataccagtttatccccacagagaggaacatggatacacgggaagctataactatgggagctatggcaaccagcatcctcaccccatgcagagccagtatccggccctccctcatgacacagctatctctgggccactccactatgccccttaccacaggagctctgcacagtacccttttaatagccccacttcccggatggaaccttgtttgatgagcagtactcccagactgcatcctaccccagtcactccccgctggccagaggtgccctcagccaacacgtgctacacaagcccgtctgtgcattctgcgaggtacggaaactctagtgacatgtatacacctctgacaacgcgcaggaattctgaatatgagcacatgcaacactttcctggctttgcttacatcaacggagaggcctctacaggatgggctaaatgactgctatcataggcatccatatttaatattaataataataattaataataataataaacccaacacccatcccccagaagactttatctctatacattgtaactcatgggctattcctaagtgcccattttcctaatgaacatgaggatgggatcaatgtgggatgaataaactttagttcagaaacaggacttactaaaagtcagtgggactgggtttctgtagccaagccagacttgactgtttctgtagagcactatctcgggcaggccattctgtgccttttccctctgttccatgactttgctttgtgttggcaaccacttctagtaagctactgattttcctgttgacaaaatctctttagtcttgaaggatggatactggagacagaatctggtttgtgttcttggatgggcacataatttaccaagagcattcaccttgccatctgtcttgtcattgtactgtacaaggaacagccctcagacgtgttctgcacatcccttcttcctggtggtaccatccctatttcctggagcaccagggctaaatggggagctatctggaaactctagattttctgtcatacccacatctgtcacagtacctgcattgtcttggaatgtaagcactgtcttgagggaaggaagaggtctgttctgtattgccttaagttgattgaggtttgtaggagactggttcttctacatacaaggatttgtcttaagtttgcacaatggctagtgtcagcaaaaggcaggagagggtttttgttttttttttaagttctatgagaatgtggatttatggcattgagtatcacactcagctctgctgtgttaactttgtgaaactggatggaacaaactttaacttaccaagcaccaagtgtgaaagtgactttcacggttccttcataaaactataataatatccgacactttgatagaaaaaaattcaaagctgtgcctttgagcctatactatactgtgtatgtgtggaaataaaaatgtattgtacttttggagaattttttgtaggcatttttctgtcagatttgtagtaatttgtgaggtttgttagagattaatataggttttctttctgtattataaaatgcaccaagcaattatggtggacctattaccctatgggtaagaaataaatggaaatatgacatcggatgtttcagcaactgttctgtaaataaaatctttgatcacaccactcagtgtgataattgtgtctacagctaaaatggaaatagttttatctgtacagttgtgcaagatatgaatggtttcacactcaaataaaaaatattgaaacga

SEQ ID NO: 17653 - DNA, 594 bp, Homo sapiens
  source 1..594: mol_type = unassigned DNA
ggcaaaatgaactgggctgccttcggagggtctgaattcttcatcccagaaggcattcagatagattcgagatgcccactaagcagaaatatcacggaatgtgaaagaaagctcccaatattatgatgtgatgtattccaagaaaggagctgcctgggtgagtgagacgggcaagaaagaagtgagcaaacagacagtggcatattcaccccggtccaaactcggaacactgctgccagaatttcccaatgtcaaagatctaaatctgccagccagcctgcctgaggagaaggtttctacctttattatgatgtacagaacacactgtcagagaatactggacactgtaataagagccaactttgatgaggttcaaagtttccttctgcacttttggcaaggaatgccgccccacatgctgcctgtgctgggctcctccacggtggtgaacattgtcggcgtgtgtgactccatcctctacaaagctatctccggggtgctgatgcccactgtgctgcaggcattacctgacagcttaactcaggtgattcgaaagtttgccaagcaactggatgagtggctaaaagtggctct

SEQ ID NO: 17654 - DNA, 960 bp, Homo sapiens
  source 1..960: mol_type = unassigned DNA
gcggaccgtgctgggagcggcgcggctggagcgcagcgccgaagggactggcagggctgaagtgtgcgggacagcaagcccccgaatagccccggctgccacctcgcaggacccaaggccacgcgcgccgggcccagctgagccgcctcatgaagccgcccgcggcgcagggcagccccgcggccgccgcggccgcagccccggccctggactcggcggccgcggaggacctgtcggacgcgctgtgcgagtttgacgcggtgctggccgacttcgcgtcgcccttccacgagcgccacttccactacgaggagcacctggagcgcatgaagcggcgcagcagcgccagtgtcagcgacagcagcggcttcagcgactcggagagtgcagattcactttataggaacagcttcagcttcagtgatgaaaaactgaattctccaacagactctaccccagctcttctctctgccactgtcactcctcagaaagctaaattaggagacacaaaagagctagaagccttcattgctgatcttgacaaaactttagcaagtatgtgaaacaagaagttctgggtcctttcatcataagggagaagcttcagaaagttccgaggacctgctaaaatcagctactagaatctgctgccagaggggacaaagacgtgcactcaaccttctaccaggccactctcaggctcaccttaaaatcagcccttgatcccatttctgggcaatttagacagtgaaactgactttgtttacctgcttgcagcatattagaacagacgatccatgctaatattgtattttctcttaaaacatagctttcctgtaatttaaagtgcttttatgaaaatatttgtaattaattatatatagttggaaatagcagtaagctttcccattataatatatttttgtatacaaataaaatttgaactgaagtctgcttcct

SEQ ID NO: 17655 - DNA, 243 bp, Homo sapiens
  source 1..243: mol_type = unassigned DNA
gaggtgtggtccctgcgatctgggccagccagcctctgggcccagggatgggggcgaagctctcaggtgcagattcactttataggaacagcttcagcttcagtgatgaaaaactgaattctccaacagactctaccccagctcttctctctgccactgtcactcctcagaaagctaaattaggagacacaaaagagctagaagccttcattgctgatcttgacaaaactttagcaagtaagt

SEQ ID NO: 17656 - DNA, 7772 bp, Homo sapiens
  source 1..7772: mol_type = unassigned DNA
caagagtgcctgaggctggatcagaaatagccacgatcgtccagtttgattgattgattgattgatttagttgtgatggagtctcgctgtatttcccaggctggagtgcagaggcacgatctccgttcactgcagcctccacctccccggttcaagtgattctcctgcctcagccttccgagtagctgggattacaggcacctgccaccacgcccggctgatttttgtgtttttagtagagacagggtttcgccatgttggccaggctggtcttgaactcctgacctcaggtgagccacccgcctcggcctcccaaagtgttgggattacaggcgtgagccactgcccccagccccagcttgatcttgaacctcctgtgtgtgggcagagagacatggccctgctactgcttgaacggcttccggagacagtgacttgtttcctttttccctctgaactatgccgtagggccaggtgagctgctgtgaaggactcattcttggtagccggcagttactggcaacttgtgagcttggtgggctcctactaacgcacctgggacaccaggctgctgggctcccctctaggcagcctcccctccaggcagcctcaccagcagctcccctgagccatggagaccccagaggtccccgtgggctcgctaatcgactttgggcctgaggcacccacctcttctcccctggaggcaccaccccctgtgctgcaggacggcgatggctccctgggggacggtgcatcagagagtgagaccactgagtctgcggacagtgagaatgacatgggcgagtcgccctcgcacccgtcctgggaccaagaccgccgttcctcctccaacgagtccttctcctccaaccagagcaccgagtctacccaggatgaagagaccctggcactcagggacttcatgcgtggctacgtggagaagatcttctctggaggggaggacttggatcaggaggagaaagccaagtttggagagtactgcagcagtgaaaatggaaaaggccgggagtggtttgctcgatacgtgagtgcccagcgctgcaactccaagtgtgtctcagaggcaaccttctaccgcctggtgcagtcttttgcagtggtgctgttcgagtgtcatcagatggatgactttgggcctgccaagaacctcatgaccatgtgcttcacctactaccacatcggaaaaccacagctgctgcccccggagtcccgggagaagcccgcgggcagcatcgactcctacctgaaatccgcaaacagctggctggccgaaaagaaggacatcgccgagcggctgctgaagaacacctcggccaggactgagaatgtcaagggcttcttcggggggctggagaccaagctgaaggggcccctggccaggaggaacgaggaagacgagaacaaaccccaggagaagcggcccagggctgtgaccgcgtacagccccgaggacgaaaagaagggggagaagatctacctgtacacgcacctgaagcaacagcccatctggcacactctgaggttctggaatgcagccttttttgacgctgtccattgtgagaggacaaagcgatctcccactaccagaggggatgctggagaggaggaggagaagagggagaagtggtgccacatgacccaggaggagcgcgacgacagcctccggttcaacgagaacatcaccttcgggcagctgggcacattcacgcacaacatgctggcctttggactgaacaagaagctgtgcaatgacttcctgaagaagcaggctgtgattggcaacctggatgaagagcaatacaagctgcttagtgaccacattgagcaaatggccactgagtaggccccagaggtcgcactccgcaggaggactgaggccatgtgccattctcccgggcccagcgcccggccgtcaccccacccgatgacctgcatgaagccagcagcacccagagccactcctgctgccctagaactagcggttagaagaatccgctgttcctccctcatctcctctgcctgtgtctgcgacccccatccatgtgccaaagtgtcccttgggtcacacagctaaagccgaggtgaccagttgtaccccgagtgccaggcttgtgagatgagaccaagagggaggaggggaaggactccatgggccatcgtgggccaagggctggcgagggtgggggcgggcaagggatgcaggcaggacagccatgaggtggggctgcagccggcacacccagtggtggagggccggcgctgccactcacggtgggtggccgtgggccaccttccctgcaatgggtgcacacgcggctcccatccagccctctcagcgtggggctgtggctggtcctcactattccccagtctcccgctgtggggcaggaacaggaagtgacgggaaccttgaggaggaaacgcctgtgttagggagagagtgggtgcggtgtagaggatgctcttggccggctggagcaagacctggctcccaccagagggacgtgtgtgtgcctgcagacggcccgggagctgtgtgtctccgccagagtcacagcagtgccgaggtgtccgcggcagaccacacagaccgtctgaaatgcgcccgcctggcggacagctcccttctgaagcagagaagcctccatggtcacgaagcagcgttgtgctgtgtgtccctcgcaagaagcacaggaaagagaagtttctttagtagccactagacaaccaccctttctgaaagcaaacagtgctgctctttattccagacaaggcaggaaagtctgagttgggagtgacagtggctggagagaagcagatctgtgcaacgtgcagggcaagccagtggcgtggcctctgcctctaagcgctgagcattgggccccttccccaccagacctttgtagctcctccagcctctgcagagactcccttcacctcgcacttactgcctgggaaccacggcccttctcttctgtgggtctgtaccaggtactccaggccagcccatgggcccggggcctgaccccaacacctgcatgctgggtccagagccttctgtttcaccgtgcgtggacactgctaggccgcctggggtcccctgcctcctgcctgtcgctgccgtggtccctgactgcgaaataggcccgcggggctctccctcctcctgccatcctcccctcccgcccttcctggctacctcctctgacatgcggtcagataagtcccgtcttgtttgtgagtaccacagaaacgcctgagagtcacttacccggccactgcttggaaggtttccctccggggaatgcctccctggaatgttccagagacggaacattctctagagacaacagtctgtgctgcagattggttggatcacagaatgtgtgtctggggcattatctgaaacgtggtgtcatctgatgcatttggaccatatgctgccagactgcagaacgggggagccggggctcagggcccctgactgcatggtgcatgagtgatctcagcctagcgatgccgctggccagaccgtgaccatgctgccagtgtgctcgccatgagctgggtcagggctggggagttgtgcaggctggggtgacccttcccccatcattgggccccaacgggcatgtctccaccgaatccatttagagaaatgtcagagcgagggttgtgtggacacccctcgctctgatgccaactgcagataatacacacctcctgcagcgtccagccacggctccagggcactgctctcctccttgcaccggtgaaactcaggccacactcaagggctgactgtccaggcgctcccttcagccgcctcgtcgtcagcgttcttagtcatgcattattcgtgttagctgaaatgcattcagactttgttctgcggtgcccacaggacttacccctgtatgtacaggatttttgtatgaaagttttgtttgattctgagactctcttgggaacgctggagagcttgtgcacagcctctggaaggaaaggcagcgctgacttcgttgggcttttttccaagcactttaacttcagaaatggtcttgacacttttttctccacatagactcttgaaatagccatttcaggggaggaaagggttggggttttctttgtttgtttgtttgtttccccctttactacctgttcttgtagatctagctcctcagagttggaggaaggctgacagagaaggtctcctctgtgctccatccacacaggatgccggagagacagccccttgtgctgtgagcagagcaggcagtggctctggaggctgcctgtggtctccttccggctgtggctgacagtggctctggccagggttgcttggagaaggctcagtgtgcctgggacagggcttaccacctgccaccaaggtttcctctcttcccccaggacctgggcagagcaggcatgagctgggctgtggtgcagagcaagcagacccagccacactgctcaaaggtccctgcgtggggaggtgtcacaccaggggcacacccagggccacctgggtgtaggagagctctggtggcccctccgtaaactcaggaagtgtcaggtgatttcctagggagaggttcccagtcccagcaggcagaatgcccaaaaccaggagcacgaaggcctgtcatccatggggccattgcaggcactctgccgcccgaccttgagggctgtgccaatcctagtgaaccaaaatgcaaacaactcacacaagtgaaaagctccctgctttgaaaacaggacatgttgacaggcagcatggtatgtttttagcctttgttacagttttagcaacattgatgtctaagaggggccgtggtaatagattgcatctgccctgtgcatgcgcatgtttaaccacaggccagagaactcaattctgatgtcgtaagttctctgtaagtgaaatggggtagactgtatgattttcctattgccaaaagaaagaaagggggccaaacagctctgaaatttccaaaaaatggctagagggagagtccagtttctgagctctgtacccaaattaaaatcctgatgttcaggttaatccaagcaacacgcattgggtttaaaaccagcaccgaggcccagtgggggaatcacagacatcaccaagtctcgtcttctttccttcctgtgagttgaaaccaaacaggcctctcgctcactcctcccagcccagtaatgctgaggagttcagttgtgaggaaagaaggctggagctgtgagattcgcttttccctaggctgttccgcgtgggttaccttatcaccctggagcacttggtattccagacccctgacatgaggaatgcaggttcacactgtaaagagtttgtgaaaggtttcagtctaactggggttccttagctggaagccagggctggaagctacaggcctgaccttcctgggtcccactatctgttggcattttttttttttttttttttttagacggagttttgctcttgttgcccaggctggagtgcagtgacacaatctctactcactgcaacctccacctcccgggttcaagcaattctcctgcctcagcctcctgagtagctgggatgacaggtgcacgccaccacgcccggctaatttttatatttttggtagagatggggtttcaccatgctggccaggctggtctcgaactcctgacctcaggtgatcccccccacctcagcctcccaaagtgctgggattacaggcgtgaggcatcacacctgcctctgttggctttttagttaggaaggatccagctaggcccgtgtggttagatcagctttgttactgaattacctaaaaccagaccacagcacagccagggagcccagtagtgtttccaagaacagtgtggagcttgagaaagagaactttaaaaattagagggtccctttctgcagaggaagggatgctcgcagggtggcagtggcccagccccagcctcagggacggggagggagagccccctctgggcccagcaggcaggtgttctgaggctggtccctcctcagtttccgcagccacaaggcgaaacggccagattctcactcaaggtcgttctcactccttttcctgtcccgtttccagtcccactgagccattcacttctgctgaaccatttttcttaggatgcagccgtctcactcccttgtcctgtaaatcgtgtattcatgttgatgattcttggagataggtttcactttttcccagctgcgtccacaggaaaggggagtcggatgccagctgcaccccgcctggctcgcacaggctaagaccacagacagagcagggcttcccggagccacacaggccacgcaccccaggaacccttgctgccgcgggccaggaacaggaatgtgttggtgcctgagacaccaaatggaagaagcacatcaagactgttctcctgcggccaacactggcccggaagccgccctccatacaggccctcagggggcctgccttctgcgcctcagtcccccgtgcatccctgggcctgggtatcacatgctctccaggaaagggacggaatcaatcctgtgaccgatgggctcgcaaggatgggtgccgccgtgggagccctgcctctggtgctggcaagggattgggtttgtgtgggtgtctctagcctgcagagtgcagtgagtgagagtccttgggagcgcggcgctgcctgtagctgtgcctggggatgcacgtggccacgggatttcagtgggacagcgctcccacaggggctgggggtgggggtggggtttcttagttactgttggaaagggaaaaattcaccatatccaaggggagagacgatgggctgggtttgtttactccaacttcccttctacacccctcctgcaggacagtacgatttggggagaacccagctccccactttatctgcagactctgggacctgacaaaacagtcagagcctgagtgcactgcagcctgaactcccttgagcagcgctataagggactttgcactttaaaaaggggatgcctgtcagtaaatcccctgtgcattgactagaactggggggctgcgcccgctccctccttaatcctagatgatttgctcatgaaatagaggtgggggacgaccgcatgcactctgggaggtgcagccctaaggggtggactccagatctccctgcaagagacagcttggcttggctttggctgttggggaggagtccctgccatcccggtgagcctggggctgttgcttagggtcttctgggtggacacgtggagaaagagaaggcaaacgttggaacactaggaaaagctagaaattcagacaacacacatggatccccttaaaacatgtaaatgtgtcagaacacggttgacctgccgccttcttgaacctggtggcccccgttggaactatcagtggcgtctcccatgcacacgccctctgctttctctttcctagactcgcggtgctcacatccagacattaccttgttggtagcccccaagtggcgtgcagtgacaccagtatcttctctgttgcatttttgcaatcttgtgtcccgctcggtgatgttctacaaactctgttttaaggttgagaaagtttcaagggtgaagatctcaaaacagtgctaaaatcaaaggtgtttgctgtgaagaaaaacatgtgtatatattgcaccttgagttgtcagaaggtagaaactgaaataaactaactttaaaaaaaaaa

SEQ ID NO: 17657 - DNA, 1873 bp, Homo sapiens
  source 1..1873: mol_type = unassigned DNA
ttctggtgaggagtggcgctaatgtctgtgtctgtgtttccattctagatgccgtagggccaggtgagctgctgtgaaggactcattcttggtagccggcagttactggcaacttgtgagcttggtgggctcctactaacgcacctgggacaccaggctgctgggctcccctctaggcagcctcccctccaggcagcctcaccagcagctcccctgagccatggagaccccagaggtccccgtgggctcgctaatcgactttgggcctgaggcacccacctcttctcccctggaggcaccaccccctgtgctgcaggacggcgatggctccctgggggacggtgcatcagagagtgagaccactgagtctgcggacagtgagaatgacatgggcgagtcgccctcgcacccgtcctgggaccaagaccgccgttcctcctccaacgagtccttctcctccaaccagagcaccgagtctacccaggatgaagagaccctggcactcagggacttcatgcgtggctacgtggagaagatcttctctggaggggaggacttggatcaggaggagaaagccaagtttggagagtactgcagcagtgaaaatggaaaaggccgggagtggtttgctcgatacgtgagtgcccagcgctgcaactccaagtgtgtctcagaggcaaccttctaccgcctggtgcagtcttttgcagtggtgctgttcgagtgtcatcagatggatgactttgggcctgccaagaacctcatgaccatgtgcttcacctactaccacatcggaaaaccacagctgctgcccccggagtcccgggagaagcccgcgggcagcatcgactcctacctgaaatccgcaaacagctggctggccgaaaagaaggacatcgccgagcggctgctgaagaacacctcggccaggactgagaatgtcaagggcttcttcggggggctggagaccaagctgaaggggcccctggccaggaggaacgaggaagacgagaacaaaccccaggagaagcggcccagggctgtgaccgcgtacagccccgaggacgaaaagaagggggagaagatctacctgtacacgcacctgaagcaacagcccatctggtaaggccgagcccgcggcttcccgtcaccctcttactgacggggccagcagtcactccccgggatcacttctagctgcctttgtccccatcagaatggcagaattctcacactcaccagagtggcagaataaaaagatgaacactcacaggcgttggtgaggatgtggagaaactggagctctcctgtatggctaggagcaatgtaaatgagcagccgctgagaaacagtctggcagttcctttaaaggtgaaacacaagagttactctgtgacccagcagctccactcctaggagtcgcccaagagaaaaacatgtcctcacaaaaccttgtacacaaatgtctgtagcaacgtcgtttattatggccccgaggtggaaaccaccttcatggctgtccagtgatgaatgggtaaacaaaatgtggtccatccgttgcatggactattagccagccatgaaaagcaatggcatgctgctccacgctgtagcagggatagacctgggaaacatcgtgaaactcagtggaagaagccagacacagaagcccaagtattgtatcatccctatgaaatgtccagaactgcagattcctagagacacagcagatgacagattgcccgggcagagggtggggaatggggagcagggcgtgactgctgatggggatggggcttctttatggggtgagagaatgttctggaaatggtggtggctgcacaactctgtgaatacactaaaaatcactgaa

SEQ ID NO: 17658 - DNA, 675 bp, Homo sapiens
  source 1..675: mol_type = unassigned DNA
aagcccgcgggcagcatcgactcctacctgaaatccgcaaacagctggctggccgaaaagaaggacatcgccgagcggctgctgaagaacacctcggccaggactgagaatgtcaagggcttcttcggggggctggagaccaagctgaaggggcccctggccaggaggaacgaggaagacgagaacaaaccccaggagaagcggcccagggctgtgaccgcgtacagccccgaggacgaaaagaagggggagaagatctacctgtacacgcacctgaagcaacagcccatctggcacactctgaggttctggaatgcagccttttttgacgctgtccattgtgagaggacaaagcgatctcccactaccagggagaagtggtgccacatgacccaggaggagcgcgacgacagcctccggttcaacgagaacatcaccttcgggcagctgggcacattcacgcacaacatgctggcctttggactgaacaagaagctgtgcaatgacttcctgaagaagcaggctgtgattggcaacctggatgaagagcaatacaagctgcttagtgaccacattgagcaaatggccactgagtaggccccagaggtcgcactccgcaggaggactgaggccatgtgccattctcccgggcccagcgcccggccgtcaccccac

SEQ ID NO: 17659 - DNA, 364 bp, Homo sapiens
  source 1..364: mol_type = unassigned DNA
gacgagaacaaaccccaggagaagcggcccagggctgtgaccgcgtacagccccgaggacgaaaagaagggggagaagatctacctgtacacgcacctgaagcaacagcccatctgggagaagtggtgccacatgacccaggaggagcgcgacgacagcctccggttcaacgagaacatcaccttcgggcagctgggcacattcacgcacaacatgctggcctttggactgaacaagaagctgtgcaatgacttcctgaagaagcaggctgtgattggcaacctggatgaagagcaatacaagctgcttagtgaccacattgagcaaatggccactgagtaggccccagaggtcgcactccgca

SEQ ID NO: 17660 - DNA, 733 bp, Homo sapiens
  source 1..733: mol_type = unassigned DNA
agtgagagttgctggtggctaattaggcagcagtgcgttttagtttctgctgacaattccaggcaggccatggtgggcgtcccagagacaagggcccagctccccggccctttcccctgggaggccagcgggtgacgctcttggggtttctcctgcagcacattcacgcacaacatgctggcctttggactgaacaagaagctgtgcaatgacttcctgaagaagcaggctgtgattggcaacctggatgaagagcaatacaagctgcttagtgaccacattgagcaaatggccactgagtaggccccagaggtcgcactccgcaggaggactgaggccatgtgccattctcccgggcccagcgcccggccgtcaccccacccgatgacctgcatgaagccagcagcacccagagccactcctgctgccctagaactagcggttagaagaatccgctgttcctccctcatctcctctgcctgtgtctgcgacccccatccatgtgccaaagtgtcccttgggtcacacagctaaagccgaggtgaccagttgtaccccgagtgccaggcttgtgagatgagaccaagagggaggaggggaaggactccatgggccatcgtgggccaagggctggcgagggtgggggcgggcaagggatgcaggcaggacagccatgaggtggggctgcagccggcacacccagtggtggagggccggcgctgccactcacggt

SEQ ID NO: 17661 - DNA, 7404 bp, Homo sapiens
  source 1..7404: mol_type = unassigned DNA
tcgcgccgcggcgccgggaaaggacccggctgctcgcgggcggcgcagtcgccgcagcagccgagtctgacggcgccggttcgctgcccggtccgcccgcgatgccgtagggccaggtgagctgctgtgaaggactcattcttggtagccggcagttactggcaacttgtgagcttggtgggctcctactaacgcacctgggacaccaggctgctgggctcccctctaggcagcctcccctccaggcagcctcaccagcagctcccctgagccatggagaccccagaggtccccgtgggctcgctaatcgactttgggcctgaggcacccacctcttctcccctggaggcaccaccccctgtgctgcaggacggcgatggctccctgggggacggtgcatcagagagtgagaccactgagtctgcggacagtgagaatgacatgggcgagtcgccctcgcacccgtcctgggaccaagaccgccgttcctcctccaacgagtccttctcctccaaccagagcaccgagtctacccaggatgaagagaccctggcactcagggacttcatgcgtggctacgtggagaagatcttctctggaggggaggacttggatcaggaggagaaagccaagtttggagagtactgcagcagtgaaaatggaaaaggccgggagtggtttgctcgatacgtgagtgcccagcgctgcaactccaagtgtgtctcagaggcaaccttctaccgcctggtgcagtcttttgcagtggtgctgttcgagtgtcatcagatggatgactttgggcctgccaagaacctcatgaccatgtgcttcacctactaccacatcggaaaaccacagctgctgcccccggagtcccgggagaagcccgcgggcagcatcgactcctacctgaaatccgcaaacagctggctggccgaaaagaaggacatcgccgagcggctgctgaagaacacctcggccaggactgagaatgtcaagggcttcttcggggggctggagaccaagctgaaggggcccctggccaggaggaacgaggaagacgagaacaaaccccaggagaagcggcccagggctgtgaccgcgtacagccccgaggacgaaaagaagggggagaagatctacctgtacacgcacctgaagcaacagcccatctggcacactctgaggttctggaatgcagccttttttgacgctgtccattgtgagaggacaaagcgatctcccactaccagaggggatgctggagaggaggaggagaagagggagaagtggtgccacatgacccaggaggagcgcgacgacagcctccggttcaacgagaacatcaccttcgggcagctgggcacattcacgcacaacatgctggcctttggactgaacaagaagctgtgcaatgacttcctgaagaagcaggctgtgattggcaacctggatgaagagcaatacaagctgcttagtgaccacattgagcaaatggccactgagtaggccccagaggtcgcactccgcaggaggactgaggccatgtgccattctcccgggcccagcgcccggccgtcaccccacccgatgacctgcatgaagccagcagcacccagagccactcctgctgccctagaactagcggttagaagaatccgctgttcctccctcatctcctctgcctgtgtctgcgacccccatccatgtgccaaagtgtcccttgggtcacacagctaaagccgaggtgaccagttgtaccccgagtgccaggcttgtgagatgagaccaagagggaggaggggaaggactccatgggccatcgtgggccaagggctggcgagggtgggggcgggcaagggatgcaggcaggacagccatgaggtggggctgcagccggcacacccagtggtggagggccggcgctgccactcacggtgggtggccgtgggccaccttccctgcaatgggtgcacacgcggctcccatccagccctctcagcgtggggctgtggctggtcctcactattccccagtctcccgctgtggggcaggaacaggaagtgacgggaaccttgaggaggaaacgcctgtgttagggagagagtgggtgcggtgtagaggatgctcttggccggctggagcaagacctggctcccaccagagggacgtgtgtgtgcctgcagacggcccgggagctgtgtgtctccgccagagtcacagcagtgccgaggtgtccgcggcagaccacacagaccgtctgaaatgcgcccgcctggcggacagctcccttctgaagcagagaagcctccatggtcacgaagcagcgttgtgctgtgtgtccctcgcaagaagcacaggaaagagaagtttctttagtagccactagacaaccaccctttctgaaagcaaacagtgctgctctttattccagacaaggcaggaaagtctgagttgggagtgacagtggctggagagaagcagatctgtgcaacgtgcagggcaagccagtggcgtggcctctgcctctaagcgctgagcattgggccccttccccaccagacctttgtagctcctccagcctctgcagagactcccttcacctcgcacttactgcctgggaaccacggcccttctcttctgtgggtctgtaccaggtactccaggccagcccatgggcccggggcctgaccccaacacctgcatgctgggtccagagccttctgtttcaccgtgcgtggacactgctaggccgcctggggtcccctgcctcctgcctgtcgctgccgtggtccctgactgcgaaataggcccgcggggctctccctcctcctgccatcctcccctcccgcccttcctggctacctcctctgacatgcggtcagataagtcccgtcttgtttgtgagtaccacagaaacgcctgagagtcacttacccggccactgcttggaaggtttccctccggggaatgcctccctggaatgttccagagacggaacattctctagagacaacagtctgtgctgcagattggttggatcacagaatgtgtgtctggggcattatctgaaacgtggtgtcatctgatgcatttggaccatatgctgccagactgcagaacgggggagccggggctcagggcccctgactgcatggtgcatgagtgatctcagcctagcgatgccgctggccagaccgtgaccatgctgccagtgtgctcgccatgagctgggtcagggctggggagttgtgcaggctggggtgacccttcccccatcattgggccccaacgggcatgtctccaccgaatccatttagagaaatgtcagagcgagggttgtgtggacacccctcgctctgatgccaactgcagataatacacacctcctgcagcgtccagccacggctccagggcactgctctcctccttgcaccggtgaaactcaggccacactcaagggctgactgtccaggcgctcccttcagccgcctcgtcgtcagcgttcttagtcatgcattattcgtgttagctgaaatgcattcagactttgttctgcggtgcccacaggacttacccctgtatgtacaggatttttgtatgaaagttttgtttgattctgagactctcttgggaacgctggagagcttgtgcacagcctctggaaggaaaggcagcgctgacttcgttgggcttttttccaagcactttaacttcagaaatggtcttgacacttttttctccacatagactcttgaaatagccatttcaggggaggaaagggttggggttttctttgtttgtttgtttgtttccccctttactacctgttcttgtagatctagctcctcagagttggaggaaggctgacagagaaggtctcctctgtgctccatccacacaggatgccggagagacagccccttgtgctgtgagcagagcaggcagtggctctggaggctgcctgtggtctccttccggctgtggctgacagtggctctggccagggttgcttggagaaggctcagtgtgcctgggacagggcttaccacctgccaccaaggtttcctctcttcccccaggacctgggcagagcaggcatgagctgggctgtggtgcagagcaagcagacccagccacactgctcaaaggtccctgcgtggggaggtgtcacaccaggggcacacccagggccacctgggtgtaggagagctctggtggcccctccgtaaactcaggaagtgtcaggtgatttcctagggagaggttcccagtcccagcaggcagaatgcccaaaaccaggagcacgaaggcctgtcatccatggggccattgcaggcactctgccgcccgaccttgagggctgtgccaatcctagtgaaccaaaatgcaaacaactcacacaagtgaaaagctccctgctttgaaaacaggacatgttgacaggcagcatggtatgtttttagcctttgttacagttttagcaacattgatgtctaagaggggccgtggtaatagattgcatctgccctgtgcatgcgcatgtttaaccacaggccagagaactcaattctgatgtcgtaagttctctgtaagtgaaatggggtagactgtatgattttcctattgccaaaagaaagaaagggggccaaacagctctgaaatttccaaaaaatggctagagggagagtccagtttctgagctctgtacccaaattaaaatcctgatgttcaggttaatccaagcaacacgcattgggtttaaaaccagcaccgaggcccagtgggggaatcacagacatcaccaagtctcgtcttctttccttcctgtgagttgaaaccaaacaggcctctcgctcactcctcccagcccagtaatgctgaggagttcagttgtgaggaaagaaggctggagctgtgagattcgcttttccctaggctgttccgcgtgggttaccttatcaccctggagcacttggtattccagacccctgacatgaggaatgcaggttcacactgtaaagagtttgtgaaaggtttcagtctaactggggttccttagctggaagccagggctggaagctacaggcctgaccttcctgggtcccactatctgttggcattttttttttttttttttttttagacggagttttgctcttgttgcccaggctggagtgcagtgacacaatctctactcactgcaacctccacctcccgggttcaagcaattctcctgcctcagcctcctgagtagctgggatgacaggtgcacgccaccacgcccggctaatttttatatttttggtagagatggggtttcaccatgctggccaggctggtctcgaactcctgacctcaggtgatcccccccacctcagcctcccaaagtgctgggattacaggcgtgaggcatcacacctgcctctgttggctttttagttaggaaggatccagctaggcccgtgtggttagatcagctttgttactgaattacctaaaaccagaccacagcacagccagggagcccagtagtgtttccaagaacagtgtggagcttgagaaagagaactttaaaaattagagggtccctttctgcagaggaagggatgctcgcagggtggcagtggcccagccccagcctcagggacggggagggagagccccctctgggcccagcaggcaggtgttctgaggctggtccctcctcagtttccgcagccacaaggcgaaacggccagattctcactcaaggtcgttctcactccttttcctgtcccgtttccagtcccactgagccattcacttctgctgaaccatttttcttaggatgcagccgtctcactcccttgtcctgtaaatcgtgtattcatgttgatgattcttggagataggtttcactttttcccagctgcgtccacaggaaaggggagtcggatgccagctgcaccccgcctggctcgcacaggctaagaccacagacagagcagggcttcccggagccacacaggccacgcaccccaggaacccttgctgccgcgggccaggaacaggaatgtgttggtgcctgagacaccaaatggaagaagcacatcaagactgttctcctgcggccaacactggcccggaagccgccctccatacaggccctcagggggcctgccttctgcgcctcagtcccccgtgcatccctgggcctgggtatcacatgctctccaggaaagggacggaatcaatcctgtgaccgatgggctcgcaaggatgggtgccgccgtgggagccctgcctctggtgctggcaagggattgggtttgtgtgggtgtctctagcctgcagagtgcagtgagtgagagtccttgggagcgcggcgctgcctgtagctgtgcctggggatgcacgtggccacgggatttcagtgggacagcgctcccacaggggctgggggtgggggtggggtttcttagttactgttggaaagggaaaaattcaccatatccaaggggagagacgatgggctgggtttgtttactccaacttcccttctacacccctcctgcaggacagtacgatttggggagaacccagctccccactttatctgcagactctgggacctgacaaaacagtcagagcctgagtgcactgcagcctgaactcccttgagcagcgctataagggactttgcactttaaaaaggggatgcctgtcagtaaatcccctgtgcattgactagaactggggggctgcgcccgctccctccttaatcctagatgatttgctcatgaaatagaggtgggggacgaccgcatgcactctgggaggtgcagccctaaggggtggactccagatctccctgcaagagacagcttggcttggctttggctgttggggaggagtccctgccatcccggtgagcctggggctgttgcttagggtcttctgggtggacacgtggagaaagagaaggcaaacgttggaacactaggaaaagctagaaattcagacaacacacatggatccccttaaaacatgtaaatgtgtcagaacacggttgacctgccgccttcttgaacctggtggcccccgttggaactatcagtggcgtctcccatgcacacgccctctgctttctctttcctagactcgcggtgctcacatccagacattaccttgttggtagcccccaagtggcgtgcagtgacaccagtatcttctctgttgcatttttgcaatcttgtgtcccgctcggtgatgttctacaaactctgttttaaggttgagaaagtttcaagggtgaagatctcaaaacagtgctaaaatcaaaggtgtttgctgtgaagaaaaacatgtgtatatattgcaccttgagttgtcagaaggtagaaactgaaataaactaacttt

SEQ ID NO: 17662 - DNA, 7381 bp, Homo sapiens
  source 1..7381: mol_type = unassigned DNA
tcgcgccgcggcgccgggaaaggacccggctgctcgcgggcggcgcagtcgccgcagcagccgagtctgacggcgccggttcgctgcccggtccgcccgcggtgagagatgccgtagggccaggtgagctgctgtgaaggactcattcttggtagccggcagttactggcaacttgtgagcttggtgggctcctactaacgcacctgggacaccaggctgctgggctcccctctaggcagcctcccctccaggcagcctcaccagcagctcccctgagccatggagaccccagaggtccccgtgggctcgctaatcgactttgggcctgaggcacccacctcttctcccctggaggcaccaccccctgtgctgcaggacggcgatggctccctgggggacggtgcatcagagagtgagaccactgagtctgcggacagtgagaatgacatgggcgagtcgccctcgcacccgtcctgggaccaagaccgccgttcctcctccaacgagtccttctcctccaaccagagcaccgagtctacccaggatgaagagaccctggcactcagggacttcatgcgtggctacgtggagaagatcttctctggaggggaggacttggatcaggaggagaaagccaagtttggagagtactgcagcagtgaaaatggaaaaggccgggagtggtttgctcgatacgtgagtgcccagcgctgcaactccaagtgtgtctcagaggcaaccttctaccgcctggtgcagtcttttgcagtggtgctgttcgagtgtcatcagatggatgactttgggcctgccaagaacctcatgaccatgtgcttcacctactaccacatcggaaaaccacagctgctgcccccggagtcccgggagaagcccgcgggcagcatcgactcctacctgaaatccgcaaacagctggctggccgaaaagaaggacatcgccgagcggctgctgaagaacacctcggccaggactgagaatgtcaagggcttcttcggggggctggagaccaagctgaaggggcccctggccaggaggaacgaggaagacgagaacaaaccccaggagaagcggcccagggctgtgaccgcgtacagccccgaggacgaaaagaagggggagaagatctacctgtacacgcacctgaagcaacagcccatctggcacactctgaggttctggaatgcagccttttttgacgctgtccattgtgagaggacaaagcgatctcccactaccagggagaagtggtgccacatgacccaggaggagcgcgacgacagcctccggttcaacgagaacatcaccttcgggcagctgggcacattcacgcacaacatgctggcctttggactgaacaagaagctgtgcaatgacttcctgaagaagcaggctgtgattggcaacctggatgaagagcaatacaagctgcttagtgaccacattgagcaaatggccactgagtaggccccagaggtcgcactccgcaggaggactgaggccatgtgccattctcccgggcccagcgcccggccgtcaccccacccgatgacctgcatgaagccagcagcacccagagccactcctgctgccctagaactagcggttagaagaatccgctgttcctccctcatctcctctgcctgtgtctgcgacccccatccatgtgccaaagtgtcccttgggtcacacagctaaagccgaggtgaccagttgtaccccgagtgccaggcttgtgagatgagaccaagagggaggaggggaaggactccatgggccatcgtgggccaagggctggcgagggtgggggcgggcaagggatgcaggcaggacagccatgaggtggggctgcagccggcacacccagtggtggagggccggcgctgccactcacggtgggtggccgtgggccaccttccctgcaatgggtgcacacgcggctcccatccagccctctcagcgtggggctgtggctggtcctcactattccccagtctcccgctgtggggcaggaacaggaagtgacgggaaccttgaggaggaaacgcctgtgttagggagagagtgggtgcggtgtagaggatgctcttggccggctggagcaagacctggctcccaccagagggacgtgtgtgtgcctgcagacggcccgggagctgtgtgtctccgccagagtcacagcagtgccgaggtgtccgcggcagaccacacagaccgtctgaaatgcgcccgcctggcggacagctcccttctgaagcagagaagcctccatggtcacgaagcagcgttgtgctgtgtgtccctcgcaagaagcacaggaaagagaagtttctttagtagccactagacaaccaccctttctgaaagcaaacagtgctgctctttattccagacaaggcaggaaagtctgagttgggagtgacagtggctggagagaagcagatctgtgcaacgtgcagggcaagccagtggcgtggcctctgcctctaagcgctgagcattgggccccttccccaccagacctttgtagctcctccagcctctgcagagactcccttcacctcgcacttactgcctgggaaccacggcccttctcttctgtgggtctgtaccaggtactccaggccagcccatgggcccggggcctgaccccaacacctgcatgctgggtccagagccttctgtttcaccgtgcgtggacactgctaggccgcctggggtcccctgcctcctgcctgtcgctgccgtggtccctgactgcgaaataggcccgcggggctctccctcctcctgccatcctcccctcccgcccttcctggctacctcctctgacatgcggtcagataagtcccgtcttgtttgtgagtaccacagaaacgcctgagagtcacttacccggccactgcttggaaggtttccctccggggaatgcctccctggaatgttccagagacggaacattctctagagacaacagtctgtgctgcagattggttggatcacagaatgtgtgtctggggcattatctgaaacgtggtgtcatctgatgcatttggaccatatgctgccagactgcagaacgggggagccggggctcagggcccctgactgcatggtgcatgagtgatctcagcctagcgatgccgctggccagaccgtgaccatgctgccagtgtgctcgccatgagctgggtcagggctggggagttgtgcaggctggggtgacccttcccccatcattgggccccaacgggcatgtctccaccgaatccatttagagaaatgtcagagcgagggttgtgtggacacccctcgctctgatgccaactgcagataatacacacctcctgcagcgtccagccacggctccagggcactgctctcctccttgcaccggtgaaactcaggccacactcaagggctgactgtccaggcgctcccttcagccgcctcgtcgtcagcgttcttagtcatgcattattcgtgttagctgaaatgcattcagactttgttctgcggtgcccacaggacttacccctgtatgtacaggatttttgtatgaaagttttgtttgattctgagactctcttgggaacgctggagagcttgtgcacagcctctggaaggaaaggcagcgctgacttcgttgggcttttttccaagcactttaacttcagaaatggtcttgacacttttttctccacatagactcttgaaatagccatttcaggggaggaaagggttggggttttctttgtttgtttgtttgtttccccctttactacctgttcttgtagatctagctcctcagagttggaggaaggctgacagagaaggtctcctctgtgctccatccacacaggatgccggagagacagccccttgtgctgtgagcagagcaggcagtggctctggaggctgcctgtggtctccttccggctgtggctgacagtggctctggccagggttgcttggagaaggctcagtgtgcctgggacagggcttaccacctgccaccaaggtttcctctcttcccccaggacctgggcagagcaggcatgagctgggctgtggtgcagagcaagcagacccagccacactgctcaaaggtccctgcgtggggaggtgtcacaccaggggcacacccagggccacctgggtgtaggagagctctggtggcccctccgtaaactcaggaagtgtcaggtgatttcctagggagaggttcccagtcccagcaggcagaatgcccaaaaccaggagcacgaaggcctgtcatccatggggccattgcaggcactctgccgcccgaccttgagggctgtgccaatcctagtgaaccaaaatgcaaacaactcacacaagtgaaaagctccctgctttgaaaacaggacatgttgacaggcagcatggtatgtttttagcctttgttacagttttagcaacattgatgtctaagaggggccgtggtaatagattgcatctgccctgtgcatgcgcatgtttaaccacaggccagagaactcaattctgatgtcgtaagttctctgtaagtgaaatggggtagactgtatgattttcctattgccaaaagaaagaaagggggccaaacagctctgaaatttccaaaaaatggctagagggagagtccagtttctgagctctgtacccaaattaaaatcctgatgttcaggttaatccaagcaacacgcattgggtttaaaaccagcaccgaggcccagtgggggaatcacagacatcaccaagtctcgtcttctttccttcctgtgagttgaaaccaaacaggcctctcgctcactcctcccagcccagtaatgctgaggagttcagttgtgaggaaagaaggctggagctgtgagattcgcttttccctaggctgttccgcgtgggttaccttatcaccctggagcacttggtattccagacccctgacatgaggaatgcaggttcacactgtaaagagtttgtgaaaggtttcagtctaactggggttccttagctggaagccagggctggaagctacaggcctgaccttcctgggtcccactatctgttggcattttttttttttttttttttttagacggagttttgctcttgttgcccaggctggagtgcagtgacacaatctctactcactgcaacctccacctcccgggttcaagcaattctcctgcctcagcctcctgagtagctgggatgacaggtgcacgccaccacgcccggctaatttttatatttttggtagagatggggtttcaccatgctggccaggctggtctcgaactcctgacctcaggtgatcccccccacctcagcctcccaaagtgctgggattacaggcgtgaggcatcacacctgcctctgttggctttttagttaggaaggatccagctaggcccgtgtggttagatcagctttgttactgaattacctaaaaccagaccacagcacagccagggagcccagtagtgtttccaagaacagtgtggagcttgagaaagagaactttaaaaattagagggtccctttctgcagaggaagggatgctcgcagggtggcagtggcccagccccagcctcagggacggggagggagagccccctctgggcccagcaggcaggtgttctgaggctggtccctcctcagtttccgcagccacaaggcgaaacggccagattctcactcaaggtcgttctcactccttttcctgtcccgtttccagtcccactgagccattcacttctgctgaaccatttttcttaggatgcagccgtctcactcccttgtcctgtaaatcgtgtattcatgttgatgattcttggagataggtttcactttttcccagctgcgtccacaggaaaggggagtcggatgccagctgcaccccgcctggctcgcacaggctaagaccacagacagagcagggcttcccggagccacacaggccacgcaccccaggaacccttgctgccgcgggccaggaacaggaatgtgttggtgcctgagacaccaaatggaagaagcacatcaagactgttctcctgcggccaacactggcccggaagccgccctccatacaggccctcagggggcctgccttctgcgcctcagtcccccgtgcatccctgggcctgggtatcacatgctctccaggaaagggacggaatcaatcctgtgaccgatgggctcgcaaggatgggtgccgccgtgggagccctgcctctggtgctggcaagggattgggtttgtgtgggtgtctctagcctgcagagtgcagtgagtgagagtccttgggagcgcggcgctgcctgtagctgtgcctggggatgcacgtggccacgggatttcagtgggacagcgctcccacaggggctgggggtgggggtggggtttcttagttactgttggaaagggaaaaattcaccatatccaaggggagagacgatgggctgggtttgtttactccaacttcccttctacacccctcctgcaggacagtacgatttggggagaacccagctccccactttatctgcagactctgggacctgacaaaacagtcagagcctgagtgcactgcagcctgaactcccttgagcagcgctataagggactttgcactttaaaaaggggatgcctgtcagtaaatcccctgtgcattgactagaactggggggctgcgcccgctccctccttaatcctagatgatttgctcatgaaatagaggtgggggacgaccgcatgcactctgggaggtgcagccctaaggggtggactccagatctccctgcaagagacagcttggcttggctttggctgttggggaggagtccctgccatcccggtgagcctggggctgttgcttagggtcttctgggtggacacgtggagaaagagaaggcaaacgttggaacactaggaaaagctagaaattcagacaacacacatggatccccttaaaacatgtaaatgtgtcagaacacggttgacctgccgccttcttgaacctggtggcccccgttggaactatcagtggcgtctcccatgcacacgccctctgctttctctttcctagactcgcggtgctcacatccagacattaccttgttggtagcccccaagtggcgtgcagtgacaccagtatcttctctgttgcatttttgcaatcttgtgtcccgctcggtgatgttctacaaactctgttttaaggttgagaaagtttcaagggtgaagatctcaaaacagtgctaaaatcaaaggtgtttgctgtgaagaaaaacatgtgtatatattgcaccttgagttgtcagaaggtagaaactgaaataaactaacttt

SEQ ID NO: 17663 - DNA, 2303 bp, Homo sapiens
  source 1..2303: mol_type = unassigned DNA
gcgcacagcaggcaaagagctggccctggcaccgctgcaggactggggtgaagagaccgaggacggcgcggtgtacagtgtctccctgcggcggcagcgcagtcagcgcaggagcccggcggagggccccgggggcagccaggctcccagccccattgccaataccttcctccactatcgaaccagcaaggtgagggtgctgagggcagcgcgcctggagcggctggtgggagagttggtgtttggagaccgtgagcaggaccccagcttcatgcccgccttcctggccacctaccggacctttgtacccactgcctgcctgctgggctttctgctgccaccaatgccaccgcccccacctcccggggtagagatcaagaagacagcggtacaagatctgagcttcaacaagaacctgagggctgtggtgtcagtgctgggctcctggctgcaggaccaccctcaggatttccgagaccaccctgcccattcggacctgggcagtgtccgaacctttctgggctgggcggccccagggagtgctgaggctcaaaaagcagagaagcttctggaagattttttggaggaggctgagcgagagcaggaagaggagccgcctcaggacctcccagagttgcccaaacttctgacccagactcttcagaggcctgcgcggaggaagaggaagggctcatgcctcaaggtccccagctcctggacttcagcgtggacgaggtggccgagcagctgaccctcatagacttggagctcttctccaaggtgaggctctacgagtgcttgggctccgtgtggtcgcagagggaccggccgggggctgcaggcgcctcccccactgtgcgcgccaccgtggcccagttcaacaccgtgaccggctgtgtgctgggttccgtgctcggagcaccgggcttggccgccccgcagagggcgcagcggctggagaagtggatccgcatcgcccagcgctgccgagaactgcggaacttctcctccttgcgcgccatcctgtccgccctgcaatctaaccccatctaccggctcaagcgcagctggggggcagtgagccgggaaccgctatctactttcaggaaactttcgcagattttctccgatgagaacaaccacctcagcagcagagagattcttttccaggaggaggccactgagggatcccaagaagaggacaacaccccaggcagcctgccctcaaaaccacccccaggccctgtcccctaccttggcaccttccttacggacctggttatgctggacacagccctgccggatatgttggagggggatctcattaactttgagaagaggaggaaggagtgggagatcctggcccgcatccagcagctgcagaggcgctgtcagagctacaccctgagcccccacccgcccatcctggctgccctgcatgcccagaaccagctcaccgaggagcagagctaccggctctcccgggtcattgagccaccagctgcctcctgccccagctccccacgcatccgacggcggatcagcctcaccaagcgtctcagtgcgaagcttgcccgagagaaaagctcatcacctagtgggagtcccggggacccctcatcccccacctccagtgtgtccccagggtcacccccctcaagtcctagaagcagagatgctcctgctggcagtcccccggcctctccagggccccagggccccagcaccaagctgcccctgagcctggacctgcccagcccccggcccttcgctttgcctctgggcagccctcgaatccccctcccggcgcagcagagctcggaggcccgtgtcatccgcgtcagcatcgacaatgaccacgggaacctgtatcgaagcatcttgctgaccagtcaggacaaagcccccagcgtggtccggcgagccttgcagaagcacaatgtgccccagccctgggcctgtgactatcagctctttcaagtccttcctggggaccggggctgggaagagatgctgatttctgcgataaaatcagtaggtacattttttggaatgttcgctatgtgccaggctagattttacagatgagaagtctgaagctcaggtaaggtaagtcacctgtccagggccacaaagaaaaaaaaaacgtgtgtctgaagccagaacgggagctgttgcggcccaactccctcccctgcccccaagcggcctctgggctcgggaagggcccctgcctcctcccgccaggcacttatctctacccaggctgagtgctggccccgccccctcggggatctgccact

SEQ ID NO: 17664 - DNA, 2366 bp, Homo sapiens
  source 1..2366: mol_type = unassigned DNA
agcggcgccactgagagggacgggcgccggccatggagcgcacagcaggcaaagagctggccctggcaccgctgcaggactggggtgaagagaccgaggacggcgcggtgtacagtgtctccctgcggcggcagcgcagtcagcgcaggagcccggcggagggccccgggggcagccaggctcccagccccattgccaataccttcctccactatcgaaccagcaaggtgagggtgctgagggcagcgcgcctggagcggctggtgggagagttggtgtttggagaccgtgagcaggaccccagcttcatgcccgccttcctggccacctaccggacctttgtacccactgcctgcctgctgggctttctgctgccaccaatgccaccgcccccacctcccggagatcaagaagacagcggtacaagatctgagcttcaacaagaacctgagggctgtggtgtcagtgctgggctcctggctgcaggaccaccctcaggatttccgagaccaccctgcccattcggacctgggcagtgtccgaacctttctgggctgggcggccccagggagtgctgaggctcaaaaagcagagaagcttctggaagattttttggaggaggctgagcgagagcaggaagaggagccgcctcaggtgtggacagttgtttctggccaggtgttgtggcacatgcctatagtcccagctacttaggatgctgagatgggaggatctcttgactccgggaaatcaaagctgccgtgagctgtgagcatgcccctgcactccaggcgatagagctgggggaaggaggaatagttgtttcttcaaattgaaatccaaagatctactcaaggacctcccagagttgcccaaacttctgacccagactcttcagaggcctgcgcggaggaagaggaagggctcatgcctcaaggtccccagctcctggacttcagcgtggacgaggtggccgagcagctgaccctcatagacttggagctcttctccaaggtgaggctctacgagtgcttgggctccgtgtggtcgcagagggaccggccgggggctgcaggcgcctcccccactgtgcgcgccaccgtggcccagttcaacaccgtgaccggctgtgtgctgggttccgtgctcggagcaccgggcttggccgccccgcagagggcgcagcggctggagaagtggatccgcatcgcccagcgctgccgagaactgcggaacttctcctccttgcgcgccatcctgtccgccctgcaatctaaccccatctaccggctcaagcgcagctggggggcagtgagccgggaaccgctatctactttcaggaaactttcgcagattttctccgatgagaacaaccacctcagcagcagagagattcttttccaggaggaggccactgagggatcccaagaagaggacaacaccccaggcagcctgccctcaaaaccacccccaggccctgtcccctaccttggcaccttccttacggacctggttatgctggacacagccctgccggatatgttggagggggatctcattaactttgagaagaggaggaaggagtgggagatcctggcccgcatccagcagctgcagaggcgctgtcagagctacaccctgagcccccacccgcccatcctggctgccctgcatgcccagaaccagctcaccgaggagcagagctaccggctctcccgggtcattgagccaccagctgcctcctgccccagctccccacgcatccgacggcggatcagcctcaccaagcgtctcagtgcgaagcttgcccgagagaaaagctcatcacctagtgggagtcccggggacccctcatcccccacctccagtgtgtccccagggtcacccccctcaagtcctagaagcagagatgctcctgctggcagtcccccggcctctccagggccccagggccccagcaccaagctgcccctgagcctggacctgcccagcccccggcccttcgctttgcctctgggcagccctcgaatccccctcccggcgcagcagagctcggaggcccgtgtcatccgcgtcagcatcgacaatgaccacgggaacctgtatcgaagcatcttgctgaccagtcaggacaaagcccccagcgtggtccggcgagccttgcagaagcacaatgtgccccagccctgggcctgtgactatcagctctttcaagtccttcctggggaccggggctgggaagagatgctgatttctgcgataaaatcagtaggtacattttttggaatgttcgctatgtgccaggctagattttacagatgagaagtctgaagctcaggtaaggtaagtcacctgtccagggccac

SEQ ID NO: 17665 - DNA, 2149 bp, Homo sapiens
  source 1..2149: mol_type = unassigned DNA
tccaaagatctactcaaggacctcccagagttgcccaaacttctgacccagactcttcagaggcctgcgcggaggaagaggaagggctcatgcctcaaggtccccagctcctggacttcagcgtggacgaggtggccgagcagctgaccctcatagacttggagctcttctccaaggtgaggctctacgagtgcttgggctccgtgtggtcgcagagggaccggccgggggctgcaggcgcctcccccactgtgcgcgccaccgtggcccagttcaacaccgtgaccggctgtgtgctgggttccgtgctcggagcaccgggcttggccgccccgcagagggcgcagcggctggagaagtggatccgcatcgcccagcgctgccgagaactgcggaacttctcctccttgcgcgccatcctgtccgccctgcaatctaaccccatctaccggctcaagcgcagctggggggcagtgagccgggaaccgctatctactttcaggaaactttcgcagattttctccgatgagaacaaccacctcagcagcagagagattcttttccaggaggaggccactgagggatcccaagaagaggacaacaccccaggcagcctgccctcaaaaccacccccaggccctgtcccctaccttggcaccttccttacggacctggttatgctggacacagccctgccggatatgttggaggtctgacccctgacccttgacccctgaccccagctccacttgcccccagcacaatgggcctcccaatatccacccttgatcctacctgtactcctgacaccaccccacactcccttactacagtggggctcctgacatcccagcccctgaccttgacccttgacccttgaccctgggtgctgcaattcagacacactttgcccccagggggatctcattaactttgagaagaggaggaaggtgagtggaggctacagtgggtgtggtggtgcctgagggtgggggtggggcaggggtagggtcttagaggctcgtcctccaggagtgggagatcctggcccgcatccagcagctgcagaggcgctgtcagagctacaccctgagcccccacccgcccatcctggctgccctgcatgcccagaaccagctcaccgaggagcagagctaccggctctcccgggtcattgagccaccagctgcctcctgccccagctccccacgcatccgacggcggatcagcctcaccaagcgtctcagtgcgaagcttgcccgagagaaaagctcatcacctagtgggagtcccggggacccctcatcccccacctccagtgtgtccccagggtcacccccctcaagtcctagaagcagagatgctcctgctggcagtcccccggcctctccagggccccagggccccagcaccaagctgcccctgagcctggacctgcccagcccccggcccttcgctttgcctctgggcagccctcgaatccccctcccggcgcagcagagctcggaggcccgtgtcatccgcgtcagcatcgacaatgaccacgggaacctgtatcgaagcatcttgctgaccagtcaggacaaagcccccagcgtggtccggcgagccttgcagaagcacaatgtgccccagccctgggcctgtgactatcagctctttcaagtccttcctggggaccgggtgctcctgattcctgacaatgccaacgtcttctatgccatgagtccagtcgcccccagagacttcatgctgcggcggaaagaggggacccggaacactctgtctgtctccccaagctgaggcagccctgtcctctccacaagacacaagtcccacaggcaagcttgcgactcttctcctggaaagctgccatcccccagtagaggccactgtgctgtgtatcccaggaccaccacccaactgtagcccattggaccccatctctttttctgactctgttggtactagatccatattccaaagacatcagcccatgggtggctggtggagagctcaatcccataaatgtagaaagaggtggggcatggatacgtcaaatccctccccagagaaatcttataaatgttagagacgcatcagaagtgacagatgcggatgaaaatagtgaccagagttatgaaacagg

SEQ ID NO: 17666 - DNA, 2542 bp, Homo sapiens
  source 1..2542: mol_type = unassigned DNA
acccgccacccgccggcccttccgcctcactcagcggcgccactgagagggacgggcgccggccatggagcgcacagcaggcaaagagctggccctggcaccgctgcaggactggggtgaagagaccgaggacggcgcggtgtacagtgtctccctgcggcggcagcgcagtcagcgcaggagcccggcggagggccccgggggcagccaggctcccagccccattgccaataccttcctccactatcgaaccagcaaggtgagggtgctgagggcagcgcgcctggagcggctggtgggagagttggtgtttggagaccgtgagcaggaccccagcttcatgcccgccttcctggccacctaccggacctttgtacccactgcctgcctgctgggctttctgctgccaccaatgccaccgcccccacctcccggggtagagatcaagaagacagcggtacaagatctgagcttcaacaagaacctgagggctgtggtgtcagtgctgggctcctggctgcaggaccaccctcaggatttccgagaccaccctgcccattcggacctgggcagtgtccgaacctttctgggctgggcggccccagggagtgctgaggctcaaaaagcagagaagcttctggaagattttttggaggaggctgagcgagagcaggaagaggagccgcctcaggtgtggacaggacctcccagagttgcccaaacttctgacccagactcttcagaggcctgcgcggaggaagaggaagggctcatgcctcaaggtccccagctcctggacttcagcgtggacgaggtggccgagcagctgaccctcatagacttggagctcttctccaaggtgaggctctacgagtgcttgggctccgtgtggtcgcagagggaccggccgggggctgcaggcgcctcccccactgtgcgcgccaccgtggcccagttcaacaccgtgaccggctgtgtgctgggttccgtgctcggagcaccgggcttggccgccccgcagagggcgcagcggctggagaagtggatccgcatcgcccagcgctgccgagaactgcggaacttctcctccttgcgcgccatcctgtccgccctgcaatctaaccccatctaccggctcaagcgcagctggggggcagtgagccgggaaccgctatctactttcaggaaactttcgcagattttctccgatgagaacaaccacctcagcagcagagagattcttttccaggaggaggccactgagggatcccaagaagaggacaacaccccaggcagcctgccctcaaaaccacccccaggccctgtcccctaccttggcaccttccttacggacctggttatgctggacacagccctgccggatatgttggagggggatctcattaactttgagaagaggaggaaggagtgggagatcctggcccgcatccagcagctgcagaggcgctgtcagagctacaccctgagcccccacccgcccatcctggctgccctgcatgcccagaaccagctcaccgaggagcagagctaccggctctcccgggtcattgagccaccagctgcctcctgccccagctccccacgcatccgacggcggatcagcctcaccaagcgtctcagtgcgaagcttgcccgagagaaaagctcatcacctagtgggagtcccggggacccctcatcccccacctccagtgtgtccccagggtcacccccctcaagtcctagaagcagagatgctcctgctggcagtcccccggcctctccagggccccagggccccagcaccaagctgcccctgagcctggacctgcccagcccccggcccttcgctttgcctctgggcagccctcgaatccccctcccggcgcagcagagctcggaggcccgtgtcatccgcgtcagcatcgacaatgaccacgggaacctgtatcgaagcatcttgctgaccagtcaggacaaagcccccagcgtggtccggcgagccttgcagaagcacaatgtgccccagccctgggcctgtgactatcagctctttcaagtccttcctggggaccgggtgctcctgattcctgacaatgccaacgtcttctatgccatgagtccagtcgcccccagagacttcatgctgcggcggaaagaggggacccggaacactctgtctgtctccccaagctgaggcagccctgtcctctccacaagacacaagtcccacaggcaagcttgcgactcttctcctggaaagctgccatcccccagtagaggccactgtgctgtgtatcccaggaccaccacccaactgtagcccattggaccccatctctttttctgactctgttggtactagatccatattccaaagacatcagcccatgggtggctggtggagagctcaatcccataaatgtagaaagaggtggggcatggatacgtcaaatccctccccagagaaatcttataaatgttagagacgcatcagaagtgacagatgcggatgaaaatagtgaccagagttatgaaacag

SEQ ID NO: 17667 - DNA, 747 bp, Homo sapiens
  source 1..747: mol_type = unassigned DNA
ggcagccctcgaatccccctcccggcgcagcagagctcggaggcccgtgtcatccgcgtcagcatcgacaatgaccacgggaacctgtatcgaagcatcttgctgaccagtcaggacaaagcccccagcgtggtccggcgagccttgcagaagcacaatgtgccccagccctgggcctgtgactatcagctctttcaagtccttcctggggaccggggttcccagtgacagcagaatgagcttggcttggcagtagctgcagagggacccatggctgttcaggttcgcggtgctcctgattcctgacaatgccaacgtcttctatgccatgagtccagtcgcccccagagacttcatgctgcggcggaaagaggggacccggaacactctgtctgtctccccaagctgaggcagccctgtcctctccacaagacacaagtcccacaggcaagcttgcgactcttctcctggaaagctgccatcccccagtagaggccactgtgctgtgtatcccaggaccaccacccaactgtagcccattggaccccatctctttttctgactctgttggtactagatccatattccaaagacatcagcccatgggtggctggtggagagctcaatcccataaatgtagaaagaggtggggcatggatacgtcaaatccctccccagagaaatcttataaatgttagagacgcatcagaagtgacagatgcggatgaaaatagtgaccagagttat

SEQ ID NO: 17668 - DNA, 2278 bp, Homo sapiens
  source 1..2278: mol_type = unassigned DNA
ggcccttccgcctcactcagcggcgccactgagagggacgggcgccggccatggagcgcacagcaggcaaagagctggccctggcaccgctgcaggactggggtgaagagaccgaggacggcgcggtgtacagtgtctccctgcggcggcagcgcagtcagcgcaggagcccggcggagggccccgggggcagccaggctcccagccccattgccaataccttcctccactatcgaaccagcaaggtgagggtgctgagggcagcgcgcctggagcggctggtgggagagttggtgtttggagaccgtgagcaggaccccagcttcatgcccgccttcctggccacctaccggacctttgtacccactgcctgcctgctgggctttctgctgccaccaatgccaccgcccccacctcccggggtagagatcaagaagacagcggtacaagatctgagcttcaacaagaacctgagggctgtggtgtcagtgctgggctcctggctgcaggaccaccctcaggatttccgagaccaccctgcccattcggacctgggcagtgtccgaacctttctgggctgggcggccccagggagtgctgaggctcaaaaagcagagaagcttctggaagattttttggaggaggctgagcgagagcaggaagaggagccgcctcaggtgtggacaggacctcccagagttgcccaaacttctgacccagactcttcagaggcctgcgcggaggaagaggaagggctcatgcctcaaggtccccagctcctggacttcagcgtggacgaggtggccgagcagctgaccctcatagacttggagctcttctccaaggtgaggctctacgagtgcttgggctccgtgtggtcgcagagggaccggccgggggctgcaggcgcctcccccactgtgcgcgccaccgtggcccagttcaacaccgtgaccggctgtgtgctgggttccgtgctcggagcaccgggcttggccgccccgcagagggcgcagcggctggagaagtggatccgcatcgcccagcgctgccgagaactgcggaacttctcctccttgcgcgccatcctgtccgccctgcaatctaaccccatctaccggctcaagcgcagctggggggcagtgagccgggaaccgctatctactttcaggaaactttcgcagattttctccgatgagaacaaccacctcagcagcagagagattcttttccaggaggaggccactgagggatcccaagaagaggacaacaccccaggcagcctgccctcaaaaccacccccaggccctgtcccctaccttggcaccttccttacggacctggttatgctggacacagccctgccggatatgttggagggggatctcattaactttgagaagaggaggaaggagtgggagatcctggcccgcatccagcagctgcagaggcgctgtcagagctacaccctgagcccccacccgcccatcctggctgccctgcatgcccagaaccagctcaccgaggagcagagctaccggctctcccgggtcattgagccaccagctgcctcctgccccagctccccacgcatccgacggcggatcagcctcaccaagcgtctcagtgcgaagcttgcccgagagaaaagctcatcacctagtgggagtcccggggacccctcatcccccacctccagcctctgcatctcccccagtgtgtccccagggtcacccccctcaagtcctagaagcagagatgctcctgctggcagtcccccggcctctccagggccccagggccccagcaccaagctgcccctgagcctggacctgcccagcccccggcccttcgctttgcctctgggcagccctcgaatccccctcccggcgcagcagagctcggaggcccgtgtcatccgcgtcagcatcgacaatgaccacgggaacctgtatcgaagcatcttgctgaccagtcaggacaaagcccccagcgtggtccggcgagccttgcagaagcacaatgtgccccagccctgggcctgtgactatcagctctttcaagtccttcctggggaccgggtgctcctgattcctgacaatgccaacgtcttctatgccatgagtccagtcgcccccagagacttcatgctgcggcggaaagaggggacccggaacactctgtctgtctccccaagctgaggcagccctgtcctctccacaagacacaagtcccacaggcaagcttgcgactcttctcctggaaagctgccatcccc

SEQ ID NO: 17669 - DNA, 440 bp, Homo sapiens
  source 1..440: mol_type = unassigned DNA
cccaaaatgctgagattacaggcatgagccactgcgcccagccaatgttttcttgagattttaaatgtggggctattgaatgcaccagtggtggctggggtgttcgtgcttttctagccctcagcatctgcagatgggccaagctgtagcctccaccccttactgcctgcagctgcccctgagcctggacctgcccagcccccggcccttcgctttgcctctgggcagccctcgaatccccctcccggcgcagcagagctcggaggcccgtgtcatccgcgtcagcatcgacaatgaccacgggaacctgtatcgaagcatcttgctgaccagtcaggacaaagcccccagcgtggtccggcgagccttgcagaagcacaatgtgccccagccctgggcctgtgactatcagctctttcaagtccttcctggggaccggg

SEQ ID NO: 17670 - DNA, 501 bp, Homo sapiens
  source 1..501: mol_type = unassigned DNA
cttgggctccgtgtggtcgcagagggaccggccgggggctgcaggcgcctcccccactgtgcgcgccaccgtggcccagttcaacaccgtgaccggctgtgtgctgggttccgtgctcggagcaccgggcttggccgccccgcagagggcgcagcggctggagaagtggatccgcatcgcccagggaaccgctatctactttcaggaaactttcgcagattttctccgatgagaacaaccacctcagcagcagagagattcttttccaggaggaggccactgagggatcccaagaagaggacaacaccccaggcagcctgccctcaaaaccacccccaggccctgtcccctaccttggcaccttccttacggacctggttatgctggacacagccctgccggatatgttggagggggatctcattaactttgagaagaggaggaaggagtgggagatcctggcccgcatccagcagctgcagaggcgctgtcagagctaca

SEQ ID NO: 17671 - DNA, 1455 bp, Homo sapiens
  source 1..1455: mol_type = unassigned DNA
actcagcggcgccactgagagggacgggcgccggccatggagcgcacagcaggcaaagagctggccctggcaccgctgcaggactggggtgaagagaccgaggacggcgcggtgtacagtgtctccctgcggcggcagcgcagtcagcgcaggagcccggcggagggccccgggggcagccaggctcccagccccattgccaataccttcctccactatcgaaccagcaaggtgagggtgctgagggcagcgcgcctggagcggctggtgggagagttggtgtttggagaccgtgagcaggaccccagcttcatgcccgccttcctggccacctaccggacctttgtacccactgcctgcctgctgggctttctgctgccaccaatgccaccgcccccacctcccggggtagagatcaagaagacagcggtacaagatctgagcttcaacaagaacctgagactcttcagaggcctgcgcggaggaagaggaagggctcatgcctcaaggtccccagctcctggacttcagcgtggacgaggtggccgagcagctgaccctcatagacttggagctcttctccaaggtgaggctctacgagtgcttgggctccgtgtggtcgcagagggaccggccgggggctgcaggcgcctcccccactgtgcgcgccaccgtggcccagttcaacaccgtgaccggctgtgtgctgggttccgtgctcggagcaccgggcttggccgccccgcagagggcgcagcggctggagaagtggatccgcatcgcccagcgctgccgagaactgcggaacttctcctccttgcgcgccatcctgtccgccctgcaatctaaccccatctaccggctcaagcgcagctggggggcagtgagccgggaaccgctatctactttcaggaaactttcgcagattttctccgatgagaacaaccacctcagcagcagagagattcttttccaggaggaggccactgagggatcccaagaagaggacaacaccccaggcagcctgccctcagtgagtgattacagtttgggatggggacaagtgggaccttcagggagggttgtggatggtgatggggtcagtaatggccccaagtgactggagctttgggggctgcagaaaccacccccaggccctgtcccctaccttggcaccttccttacggacctggttatgctggacacagccctgccggatatgttggaggtctgacccctgacccttgacccctgaccccagctccacttgcccccagcacaatgggcctcccaatatccacccttgatcctacctgtactcctgacaccaccccacactcccttactacagtggggctcctgacatcccagcccctgaccttgacccttgacccttgaccctgggtgctgcaattcagacacactttgcccccagggggatctcattaactttga

SEQ ID NO: 17672 - DNA, 562 bp, Homo sapiens
  source 1..562: mol_type = unassigned DNA
agggacagggactcacccaaggtcacacagccagtcttggattcaaacttgagagtttgtaaccctttctaatgatcaggacctcccagagttgcccaaacttctgacccagactcttcagaggcctgcgcggaggaagaggaagggctcatgcctcaaggtccccagctcctggacttcagcgtggacgaggtggccgagcagctgaccctcatagacttggagctcttctccaaggtgaggctctacgagtgcttgggctccgtgtggtcgcagagggaccggccgggggctgcaggcgcctcccccactgtgcgcgccaccgtggcccagttcaacaccgtgaccggctgtgtgctgggttccgtgctcggagcaccgggcttggccgccccgcagagggcgcagcggctggagaagtggatccgcatcgcccagcgctgccgagaactgcggaacttctcctccttgcgcgccatcctgtccgccctgcaatctaaccccatctaccggctcaagcgcagctggggggcagtgagccgggaaccgctatctactttca

SEQ ID NO: 17673 - DNA, 973 bp, Homo sapiens
  source 1..973: mol_type = unassigned DNA
ctcactcagcggcgccactgagagggacgggcgccggccatggagcgcacagcaggcaaagagctggccctggcaccgctgcaggactggggtgaagagaccgaggacggcgcggtgtacagtgtctccctgcggcggcagcgcagtcagcgcaggagcccggcggagggccccgggggcagccaggctcccagccccattgccaataccttcctccactatcgaaccagcaaggtgagggtgctgagggcagcgcgcctggagcggctggtgggagagttggtgtttggagaccgtgagcaggaccccagcttcatgcccgccttcctggccacctaccggacctttgtacccactgcctgcctgctgggctttctgctgccaccaatgccaccgcccccacctcccgggtcagtagcgaaccataacctccgtattctccaccctagaaccccaactgggcacccccctccacctcctcaggtgtggaacctggaaacacctcccagacccagagccctcttcctaagccccctctaggttcccccttcttcacctgctggggggcctcttcccagggtagagatcaagaagacagcggtacaagatctgagcttcaacaagaacctgagggctgtggtgtcagtgctgggctcctggctgcaggaccaccctcaggatttccgagaccaccctgcccattcggacctgggcagtgtccgaacctttctgggctgggcggccccagggagtgctgaggctcaaaaagcagagaagcttctggaagattttttggaggaggctgagcgagagcaggaagaggagccgcctcaggtgtggacaggacctcccagagttgcccaaacttctgacccagactcttcagaggcctgcgcggaggaagaggaagggctcatgcctcaaggtccccagctcctggacttcagcgtggacgaggtggccgagcagctga

SEQ ID NO: 17674 - DNA, 521 bp, Homo sapiens
  source 1..521: mol_type = unassigned DNA
aaaaaaaaaaaaaaaaaaggtaccaggagtcatattctatgtcccccactctggacccagctctgagaccctgcctctctggccagggctgtggtgtcagtgctgggctcctggctgcaggaccaccctcaggatttccgagaccaccctgcccattcggacctgggcagtgtccgaacctttctgggctgggcggccccagggagtgctgaggctcaaaaagcagagaagcttctggaagattttttggaggaggctgagcgagagcaggaagaggagccgcctcagttgtttctggccaggtgttgtggcacatgcctatagtcccagctacttaggatgctgagatgggaggatctcttgactccgggaaatcaaagctgccgtgagctgtgagcatgcccctgcactccaggcgatagagctgggggaaggaggaatagttgtttcttcaaattgaaatccaaagatctactcaaggacctcccagagttgcccaaacttctgacccagactcttca

SEQ ID NO: 17675 - DNA, 557 bp, Homo sapiens
  source 1..557: mol_type = unassigned DNA
aggaagggaggggctcggaggcgaccagatgaggcgaccaggtagaaaggggactgggggcggccaggctcccagccccattgccaataccttcctccactatcgaaccagcaaggtgagggtgctgagggcagcgcgcctggagcggctggtgggagagttggtgtttggagaccgtgagcaggaccccagcttcatgcccgccttcctggccacctaccggacctttgtacccactgcctgcctgctgggctttctgctgccaccaatgccaccgcccccacctcccggggtagagatcaagaagacagcggtacaagatctgagcttcaacaagaacctgagggctgtggtgtcagtgctgggctcctggctgcaggaccaccctcaggatttccgagaccaccctgcccattcggacctgggcagtgtccgaacctttctgggctgggcggccccagggagtgctgaggctcaaaaagcagagaagcttctggaagattttttggaggaggctgagcgagagcaggaagaggagccgcctcaggtgtggacag

SEQ ID NO: 17676 - DNA, 264 bp, Homo sapiens
  source 1..264: mol_type = unassigned DNA
tagcgaaccataacctccgtattctccaccctagaaccccaactgggcacccccctccacctcctcagggtagagatcaagaagacagcggtacaagatctgagcttcaacaagaacctgagggctgtggtgtcagtgctgggctcctggctgcaggaccaccctcaggatttccgagaccaccctgcccattcggacctgggcagtgtccgaacctttctgggctgggcggccccagggagtgctgaggctcaaaaagcagag

SEQ ID NO: 17677 - DNA, 537 bp, Homo sapiens
  source 1..537: mol_type = unassigned DNA
actcagcggcgccactgagagggacgggcgccggccatggagcgcacagcaggcaaagagctggccctggcaccgctgcaggactggggtgaagagaccgaggacggcgcggtgtacagtgtctccctgcggcggcagcgcagtcagcgcaggagcccggcggagggccccgggggcagccaggctcccagccccattgccaataccttcctccactatcgaaccagcaaggtgagggtgctgagggcagcgcgcctggagcggctggtgggagagttggtgtttggagaccgtgagcaggaccccagcttcatgcccgccttcctggccacctaccggacctttgtacccactgcctgcctgctgggctttctgctgccaccaatgccaccgcccccacctcccggggtagagatcaagaagacagcggtacaagatctgagcttcaacaagaacctgaggaccaccctcaggatttccgagaccaccctgcccattcggacctgggcagtgtccgaacctttctgggctgggcgg

SEQ ID NO: 17678 - DNA, 771 bp, Homo sapiens
  source 1..771: mol_type = unassigned DNA
cgccactgagagggacgggcgccggccatggagcgcacagcaggcaaagagctggccctggcaccgctgcaggactggggtgaagagaccgaggacggcgcggtgtacagtgtctccctgcggcggcagcgcagtcagcgcaggagcccggcggagggccccgggggcagccaggctcccagccccattgccaataccttcctccactatcgaaccagcaaggtgagggtgctgagggcagcgcgcctggagcggctggtgggagagttggtgtttggagaccgtgagcaggaccccagcttcatgcccgccttcctggccacctaccggacctttgtacccactgcctgcctgctgggctttctgctgccaccaatgccaccgcccccacctcccgggtcagtagcgaaccataacctccgtattctccaccctagaaccccaactgggcacccccctccacctcctcaggtgtggaacctggaaacacctcccagacccagagccctcttcctaagccccctctaggttcccccttcttcacctgctggggggcctcttcccagggtagagatcaagaagacagcggtacaagatctgagcttcaacaagaacctgaggtgggtccttcatccagataggggagtgcggggagggaaatccaagaggtcaaaggttagcagtcggactggggttttgaaaattgcaggttgggtaataagagactgggagtcaggtggggcgtggtggctcatgcctgtaatcccaaca

SEQ ID NO: 17679 - DNA, 504 bp, Homo sapiens
  source 1..504: mol_type = unassigned DNA
ctcactcagcggcgccactgagagggacgggcgccggccatggagcgcacagcaggcaaagagctggccctggggcgtggggatgcagcaggaggactcggcccgagtccgagcggccaaggaggctgaggccccaggacctgtgcccctttggtgccctgagtccgcctgtgcgtccaggcaccgctgcaggactggggtgaagagaccgaggacggcgcggtgtacagtgtctccctgcggcggcagcgcagtcagcgcaggagcccggcggagggccccgggggcagccaggctcccagccccattgccaataccttcctccactatcgaaccagcaaggtgagggtgctgagggcagcgcgcctggagcggctggtgggagagttggtgtttggagaccgtgagcaggaccccagcttcatgcccgccttcctggccacctaccggacctttgtacccactgcctgcctgctgggctttctgctgccaccaatgccaccg

SEQ ID NO: 17680 - DNA, 11350 bp, Homo sapiens
  source 1..11350: mol_type = unassigned DNA
agttgtctcccgagcgctggctgcgccgcccgagccgctgggccggggaagcactggccgttcgctcccgggccggctccgccaggcgctcgcaggcatgcagcccgggagcaggaggcgctccccgggccgctgctgagccggccggggcggcggggaccagcgccagcggagcccctcccaccttgccccggggcagacgagcggcgccccgacaccccctcttctcccgcagccccgccagcgccaccccccgcgggccgcaggggctcatgcagccgccaagggagaggctagtggtaacaggccgagctggatggatgggtatggggagaggggcaggacgttcagccctgggattctggccgaccctcgccttccttctctgcagcttccccgcagccacctccccgtgcaagatcctcaagtgcaactctgagttctggagcgccacgtcgggcagccacgccccagcctcagacgacacccccgagttctgtgcagccttgcgcagctacgccctgtgcacgcggcggacggcccgcacctgccggggtgacctggcctaccactcggccgtccatggcatagaggacctcatgagccagcacaactgctccaaggatggccccacctcgcagccacgcctgcgcacgctcccaccggccggagacagccaggagcgctcggacagccccgagatctgccattacgagaagagctttcacaagcactcggccacccccaactacacgcactgtggcctcttcggggacccacacctcaggactttcaccgaccgcttccagacctgcaaggtgcagggcgcctggccgctcatcgacaataattacctgaacgtgcaggtcaccaacacgcctgtgctgcccggctcagcggccactgccaccagcaagctcaccatcatcttcaagaacttccaggagtgtgtggaccagaaggtgtaccaggctgagatggacgagctcccggccgccttcgtggatggctctaagaacggtggggacaagcacggggccaacagcctgaagatcactgagaaggtgtcaggccagcacgtggagatccaggccaagtacatcggcaccaccatcgtggtgcgccaggtgggccgctacctgacctttgccgtccgcatgccagaggaagtggtcaatgctgtggaggactgggacagccagggtctctacctctgcctgcggggctgccccctcaaccagcagatcgacttccaggccttccacaccaatgctgagggcaccggtgcccgcaggctggcagccgccagccctgcacccacagcccccgagaccttcccatacgagacagccgtggccaagtgcaaggagaagctgccggtggaggacctgtactaccaggcctgcgtcttcgacctcctcaccacgggcgacgtgaacttcacactggccgcctactacgcgttggaggatgtcaagatgctccactccaacaaagacaaactgcacctgtatgagaggactcgggacctgccaggcagggcggctgcggggctgcccctggccccccggcccctcctgggcgccctcgtcccgctcctggccctgctccctgtgttctgctagacgcgtagatgtggagggaggcgcgggctccgtcctctcggcttccccatgtgtgggctgggaccgcccacggggtgcagatctcctggcgtgtccaccatggccccgcagaacgccagggaccgcctgctgccaagggctcaggcacggacccctccccttctagtgcacgtgacaaggttgtggtgactggtgccatgatgtttgacagtagagctgtgtgagagggagagcagctcccctcgccccgcccctgcagtgtgaatgtgtgaaacatcccctcaggctgaagccccccacccccaccagagacacactgggaaccgtcagagtcagctccttccccctcgcaatgcactgaaaggcccggccgactgctgctcgccgatccgtggggccccctgtgcccgccacacgcacgcacacactcttacacgagagcacactcgatccccctaggccagcggggacaccccagccacacagggaggcatccttggggcttggccccaggcagggcaaccccggggcgctgcttggcaccttagcagactgctggaaccttttggccagtaggtcgtgcccgcctggtgccttctggcctgtggcctccctgcccatgttcacctggctgctgtgggtaccagtgcaggtcccggttttcaggcacctgctcagctgcccgtctctggcctgggcccctgccccttccaccctgtgcttagaaagtcgaagtgcttggttctaaatgtctaaacagagaagagatccttgacttctgttcctctctctcctgcagatgcaagagctcctgggcaggggtgcctgggccccagggtgtggcaggagacccagtggatggggccagctggcctgccctgatcctctgcttcctcctcacaaccccaagagcccccagcccggtccatccacgtctggagtctggggagaggagcagggtcttaggactctcagctctgagcatccctggcagggtcttcaacctctaatctcttcccttaagccctgtggccacacagccaggagagacttgccgctggctcccgcctcatttcagcccagggtgctcatccaggggcccagaacagtcccacctgtgctgctgtgcccacagcacaaagccaggcttcactcccaaaagtgcagccaggccctggagggtgatcctgccagcagccctacagctccacaccctacccacccatcggcagcccctctgctgttccccagggacctctcatacactggccaggaggctgcagaacgtgtgtctccccctccctccaagaggtcctgctccctctgccagaaccgtgtgtgggcgggtgggagggcgctcggggcccggcccctccctctccctgctggttttagttggtccctatgttggaagtaaaaagtgaagcactttattttggttgtgtttgctcacgttctgcttggaagtggggacccctcactgcgtccacgtgtctgcgacctgtgtggagtgtcaccgcgtgtacatactgtaaattatttattaatggctaaatgcaagtaaagtttggtttttttgttattttcttttagacgtgttggagtttgttttctgaacagactttggctcccttgaggcgggtggaggatggactttggtggtgggatcccctgcagcaagtgtgtgtgtgtgcgcgcatgtgtgtgtgcgcgcatgtgtgtatgcatgcctgtgtgtgtgcgtgcctgtgtgcgtgcatgtacgcatgtgtgcgcatgcctgtgtgtgcgcccatgcctatgtgtgtgcatgtaggcatgtgtgtgcgcatgtgtatgtgcgtgagaatggtgtgaaggcggatagaagatgcagcagtttaacagccaccacacattgcttttgtaaagtcacttttcctcctcacgatgagctgtctttggagcttggcaggcccagatcctcttgttctagtgacagtggaacacagtcagggagacaggtgactatgtggtggagagacatatggtgccctctgggatgagatgggtgggatagcctgagatctgggatgactccctctcagccactgctatcagcctggagccccagctgttgggactgcctgccaccctccctgccagtgcccatcttctcatagcccgggcggagcagtggtgctgcaggaggctgctgtccacgtcactgtgggaccaggtttattggcagctgtgatcacatttcatctgtacaaactacccagtgaatcaggaagaaattcaggcccattttgccgatgaaacagactctgagattaactgacttgcctagggctccttagcaacgggaaggacaacctgtgcacctaggttagtattgtcctgaagccccttctcttcaaactaaatgccatgaggcagaatagcagcacagttaagccagcctacatcctggcttctccacctccccagcagtgtgaccatgggcaagtcacttcacctctctgagcctgcatgctgttctctggaagatgggggggtgcctgtcccatacagttgtttggagagtcaggagttcattcctgtaaattgcttaggagagggcggggcacacatggcttgtctggtcgtggggagggagggggtggtattatcccaaagcaagataaatcagttaaggggagaaggaaaggggcgatacagaccctggactcttgggagaggtgaacctgcaggctagcaaggggaggagtcccaagagtggccaagttcattaatcccaggcagaccaggaaggctgaagaaaaaggagaactttattttatttttgaaatggagtctggcgtcttgctctgtcgccaggctggagtgcagtggcaccatcccagctcactgcagcccctgcctcccaggttcaagcaattctcctgcctcagcctcccaagtagctgggactacaggcacacaccaccacgcctggctaattttttgtattttagtagagatggtgtttcaccatgttgaccagtatggtcttgatctcctgacctcgtgatccgcctgccttggcctcccaaagtgttgggattacaggcgtgagccaccaccgtgcccggccaaaaaaggagaacgttctaaagccctgttcttgcagggctcccagagagaacacgggagttgggtttgggaggcaggaaccagactggaaaggacaaaacgtacccagcatcttccctggcggccggaaccgtcactacaggccccgtgcccttagcagtcccagggacagagcgactcagggaggcagcaaggaggagcggagccattggtgctcgtccggcacagagaacagttcctgagaagccagggcacacagaagaaaaagaaaaaagaaatctctactagacgaaaatgctaaatggcactagccacaaagtattcttggtttggaattttttttccaggaccctaaatgtaaccggctggaattctttcccaagtgccatgctacttactactggttgccctcacgagcatggaaatgccgtcgtgaatatggaacacagcatcctgagctaaaagattcccaagaagcagcttcatcttgcaggacgggctaggttgggagcctctggaggttcctggctgccagctccgcggaggcctgcggcctggaggtaaatgcattagcacacggaggtgggcgcctctccccgccccatcctgtctcactgatgtgttgccgagaactggagttcttgtttagctaaccagaatgtgcaaggctataggacaggagagaaatggcctttaaaacaaatgaatgagagtcacgatgaagggggcagacgggggggtgaaaatcattaccagaacacttgggcagagacccgtcagagccaggcaggagacagtcatcagagctgtgccagcaagtggcatggagcaggggtggcacttgggctcgggctgcaggcaaacttggcgtcaaaactggctcaacccgtcgcgagctgtgtggtctccttgggattttttgagccttagattccttatttgtaaaatggatttgtgagtctccacctcccgaggtcagtatggaaatccagtgagctaacactcgtcaatggcctcgcacatggccctggcaccacgcatggaggccgccaaaagtggccgcctcctctctgcaattgcatttatttatccatttgataactctattgggtgtctacccagcattgttcaggggggtgtgaggggctaccgcaatgacccagacagactgctgtgcattcttattggaaagacaaggcaataaaccacagttacaaaacccagggtcccatggtaacgagctccacagagaaaagggaagtgggccagaggttccgagagacacacattttggattgcaggagggtgagaaggggcattcatctgtggtggggttaaggggaggcctccgactagctcacctgcatgaatttcaggaacaagccatgcagagccggacagagcattctgtgcagagaaaacagtgtaacagccctagagcagcagcagcaaagggggagtttaagggatggtgggaagccactgtcactggacagtagcaagtggacagaccaggggtcccaggtgaggccacagagcagccaaagtactgcagggctctccggctccgggaggacttgatgtttgactccagttgccagaggaagccgttcacgggctttgagtgtaggaatgatgtgtccgacttgggtctttttattgttcttttttagagacagggtctcactctgtcacccaggctggagtgcagcggcacaatcacagctcactgcagcctccacttcctgggctcaagcaatcctcccacttcagccactcaagtagctgggattacaggtgcctgccgtcacacccggctaattgttaaatttttttggagagacaggatcttgctgttttcccaggctgatcttgaactcctgggctcaagcgagacgtctgtttcagcctcccaaagtgctgggataacaggtgtgagccactgggcctgccttggcttgggtattaaaggaattgttctagttactatatggaggtgacttggggccgctggggaagaaagaggaagtcaggagccagtctgaggcagtggcaatgcagcgattatcagaaataatgggctcaatgatagactggataaagaaaatgtggcacatatacgccatggagtactatgcagccataaaaagggatgagttcatgtcctttgcagggacatggatgaagctggaaaccatcattctcagcaaactaacacaagaacagaaaaccaaacaccgcatgttctcactcgtaagtgggagttgaacaatgagaacacatggacacagggaagggaacatcacacactggggcctgtcagtgggtggggggctgggggagggagagcatcaggagaaatacccaatgtagatgatgacgggttcataggtgcagcaaaccaccatggcacgtgtatacctatgtaacaaacttgtgcgttctgcacgtgtaccccataactgaaagtataatcataattttaagaaaagaaatgatggcctttggggtctaataagaaggtggggctgacagggcttggggagagagcgagcttgacaggagaccacgatgtcttccccaggggtctgagcacctggggaaatggtggtgccatttaccatgactggaaagatcatgggaggagcaggtttgggacactgaaggcccgagagcccctggcaaaccaccagtgtaagtccaagagtccaaaagctgaagaacttggagtccaatgtttgagggtaaaaaacagccagcatgagaaaaagatgaaggccagaagactcgtccagtctagcccttccacattcctctgcccgcttttatcctagcctcgctggcaggtgattagatggtgcccacccaggttaagcgtgggtctctgtctcccagttcactgactcaaatgttaatttcctttggcgacagcctcacagacacacccaggaacgatactttgcatcctccaatccaatcaagttggcactcaatattaaacagtttcggccgggagcggtggctcacgcctgtaatcccagcactttgggaggccaaagcgggcagatcactaagtcaggagatcgagaccatcctggctaacacggtgaaaccccatctctactaaaaatacaaaaaattagccaggcgtggtggtgggcgcctgtagtcccagctactcgggaggctgaggcaagagagtggcgtgaacccgggaggcagaacttgcagcaagcagagatcgcaccactgcactccagcctccagcctgggcgacagagcaagacaccgtctcaaaaaaaaaaaaaaaacaactaacagtttcgttcattaaggcaatgtccatggggcagctcctgcatgccacgccacccctgccctgacatactcccaggctgaccagccagaactggggagagggcatcttgaagaaacagtccaccctccgccctcgcatacctgtgtctcccagcagacaagacacacaagggcagggactgcactttcctgtgtgcaaatctcaggtatggtccagaaatcacatctctttggtctgattggccttacttaccaaacccttgaaacaatggaaagaagcttgctgcaatgggaagacccctgccccccaaaccctctaaccaggagtctacagacctcattccgtggaagttcccattgtcccctgggaaaccaccaccttctgaatcggcacagccaaggcccccaaccctgctatcaacagctttccttagccaccttccccatcctgcagggcttttcaacatttcgactttttaatccttccctccctaagatatagacatggtgttagtagcagaaccctgaaggcaaaggaacagaaactaacactctcagaaagtcctagcaggatggtctgaattaatagacagctgcaggcagccagtgtgcaaggcacgctcgtaatgtcagtggcgttccggaatgagggctgtgatcccaggcagcccagatcccaaggcgaaaacattcatgtcgcccagcatcaccctgtccttgcccagggtgaccctgagacggcacttggattcttccacatctgaactcaaacctgctccctcagctctccccagcaggaattggagccctctccaggccgttcagccaaagcagaatgtgtctggccaagcagatctgcccagagaagaacaaagacgtgttcagacactgtctggggaattggttttgagctcactctgagctccatctgtgcaacaaggccagcgtcagctgttacagagaaggggcttgtggcagtttattaccctggtgagctggctcggggccatgctgaccgcaggactgtaaaggacataaggcagttggcaatatgggaagcagcagtccccaaagcaccccgtcaaggaaacgatgcaagagctctgtccactggaccagccccaccctaccccgccacgccctggcctagggggagggaccttgtgtttcacgggcctggatggccagggatggacagtggcatgggcacagacacacccagaccgaaggaagggcccgggctccagaaccagacccgatccaggctcccagctctgtcacctactggctgcatgaaaagggtgggttttccttgttttgcagcctcagctatctcagctgtgagggaacaatgacgccacctccctcacgtggcggtcctgaagatgaaatgtaatgcatgcagcgcggcggccggcccaccgtgtgctcttagtaactggccgctgttctcttcagccctcccgttactgaccacctcgagggcaccgttcctccaagctgaccatttcctgccagtcacccactgcccagctcgcccagccatggagtgggctctggtccacgtgcatggtgagctgccatctttgtcgtcctctggacaccacgtctacctccttgggaaatagaaacgagtcctgcattgctttgtcaaatttcacaaaaaccctagaaagcagatattgccctggtttacagacggacagacagaagcaaagagaagccaactgacccactccaggttacaagcagggtctggtaggagagcacgcgtccaccccaccgctcactgcgcccacctactcctcgcttgagggcagagaacgagctggggcggggcgctccagggggcacaggcagcctgtgttcaaggcatgctcgtgagccccacagcaggggcggagtcaaaccagggctctggttctggggtgagcagagggtggggccaggcccccactgggaggctgactgaggaggggctcaaagggcaggcaggctccatcagagcggtttgatgagcagggccgctgagtggccctcaggtcaaggctggggccgggaccaccagggaccaggtctgcggggccaggggtccctccccagggtggagcaggaaaactccggcaaccgccttcttgagtggacttgaccttccctttctctgctaatgatctcagattaatcccttaaggcaagtgccccagggtgggtgttggttgcataaaacaagaggagtccttcttcccttccttcctggcacaaacatttgtaggccacccccgatgtggctggtcgtagtctggatttgggggcacattcaggcattcaacaaatacgtcatgaggccccgtgatgagctggggggctatgcttgatgtcggcagtacagctgtggtcgctcgaatgaatgtgcccgccctcacgggactgacctctagtggtgagagacagacactaaccgagtcacatgtgtgattacacgtgtaatcatacttacatatgtaacaacacgagttacacgtgcagtgtggggagggggcccttcacggtgaccagcccatcagggaaggggatgcgggtggcagaaggaagcggcacacccttgtcctcacggagctcacaggaggttctctgaccctcatcttaagccacaggctgtgtctgagcctcactgccctagctatcaactgggtgcaggactaggccttaatcactgggcagcgggaagaactacataagctcatactggcgcaaagccccttgggagaccgcagggaaagccattgcatgaggtggtgacaggctcggccttcagagtcgggctagaatctgagttctgacaatgatccccgccttgacccatctctcctcaggccgccctgagccttccagttaggcctgggctttgggcttccgtgtttgtctctggattgttcggttttagcaagagtcctgctaaattggtcttgctggaatcctccgccctccacatctgattgcccttcctgtctgatcgtggtcttcatgccccacggcctccaggggacgtctgatcacctggcctgccttcagcaagaatccccccaggtgtttcctcttaagaggttttccatccactgagcccaccctgctccttggccatcaattcccacttgcctgtactgtattcagaggggaccccaatctctcttcccagctgcagcggtccctgtccaacactgccccccacctcaaataaagtctttcttactgtctttaacatatgccgtcaataaagttttagcagatcc

SEQ ID NO: 17681 - DNA, 3038 bp, Homo sapiens
  source 1..3038: mol_type = unassigned DNA
cgcccgcggccgaggtggacggagcctcccggctcgctgctcccgccggcggagcgaggctgccctttcttcgcagcgtgatttattttcttctttttttctgaactcttcttccagggagaggctagtggtaacaggccgagctggatggatgggtatggggagaggggcaggacgttcagccctgggattctggccgaccctcgccttccttctctgcagcttccccgcagccacctccccgtgcaagatcctcaagtgcaactctgagttctggagcgccacgtcgggcagccacgccccagcctcagacgacacccccgagttctgtgcagccttgcgcagctacgccctgtgcacgcggcggacggcccgcacctgccggggtgacctggcctaccactcggccgtccatggcatagaggacctcatgagccagcacaactgctccaaggatggccccacctcgcagccacgcctgcgcacgctcccaccggccggagacagccaggagcgctcggacagccccgagatctgccattacgagaagagctttcacaagcactcggccacccccaactacacgcactgtggcctcttcggggacccacacctcaggactttcaccgaccgcttccagacctgcaaggtgcagggcgcctggccgctcatcgacaataattacctgaacgtgcaggtcaccaacacgcctgtgctgcccggctcagcggccactgccaccagcaagctcaccatcatcttcaagaacttccaggagtgtgtggaccagaaggtgtaccaggctgagatggacgagctcccggccgccttcgtggatggctctaagaacggtggggacaagcacggggccaacagcctgaagatcactgagaaggtgtcaggccagcacgtggagatccaggccaagtacatcggcaccaccatcgtggtgcgccaggtgggccgctacctgacctttgccgtccgcatgccagaggaagtggtcaatgctgtggaggactgggacagccagggtctctacctctgcctgcggggctgccccctcaaccagcagatcgacttccaggccttccacaccaatgctgagggcaccggtgcccgcaggctggcagccgccagccctgcacccacagcccccgagaccttcccatacgagacagccgtggccaagtgcaaggagaagctgccggtggaggacctgtactaccaggcctgcgtcttcgacctcctcaccacgggcgacgtgaacttcacactggccgcctactacgcgttggaggatgtcaagatgctccactccaacaaagacaaactgcacctgtatgagaggactcgggacctgccaggcagggcggctgcggggctgcccctggccccccggcccctcctgggcgccctcgtcccgctcctggccctgctccctgtgttctgctagacgcgtagatgtggagggaggcgcgggctccgtcctctcggcttccccatgtgtgggctgggaccgcccacggggtgcagatctcctggcgtgtccaccatggccccgcagaacgccagggaccgcctgctgccaagggctcaggcacggacccctccccttctagtgcacgtgacaaggttgtggtgactggtgccatgatgtttgacagtagagctgtgtgagagggagagcagctcccctcgccccgcccctgcagtgtgaatgtgtgaaacatcccctcaggctgaagccccccacccccaccagagacacactgggaaccgtcagagtcagctccttccccctcgcaatgcactgaaaggcccggccgactgctgctcgccgatccgtggggccccctgtgcccgccacacgcacgcacacactcttacacgagagcacactcgatccccctaggccagcggggacaccccagccacacagggaggcatccttggggcttggccccaggcagggcaaccccggggcgctgcttggcaccttagcagactgctggaaccttttggccagtaggtcgtgcccgcctggtgccttctggcctgtggcctccctgcccatgttcacctggctgctgtgggtaccagtgcaggtcccggttttcaggcacctgctcagctgcccgtctctggcctgggcccctgccccttccaccctgtgcttagaaagtcgaagtgcttggttctaaatgtctaaacagagaagagatccttgacttctgttcctctctctcctgcagatgcaagagctcctgggcaggggtgcctgggccccagggtgtggcaggagacccagtggatggggccagctggcctgccctgatcctctgcttcctcctcacaaccccaagagcccccagcccggtccatccacgtctggagtctggggagaggagcagggtcttaggactctcagctctgagcatccctggcagggtcttcaacctctaatctcttcccttaagccctgtggccacacagccaggagagacttgccgctggctcccgcctcatttcagcccagggtgctcatccaggggcccagaacagtcccacctgtgctgctgtgcccacagcacaaagccaggcttcactcccaaaagtgcagccaggccctggagggtgatcctgccagcagccctacagctccacaccctacccacccatcggcagcccctctgctgttccccagggacctctcatacactggccaggaggctgcagaacgtgtgtctccccctccctccaagaggtcctgctccctctgccagaaccgtgtgtgggcgggtgggagggcgctcggggcccggcccctccctctccctgctggttttagttggtccctatgttggaagtaaaaagtgaagcactttattttggttgtgtttgctcacgttctgcttggaagtggggacccctcactgcgtccacgtgtctgcgacctgtgtggagtgtcaccgcgtgtacatactgtaaattatttattaatggctaaatgcaagtaaagtttggtttttttgtta

SEQ ID NO: 17682 - DNA, 3172 bp, Homo sapiens
  source 1..3172: mol_type = unassigned DNA
agacctagacaactcggaagtgggtttttcagcctcctgcaccggtgtcgcgtctgagtgcgactgatgagccagggggcgtcggtggaagcttgggggagaggctagtggtaacaggccgagctggatggatgggtatggggagaggggcaggacgttcagccctgggattctggccgaccctcgccttccttctctgcagcttccccgcagctattaaaagaagcccaggaagtttctgcgcagcgttggagatgaggagactgtggaatttgatgtcgtggaaggagagaagggtgcagaagccgctaatgtaactgggcccggggaggtgcccgtgaagggcagctgttatgcccccaacctacccacctccccgtgcaagatcctcaagtgcaactctgagttctggagcgccacgtcgggcagccacgccccagcctcagacgacacccccgagttctgtgcagccttgcgcagctacgccctgtgcacgcggcggacggcccgcacctgccggggtgacctggcctaccactcggccgtccatggcatagaggacctcatgagccagcacaactgctccaaggatggccccacctcgcagccacgcctgcgcacgctcccaccggccggagacagccaggagcgctcggacagccccgagatctgccattacgagaagagctttcacaagcactcggccacccccaactacacgcactgtggcctcttcggggacccacacctcaggactttcaccgaccgcttccagacctgcaaggtgcagggcgcctggccgctcatcgacaataattacctgaacgtgcaggtcaccaacacgcctgtgctgcccggctcagcggccactgccaccagcaagctcaccatcatcttcaagaacttccaggagtgtgtggaccagaaggtgtaccaggctgagatggacgagctcccggccgccttcgtggatggctctaagaacggtggggacaagcacggggccaacagcctgaagatcactgagaaggtgtcaggccagcacgtggagatccaggccaagtacatcggcaccaccatcgtggtgcgccaggtgggccgctacctgacctttgccgtccgcatgccagaggaagtggtcaatgctgtggaggactgggacagccagggtctctacctctgcctgcggggctgccccctcaaccagcagatcgacttccaggccttccacaccaatgctgagggcaccggtgcccgcaggctggcagccgccagccctgcacccacagcccccgagaccttcccatacgagacagccgtggccaagtgcaaggagaagctgccggtggaggacctgtactaccaggcctgcgtcttcgacctcctcaccacgggcgacgtgaacttcacactggccgcctactacgcgttggaggatgtcaagatgctccactccaacaaagacaaactgcacctgtatgagaggactcgggacctgccaggcagggcggctgcggggctgcccctggccccccggcccctcctgggcgccctcgtcccgctcctggccctgctccctgtgttctgctagacgcgtagatgtggagggaggcgcgggctccgtcctctcggcttccccatgtgtgggctgggaccgcccacggggtgcagatctcctggcgtgtccaccatggccccgcagaacgccagggaccgcctgctgccaagggctcaggcacggacccctccccttctagtgcacgtgacaaggttgtggtgactggtgccatgatgtttgacagtagagctgtgtgagagggagagcagctcccctcgccccgcccctgcagtgtgaatgtgtgaaacatcccctcaggctgaagccccccacccccaccagagacacactgggaaccgtcagagtcagctccttccccctcgcaatgcactgaaaggcccggccgactgctgctcgccgatccgtggggccccctgtgcccgccacacgcacgcacacactcttacacgagagcacactcgatccccctaggccagcggggacaccccagccacacagggaggcatccttggggcttggccccaggcagggcaaccccggggcgctgcttggcaccttagcagactgctggaaccttttggccagtaggtcgtgcccgcctggtgccttctggcctgtggcctccctgcccatgttcacctggctgctgtgggtaccagtgcaggtcccggttttcaggcacctgctcagctgcccgtctctggcctgggcccctgccccttccaccctgtgcttagaaagtcgaagtgcttggttctaaatgtctaaacagagaagagatccttgacttctgttcctctctctcctgcagatgcaagagctcctgggcaggggtgcctgggccccagggtgtggcaggagacccagtggatggggccagctggcctgccctgatcctctgcttcctcctcacaaccccaagagcccccagcccggtccatccacgtctggagtctggggagaggagcagggtcttaggactctcagctctgagcatccctggcagggtcttcaacctctaatctcttcccttaagccctgtggccacacagccaggagagacttgccgctggctcccgcctcatttcagcccagggtgctcatccaggggcccagaacagtcccacctgtgctgctgtgcccacagcacaaagccaggcttcactcccaaaagtgcagccaggccctggagggtgatcctgccagcagccctacagctccacaccctacccacccatcggcagcccctctgctgttccccagggacctctcatacactggccaggaggctgcagaacgtgtgtctccccctccctccaagaggtcctgctccctctgccagaaccgtgtgtgggcgggtgggagggcgctcggggcccggcccctccctctccctgctggttttagttggtccctatgttggaagtaaaaagtgaagcactttattttggttgtgtttgctcacgttctgcttggaagtggggacccctcactgcgtccacgtgtctgcgacctgtgtggagtgtcaccgcgtgtacatactgtaaattatttattaatggctaaatgcaagtaaagtttggtttttttgtt

SEQ ID NO: 17683 - DNA, 1929 bp, Homo sapiens
  source 1..1929: mol_type = unassigned DNA
gtttcatccaaaagatgtctctcaggggaagttaccagtcccttaaatatcacaacggcagcagaactgcagggcccagggaaccttgggaaggagatgtttctttcccagaaaaataagcgacagagttaggaaaggtcaccatactgaagccctcccaagtgcagccttgcgggcctcgcagagagcgccaaaccatccggccctgcgcgccacgcggaccggcatagccatctctctggagtggcagctgtgccaaggtggcaaggttaggcccgcaggccctcagcacgggggcgcagccggggcaagtcttcaggaagcagcgaggtgcttgaagggggtgctggaggcaggccaaacccagtcaggatgggtggcctggggccacgacgggcgggaacctcgagggagaggctagtggtaacaggccgagctggatggatgggtatggggagaggggcaggacgttcagccctgggattctggccgaccctcgccttccttctctgcagcttccccgcagccacctccccgtgcaagatcctcaagtgcaactctgagttctggagcgccacgtcgggcagccacgccccagcctcagacgacacccccgagttctgtgcagccttgcgcagctacgccctgtgcacgcggcggacggcccgcacctgccggggtgacctggcctaccactcggccgtccatggcatagaggacctcatgagccagcacaactgctccaaggatggccccacctcgcagccacgcctgcgcacgctcccaccggccggagacagccaggagcgctcggacagccccgagatctgccattacgagaagagctttcacaagcactcggccacccccaactacacgcactgtggcctcttcggggacccacacctcaggactttcaccgaccgcttccagacctgcaaggtgcagggcgcctggccgctcatcgacaataattacctgaacgtgcaggtcaccaacacgcctgtgctgcccggctcagcggccactgccaccagcaagctcaccatcatcttcaagaacttccaggagtgtgtggaccagaaggtgtaccaggctgagatggacgagctcccggccgccttcgtggatggctctaagaacggtggggacaagcacggggccaacagcctgaagatcactgagaaggtgtcaggccagcacgtggagatccaggccaagtacatcggcaccaccatcgtggtgcgccaggtgggccgctacctgacctttgccgtccgcatgccagaggaagtggtcaatgctgtggaggactgggacagccagggtctctacctctgcctgcggggctgccccctcaaccagcagatcgacttccaggccttccacaccaatgctgagggcaccggtgcccgcaggctggcagccgccagccctgcacccacagcccccgagaccttcccatacgagacagccgtggccaagtgcaaggagaagctgccggtggaggacctgtactaccaggcctgcgtcttcgacctcctcaccacgggcgacgtgaacttcacactggccgcctactacgcgttggaggatgtcaagatgctccactccaacaaagacaaactgcacctgtatgagaggactcgggacctgccaggcagggcggctgcggggctgcccctggccccccggcccctcctgggcgccctcgtcccgctcctggccctgctccctgtgttctgctagacgcgtagatgtggagggaggcgcgggctccgtcctctcggcttccccatgtgtgggctgggaccgcccacggggtgcagatctcctggcgtgtccaccatggccccgcagaacgccagggaccgcctgctgccaagggctcaggcacggacccctccccttctagtgcacgtgacaagg

SEQ ID NO: 17684 - DNA, 989 bp, Homo sapiens
  source 1..989: mol_type = unassigned DNA
ccgcggccgaggtggacggagcctcccggctcgctgctcccgccggcggagcgaggctgccctttcttcgcagcgtgatttattttcttctttttttctgaactcttcttccagggagaggctagtggtaacaggccgagctggatggatgggtatggggagaggggcaggacgttcagccctgggattctggccgaccctcgccttccttctctgcagcttccccgcagctcaccatcatcttcaagaacttccaggagtgtgtggaccagaaggtgtaccaggctgagatggacgagctcccggccgccttcgtggatggctctaagaacggtggggacaagcacggggccaacagcctgaagatcactgagaaggtgtcaggccagcacgtggagatccaggccaagtacatcggcaccaccatcgtggtgcgccaggtgggccgctacctgacctttgccgtccgcatgccagaggaagtggtcaatgctgtggaggactgggacagccagggtctctacctctgcctgcggggctgccccctcaaccagcagatcgacttccaggccttccacaccaatgctgagggcaccggtgcccgcaggctggcagccgccagccctgcacccacagcccccgagaccttcccatacgagacagccgtggccaagtgcaaggagaagctgccggtggaggacctgtactaccaggcctgcgtcttcgacctcctcaccacgggcgacgtgaacttcacactggccgcctactacgcgttggaggatgtcaagatgctccactccaacaaagacaaactgcacctgtatgagaggactcgggacctgccaggcagggcggctgcggggctgcccctggccccccggcccctcctgggcgccctcgtcccgctcctggccctgctccctgtgttctgctagacgcgtagatgtggagggaggcgcgggctccgtcctctcggcttccccatg

SEQ ID NO: 17685 - DNA, 1889 bp, Homo sapiens
  source 1..1889: mol_type = unassigned DNA
aagtgggtttttcagcctcctgcaccggtgtcgcgtctgagtgcgactgatgagccagggggcgtcggtggaagcttgggggagaggctagtggtaacaggccgagctggatggatgggtatggggagaggggcaggacgttcagccctgggattctggccgaccctcgccttccttctctgcagcttccccgcagacagctattaaaagaagcccaggaagtttctgcgcagcgttggagatgaggagactgtggaatttgatgtcgtggaaggagagaagggtgcagaagccgctaatgtaactgggcccggggaggtgcccgtgaagggcagctgttatgcccccaacctacgtaagtttcgccgattcatcccccggcctccctcagttgccccaccacccatggtggcagagatcccttcagcggggacagaacctggcagagaaggggaacgggccaaagactccgcgcagcggcccagacgacggcgccccccacccttcttctaccgacggtggtttgtgcgagtccctcggccccccagccagcaacagcctacagagagcactgacggggtagagcccaaagagccccattggaggggcagcaacagcagggagccacctccccgtgcaagatcctcaagtgcaactctgagttctggagcgccacgtcgggcagccacgccccagcctcagacgacacccccgagttctgtgcagccttgcgcagctacgccctgtgcacgcggcggacggcccgcacctgccggggtgacctggcctaccactcggccgtccatggcatagaggacctcatgagccagcacaactgctccaaggatggccccacctcgcagccacgcctgcgcacgctcccaccggccggagacagccaggagcgctcggacagccccgagatctgccattacgagaagagctttcacaagcactcggccacccccaactacacgcactgtggcctcttcggggacccacacctcaggactttcaccgaccgcttccagacctgcaaggtgcagggcgcctggccgctcatcgacaataattacctgaacgtgcaggtcaccaacacgcctgtgctgcccggctcagcggccactgccaccagcaagctcaccatcatcttcaagaacttccaggagtgtgtggaccagaaggtgtaccaggctgagatggacgagctcccggccgccttcgtggatggctctaagaacggtggggacaagcacggggccaacagcctgaagatcactgagaaggtgtcaggccagcacgtggagatccaggccaagtacatcggcaccaccatcgtggtgcgccaggtgggccgctacctgacctttgccgtccgcatgccagaggaagtggtcaatgctgtggaggactgggacagccagggtctctacctctgcctgcggggctgccccctcaaccagcagatcgacttccaggccttccacaccaatgctgagggcaccggtgcccgcaggctggcagccgccagccctgcacccacagcccccgagaccttcccatacgagacagccgtggccaagtgcaaggagaagctgccggtggaggacctgtactaccaggcctgcgtcttcgacctcctcaccacgggcgacgtgaacttcacactggccgcctactacgcgttggaggatgtcaagatgctccactccaacaaagacaaactgcacctgtatgagaggactcgggacctgccaggcagggcggctgcggggctgcccctggccccccggcccctcctgggcgccctcgtcccgctcctggccctgctccctgtgttctgctagacgcgtagatgtggagggaggcgcgggctccgtcctctcggc

SEQ ID NO: 17686 - DNA, 552 bp, Homo sapiens
  source 1..552: mol_type = unassigned DNA
agtgttctgatcacgccctgggtgctcactgaaaatgcttcaggggctccctgccatctattggaaaaaagcagaaatccttaggctggtgtgccagggtccaatcagaaaagcaaaacccacccgggatgtttccgcagaggggacttcgtgtagggcattgttatgggcatgggaagactgaaagggcaaagagggaccgctgggacacagagtggcagaagcagcttccacccctgcagccagagggacagaaggaaggcaggtttggaggagggcccgggactctgatggggaagaagggccgctgctgctgccacctccccgtgcaagatcctcaagtgcaactctgagttctggagcgccacgtcgggcagccacgccccagcctcagacgacacccccgagttctgtgcagccttgcgcagctacgccctgtgcacgcggcggacggcccgcacctgccggggtgacctggcctaccactcggccgtccatggcatagaggacctcatgagccagcacaactgctccaaggatggccccacctcg

SEQ ID NO: 17687 - DNA, 547 bp, Homo sapiens
  source 1..547: mol_type = unassigned DNA
ctcccgctcgacgcccggctgcggagctgcctggccatctcctgccctcggggatgtcggcgcagtgcaccgcgtgggctcgcgtcccggcggccctttgcctcggcgcgccggcgtacgggaaggtgcggaccttggattgagggccgaggatgcccattgccaagccgccccggctttcctaagtggacgggagggcacggcgacgattcagcgccggctcgcgccgcagctcaacccaggggagaggctagtggtaacaggccgagctggatggatgggtatggggagaggggcaggacgttcagccctgggattctggccgaccctcgccttccttctctgcagcttccccgcagccacctccccgtgcaagatcctcaagtgcaactctgagttctggagcgccacgtcgggcagccacgccccagcctcagacgacacccccgagttctgtgcagccttgcgcagctacgccctgtgcacgcggcggacggcccgcacctgccggggtgacctggcctaccactcggccgtccatggcata

SEQ ID NO: 17688 - DNA, 473 bp, Homo sapiens
  source 1..473: mol_type = unassigned DNA
gtggacggagcctcccggctcgctgctcccgccggcggagcgaggctgccctttcttcgcagcgtgatttattttcttctttttttctgaactcttcttccagggagaggctagtggtaacaggccgagctggatggatgggtatggggagaggggcaggacgttcagccctgggattctggccgaccctcgccttccttctctgcagcttccccgcagacagctattaaaagaagcccaggaagtttctgcgcagcgttggagatgaggagactgtggaatttgatgtcgtggaaggagagaagggtgcagaagccgctaatgtaactgggcccggggaggtgcccgtgaagggcagctgttatgcccccaacctacgtaagtttcgccgattcatcccccggcctccctcagttgccccaccacccatggtggcagagatcccttcagcggggacagaacctggcagagaa

SEQ ID NO: 17689 - DNA, 320 bp, Homo sapiens
  source 1..320: mol_type = unassigned DNA
acacgtcccttacaccgtgtgcgggctgggagctccttccctcagcccggctcgcggagccccggacggagccggccacccgactgtcccgccgtgaacccccattggcccgcgccgcccgggcccccgcctcccgctcgacgcccggctgcggagctgcctggccatctcctgccctcggggatgtcggcgcagtgcaccgcgtgggctcgcgtcccggcggccctttgcctcggcgcgccggcgtacgggaagggagaggctagtggtaacaggccgagctggatggatgggtatggggagaggggcaggacgttcag

SEQ ID NO: 17690 - DNA, 3078 bp, Homo sapiens
  source 1..3078: mol_type = unassigned DNA
gtagctgagatgcagagagccatcctgcccagacctagacaactcggaagtgggtttttcagcctcctgcaccggtgtcgcgtctgagtgcgactgatgagccagggggcgtcggtggaagcttggggtcggcagtctggttggaaaggagaggctagtggtaacaggccgagctggatggatgggtatggggagaggggcaggacgttcagccctgggattctggccgaccctcgccttccttctctgcagcttccccgcagccacctccccgtgcaagatcctcaagtgcaactctgagttctggagcgccacgtcgggcagccacgccccagcctcagacgacacccccgagttctgtgcagccttgcgcagctacgccctgtgcacgcggcggacggcccgcacctgccggggtgacctggcctaccactcggccgtccatggcatagaggacctcatgagccagcacaactgctccaaggatggccccacctcgcagccacgcctgcgcacgctcccaccggccggagacagccaggagcgctcggacagccccgagatctgccattacgagaagagctttcacaagcactcggccacccccaactacacgcactgtggcctcttcggggacccacacctcaggactttcaccgaccgcttccagacctgcaaggtgcagggcgcctggccgctcatcgacaataattacctgaacgtgcaggtcaccaacacgcctgtgctgcccggctcagcggccactgccaccagcaagctcaccatcatcttcaagaacttccaggagtgtgtggaccagaaggtgtaccaggctgagatggacgagctcccggccgccttcgtggatggctctaagaacggtggggacaagcacggggccaacagcctgaagatcactgagaaggtgtcaggccagcacgtggagatccaggccaagtacatcggcaccaccatcgtggtgcgccaggtgggccgctacctgacctttgccgtccgcatgccagaggaagtggtcaatgctgtggaggactgggacagccagggtctctacctctgcctgcggggctgccccctcaaccagcagatcgacttccaggccttccacaccaatgctgagggcaccggtgcccgcaggctggcagccgccagccctgcacccacagcccccgagaccttcccatacgagacagccgtggccaagtgcaaggagaagctgccggtggaggacctgtactaccaggcctgcgtcttcgacctcctcaccacgggcgacgtgaacttcacactggccgcctactacgcgttggaggatgtcaagatgctccactccaacaaagacaaactgcacctgtatgagaggactcgggacctgccaggcagggcggctgcggggctgcccctggccccccggcccctcctgggcgccctcgtcccgctcctggccctgctccctgtgttctgctagacgcgtagatgtggagggaggcgcgggctccgtcctctcggcttccccatgtgtgggctgggaccgcccacggggtgcagatctcctggcgtgtccaccatggccccgcagaacgccagggaccgcctgctgccaagggctcaggcacggacccctccccttctagtgcacgtgacaaggttgtggtgactggtgccatgatgtttgacagtagagctgtgtgagagggagagcagctcccctcgccccgcccctgcagtgtgaatgtgtgaaacatcccctcaggctgaagccccccacccccaccagagacacactgggaaccgtcagagtcagctccttccccctcgcaatgcactgaaaggcccggccgactgctgctcgccgatccgtggggccccctgtgcccgccacacgcacgcacacactcttacacgagagcacactcgatccccctaggccagcggggacaccccagccacacagggaggcatccttggggcttggccccaggcagggcaaccccggggcgctgcttggcaccttagcagactgctggaaccttttggccagtaggtcgtgcccgcctggtgccttctggcctgtggcctccctgcccatgttcacctggctgctgtgggtaccagtgcaggtcccggttttcaggcacctgctcagctgcccgtctctggcctgggcccctgccccttccaccctgtgcttagaaagtcgaagtgcttggttctaaatgtctaaacagagaagagatccttgacttctgttcctctctctcctgcagatgcaagagctcctgggcaggggtgcctgggccccagggtgtggcaggagacccagtggatggggccagctggcctgccctgatcctctgcttcctcctcacaaccccaagagcccccagcccggtccatccacgtctggagtctggggagaggagcagggtcttaggactctcagctctgagcatccctggcagggtcttcaacctctaatctcttcccttaagccctgtggccacacagccaggagagacttgccgctggctcccgcctcatttcagcccagggtgctcatccaggggcccagaacagtcccacctgtgctgctgtgcccacagcacaaagccaggcttcactcccaaaagtgcagccaggccctggagggtgatcctgccagcagccctacagctccacaccctacccacccatcggcagcccctctgctgttccccagggacctctcatacactggccaggaggctgcagaacgtgtgtctccccctccctccaagaggtcctgctccctctgccagaaccgtgtgtgggcgggtgggagggcgctcggggcccggcccctccctctccctgctggttttagttggtccctatgttggaagtaaaaagtgaagcactttattttggttgtgtttgctcacgttctgcttggaagtggggacccctcactgcgtccacgtgtctgcgacctgtgtggagtgtcaccgcgtgtacatactgtaaattatttattaatggctaaatgcaagtaaagtttggtttttttgttattttctttta

SEQ ID NO: 17691 - DNA, 3174 bp, Homo sapiens
  source 1..3174: mol_type = unassigned DNA
ctcccgctcgacgcccggctgcggagctgcctggccatctcctgccctcggggatgtcggcgcagtgcaccgcgtgggctcgcgtcccggcggccctttgcctcggcgcgccggcgtacgggaaggtgcggaccttggattgagggccgaggatgcccattgccaagccgccccggctttcctaagtggacgggagggcacggcgacgattcagcgccggctcgcgccgcagctcaacccaggggagaggctagtggtaacaggccgagctggatggatgggtatggggagaggggcaggacgttcagccctgggattctggccgaccctcgccttccttctctgcagcttccccgcagccacctccccgtgcaagatcctcaagtgcaactctgagttctggagcgccacgtcgggcagccacgccccagcctcagacgacacccccgagttctgtgcagccttgcgcagctacgccctgtgcacgcggcggacggcccgcacctgccggggtgacctggcctaccactcggccgtccatggcatagaggacctcatgagccagcacaactgctccaaggatggccccacctcgcagccacgcctgcgcacgctcccaccggccggagacagccaggagcgctcggacagccccgagatctgccattacgagaagagctttcacaagcactcggccacccccaactacacgcactgtggcctcttcggggacccacacctcaggactttcaccgaccgcttccagacctgcaaggtgcagggcgcctggccgctcatcgacaataattacctgaacgtgcaggtcaccaacacgcctgtgctgcccggctcagcggccactgccaccagcaagctcaccatcatcttcaagaacttccaggagtgtgtggaccagaaggtgtaccaggctgagatggacgagctcccggccgccttcgtggatggctctaagaacggtggggacaagcacggggccaacagcctgaagatcactgagaaggtgtcaggccagcacgtggagatccaggccaagtacatcggcaccaccatcgtggtgcgccaggtgggccgctacctgacctttgccgtccgcatgccagaggaagtggtcaatgctgtggaggactgggacagccagggtctctacctctgcctgcggggctgccccctcaaccagcagatcgacttccaggccttccacaccaatgctgagggcaccggtgcccgcaggctggcagccgccagccctgcacccacagcccccgagaccttcccatacgagacagccgtggccaagtgcaaggagaagctgccggtggaggacctgtactaccaggcctgcgtcttcgacctcctcaccacgggcgacgtgaacttcacactggccgcctactacgcgttggaggatgtcaagatgctccactccaacaaagacaaactgcacctgtatgagaggactcgggacctgccaggcagggcggctgcggggctgcccctggccccccggcccctcctgggcgccctcgtcccgctcctggccctgctccctgtgttctgctagacgcgtagatgtggagggaggcgcgggctccgtcctctcggcttccccatgtgtgggctgggaccgcccacggggtgcagatctcctggcgtgtccaccatggccccgcagaacgccagggaccgcctgctgccaagggctcaggcacggacccctccccttctagtgcacgtgacaaggttgtggtgactggtgccatgatgtttgacagtagagctgtgtgagagggagagcagctcccctcgccccgcccctgcagtgtgaatgtgtgaaacatcccctcaggctgaagccccccacccccaccagagacacactgggaaccgtcagagtcagctccttccccctcgcaatgcactgaaaggcccggccgactgctgctcgccgatccgtggggccccctgtgcccgccacacgcacgcacacactcttacacgagagcacactcgatccccctaggccagcggggacaccccagccacacagggaggcatccttggggcttggccccaggcagggcaaccccggggcgctgcttggcaccttagcagactgctggaaccttttggccagtaggtcgtgcccgcctggtgccttctggcctgtggcctccctgcccatgttcacctggctgctgtgggtaccagtgcaggtcccggttttcaggcacctgctcagctgcccgtctctggcctgggcccctgccccttccaccctgtgcttagaaagtcgaagtgcttggttctaaatgtctaaacagagaagagatccttgacttctgttcctctctctcctgcagatgcaagagctcctgggcaggggtgcctgggccccagggtgtggcaggagacccagtggatggggccagctggcctgccctgatcctctgcttcctcctcacaaccccaagagcccccagcccggtccatccacgtctggagtctggggagaggagcagggtcttaggactctcagctctgagcatccctggcagggtcttcaacctctaatctcttcccttaagccctgtggccacacagccaggagagacttgccgctggctcccgcctcatttcagcccagggtgctcatccaggggcccagaacagtcccacctgtgctgctgtgcccacagcacaaagccaggcttcactcccaaaagtgcagccaggccctggagggtgatcctgccagcagccctacagctccacaccctacccacccatcggcagcccctctgctgttccccagggacctctcatacactggccaggaggctgcagaacgtgtgtctccccctccctccaagaggtcctgctccctctgccagaaccgtgtgtgggcgggtgggagggcgctcggggcccggcccctccctctccctgctggttttagttggtccctatgttggaagtaaaaagtgaagcactttattttggttgtgtttgctcacgttctgcttggaagtggggacccctcactgcgtccacgtgtctgcgacctgtgtggagtgtcaccgcgtgtacatactgtaaattatttattaatggctaaatgcaagtaaagtttggtttttttgttattttctttta

SEQ ID NO: 17692 - DNA, 880 bp, Homo sapiens
  source 1..880: mol_type = unassigned DNA
gccttaggtgtctctttaaaccctctctcccctctttatttccaaatctttatctttggctttcttaagctgtaaaggcacactggcaccttaggtggtcaggtaagatcgctggattccttatttcggcgaaagtccagcggaccattcccgccactgtacccattttagaaacacttggaagacccttaaggatcatttacggagagaaaggtcctgcgtgttccgaagttcaggggccccctgatcccgctgagccccctccaggagcgaaagggttaagaatgatgaagaagaggaagcgaagcgcgccccccggcccatgccgcagccacgggcccagacccgccacggcgcccgcgccgccgccctcgccggagcccacgagacctgcatggacgggcatgggcttgagagcagcaccttccagcgccgccgctgccgccgccgaggttgagcagcgccgcagccccgggctctgccccccgccgctggagctgctgctgctgctgctgttcagcctcgggctgctccacgcaggtgactgccaacagccagcccaatgtcgaatccagaaatgcaccacggacttcgtgtccctgacttctcacctgaactctgccgttgacggctttgactctgagttttgcaaggccttgcgtgcctatgctggctgcacccagcgaacttcaaaagcctgccgtggcaacctggtataccattctgccgtgttgggtatcagtgacctcatgagccagaggaattgttccaaggatggacccacatcctctaccaaccccgaagtgacccatgatccttgcaactatcacagccacgctggagccagggaacacaggagaggggaccagaaccctcccag

SEQ ID NO: 17693 - DNA, 446 bp, Homo sapiens
  source 1..446: mol_type = unassigned DNA
tatttgaggctgactggggagaaagctgcctggaggaagctgctggggtgcggggggctgagggatttggctccccgccctctcccctagatggcggagaaatcgggctagctggaagggcgcagctcctctcccagagctcattctggagtcggagaactgggagagcggcccccgaggcggagcctccctcccgccccgagtcgcgctgccccccacctgggggagaggggcgggcgccgcgctgccttccctccgcgcctcggccgcgtggcttgcggcttattttcccagctggcaagcgtcgcgctgcagacaagggaatgcctgtgggaaggctgcactggtttcctgagataaatggacaggaagcgcattacctccgcgcgctggcaagcggctcccaaatgctttttgcacctgccgttttgagcggtgagagcagc

SEQ ID NO: 17694 - DNA, 2513 bp, Homo sapiens
  source 1..2513: mol_type = unassigned DNA
tatttgaggctgactggggagaaagctgcctggaggaagctgctggggtgcggggggctgagggatttggctccccgccctctcccctagatggcggagaaatcgggctagctggaagggcgcagctcctctcccagagctcattctggagtcggagaactgggagagcggcccccgaggcggagcctccctcccgccccgagtcgcgctgccccccacctgggggagaggggcgggcgccgcgctgccttccctccgcgcctcggccgcgtggcttgcggcttattttcccagctggcaagcgtcgcgctgcagacaagggaatgcctgtgggaaggctgcactggtttcctgagataaatggacaggaagcgcattacctccgcgcgctggcaagcggctcccaaatgctttttgcacctgccgttttgagcggtgagagcagcggcggagcccgcagggattgcgggggcccgttgtctacgagcgggtgatgagccccccgcaagccccgggctctctccctccgcgagtgcattgctcacgccaagctttgggactcttctctcacacccaggtcctgcgtgttccgaagttcaggggccccctgatcccgctgagccccctccaggagcgaaagggttaagaatgataaggaagaagaggaagcgaagcgcgccccccggcccatgccgcagccacgggcccagacccgccacggcgcccgcgccgccgccctcgccggagcccacgagacctgcatggacgggcatgggcttgagagcagcaccttccagcgccgccgctgccgccgccgaggttgagcagcgccgcagccccgggctctgccccccgccgctggagctgctgctgctgctgctgttcagcctcgggctgctccacgcaggtgactgccaacagccagcccaatgtcgaatccagaaatgcaccacggacttcgtgtccctgacttctcacctgaactctgccgttgacggctttgactctgagttttgcaaggccttgcgtgcctatgctggctgcacccagcgaacttcaaaagcctgccgtggcaacctggtataccattctgccgtgttgggtatcagtgacctcatgagccagaggaattgttccaaggatggacccacatcctctaccaaccccgaagtgacccatgatccttgcaactatcacagccacgctggagccagggaacacaggagaggggaccagaaccctcccagttaccttttttgtggcttgtttggagatcctcacctcagaactttcaaggataacttccaaacatgcaaagtagaaggggcctggccactcatagataataattatctttcagttcaagtgacaaacgtacctgtggtccctggatccagtgctactgctacaaataaggcaagtataccttcttttttccctctccctactcaactttcaaaagatgtttgattcttcagataacttttgaaatgtgctataaagggcctagtttaaaaggaacttcttttgaaaagcaattaacagttgataaagggttaaataaaaattatctagtaaggaatttcttattggaatgtaaacgtggttctaattttaaatagacagtgatataaagaataaaaagtaaacagtgaaattgagttctccagggaaaaggcagacctgtttagtaaaaaaaggatgcttttttcagtgatgtctttttttgagtgcatatgtgtgtgactcttgaagaaatccatgttcagatttatcagatgattgaagtgggtgttctgaataaagaaagctgtgaggcctgaggcagtgacgtatcaggaaacatattttattggagatttggaagctatagtaaaacataatggcaataagccaacttcccagtggtaaacccacagtggtggtttagttactaacctcttgatgaccgaggaggttaataattggatattgcagagcagcaatatgtaacctgtgtgtaatctcagggcctcaggttaacagtttcagtcagaagctaagagaaacactgacaaaatttagcttaccatgactagctgccagtttatgtggtctgtgttcgtttgttttaaagaaactaatactgtacagagatctttgacaccaacttcaaggcaccagtgtttagtgcaagcaggtagagaggacctatgaactaggtttctaattggcagtcagtgctaattcagccattagtaagtaaagtcacttttccactaaaatagtgtcccgactaaccacctccttccgtgtcttttccaaccacaaaaccacacacatagaccatctcatcttactttatttcttgcatttattgtatccaaaaaaattggtttagttttttaatgtaattgacaagactcaagcttttgaaatacttacgactgttctcttgattccaggacaccctcccctgtgtctaaacatgtgtggtatactttttaaataaattaaagcttattttacttggc

SEQ ID NO: 17695 - DNA, 4580 bp, Homo sapiens
  source 1..4580: mol_type = unassigned DNA
atttgaggctgactggggagaaagctgcctggaggaagctgctggggtgcggggggctgagggatttggctccccgccctctcccctagatggcggagaaatcgggctagctggaagggcgcagctcctctcccagagctcattctggagtcggagaactgggagagcggcccccgaggcggagcctccctcccgccccgagtcgcgctgccccccacctgggggagaggggcgggcgccgcgctgccttccctccgcgcctcggccgcgtggcttgcggcttattttcccagctggcaagcgtcgcgctgcagacaagggaatgcctgtggtcctgcgtgttccgaagttcaggggccccctgatcccgctgagccccctccaggagcgaaagggttaagaatgataaggaagaagaggaagcgaagcgcgccccccggcccatgccgcagccacgggcccagacccgccacggcgcccgcgccgccgccctcgccggagcccacgagacctgcatggacgggcatgggcttgagagcagcaccttccagcgccgccgctgccgccgccgaggttgagcagcgccgcagccccgggctctgccccccgccgctggagctgctgctgctgctgctgttcagcctcgggctgctccacgcaggtgactgccaacagccagcccaatgtcgaatccagaaatgcaccacggacttcgtgtccctgacttctcacctgaactctgccgttgacggctttgactctgagttttgcaaggccttgcgtgcctatgctggctgcacccagcgaacttcaaaagcctgccgtggcaacctggtataccattctgccgtgttgggtatcagtgacctcatgagccagaggaattgttccaaggatggacccacatcctctaccaaccccgaagtgacccatgatccttgcaactatcacagccacgctggagccagggaacacaggagaggggaccagaaccctcccagttaccttttttgtggcttgtttggagatcctcacctcagaactttcaaggataacttccaaacatgcaaagtagaaggggcctggccactcatagataataattatctttcagttcaagtgacaaacgtacctgtggtccctggatccagtgctactgctacaaataagatcactattatcttcaaagcccaccatgagtgtacagatcagaaagtctaccaagctgtgacagatgacctgccggccgcctttgtggatggcaccaccagtggtggggacagcgatgccaagagcctgcgtatcgtggaaagggagagtggccactatgtggagatgcacgcccgctatatagggaccacagtgtttgtgcggcaggtgggtcgctacctgacccttgccatccgtatgcctgaagacctggccatgtcctacgaggagagccaggacctgcagctgtgcgtgaacggctgccccctgagtgaacgcatcgatgacgggcagggccaggtgtctgccatcctgggacacagcctgcctcgcacctccttggtgcaggcctggcctggctacacactggagactgccaacactcaatgccatgagaagatgccagtgaaggacatctatttccagtcctgtgtcttcgacctgctcaccactggtgatgccaactttactgccgcagcccacagtgccttggaggatgtggaggccctgcacccaaggaaggaacgctggcacattttccccagcagtggcaatgggactccccgtggaggcagtgatttgtctgtcagtctaggactcacctgcttgatccttatcgtgtttttgtaggggttgtcttttgttttggttttttattttttgtctataacaaaattttaaaatatatattgtcataatatattgagtaaaagagtatatatgtatataccatgtatatgacaggatgtttgtcctgggacacccaccagattgtacatactgtgtttggctgttttcacatatgttggatgtagtgttctttgattgtatcaattttgttttgcagttctgtgaaatgttttataatgtccctgcccagggacctgttagaaagcactttattttttatatattaaatatttatgtgtgtgcttggttgatatgtatagtacatatacacagacatccatatgcagcgtttcctttgaaggtgaccagttgtttgtagctattcttggctgtaccttcctgccctttcccattgctactgatttgccacggtgtgcagcttttactcgccaccttccggtggagctgcctcgttcctttgaactatgccctcacccttctgccctcacttgatttgaaagggtcgttaactctcccttacaggtgctttgactcttaaacgctgatcttaagaagctctcttcatctaagagctgttactttttcagaagggggggtattattggtattctgattactctcaattctaattgttatatatttgagcccatacagtgtattaggttgaaccatagaaactgctattctcgtaggtcaaaagggtctagtgatggaagttttgtagataagtaccaggcatctcagtaactcctagactttttctcatcccatgccccgttttaaattgtcagttttccctctgactcttctgtgttaaaacatgaaactataaatttagtaattatcatgccttgctctttttaatctatatgactgatgcaagcccctcttcttaaccgtttcttggctttgagcccagaaacacagctctccctgtctccaactccagtaagccctcctcagcctcaccttacgaatccaaagaactggggtttgttaggttctttctctaatgtagaggcccagatcccatcacaaagtttttcattcttccttgtccaccatgatcttcatcacagtctttgatatgtctgcatgcaaagtggaacagagttgggcggcaatgacagaagagcttccttggcctgactcggtgtgcggccacttcggcactgcttaatccagatattcttgttaactaagcattgtgcttcccaggtggtctgaagtcaggtactctctctctcaacacctgtagttgaatatgatttggtcagttgctcgttgtaacttggagaaattcctataaagtaagatctccttgcctcttccatccattgttggcacccccttgcaaaaggaaaagaacagcaaaagtcaggagcagtaatctgagaaagttaactccaggataggtaggtttctattgttatagctagatgtaaatctttagttccaagaagtgatagagtttctgctttaataatttgttgataagtttacataaacagaaataaaagatactatctttaccgtagtagttcaggccaagattatgcttagttttagttctccaggtagttacttttgccatgtcctattgatcagtgacactgccagaggcccataccggcaagaggaagaggacgtcattttgtaaagtttaacttcttagcgaactgatgtgccacccagtcacagagtggagttgtgaattcatgtagaggtggcaaacctctaccttgtgttgatgagagaataatcttgggcagtctgggaaaataaggaaggcatctccttcttactcatggagattcaactatagagagttgaaacctaaacccgccttccttttatagaagctggactagagacggactgaccatcagctctgaactgtggctttttttgttcacctatgatgccatgtaccaaattcagaagctatcgttaataatttgttttataattgagtagtacaagcgaggaaaaaatacggaggataaccactatttttgtgcaaataatatgaaagtgaagtaaaagcaatagaagaaatttctataggatctgggtttagagtgtgtatcattaataaatatacctttgctcttttcagggaaaataacaaccacccttactgatagttgggaaaagaagattgggttattttgccatatcatttagctggaagtgacatttaaaagcaccctgcatcactagtaatagtgtattttgctattctgcccttgtaatcggtgtccctgtaaaacaatccccacagattactttcagaaatagatgtatttctctacgtaagggccaggtttattttctccttttttgagatttctagaaaaaatgctgcttgcacatgttggttcttgaaaccttagctagaagaatttcaggtcataccaacatgtggataggctatagctgttcagaggtctcctgggggagcttaaaacgggggaaacactggttttcacagatgctccacatggctgtctttaaaagactcaaaacttttttttgtcctctttgttatgcttggaagctcccccccccccaacagtgtgtcgagtctttgcaaagaaacctttagatgtggttcatagatatatgaatacgtatctgtgtaaaacagtgagtgtgcagtgtgtaaatactttaaattattatgctagaaaaataaagttacataccttgctgtggaa

SEQ ID NO: 17696 - DNA, 300 bp, Homo sapiens
  source 1..300: mol_type = unassigned DNA
attctggagtcggagaactgggagagcggcccccgaggcggagcctccctcccgccccgagtcgcgctgccccccacctgggggagaggggcgggcgccgcgctgccttccctccgcgcctcggccgcgtggcttgcggcttattttcccagctggcaagcgtcgcgctgcagacaagggaatgcctgtggtcctgcgtgttccgaagttcaggggccccctgatcccgctgagccccctccaggagcgaaagggttaagaatgatgaagggaaatgtcaaactagaacacctgagcctc

SEQ ID NO: 17697 - DNA, 2052 bp, Homo sapiens
  source 1..2052: mol_type = unassigned DNA
gagattgatcgaccgcgggggctgccgcgcagagatatccgggccgccggtgggtggtcgctagggctgggccagcctcttggaggtccacgcccgccgagcccacgctggctggggccggggtgccggcgcgctcgggactcgtctcagcagtcgctcacggtctttgtgtcttctcttccgcccctttccctgcctgccgcctccggccgccacgatgcccctgcgccccgctgctgccgccgcggactggctgcgccggctgcgcgctgcttgctgcggcggtggtggcgccccatctgctacacgggcctgaagaaggaagaagaggaagcgaagcgcgccccccggcccatgccgcagccacgggcccagacccgccacggcgcccgcgccgccgccctcgccggagcccacgagacctgcatggacgggcatgggcttgagagcagcaccttccagcgccgccgctgccgccgccgaggttgagcagcgccgcagccccgggctctgccccccgccgctggagctgctgctgctgctgctgttcagcctcgggctgctccacgcaggtgactgccaacagccagcccaatgtcgaatccagaaatgcaccacggacttcgtgtccctgacttctcacctgaactctgccgttgacggctttgactctgagttttgcaaggccttgcgtgcctatgctggctgcacccagcgaacttcaaaagcctgccgtggcaacctggtataccattctgccgtgttgggtatcagtgacctcatgagccagaggaattgttccaaggatggacccacatcctctaccaaccccgaagtgacccatgatccttgcaactatcacagccacgctggagccagggaacacaggagaggggaccagaaccctcccagttaccttttttgtggcttgtttggagatcctcacctcagaactttcaaggataacttccaaacatgcaaagtagaaggggcctggccactcatagataataattatctttcagttcaagtgacaaacgtacctgtggtccctggatccagtgctactgctacaaataagatcactattatcttcaaagcccaccatgagtgtacagatcagaaagtctaccaagctgtgacagatgacctgccggccgcctttgtggatggcaccaccagtggtggggacagcgatgccaagagcctgcgtatcgtggaaagggagagtggccactatgtggagatgcacgcccgctatatagggaccacagtgtttgtgcggcaggtgggtcgctacctgacccttgccatccgtatgcctgaagacctggccatgtcctacgaggagagccaggacctgcagctgtgcgtgaacggctgccccctgagtgaacgcatcgatgacgggcagggccaggtgtctgccatcctgggacacagcctgcctcgcacctccttggtgcaggcctggcctggctacacactggagactgccaacactcaatgccatgagaagatgccagtgaaggacatctatttccagtcctgtgtcttcgacctgctcaccactggtgatgccaactttactgccgcagcccacagtgccttggaggatgtggaggccctgcacccaaggaaggaacgctggcacattttccccagcagtggcaatgggactccccgtggaggcagtgatttgtctgtcagtctaggactcacctgcttgatccttatcgtgtttttgtaggggttgtcttttgttttggttttttattttttgtctataacaaaattttaaaatatatattgtcataatatattgagtaaaagagtatatatgtatataccatgtatatgacaggatgtttgtcctgggacacccaccagattgtacatactgtgtttggctgttttcacatatgttggatgtagtgttctttgattgtatcaattttgttttgcagttctgtgaaatgttttataatgtccctgcccagggacctgttagaaagcactttattttttatatattaaatatttatgtgtgtg

SEQ ID NO: 17698 - DNA, 427 bp, Homo sapiens
  source 1..427: mol_type = unassigned DNA
gacccatgatccttgcaactatcacagccacgctggagccagggaacacaggagaggggaccagaaccctcccagttaccttttttgtggcttgtttggagatcctcacctcagaactttcaaggataacttccaaacatgcaaagtagaaggggcctggccactcatagataataattatctttcagttcaagtgacaaacgtacctgtggtccctggatccagtgctactgctacaaataaggttatgtcatggctccctgacggtgaaatatgtgtgaaatccaaccaacacccagcaggatacactaacaaacattctacaaagccagaatggatgccctcaccctccttggaatgatgttaaaccaattgagtaaactggtcctgccaactgcaatgtaataaagtaggcctatcaaacttc

SEQ ID NO: 17699 - DNA, 2427 bp, Homo sapiens
  source 1..2427: mol_type = unassigned DNA
gcggccgctcagtctgggcgcttgcaggctgctaaacccaaccgcagttgactagcacctgctaccgcgcctttgcttcctggcgcacgcggagcctcctggagcctgccaccatcctgcctactacgtgctgccctgcgcccgcagccatgtgccgcaccctggccgccttccccaccacctgcctggagagagccaaagagttcaagacacgtctggggatctttcttcacaaatcagagctgggctgcgatactgggagtactggcaagttcgagtggggcagtaaacacagcaaagagaatagaaacttctcagaagatgtgctggggtggagagagtcgttcgacctgctgctgagcagtaaaaatggagtggctgccttccacgctttcctgaagacagagttcagtgaggagaacctggagttctggctggcctgtgaggagttcaagaagatccgatcagctaccaagctggcctccagggcacaccagatctttgaggagttcatttgcagtgaggcccctaaagaggtcaacattgaccatgagacccacgagctgacgaggatgaacctgcagactgccacagccacatgctttgatgcggctcaggggaagacacgtaccctgatggagaaggactcctacccacgcttcctgaagtcgcctgcttaccgggacctggctgcccaagcctcagccgcctctgccactctgtccagctgcagcctggacgagccctcacacacctgagtctccacggcagtgaggaagccagccgggaagagaggttgagtcacccatccccgaggtggctgcccctgtgtgggaggcaggttctgcaaagcaagtgcaagaggacaaaaaaaaaaaaaaaaaaaaaaaaaatgcgctccagcagcctgtttgggaagcagcagtctctccttcagatactgtgggactcatgctggagaggagccgcccacttccaggacctgtgaataagggctaatgatgagggttggtggggctctctgtggggcaaaaaggtggtatgggggttagcactggctctcgttctcaccggagaaggaagtgttctagtgtggtttaggaaacatgtggataaagggaaccatgaaaatgagaggaggaaagacatccagatcagctgttttgcctgttgctcagttgactctgattgcatcctgttttcctaattcccagactgttctgggcacggaagggaccctggatgtggagtcttcccctttggccctcctcactggcctctgggctagcccagagtcccttagcttgtacctcgtaacactcctgtgtgtctgtccagccttgcagtcatgtcaaggccagcaagctgatgtgactcttgccccatgcgagatatttatacctcaaacactggcctgtgagccctttccaagtcagtggagagccctgaaaggaggctcacttgaatccagctcagtgctctgggtggccccctgcaggtggcccctgaccctgcgttgcagcagggtccacctgtgagcaggcccgccctggggcctcttcctggatgtgccctctctgagttctgtgctgtctcttggaggcagggcccaggagaacaaagtgtggaggcctcggggagtggcttttccagctctcatgccccgcagtgtggaacaaggcagaaaaggatcctaggaaataagtctcttggcggtccctgagagtcctgctgaaatccagccagtgttttttgtggtatgagaacaggcaaaaagagatgccccgagatagaaggggagccttgtgtttctttcctgcagacgtgagatgaacactggagtgggcagaggtggcccaggaccatggcacccttagagtgcagaagctggggggagaggctgcttcgaagggcaggactggggataatcagaacctgcctgtcacctcagggcatcactgaacaaacatttcctgatggcaactcctgcggcagagcccaggctggggaagtgaactacccagggcagcccctttgtggcccaggataatcaacactgttctctctgtaccatgagctcctccaggagattatttaagtgtattgtatcattggttttctgtgattgtcataacattgtttttgttattgttggtgctgttgttatttattattgtaatttcagtttgcctctactggagaatctcagcaggggtttcagcctgactgtctccctttctctaccagactctacctctgaatgtgctgggaacctcttggagcctgtcaggaactcctcactgtttaaatatttatttattgtgacaaatggagctggtttcctagatatgaatgatgtttgcaatccccattttcctgtttcagcatgttatattcttataaaataaaagcaaaagtcaaatatga

SEQ ID NO: 17700 - DNA, 877 bp, Homo sapiens
  source 1..877: mol_type = unassigned DNA
gcaaacagccggggctccagcgggagaacgataatgcaaagtgctatgttcttggctgttcaacacgactgcagacccatggacaagagcgcaggcagtggccacaagagcgaggagaagcgagaaaagatgaaacggacccttttaaaagattggaagacccgtttgagctacttcttacaaaattcctctactcctgggaagcccaaaaccggcaaaaaaagcaaacagcaagctttcatcaagtaagttgagaatcctgtgcttgcaaatatcaatagttagctgctgaactgaaaaggggaactctgatgtgcgtaagctaacatacagaacctctcttgcaggccttctcctgaggaagcacagctgtggtcagaagcatttgacgagctgctagccagcaaatgtaagttaactcttgagcttgagccattgctaacatcgcaaaagcctggaaaggctgcgtccacctaacaaaagagcagcttgcctgagggggattagactgcagtcactataggataaagcctgtttttctttcctttatttcccagggtttaacaaataaatgcatatattctctccaggtggggaagaaaatcagcctaaacaaattaaagtggcagttgcttatagttaaggttgagtcagtttttccattgcatacaatgttttcaagaggcttagttcccagagaatttatggctcccctataaatatttactttgcattgacagcaaagtacttatatttttgcagcagagtgccaacataagccttttgcctactggtatcttagtctttaaaaagctaaattttgagaattacaggtttgagcgaaatctagaaaattcatttagaaataattaaaatg

SEQ ID NO: 17701 - DNA, 1354 bp, Homo sapiens
  source 1..1354: mol_type = unassigned DNA
aaacagccggggctccagcgggagaacgataatgcaaagtgctatgttcttggctgttcaacacgactgcagacccatggacaagagcgcaggcagtggccacaagagcgaggagaagcgagaaaagatgaaacggacccttttaaaagattggaagacccgtttgagctacttcttacaaaattcctctactcctgggaagcccaaaaccggcaaaaaaagcaaacagcaagctttcatcaagccttctcctgaggaagcacagctgtggtcagaagcatttgacgagctgctagccagcaaatatggtcttgctgcattcagggcttttttaaagtcggaattctgtgaagaaaatattgaattctggctggcctgtgaagacttcaaaaaaaccaaatcaccccaaaagctgtcctcaaaagcaaggaaaatatatactgacttcatagaaaaggaagctccaaaagagataaacatagattttcaaaccaaaactctgattgcccagaatatacaagaagctacaagtggctgctttacaactgcccagaaaagggtatacagcttgatggagaacaactcttatcctcgtttcttggagtcagaattctaccaggacttgtgtaaaaagccacaaatcaccacagagcctcatgctacatgaaatgtaaaagggagcccagaaatggaggacatttcattctttttcctgaggggaaggactgtgacctgccataaagactgaccttgaattcagcctgggtgttcaggaaacatcactcagaactattgattcaaagttgggtagtgaatcaggaagccagtaactgactaggagaagctggtatcagaacagcttccctcactgtgtacagaacgcaagaagggaataggtggtctgaacgtggtgtctcactctgaaaagcaggaatgtaagatgatgaaagagacaatgtaatactgttggtccaaaagcatttaaaatcaatagatctgggattatgtggccttaggtagctggttgtacatctttccctaaatcgatccatgttaccacatagtagttttagtttaggattcagtaacagtgaagtgtttactatgtgcaacggtattgaagttcttatgaccacagatcatcagtactgttgtctcatgtaatgctaaaactgaaatggtccgtgtttgcattgttaaaaatgatgtgtgaaatagaatgagtgctatggtgttgaaaactgcagtgtccgttatgagtgccaaaaatctgtcttgaaggcagctacactttgaagtggtctttgaatacttttaataaatttattttgataaataatattgaacacttgga

SEQ ID NO: 17702 - DNA, 665 bp, Homo sapiens
  source 1..665: mol_type = unassigned DNA
aacagccggggctccagcgggagaacgataatgcaaagtgctatgttcttggctgttcaacacgactgcagacccatggacaagagcgcaggcagtggccacaagagcgaggagaagcgagaaaagatgaaacggacccttttaaaagattggaagacccgtttgagctacttcttacaaaattcctctactcctgggaagcccaaaaccggcaaaaaaagcaaacagcaagctttcatcaagtaagttgagaatcctgtgcttgcaaatatcaatagttagctgctgaactgaaaaggggaactctgatgtgcgtaagctaacatacagaacctctcttgcaggccttctcctgaggaagcacagctgtggtcagaagcatttgacgagctgctagccagcaaatatggtcttgctgcattcagggcttttttaaagtcggaattctgtgaagaaaatattgaattctggctggcctgtgaagacttcaaaaaaaccaaatcaccccaaaagctgtcctcaaaagcaaggaaaatatatactgacttcatagaaaaggaagctccaaaagaggtaaggaaacaagttcctaatttcagcacaatctggacatctttagcacaaaagtgaaacaaagtaatcaaggacaaagcgggctaggaggg

SEQ ID NO: 17703 - DNA, 333 bp, Homo sapiens
  source 1..333: mol_type = unassigned DNA
caagagcgaggagaagcgagaaaagatgaaacggaccctaatcctgcggctgaagcgcgtccccagcattcatacgttgcatgatgagttctcatcagcttacacagctactggaagtttaaaagattggaagacccgtttgagctacttcttacaaaattcctctactcctgggaagcccaaaaccggcaaaaaaagcaaacagcaagctttcatcaagccttctcctgaggaagcacagctgtggtcagaagcatttgacgagctgctagccagcaaatatggtcttgctgcattcagggcttttttaaagtcggaattctgtgaagaaaa

SEQ ID NO: 17704 - DNA, 2104 bp, Homo sapiens
  source 1..2104: mol_type = unassigned DNA
cattaaccaaacaaagagaagcagagtggatcctgtgctaatattgggaaaaccaggcaacaggactcatttggggcctttattgtgaaaacatgccccagctttcccaagataaccaagagtgcctccagaaacatttctccaggccgtctatatggacacagtttctgcccctgttcagggctcagagatataatacagacattcaccaaatcacagaaaatgaaggagacctcagggctgttcctgatatcaagtccttcccgcctgcacagctcccagactcgcccgccgccccgaagctgttcggcctcctttctagcccgctttccagcctcgcaaggttcttctctcaccttctccggcgaccccctcccgaggctccccggaggcgcctggacttctcccccctgcttcccgccctgccggccgcccggctctcgagggggcacgaggagctgccgggccgcctctcgctcctgctcggggcggcgctggcactgcccggccgaccctcggggggtcgtccgctgaggcccccccatccggtagccaagcccagggaagaagacgccaccgctgggcagagctcgcctatgccgcagatgggatcagagcggatggagatgcggaagcggcagatgcccgccgcccaggacacaccaggcgccgccccaggccagcccggagcggggagtcgcgggtccaacgcatgctgcttctgctggtgctgctgttgtagctgctcgtgtctcactgttagaaaccaggaagatcagaggcccacaatagcttcccacgaactcagagcagatcttccaacctgggaagaaagccctgctcctactctggaagaagtcaacgcctgggctcagtcatttgacaaattaatggtcactccagcaggaaggaatgcattccgtgaattcctccgaacagaattcagtgaggaaaatatgctcttctggatggcctgtgaggaactgaaaaaggaagctaataaaaacattattgaagagaaagcaaggataatctatgaagactacatttctatactttctcctaaggaggtgagcttagactcccgggtgagagaagtgatcaacagaaacatggtggagccatcccaacacatattcgatgatgctcaacttcagatttacaccctgatgcacagagactcatatcctcgattcatgaactctgctgtctataaggacttgcttcagtccttatcggagaaatctattgaagcataggatttttcaaatatatttattattaataaaataataaaagaattcatgggctacaactagcacagggaatttagaggttgtagcatcttctgctggagtaatactcaggctattctaataacagatgattccttcaacagactgctatatattcaccatgtaaactgcagccacctttagtgatacttttgaaaaaaaaaaataaagggatatggctgttgtagaaagatagcgtatttgcatttacaataacagtagcatgttgtcagtggccaaggctacacagaaggctccctgctgcccggagcaggtacatccaccagagcaaagggaaccacttttattttgcatgagtttggtaactgattactctcccctcaaagaaaagacattcaggtgtttctcaacgacatcttctgtccagcaagctcggtttgaatacgtcacttaccagtgccattgcaggacccaaattcacagttcataaaagatgtgaccactacatgtaaaaatagcattctacttgatcttacagtatgtatgtatgtatgtatggagacatatgtgtgcgtgtggatgtctacatggttaatggaaagcactgtgctctgaagtggatcagtctcaagtgtctggtaacagcagcagtgcttagaaaattcttttgttgaaaagagttactgttattatcagaatttgccaacctaaagaatgaatttttaaattcataacttggtcatgttcacaacaaaactgtcaaataagcatatttccatttttattactgaaagaaatatgggcattttcattctttaaagaaataaagcacaagaattttatctcaa

SEQ ID NO: 17705 - DNA, 1518 bp, Homo sapiens
  source 1..1518: mol_type = unassigned DNA
atgccccagctttcccaagataaccaagagtgcctccagaaacatttctccaggccgtctatatggacacagtttctgcccctgttcagggctcagagatataatacagacattcaccaaatcacagaaaatgaaggagacctcagggctgttcctgatatcaagtctcactgttagaaaccaggaagatcagaggcccacaatagcttcccacgaactcagagcagatcttccaacctgggaagaaagccctgctcctactctggaagaagtcaacgcctgggctcagtcatttgacaaattaatggtcactccagcaggaaggaatgcattccgtgaattcctccgaacagaattcagtgaggaaaatatgctcttctggatggcctgtgaggaactgaaaaaggaagctaataaaaacattattgaagagaaagcaaggataatctatgaagactacatttctatactttctcctaaggaggtgagcttagactcccgggtgagagaagtgatcaacagaaacatggtggagccatcccaacacatattcgatgatgctcaacttcagatttacaccctgatgcacagagactcatatcctcgattcatgaactctgctgtctataaggacttgcttcagtccttatcggagaaatctattgaagcataggatttttcaaatatatttattattaataaaataataaaagaattcatgggctacaactagcacagggaatttagaggttgtagcatcttctgctggagtaatactcaggctattctaataacagatgattccttcaacagactgctatatattcaccatgtaaactgcagccacctttagtgatacttttgaaaaaaaaaaataaagggatatggctgttgtagaaagatagcgtatttgcatttacaataacagtagcatgttgtcagtggccaaggctacacagaaggctccctgctgcccggagcaggtacatccaccagagcaaagggaaccacttttattttgcatgagtttggtaactgattactctcccctcaaagaaaagacattcaggtgtttctcaacgacatcttctgtccagcaagctcggtttgaatacgtcacttaccagtgccattgcaggacccaaattcacagttcataaaagatgtgaccactacatgtaaaaatagcattctacttgatcttacagtatgtatgtatgtatgtatggagacatatgtgtgcgtgtggatgtctacatggttaatggaaagcactgtgctctgaagtggatcagtctcaagtgtctggtaacagcagcagtgcttagaaaattcttttgttgaaaagagttactgttattatcagaatttgccaacctaaagaatgaatttttaaattcataacttggtcatgttcacaacaaaactgtcaaataagcatatttccatttttattactgaaagaaatatgggcattttcattctttaaagaaataaagcacaagaattttatctcaa

SEQ ID NO: 17706 - DNA, 1667 bp, Homo sapiens
  source 1..1667: mol_type = unassigned DNA
atgccccagctttcccaagataaccaagagtgcctccagaaacatttctccaggccgtctatatggacacagtttctgcccctgttcagggctcagagatataatacagacattcaccaaatcacagaaaatgaaggagacctcagggctgttcctgatatcaagcagatgggatcagagcggatggagatgcggaagcggcagatgcccgccgcccaggacacaccaggcgccgccccaggccagcccggagcggggagtcgcgggtccaacgcatgctgcttctgctggtgctgctgttgtagctgctcgtgtctcactgttagaaaccaggaagatcagaggcccacaatagcttcccacgaactcagagcagatcttccaacctgggaagaaagccctgctcctactctggaagaagtcaacgcctgggctcagtcatttgacaaattaatggtcactccagcaggaaggaatgcattccgtgaattcctccgaacagaattcagtgaggaaaatatgctcttctggatggcctgtgaggaactgaaaaaggaagctaataaaaacattattgaagagaaagcaaggataatctatgaagactacatttctatactttctcctaaggaggtgagcttagactcccgggtgagagaagtgatcaacagaaacatggtggagccatcccaacacatattcgatgatgctcaacttcagatttacaccctgatgcacagagactcatatcctcgattcatgaactctgctgtctataaggacttgcttcagtccttatcggagaaatctattgaagcataggatttttcaaatatatttattattaataaaataataaaagaattcatgggctacaactagcacagggaatttagaggttgtagcatcttctgctggagtaatactcaggctattctaataacagatgattccttcaacagactgctatatattcaccatgtaaactgcagccacctttagtgatacttttgaaaaaaaaaaataaagggatatggctgttgtagaaagatagcgtatttgcatttacaataacagtagcatgttgtcagtggccaaggctacacagaaggctccctgctgcccggagcaggtacatccaccagagcaaagggaaccacttttattttgcatgagtttggtaactgattactctcccctcaaagaaaagacattcaggtgtttctcaacgacatcttctgtccagcaagctcggtttgaatacgtcacttaccagtgccattgcaggacccaaattcacagttcataaaagatgtgaccactacatgtaaaaatagcattctacttgatcttacagtatgtatgtatgtatgtatggagacatatgtgtgcgtgtggatgtctacatggttaatggaaagcactgtgctctgaagtggatcagtctcaagtgtctggtaacagcagcagtgcttagaaaattcttttgttgaaaagagttactgttattatcagaatttgccaacctaaagaatgaatttttaaattcataacttggtcatgttcacaacaaaactgtcaaataagcatatttccatttttattactgaaagaaatatgggcattttcattctttaaagaaataaagcacaagaattttatctcaa

SEQ ID NO: 17707 - DNA, 1434 bp, Homo sapiens
  source 1..1434: mol_type = unassigned DNA
atgccccagctttcccaagataaccaagagtgcctccagaaacatttctccaggccgtctatatggacacagtttctgcccctgttcagggctcagagatataatacagacattcaccaaatcacagaaaatgaaggagacctcagggctgttcctgatatcaagccctgctcctactctggaagaagtcaacgcctgggctcagtcatttgacaaattaatggtcactccagcaggaaggaatgcattccgtgaattcctccgaacagaattcagtgaggaaaatatgctcttctggatggcctgtgaggaactgaaaaaggaagctaataaaaacattattgaagagaaagcaaggataatctatgaagactacatttctatactttctcctaaggaggtgagcttagactcccgggtgagagaagtgatcaacagaaacatggtggagccatcccaacacatattcgatgatgctcaacttcagatttacaccctgatgcacagagactcatatcctcgattcatgaactctgctgtctataaggacttgcttcagtccttatcggagaaatctattgaagcataggatttttcaaatatatttattattaataaaataataaaagaattcatgggctacaactagcacagggaatttagaggttgtagcatcttctgctggagtaatactcaggctattctaataacagatgattccttcaacagactgctatatattcaccatgtaaactgcagccacctttagtgatacttttgaaaaaaaaaaataaagggatatggctgttgtagaaagatagcgtatttgcatttacaataacagtagcatgttgtcagtggccaaggctacacagaaggctccctgctgcccggagcaggtacatccaccagagcaaagggaaccacttttattttgcatgagtttggtaactgattactctcccctcaaagaaaagacattcaggtgtttctcaacgacatcttctgtccagcaagctcggtttgaatacgtcacttaccagtgccattgcaggacccaaattcacagttcataaaagatgtgaccactacatgtaaaaatagcattctacttgatcttacagtatgtatgtatgtatgtatggagacatatgtgtgcgtgtggatgtctacatggttaatggaaagcactgtgctctgaagtggatcagtctcaagtgtctggtaacagcagcagtgcttagaaaattcttttgttgaaaagagttactgttattatcagaatttgccaacctaaagaatgaatttttaaattcataacttggtcatgttcacaacaaaactgtcaaataagcatatttccatttttattactgaaagaaatatgggcattttcattctttaaagaaataaagcacaagaattttatctcaa

SEQ ID NO: 17708 - DNA, 455 bp, Homo sapiens
  source 1..455: mol_type = unassigned DNA
gaggctgcctttcaaactctcagcgtgtcgctctcctccgcctactccgagcctcccccaaacgcgcctccgcctgctcccagcgctcgctctcccactcccctgccctctcggcaggcaagggaggaaatgacgtgatgttatttttgtgtcagcagatgggatcagagcggatggagatgcggaagcggcagatgcccgccgcccaggacacaccaggcgccgccccaggccagcccggagcggggagtcgcgggtccaacgcatgctgcttctgctggtgctgctgttgtagctgctcgtgtctcactgttagaaaccaggaagatcagaggcccacaatagcttcccacgaactcagagcagatcttccaacctgggaagaaagccctgctcctactctggaagaagtcaacgcctgggctcagtcatttgacaaattaatggtcactcca

SEQ ID NO: 17709 - DNA, 668 bp, Homo sapiens
  source 1..668: mol_type = unassigned DNA
ggcaagggaggaaatgacgtgatgttatttttgtgtcaggtcagtttccagcttcagcttagccctccgggctccagggaactaaccccgcggccccaccgggtcccactcccgaagggacgctgcgggctacggggacacgcggtgctgcgagtccggagagctgggcggctgggttccccctcccgctgccccctggtctactcctttccccggactccggagtccctggagaaggggacgcggagggcgactgccgagggtctcagcgggatctggagtcagggcagatgggatcagagcggatggagatgcggaagcggcagatgcccgccgcccaggacacaccaggcgccgccccaggccagcccggagcggggagtcgcgggtccaacgcatgctgcttctgctggtgctgctgttgtagctgctcgtgtctcactgttagaaaccaggaagatcagaggcccacaatagcttcccacgaactcagagcagatcttccaacctgggaagaaagccctgctcctactctggaagaagtcaacgcctgggctcagtcatttgacaaattaatggtcactccagcaggaaggaatgcattccgtgaattcctccgaacagaattcagtgaggaaaatatgctcttctggatggcctgtgaggaa

SEQ ID NO: 17710 - DNA, 1559 bp, Homo sapiens
  source 1..1559: mol_type = unassigned DNA
agagcaaggggaggaagaggccgggagaagagggctagagcaaagaccgagagccggagaaaggcgaaaggcgcggtgagcaatcgccgacgtagagagggcagccctccgcgctgcaatattgagaaggcacccgcgggacgcatgcgcacggcggacggaggcgagccggccggggcttcctccccggccggcagggtggacggtgggctctctcactgttagaaaccaggaagatcagaggcccacaatagcttcccacgaactcagagcagatcttccaacctgggaagaaagccctgctcctactctggaagaagtcaacgcctgggctcagtcatttgacaaattaatggtcactccagcaggaaggaatgcattccgtgaattcctccgaacagaattcagtgaggaaaatatgctcttctggatggcctgtgaggaactgaaaaaggaagctaataaaaacattattgaagagaaagcaaggataatctatgaagactacatttctatactttctcctaaggaggtgagcttagactcccgggtgagagaagtgatcaacagaaacatggtggagccatcccaacacatattcgatgatgctcaacttcagatttacaccctgatgcacagagactcatatcctcgattcatgaactctgctgtctataaggacttgcttcagtccttatcggagaaatctattgaagcataggatttttcaaatatatttattattaataaaataataaaagaattcatgggctacaactagcacagggaatttagaggttgtagcatcttctgctggagtaatactcaggctattctaataacagatgattccttcaacagactgctatatattcaccatgtaaactgcagccacctttagtgatacttttgaaaaaaaaaaataaagggatatggctgttgtagaaagatagcgtatttgcatttacaataacagtagcatgttgtcagtggccaaggctacacagaaggctccctgctgcccggagcaggtacatccaccagagcaaagggaaccacttttattttgcatgagtttggtaactgattactctcccctcaaagaaaagacattcaggtgtttctcaacgacatcttctgtccagcaagctcggtttgaatacgtcacttaccagtgccattgcaggacccaaattcacagttcataaaagatgtgaccactacatgtaaaaatagcattctacttgatcttacagtatgtatgtatgtatgtatggagacatatgtgtgcgtgtggatgtctacatggttaatggaaagcactgtgctctgaagtggatcagtctcaagtgtctggtaacagcagcagtgcttagaaaattcttttgttgaaaagagttactgttattatcagaatttgccaacctaaagaatgaatttttaaattcataacttggtcatgttcacaacaaaactgtcaaataagcatatttccatttttattactgaaagaaatatgggcattttcattctttaaagaaataaagcacaagaatttt

SEQ ID NO: 17711 - DNA, 1664 bp, Homo sapiens
  source 1..1664: mol_type = unassigned DNA
gggagaagagggctagagcaaagaccgagagccggagaaaggcgaaaggcgcggtgagcaatcgccgacgtagagagggcagccctccgcgctgcaatattgagaaggcacccgcgggacgcatgcgcacggcggacggaggcgagccggccggggcttcctccccggccggcagggtggacggtgggctccagatgggatcagagcggatggagatgcggaagcggcagatgcccgccgcccaggacacaccaggcgccgccccaggccagcccggagcggggagtcgcgggtccaacgcatgctgcttctgctggtgctgctgttgtagctgctcgtgtctcactgttagaaaccaggaagatcagaggcccacaatagcttcccacgaactcagagcagatcttccaacctgggaagaaagccctgctcctactctggaagaagtcaacgcctgggctcagtcatttgacaaattaatggtcactccagcaggaaggaatgcattccgtgaattcctccgaacagaattcagtgaggaaaatatgctcttctggatggcctgtgaggaactgaaaaaggaagctaataaaaacattattgaagagaaagcaaggataatctatgaagactacatttctatactttctcctaaggaggtgagcttagactcccgggtgagagaagtgatcaacagaaacatggtggagccatcccaacacatattcgatgatgctcaacttcagatttacaccctgatgcacagagactcatatcctcgattcatgaactctgctgtctataaggacttgcttcagtccttatcggagaaatctattgaagcataggatttttcaaatatatttattattaataaaataataaaagaattcatgggctacaactagcacagggaatttagaggttgtagcatcttctgctggagtaatactcaggctattctaataacagatgattccttcaacagactgctatatattcaccatgtaaactgcagccacctttagtgatacttttgaaaaaaaaaaataaagggatatggctgttgtagaaagatagcgtatttgcatttacaataacagtagcatgttgtcagtggccaaggctacacagaaggctccctgctgcccggagcaggtacatccaccagagcaaagggaaccacttttattttgcatgagtttggtaactgattactctcccctcaaagaaaagacattcaggtgtttctcaacgacatcttctgtccagcaagctcggtttgaatacgtcacttaccagtgccattgcaggacccaaattcacagttcataaaagatgtgaccactacatgtaaaaatagcattctacttgatcttacagtatgtatgtatgtatgtatggagacatatgtgtgcgtgtggatgtctacatggttaatggaaagcactgtgctctgaagtggatcagtctcaagtgtctggtaacagcagcagtgcttagaaaattcttttgttgaaaagagttactgttattatcagaatttgccaacctaaagaatgaatttttaaattcataacttggtcatgttcacaacaaaactgtcaaataagcatatttccatttttattactgaaagaaatatgggcattttcattctttaa

SEQ ID NO: 17712 - DNA, 610 bp, Homo sapiens
  source 1..610: mol_type = unassigned DNA
gagggctagagcaaagaccgagagccggagaaaggcgaaaggcgcggtgagcaatcgccgacgtagagagggcagccctccgcgctgcaatattgagaaggcacccgcgggacgcatgcgcacggcggacggaggcgagccggccggggcttcctccccggccggcagggtggacggtgggctcggtctttgcatgcaccaccacatctggctaatcaagtgaagatgaggccaaactggatgaaggcgggcctgaaatccaacgactggtgaccttataaggagggagagcttcaaagacccaggcagtcatagagggaagaagggcaagtggcaaagaagacagagattgggtttctgttgccaccgaggctgccagaagaggcaaggaagaatcctcccctagagccttcagaggcagatgcctggccctgctgacggtttggttttgaacttttagcctccagaactgtgcaagaataaatttctgttgttttaagccatcgggtttgtggtaatttgttatggcagctctaggaaactaatccagatgttaaagtttattcttacatagaaattgaggtttctaataaaaggtgtgtggacgtgg

SEQ ID NO: 17713 - DNA, 793 bp, Homo sapiens
  source 1..793: mol_type = unassigned DNA
aacattacgccaagtgaaaggagacagccagcaaagatcacatacgtctcactgttagaaaccaggaagatcagaggcccacaatagcttcccacgaactcagagcagatcttccaacctgggaagaaagccctgctcctactctggaagaagtcaacgcctgggctcagtcatttgacaaattaatggtcactccagcaggaaggaatgcattccgtgaattcctccgaacagaattcagtgaggaaaatatgctcttctggatggcctgtgaggaactgaaaaaggaagctaataaaaacattattgaagagaaagcaaggataatctatgaagactacatttctatactttctcctaaggaggtgagcttagactcccgggtgagagaagtgatcaacagaaacatggtggagccatcccaacacatattcgatgatgctcaacttcagatttacaccctgatgcacagagactcatatcctcgattcatgaactctgctgtctataaggacttgcttcagtccttatcggagaaatctattgaagcataggatttttcaaatatatttattattaataaaataataaaagaattcatgggctacaactagcacagggaatttagaggttgtagcatcttctgctggagtaatactcaggctattctaataacagatgattccttcaacagactgctatatattcaccatgtaaactgcagccacctttagtgatacttttgaaaaaaaaaaataaagggatatggctgttgtagaaagatagcgtattt

SEQ ID NO: 17714 - DNA, 3311 bp, Homo sapiens
  source 1..3311: mol_type = unassigned DNA
agtttctgtatgctgccgggcttataactgtctgtcatccagctatttctctccaccttcttgtttgcataacaaccaaggcaacttccgcaaatcactgcgtggagacgatgatcctgccagctcccttttggaaatcgtgaggatcagatcttggaccatgtataatatgatgcttctaatccaaaagaggaaaggcattgggagtcagctcctaagggctggagaggcagagggagacagaggagctggtactgcagagcggtcgtctgattggctggacggtcgtagctgggctataaaagagacccctacaggcttagcaggaagacgctcagaggattctgacaatatctttaccggagaagaggcaaagtacgctcaaagccgaagccacagctcctcctgccgcatttctttcctgcttgcgaattccaagctgttaaataagatgtgcaaagggcttgcaggtctgccggcttcttgcttgaggagtgcaaaagatatgaaacatcggctaggtttcctgctgcaaaaatctgattcctgtgaacacaattcttcccacaacaagaaggacaaagtggttatttgccagagagtgagccaagaggaagtcaagaaatgggctgaatcactggaaaacctgattagtcatgaatgtgggctggcagctttcaaagctttcttgaagtctgaatatagtgaggagaatattgacttctggatcagctgtgaagagtacaagaaaatcaaatcaccatctaaactaagtcccaaggccaaaaagatctataatgaattcatctcagtccaggcaaccaaagaggtgaacctggattcttgcaccagggaagagacaagccggaacatgctagagcctacaataacctgctttgatgaggcccagaagaagattttcaacctgatggagaaggattcctaccgccgcttcctcaagtctcgattctatcttgatttggtcaacccgtccagctgtggggcagaaaagcagaaaggagccaagagttcagcagactgtgcttccctggtccctcagtgtgcctaattctcacctgaaggcagagggatgaaatgccaagactctatgctctggaaaacctgaggccaaatattgatctgtattaagctccagtgctttatccacattgtagcctaatattcatgctgcctgccatgtgtgagtcacttctacgcataaactagatatagcttttggtgtttgagtgttcatcagggtgggaccccattccagtccaattttcctaagtttctttgagggttccatgggagcaaatatctaaataatggcctggtaggtctggattttcaaagattgttggcagtttcctcctcccaacagttttacctcgggatggttggttagtgcatgtcacatgacatccacatgcacatgtattctgttggccagcacgttctccagactctagatgtttagatgaggttgagctatgatatgtgcttgtgtgtatgtctatgtgtatatattatatatacattagacacacatatacattatttctgtatatagatgtctgtgtatacatatgtatgtgtgagtgtatgtatacacacacacacacacacacacacacacttttgcaagagtgatgggaaagaccctaggtgctcataactagagtatgtgtatgtacttacatgggtgttttgatctctgttctttcatactacatttgaacagggcaaaatgaactaactgccatgtaggctaagaaagaaatgctaacctgtggaaagttggttttgtaaaattccatggatcttgctggagaagcatccaaggaacttcatgcttgatttgaccactgacagcctccaccttgagcactattctaaggagcaaataccttagctcccttgagctggttttctctgatggcacttttgagctcctaagctgccagccttcccttcttttcctgggtgctcagggcatgcttattagcagctgggttggtatggagttggcagacaggatgttcaacttaatgaagaaatacagctaaggccttgccagcaacacctgccgtaagttactggctgagtgagggcatagaagttaaaggttactgtttttatcctctatccttttttcctttcctgatcaaggtgctcttctcattttttcctgagaaccttagccatcagatgaggctccttagtttattgtggttggttgttttttctttataatggctctgggctatatgcctatatttataaaccagcagcaggggaaagattatattttataagagggaacaaattttcacaatttgaaaagcccacataagttttctcttttaaggtagaatcttgttaatttcattccaaacatcggggctaacagagactggaggcatttctttttaggctctgagactaaatgagaggaaaagaaaagaaaaaaaaaatgattgtctaaccaattgtgagaattactgtttgaaacttttcaaggcacattgaaatacttgaaaacttctcatttatgttatttatgatgttattttgtacgtgttattattattatattgttttataaatggaggtacaggatatcacctgaattattaatgaatgcccaggaagtaattttcttctcattcttctaaaactactgcctttcaaagtgcacacacacgcgtccacatacactgcattcgttgctccagtataaattacatgcatgagcacctttctggcttttaagccaatataatgggctgcaaaatgaagacaccagagtgtatgcatacaaatctcactgtattaaagatgcaggttttctaattgtacccttcttgtctctctggcaatcttgcccttaatatccctggagttcctcatcagtgtcattttctgttatacacagttccacaattttgtctctagttgacttcaaatgtgtaactttattggtcttgccctattataattgtcatgactttcagattgtatctgaactcacagactgctgtcttactaataggtctggaaggtcacgctgaatgagaagtaaattattttatgtaatacatttttgagtgtgtttttcagttgtatttccctgttatttcatcactatttccaatggtgagcttgcctgctcatgctccctggacagaatactccttccttttgcatgcctgtttctatcatgtgcttgataggcctcaaagctaatgcttccagtgaaacacacgcatcttaataataagggtaaataaacgctccatatgaaacta

SEQ ID NO: 17715 - DNA, 563 bp, Homo sapiens
  source 1..563: mol_type = unassigned DNA
atgtataatatgatgcttctaatccaaaagaggaaaggcattgggagtcagctcctaagtaagctccagaattcctgctggggctggagaggcagagggagacagaggagctggtactgcagagcggtcgtctgattggctggacggtcgtagctgggctataaaagagacccctacaggcttagcaggaagacgctcagaggattctgacaatatctttaccggagaagaggcaaagtacgctcaaagccgaagccacagctcctcctgccgcatttctttcctgcttgcgaattccaagctgttaaataagatgtgcaaagggcttgcaggtctgccggcttcttgcttgaggagtgcaaaagatatgaaacatcggctaggtttcctgctgcaaaaatctgattcctgtgaacacaattcttcccacaacaagaaggacaaagtggttatttgccagagagtgagccaagaggaagtcaagaaatgggctgaatcactggaaaacctgattagtcatgaatgtgggctggcagctttcaaagctttcttgaagtctgaat

SEQ ID NO: 17716 - DNA, 3200 bp, Homo sapiens
  source 1..3200: mol_type = unassigned DNA
gacattgagtacattttttcccatatccctacttttcagaaggattttctctgctcgttcacttaacattgctgatgcgtcagtcttttcttcctcatctctttcaggggctggagaggcagagggagacagaggagctggtactgcagagcggtcgtctgattggctggacggtcgtagctgggctataaaagagacccctacaggcttagcaggaagacgctcagaggattctgacaatatctttaccggagaagaggcaaagtacgctcaaagccgaagccacagctcctcctgccgcatttctttcctgcttgcgaattccaagctgttaaataagatgtgcaaagggcttgcaggtctgccggcttcttgcttgaggagtgcaaaagatatgaaacatcggctaggtttcctgctgcaaaaatctgattcctgtgaacacaattcttcccacaacaagaaggacaaagtggttatttgccagagagtgagccaagaggaagtcaagaaatgggctgaatcactggaaaacctgattagtcatgaatgtgggctggcagctttcaaagctttcttgaagtctgaatatagtgaggagaatattgacttctggatcagctgtgaagagtacaagaaaatcaaatcaccatctaaactaagtcccaaggccaaaaagatctataatgaattcatctcagtccaggcaaccaaagaggtgaacctggattcttgcaccagggaagagacaagccggaacatgctagagcctacaataacctgctttgatgaggcccagaagaagattttcaacctgatggagaaggattcctaccgccgcttcctcaagtctcgattctatcttgatttggtcaacccgtccagctgtggggcagaaaagcagaaaggagccaagagttcagcagactgtgcttccctggtccctcagtgtgcctaattctcacctgaaggcagagggatgaaatgccaagactctatgctctggaaaacctgaggccaaatattgatctgtattaagctccagtgctttatccacattgtagcctaatattcatgctgcctgccatgtgtgagtcacttctacgcataaactagatatagcttttggtgtttgagtgttcatcagggtgggaccccattccagtccaattttcctaagtttctttgagggttccatgggagcaaatatctaaataatggcctggtaggtctggattttcaaagattgttggcagtttcctcctcccaacagttttacctcgggatggttggttagtgcatgtcacatgacatccacatgcacatgtattctgttggccagcacgttctccagactctagatgtttagatgaggttgagctatgatatgtgcttgtgtgtatgtctatgtgtatatattatatatacattagacacacatatacattatttctgtatatagatgtctgtgtatacatatgtatgtgtgagtgtatgtatacacacacacacacacacacacacacacttttgcaagagtgatgggaaagaccctaggtgctcataactagagtatgtgtatgtacttacatgggtgttttgatctctgttctttcatactacatttgaacagggcaaaatgaactaactgccatgtaggctaagaaagaaatgctaacctgtggaaagttggttttgtaaaattccatggatcttgctggagaagcatccaaggaacttcatgcttgatttgaccactgacagcctccaccttgagcactattctaaggagcaaataccttagctcccttgagctggttttctctgatggcacttttgagctcctaagctgccagccttcccttcttttcctgggtgctcagggcatgcttattagcagctgggttggtatggagttggcagacaggatgttcaacttaatgaagaaatacagctaaggccttgccagcaacacctgccgtaagttactggctgagtgagggcatagaagttaaaggttactgtttttatcctctatccttttttcctttcctgatcaaggtgctcttctcattttttcctgagaaccttagccatcagatgaggctccttagtttattgtggttggttgttttttctttataatggctctgggctatatgcctatatttataaaccagcagcaggggaaagattatattttataagagggaacaaattttcacaatttgaaaagcccacataagttttctcttttaaggtagaatcttgttaatttcattccaaacatcggggctaacagagactggaggcatttctttttaggctctgagactaaatgagaggaaaagaaaagaaaaaaaaaatgattgtctaaccaattgtgagaattactgtttgaaacttttcaaggcacattgaaatacttgaaaacttctcatttatgttatttatgatgttattttgtacgtgttattattattatattgttttataaatggaggtacaggatatcacctgaattattaatgaatgcccaggaagtaattttcttctcattcttctaaaactactgcctttcaaagtgcacacacacgcgtccacatacactgcattcgttgctccagtataaattacatgcatgagcacctttctggcttttaagccaatataatgggctgcaaaatgaagacaccagagtgtatgcatacaaatctcactgtattaaagatgcaggttttctaattgtacccttcttgtctctctggcaatcttgcccttaatatccctggagttcctcatcagtgtcattttctgttatacacagttccacaattttgtctctagttgacttcaaatgtgtaactttattggtcttgccctattataattgtcatgactttcagattgtatctgaactcacagactgctgtcttactaataggtctggaaggtcacgctgaatgagaagtaaattattttatgtaatacatttttgagtgtgtttttcagttgtatttccctgttatttcatcactatttccaatggtgagcttgcctgctcatgctccctggacagaatactccttccttttgcatgcctgtttctatcatgtgcttgataggcctcaaagctaatgcttccagtgaaacacacgcatcttaataataagggtaaataaacgctccatatgaaacta

SEQ ID NO: 17717 - DNA, 544 bp, Homo sapiens
  source 1..544: mol_type = unassigned DNA
aagacgctcagaggattctgacaatatctttaccggagaagaggcaaagtacgctcaaagccgaagccacagctcctcctgccgcatttctttcctgcttgcgaattccaagctgttaaataagatgtgcaaagggcttgcaggtctgccggcttcttgcttgaggagtgcaaaagatatgaaacatcggctaggtttcctgctgcaaaaatctgattcctgtgaacacaattcttcccacaacaagaaggacaaagtggttatttgccagagagtgagccaagaggaagtcaagaaatgggctgaatcactggaaaacctgattagtcatgaatgtgggctggcagctttcaaagctttcttgaagtctgaatatagtgaggagaatattgacttctggatcagctgtgaagagtacaagaaaatcaaatcaccatctaaactaagtcccaaggccaaatattgatctgtattaagctccagtgctttatccacattgtagcctaatattcatgctgcctgccatgtgtgagtcacttctacg

SEQ ID NO: 17718 - DNA, 817 bp, Homo sapiens
  source 1..817: mol_type = unassigned DNA
aagacgctcagaggattctgacaatatctttaccggagaagaggcaaatgcaaaagatatgaaacatcggctaggtttcctgctgcaaaaatctgattcctgtgaacacaattcttcccacaacaagaaggacaaagtggttatttgccagagagtgagccaagaggaagtcaagaaatgggctgaatcactggaaaacctgattagtcatgaatgtgggctggcagctttcaaagctttcttgaagtctgaatatagtgaggagaatattgacttctggatcagctgtgaagagtacaagaaaatcaaatcaccatctaaactaagtcccaaggccaaaaagatctataatgaattcatctcagtccaggcaaccaaagaggtgaacctggattcttgcaccagggaagagacaagccggaacatgctagagcctacaataacctgctttgatgaggcccagaagaagattttcaacctgatggagaaggattcctaccgccgcttcctcaagtctcgattctatcttgatttggtcaacccgtccagctgtggggcagaaaagcagaaaggagccaagagttcagcagactgtgcttccctggtccctcagtgtgcctaattctcacctgaaggcagagggatgaaatgccaagactctatgctctggaaaacctgaggccaaatattgatctgtattaagctccagtgctttatccacattgtagcctaatattcatgctgcctgccatgtgtgagtcacttctacgcataaactagatatagcttttggtgtttgagtgttcatcagggtggg

SEQ ID NO: 17719 - DNA, 2606 bp, Homo sapiens
  source 1..2606: mol_type = unassigned DNA
aagacgctcagaggattctgacaatatctttaccggagaagaggcaaagtacgctcaaagccgaagccacagctcctcctgccgcatttctttcctgcttgcgaattccaagctgttaaataagatgtgcaaagggcttgcaggtctgccggcttcttgcttgaggagtgcaaaagatatgaaacatcggctaggtttcctgctgcaaaaatctgattcctgtgaacacaattcttcccacaacaagaaggacaaagtggttatttgccagagagtgagccaagaggaagtcaagaaatgggctgaatcactggaaaacctgattagtcatgaatgtgaacctggattcttgcaccagggaagagacaagccggaacatgctagagcctacaataacctgctttgatgaggcccagaagaagattttcaacctgatggagaaggattcctaccgccgcttcctcaagtctcgattctatcttgatttggtcaacccgtccagctgtggggcagaaaagcagaaaggagccaagagttcagcagactgtgcttccctggtccctcagtgtgcctaattctcacctgaaggcagagggatgaaatgccaagactctatgctctggaaaacctgaggccaaatattgatctgtattaagctccagtgctttatccacattgtagcctaatattcatgctgcctgccatgtgtgagtcacttctacgcataaactagatatagcttttggtgtttgagtgttcatcagggtgggaccccattccagtccaattttcctaagtttctttgagggttccatgggagcaaatatctaaataatggcctggtaggtctggattttcaaagattgttggcagtttcctcctcccaacagttttacctcgggatggttggttagtgcatgtcacatgacatccacatgcacatgtattctgttggccagcacgttctccagactctagatgtttagatgaggttgagctatgatatgtgcttgtgtgtatgtctatgtgtatatattatatatacattagacacacatatacattatttctgtatatagatgtctgtgtatacatatgtatgtgtgagtgtatgtatacacacacacacacacacacacacacacttttgcaagagtgatgggaaagaccctaggtgctcataactagagtatgtgtatgtacttacatgggtgttttgatctctgttctttcatactacatttgaacagggcaaaatgaactaactgccatgtaggctaagaaagaaatgctaacctgtggaaagttggttttgtaaaattccatggatcttgctggagaagcatccaaggaacttcatgcttgatttgaccactgacagcctccaccttgagcactattctaaggagcaaataccttagctcccttgagctggttttctctgatggcacttttgagctcctaagctgccagccttcccttcttttcctgggtgctcagggcatgcttattagcagctgggttggtatggagttggcagacaggatgttcaacttaatgaagaaatacagctaaggccttgccagcaacacctgccgtaagttactggctgagtgagggcatagaagttaaaggttactgtttttatcctctatccttttttcctttcctgatcaaggtgctcttctcattttttcctgagaaccttagccatcagatgaggctccttagtttattgtggttggttgttttttctttataatggctctgggctatatgcctatatttataaaccagcagcaggggaaagattatattttataagagggaacaaattttcacaatttgaaaagcccacataagttttctcttttaaggtagaatcttgttaatttcattccaaacatcggggctaacagagactggaggcatttctttttaggctctgagactaaatgagaggaaaagaaaagaaaaaaaaaatgattgtctaaccaattgtgagaattactgtttgaaacttttcaaggcacattgaaatacttgaaaacttctcatttatgttatttatgatgttattttgtacgtgttattattattatattgttttataaatggaggtacaggatatcacctgaattattaatgaatgcccaggaagtaattttcttctcattcttctaaaactactgcctttcaaagtgcacacacacgcgtccacatacactgcattcgttgctccagtataaattacatgcatgagcacctttctggcttttaagccaatataatgggctgcaaaatgaagacaccagagtgtatgcatacaaatctcactgtattaaagatgcaggttttctaattgtacccttcttgtctctctggcaatcttgcccttaatatccctggagttcctcatcagtgtcattttctgttatacacagttccacaattttgtctctagttgacttcaaatgtgtaactttattggtcttgccctattataattgtcatgactttcagattgtatctgaactcacagactgctgtcttactaataggtctggaaggtcacgctgaatgagaagtaaattattttatgtaat

SEQ ID NO: 17720 - DNA, 3774 bp, Homo sapiens
  source 1..3774: mol_type = unassigned DNA
gacgctcagaggattctgacaatatctttaccggagaagaggcaaagtacgctcaaagccgaagccacagctcctcctgccgcatttctttcctgcttgcgaattccaagctgttaaataagatgtgcaaagggcttgcaggtctgccggcttcttgcttgaggagtgcaaaagatatgaaacatcggctaggtttcctgctgcaaaaatctgattcctgtgaacacaattcttcccacaacaagaaggacaaagtggttatttgccagaggtaagagaaaaggccttggtgaagatgtacttagtattaactatctgatgatggggatgttctgtgagaaggaacttgtgctcctagttaagccagatttggatcaagatagcctccattttcatggagatcataactacatttgaaatttctatacatttagtgaaaaactgccctcatcaataacatattttgtcataacgatggaaaataaaatctttgccttcattcaggatcttagatttcttgccccaatttttttaccatggcattccaattattctgtttctctctattttttctagagtgagccaagaggaagtcaagaaatgggctgaatcactggaaaacctgattagtcatgaatgtgggctggcagctttcaaagctttcttgaagtctgaatatagtgaggagaatattgacttctggatcagctgtgaagagtacaagaaaatcaaatcaccatctaaactaagtcccaaggccaaaaagatctataatgaattcatctcagtccaggcaaccaaagaggtaggttttttatggatacataaaaattgtacgtatttatggagtatgtgtgatattttgatacatgcatacaatgtgataacaatcaaatcagggcaattgctatatacatatctcaaacatttattatttctacgtgttgagaacattccaaatctcctcttctagctatcttaaaatatacaataaactattgataactatatcaccctaatgtgctatcaaacactagaacctattccctctacccaactttctatctattccttctacccattagccaacctgaccaaaaaggtaagcttttatggcagagaactctctggatcttagtgaaggttcctagaatagtggagctgactatcataatcttgacaaccccaaataaatcagttttttaaaaaatctcttttatccatgtggcttaccataacctccctgcatgaatttttctgatgaatctccccaatttgttagacagaacagaagatcttgccctgctctctctaaagcagaaaggttcattctgaacctttcatactctctcacatgtgccaaggaggaccccaatgtcacttttgttttttgcttctgaaatacagagggtgcactgccacttacaagtcactacaaagcatacaggcttgcatcctcaacagggatataggtctaatgaagccttggcctttgcccctcaggtgaacctggattcttgcaccagggaagagacaagccggaacatgctagagcctacaataacctgctttgatgaggcccagaagaagattttcaacctgatggagaaggattcctaccgccgcttcctcaagtctcgattctatcttgatttggtcaacccgtccagctgtggggcagaaaagcagaaaggagccaagagttcagcagactgtgcttccctggtccctcagtgtgcctaattctcacctgaaggcagagggatgaaatgccaagactctatgctctggaaaacctgaggccaaatattgatctgtattaagctccagtgctttatccacattgtagcctaatattcatgctgcctgccatgtgtgagtcacttctacgcataaactagatatagcttttggtgtttgagtgttcatcagggtgggaccccattccagtccaattttcctaagtttctttgagggttccatgggagcaaatatctaaataatggcctggtaggtctggattttcaaagattgttggcagtttcctcctcccaacagttttacctcgggatggttggttagtgcatgtcacatgacatccacatgcacatgtattctgttggccagcacgttctccagactctagatgtttagatgaggttgagctatgatatgtgcttgtgtgtatgtctatgtgtatatattatatatacattagacacacatatacattatttctgtatatagatgtctgtgtatacatatgtatgtgtgagtgtatgtatacacacacacacacacacacacacacacttttgcaagagtgatgggaaagaccctaggtgctcataactagagtatgtgtatgtacttacatgggtgttttgatctctgttctttcatactacatttgaacagggcaaaatgaactaactgccatgtaggctaagaaagaaatgctaacctgtggaaagttggttttgtaaaattccatggatcttgctggagaagcatccaaggaacttcatgcttgatttgaccactgacagcctccaccttgagcactattctaaggagcaaataccttagctcccttgagctggttttctctgatggcacttttgagctcctaagctgccagccttcccttcttttcctgggtgctcagggcatgcttattagcagctgggttggtatggagttggcagacaggatgttcaacttaatgaagaaatacagctaaggccttgccagcaacacctgccgtaagttactggctgagtgagggcatagaagttaaaggttactgtttttatcctctatccttttttcctttcctgatcaaggtgctcttctcattttttcctgagaaccttagccatcagatgaggctccttagtttattgtggttggttgttttttctttataatggctctgggctatatgcctatatttataaaccagcagcaggggaaagattatattttataagagggaacaaattttcacaatttgaaaagcccacataagttttctcttttaaggtagaatcttgttaatttcattccaaacatcggggctaacagagactggaggcatttctttttaggctctgagactaaatgagaggaaaagaaaagaaaaaaaaaatgattgtctaaccaattgtgagaattactgtttgaaacttttcaaggcacattgaaatacttgaaaacttctcatttatgttatttatgatgttattttgtacgtgttattattattatattgttttataaatggaggtacaggatatcacctgaattattaatgaatgcccaggaagtaattttcttctcattcttctaaaactactgcctttcaaagtgcacacacacgcgtccacatacactgcattcgttgctccagtataaattacatgcatgagcacctttctggcttttaagccaatataatgggctgcaaaatgaagacaccagagtgtatgcatacaaatctcactgtattaaagatgcaggttttctaattgtacccttcttgtctctctggcaatcttgcccttaatatccctggagttcctcatcagtgtcattttctgttatacacagttccacaattttgtctctagttgacttcaaatgtgtaactttattggtcttgccctattataattgtcatgactttcagattgtatctgaactcacagactgctgtcttactaataggtctggaaggtcacgctgaatgagaagtaaattattttatgtaat

SEQ ID NO: 17721 - DNA, 540 bp, Homo sapiens
  source 1..540: mol_type = unassigned DNA
atcgatggcttctttaaaatgaagcaggagggtctggcagagagtatctatgaaataagttcctctgaccttcacgcttaattttctgaatggagtggagcaaattacttcaagcttcacttaacttgcatatgaaatgaaccgtacaaaaatacaagagtgtcaggagaaagttatgctctgtgcaaaagatatgaaacatcggctaggtttcctgctgcaaaaatctgattcctgtgaacacaattcttcccacaacaagaaggacaaagtggttatttgccagagagtgagccaagaggaagtcaagaaatgggctgaatcactggaaaacctgattagtcatgaatgtgggctggcagctttcaaagctttcttgaagtctgaatatagtgaggagaatattgacttctggatcagctgtgaagagtacaagaaaatcaaatcaccatctaaactaagtcccaaggccaaaaagatctataatgaattcatctcagtccaggcaaccaaagaggtgaacctggattcttgcaccag

SEQ ID NO: 17722 - DNA, 930 bp, Homo sapiens
  source 1..930: mol_type = unassigned DNA
agatcactcatgtgttcagtgattcaggttctgttgaagataccaaagatattcggttggtcaaaatgacgggcatataaaggcttctcaggtttctgagtgcaaaagatatgaaacatcggctaggtttcctgctgcaaaaatctgattcctgtgaacacaattcttcccacaacaagaaggacaaagtggttatttgccagagagtgagccaagaggaagtcaagaaatgggctgaatcactggaaaacctgattagtcatgaatgtgggctggcagctttcaaagctttcttgaagtctgaatatagtgaggagaatattgacttctggatcagctgtgaagagtacaagaaaatcaaatcaccatctaaactaagtcccaaggccaaaaagatctataatgaattcatctcagtccaggcaaccaaagaggtgaacctggattcttgcaccagggaagagacaagccggaacatgctagagcctacaataacctgctttgatgaggcccagaagaagattttcaacctgatggagaaggattcctaccgccgcttcctcaagtctcgattctatcttgatttggtcaacccgtccagctgtggggcagaaaagcagaaaggagccaagagttcagcagactgtgcttccctggtccctcagtgtgcctaattctcacctgaaggcagagggatgaaatgccaagactctatgctctggaaaacctgaggccaaatattgatctgtattaagctccagtgctttatccacattgtagcctaatattcatgctgcctgccatgtgtgagtcacttctacgcataaactagatatagcttttggtgtttgagtgttcatcagggtgggaccccattccagtccaattttcctaagtttctttgagggttccatgggagcaaatatctaa

SEQ ID NO: 17723 - DNA, 551 bp, Homo sapiens
  source 1..551: mol_type = unassigned DNA
aaactgaagggtcagaattccagttgtggatgaaggaaatggtgttatgactgcctcaaggttttgtagcaagtcatagggaaccaagaggaatcttgttttcctcagagtgcaaaagatatgaaacatcggctaggtttcctgctgcaaaaatctgattcctgtgaacacaattcttcccacaacaagaaggacaaagtggttatttgccagagagtgagccaagaggaagtcaagaaatgggctgaatcactggaaaacctgattagtcatgaatgtgggctggcagctttcaaagctttcttgaagtctgaatatagtgaggagaatattgacttctggatcagctgtgaagagtacaagaaaatcaaatcaccatctaaactaagtcccaaggccaaaaagatctataatgaattcatctcagtccaggcaaccaaagaggtgaacctggattcttgcaccagggaagagacaagccggaacatgctagagcctacaataacctgctttgatgaggcccagaagaagattttcaacctgatggagaa

SEQ ID NO: 17724 - DNA, 2005 bp, Homo sapiens
  source 1..2005: mol_type = unassigned DNA
gcgagttggggcagctcctcgcgctcggccctgctcggcggcgagagctccgcctgggcgccgcgttcctacagccgccggagccgccaggcgccgagggaacggacagacctccgcgcacccttgccgaccggggcgggcagaggcgggcaagcggcgaacgcctgggagcgcggagagccaggccagcccggagcgcgccggggacaccctgtgcgccccgagtcccggcaccatgcgacccgccgcgcgtcctcgcgggcccggggcttcgctcttcgctcgctgagcccctgcgctcgccaccacggaaactcggaaagaggaggcgaggctgtggggagcggcgcggagacggactagacttcccctccgcccccaagaggctgccggtccccggttccctgggcttctccagctttatcatgaacctggcgcaaggttggctttaggaaaaattctggagccagagggagagtcaaggcaattctttggttgctaagtgtgagtgaagacactcaggatggctcaaggatccggggatcaaagagcagtgggggttgctgacccagaggagagttctccaaacatgatcgtttactgcaaaattgaagacatcattacaaagatgcaagatgacaagacagggggtgtgcccatcagaacagtcaagagctttctctccaaaatccccagtgtcgtcacaggtactgacattgtgcagtggcttatgaagaacctttccattgaggacccagttgaagcaatacacttggggagccttatcgctgcccagggctacatctttccaatctcagaccatgttctcaccatgaaggatgatggcaccttttatcgtttccaggctccgtacttctggccttcgaactgctgggaacctgaaaacactgactatgccatctatctctgtaagaggacaatgcaaaataaagcaaggctggaactggcagattatgaagcagaaaacttagcaagactccagagggcctttgcgaggaagtgggaattcatctttatgcaagcagaagcacaagtaaagattgaccggaaaaaagacaagacagaaaggaaaattttggatagtcaagaacgagccttttgggatgtccacaggcctgtgccaggctgtgtgaacacaacagaaatggatatccgaaaatgtcgacgtttgaagaatccacaaaaggttaaaaagtccgtgtatggcgtgactgaagagtcccaggcacagagcccggtgcatgtactcagccaaccaatcaggaaaacaacaaaagaggacatccggaaacagataacatttttgaacgcacagatcgacagacattgtttgaaaatgtccaaagtggctgaaagtttaattgcctacacggaacaatatgtggaatatgaccctttgataacaccagctgagccatccaacccttggatcagcgatgacgttgctttgtgggacatagagatgagcaaagagcccagccaacagcgagtaaaaagatggggcttctctttcgatgagatattgaaggaccaggtggggcgggaccagtttctacgattcctggagtccgaattcagttcagaaaacctcaggttctggctggctgtccaagatcttaagaaacaacccctacaggatgtggccaagagggtagaagaaatctggcaagagtttctggctccaggggctccaagtgcaatcaacctggattctcacagctatgagataaccagtcaaaatgtcaaagatggagggagatatacatttgaagacgcccaggagcacatctacaagctgatgaagagtgacagctatgcccgcttcctccggtcaaatgcttaccaggatttgctgctggccaagaagaagccagaaagtgagcaaggtcgtagaacttccctagaaaagttcactcgcagtgtgggaaagtcgctggcgggcaagcgcctcacgggcctgatgcagtcctcctgaccgttccta

SEQ ID NO: 17725 - DNA, 1764 bp, Homo sapiens
  source 1..1764: mol_type = unassigned DNA
agccaggccagcccggagcgcgccggggacaccctgtgcgccccgagtcccggcaccatgcgacccgccgcgcgtcctcgcgggcccggggcttcgctcttcgctcgctgagcccctgcgctcgccaccacggaaactcggaaagaggaggcgaggctgtggggagcggcgcggagacggactagacttcccctccgcccccaagaggctgccggtccccggttccctgggcttctccagctttatcatgaacctggcgcaaggttggctttaggaaaaattctggagccagagggagagtcaaggcaattctttggttgctaagtgtgagtgaagacactcaggatggctcaaggatccggggatcaaagagcagtgggggttgctgacccagaggagagttctccaaacatgatcgtttactgcaaaattgaagacatcattacaaagatgcaagatgacaagacagggggtgtgcccatcagaacagtcaagagctttctctccaaaatccccagtgtcgtcacaggtactgacattgtgcagtggcttatgaagaacctttccattgaggacccagttgaagcaatacacttggggagccttatcgctgcccagggctacatctttccaatctcagaccatgttctcaccatgaaggatgatggcaccttttatcgtttccaggctccgtacttctggccttcgaactgctgggaacctgaaaacactgactatgccatctatctctgtaagaggacaatgcaaaataaagcaaggctggaactggcagattatgaagcagaaaacttagcaagactccagagggcctttgcgaggaagtgggaattcatctttatgcaagcagaagcacaagtaaagattgaccggaaaaaagacaagacagaaaggaaaattttggatagtcaagaacgagccttttgggatgtccacaggcctgtgccaggctgtgtgaacacaacagaaatggatatccgaaaatgtcgacgtttgaagaatccacaaaaggttaaaaagtccgtgtatggcgtgactgaagagtcccaggcacagagcccggtgcatgtactcagccaaccaatcaggaaaacaacaaaagaggacatccggaaacagataacatttttgaacgcacagatcgacagacattgtttgaaaatgtccaaagtggctgaaagtttaattgcctacacggaacaatatgtggaatatgaccctttgataacaccagctgagccatccaacccttggatcagcgatgacgttgctttgtgggacatagagatgagcaaagagcccagccaacagcgagtaaaaagatggggcttctctttcgatgagatattgaaggaccaggtggggcgggaccagtttctacgattcctggagtccgaattcagttcagaaaacctcaggttctggctggctgtccaagatcttaagaaacaacccctacaggatgtggccaagagggtagaagaaatctggcaagagtttctggctccaggggctccaagtgcaatcaacctggattctcacagctatgagataaccagtcaaaatgtcaaagatggagggagatatacatttgaagacgcccaggagcacatctacaagctgatgaagagtgacagctatgcccgcttcctccggtcaaatgcttaccaggatttgctgctggccaagaagaagggaaagtcgctggcgggcaagcgcctcacgggcctgatgcagtcctcctga

SEQ ID NO: 17726 - DNA, 5685 bp, Homo sapiens
  source 1..5685: mol_type = unassigned DNA
gactgtggaagcacgagcttacataagtggttaggcaagctggcgtgtggacttgtgtgggatgggtgcaggtctgcatataaatcatgttcctgggtttctgggtgtgaagcgcacaccgacggggacgagagcgcagaggatggcgcttttagatacttccagtcttccgatgttgtgatcgcagtgtgagtgaagacactcaggatggctcaaggatccggggatcaaagagcagtgggggttgctgacccagaggagagttctccaaacatgatcgtttactgcaaaattgaagacatcattacaaagatgcaagatgacaagacagggggtgtgcccatcagaacagtcaagagctttctctccaaaatccccagtgtcgtcacaggtactgacattgtgcagtggcttatgaagaacctttccattgaggacccagttgaagcaatacacttggggagccttatcgctgcccagggctacatctttccaatctcagaccatgttctcaccatgaaggatgatggcaccttttatcgtttccaggctccgtacttctggccttcgaactgctgggaacctgaaaacactgactatgccatctatctctgtaagaggacaatgcaaaataaagcaaggctggaactggcagattatgaagcagaaaacttagcaagactccagagggcctttgcgaggaagtgggaattcatctttatgcaagcagaagcacaagtaaagattgaccggaaaaaagacaagacagaaaggaaaattttggatagtcaagaacgagccttttgggatgtccacaggcctgtgccaggctgtgtgaacacaacagaaatggatatccgaaaatgtcgacgtttgaagaatccacaaaaggttaaaaagtccgtgtatggcgtgactgaagagtcccaggcacagagcccggtgcatgtactcagccaaccaatcaggaaaacaacaaaagaggacatccggaaacagataacatttttgaacgcacagatcgacagacattgtttgaaaatgtccaaagtggctgaaagtttaattgcctacacggaacaatatgtggaatatgaccctttgataacaccagctgagccatccaacccttggatcagcgatgacgttgctttgtgggacatagagatgagcaaagagcccagccaacagcgagtaaaaagatggggcttctctttcgatgagatattgaaggaccaggtggggcgggaccagtttctacgattcctggagtccgaattcagttcagaaaacctcaggttctggctggctgtccaagatcttaagaaacaacccctacaggatgtggccaagagggtagaagaaatctggcaagagtttctggctccaggggctccaagtgcaatcaacctggattctcacagctatgagataaccagtcaaaatgtcaaagatggagggagatatacatttgaagacgcccaggagcacatctacaagctgatgaagagtgacagctatgcccgcttcctccggtcaaatgcttaccaggatttgctgctggccaagaagaagggaaagtcgctggcgggcaagcgcctcacgggcctgatgcagtcctcctgaccgttcctaccgcaggtccagggcctgggcccgcggaccccacaggcaggcggcggcgctccacatctgcggacagagtttccttacgaggagacttggtcactgtgaaggagaaagagtgagggcaatgaagggcgatggtggggagactcggtgggtgaatggggagaccagaaagaaagagtccacagagcctgggctgggcccggtggaggctcctgtttacagccctctcttctttgtacagttgtattccaacactccactcgctaagaggccctgatcccagctcattcaggggagaacacgtcgtggggttcctgtcacgactatcacttgagattatattattatcctcactccctcgctgtctggagacggtcacaccttctggcaaattcaagaggcatgagtggaccgagagcacatccagcatttgcatcacctccctggcacctcccatagttacagccactacatccccaccgccgcctgtcatccctcacgtctctgtggccacccgggtgtcactgccagcaccaggcactgctttcacgtaaaatgtccaaatcacatcttcagcaagaaagcaacctcacggattgccccgcctcaaggtctttccaccctctttgagatcagcgttcggagaggtccccgccagcccggtggctgccctcaggtcccgtcacatgtctcaagggtccagcgttcgaggaagcactgttgtagatgacagagctttttgtttcacagctgcggggattctgctgaccatcttttagaaaattatttcataatttattctggctttgcccccttgctccttggtttattccctcatgttttactcaaaataaacatggccatgaactcaggggccattgggattctcccctctggcagccccaggtgggagctgggagggtccccagcccaggaggtggctggattgcagggctggcagcccccacgtggtggcatcctgacaggcacagtgagacccttgctgggtcaggtctcctttgtgtgtgaagctggggcagagtatgctacgaagggaccaggccaggccacagggctctcctcccagtctttatctgaaggcccagccaaagcacccctctaaaccggtcacctaggggaaatgcaaaaacctgcaaaagatccacctgtattccctgtgtgtgtgtgtcaaaatgaccatttgccaacctggctgtgaggtaatgtatgtaaagcaccgagtcaggtgcctgatacgcagtaggtgcttagcaaacggtagctaatactatcatcattgtcattgttattgtgacacccatgagcccacagacagagctgtattaagtaacctgttttgaatccagacattcactcccccacttgctatgactaccctcctttgatctatttttggtcataggtaaaaaaaaaaatctctcttgggagcatataaacaaaaaacatagaagcaataaagcgatcgctggtatttcttttctcatgcagccaaattcgccagctggtgaccaaaggctcagatgcttgcttatttgcagacccggcctcctgggtgctccccagtgacccatctttccaccccaccacctccaagtcctgtctatgtctgcttccacacagccctgtccccagggcaccagccttctgtccctcacagcagtgccatcgcgggcattaggagtcttcgttatgttgtatccttgtgagttcttgactaccatgcccaagtttcccccactggcaatggttcctctcttggaggtacagtggaaaccagagagatgacagatgttgagtcctcagtgtctcagaggcagcaattcttgctggacacctgcacatgctcagcacagaggctggtactttggaggcactaaccacttgatgagtaaatcaatggcataaagccccattccaagttatggggtcttttgacaggcccctttcatcctctttctctttgtataaacctcatgtttcagaacaaaattacagtctaagttcatttgcccccagccttgcccaaggatccccgggctgtgctgacccctaggcatagggcaaagggtgttcccaagcagcaggcacctcagtgccctcagttatccagggcaaggggcctggctgccccctgctcctccccatgatgcaggggctttctaagccaggctgcagacagggcagggttggcttcttggccattccctctgtgcccccttctccttctgactggtctcaccctggagatccccagaggatctgaccagagccaggtggactgtggccctgagatggagctggctgcaggcttacaagcacctctggggacatccagaggggagggtcagtaagcacaacggagctagggagacttcagatggactcaaacccagagcaataatactctcacaccaccccacagctaaggcactcatgttccccagtagatcaagccagaagctttgcaagaagggagtggaacgaggctgcctatccaaggtccatctaccacgcagaacttggtcatgcaagtacatttggaaaatctggtcttggcccgtcccccattggcctggtctacacagccaaaaattcagactagattagatgtttgcaggcaattctgtagcaaagcaaattcccctaccccgtcccttccccctagaagctgccttagcctccctgactgggtgtggtctctgggcctaggactcctccctatgaggaaaagtgctctccagccacatcttggcagccccacaaccacagcatcagggcagctgcagcaagtgaccacccacccgtcgggttagacacacaaggcaccaggcactggcatctgactaaaataacctttccctacatgggaagaggaaagcttgtaggctggcacatataaacgtccagccgcagccagatggcctgaactaagcagcaggaactctctgggctggggaggagcctcctgcccttctagaaagtgatgcgtcagctttgttctcctgggaaggtgttgctataccccaggaacaaagcagggcccaactgccagtgcagtcagctgggcctgcgctccaggctcaccaccgctaagtggtcaggtaccgggccagcatcctgggagggacctcttgcgactctgagttgcagcttggactagctgaacacatggggacatgctccaggggcttcttccctggcaggattcctgggatttcaaactacctcaccaacaggacgctgaaccaggagcctgccacccaactggcccccttggtgattgtggaaggtgatgtttttcctaaaatgcatccctcctgttctgctccatatacatgtgcttcaaaaaccaccaccaggaaagccttcccagaagagggaaaggattaagggctctcttcctttgggccctgcagaatgtattggagggaggtgttgctgcaaggtccaggagctgggaaactctgggctcggggggagataatgcaccaccagcctcaaaaaggagctgcccaagttgaatatgtagcaaagaccatgggataagttgaatagtggccagacgaatcactaataactcaccatgggaccctctgaagagaggcctgtgctcgtgtaaccatagcaacagcagatgccagcaacctactcattagtaccacccagtgataaggcatcccctgggctagacccaggggccataaagtagcaaagtagcaaatgtagcaataaagggcccgggtctatacggggacagggtccaaatgaccaggacttggccctctccccagccccgatgagggctcagagccagctgctgtcagctgtctggggagggaaggccctgctccataccaggggtccctgttctatactctaagcccactcaccgcatgatcacggactcatcggaatggcctcctcttagtgcatgtggttctctttagtttatttttctggaatttggggattggaccccagaaccaaacatgctggtacagtctaaaaataaatgacttgaacccacttcaa

SEQ ID NO: 17727 - DNA, 2111 bp, Homo sapiens
  source 1..2111: mol_type = unassigned DNA
gttaggcaagctggcgtgtggacttgtgtgggatgggtgcaggtctgcatataaatcatgttcctgggtttctgggtgtgaagcgcacaccgacggggacgagagcgcagaggatggcgcttttagatacttccagtcttccgatgttgtgatcgcagtgtgagtgaagacactcaggatggctcaaggatccggggatcaaagagcagtgggggttgctgacccagaggagagttctccaaacatgatcgtttactgcaaaattgaagacatcattacaaagatgcaagatgacaagacagggggtgtgcccatcagaacagtcaagagctttctctccaaaatccccagtgtcgtcacaggtactgacattgtgcagtggcttatgaagaacctttccattgaggacccagttgaagcaatacacttggggagccttatcgctgcccagggctacatctttccaatctcagaccatgttctcaccatgaaggatgatggcaccttttatcgtttccaggctccgtacttctggccttcgaactgctgggaacctgaaaacactgactatgccatctatctctgtaagaggacaatgcaaaataaagcaaggctggaactggcagattatgaagcagaaaacttagcaagactccagagggcctttgcgaggaagtgggaattcatctttatgcaagcagaagcacaagtaaagattgaccggaaaaaagacaagacagaaaggaaaattttggatagtcaagaacgagccttttgggatgtccacaggcctgtgccaggctgtgtgaacacaacagaaatggatatccgaaaatgtcgacgtttgaagaatccacaaaaggttaaaaagtccgtgtatggcgtgactgaagagtcccaggcacagagcccggtgcatgtactcagccaaccaatcaggaaaacaacaaaagaggacatccggaaacagataacatttttgaacgcacagatcgacagacattgtttgaaaatgtccaaagtggctgaaagtttaattgcctacacggaacaatatgtggaatatgaccctttgataacaccagctgagccatccaacccttggatcagcgatgacgttgctttgtgggacatagagatgagcaaagagcccagccaacagcgagtaaaaagatggggcttctctttcgatgagatattgaaggaccaggtggggcgggaccagtttctacgattcctggagtccgaattcagttcagaaaacctcaggttctggctggctgtccaagatcttaagaaacaacccctacaggatgtggccaagagggtagaagaaatctggcaagagtttctggctccaggggctccaagtgcaatcaacctggattctcacagctatgagataaccagtcaaaatgtcaaagatggagggagatatacatttgaagacgcccaggagcacatctacaagctgatgaagagtgacagctatgcccgcttcctccggtcaaatgcttaccaggatttgctgctggccaagaagaagaaagtgagcaaggtcgtagaacttccctagaaaagttcactcgcagtgtgtgctgctggcgcagagtcagaatggccgctgcatttcacccccgaggtggcttccttccagcagtggggaaagtcgctggcgggcaagcgcctcacgggcctgatgcagtcctcctgaccgttcctaccgcaggtccagggcctgggcccgcggaccccacaggcaggcggcggcgctccacatctgcggacagagtttccttacgaggagacttggtcactgtgaaggagaaagagtgagggcaatgaagggcgatggtggggagactcggtgggtgaatggggagaccagaaagaaagagtccacagagcctgggctgggcccggtggaggctcctgtttacagccctctcttctttgtacagttgtattccaacactccactcgctaagaggccctgatcccagctcattcaggggagaacacgtcgtggggttcctgtcacgactatcacttgagattatattattatcctcactccctcgctgtctggagacggtcacaccttctggcaa

SEQ ID NO: 17728 - DNA, 1689 bp, Homo sapiens
  source 1..1689: mol_type = unassigned DNA
caccgacggggacgagagcgcagaggatggcgcttttagatacttccagtcttccgatgttgtgatcgcagtgtgagtgaagacactcaggatggctcaaggatccggggatcaaagagcagtgggggttgctgacccagaggagagttctccaaacatgatcgtttactgcaaaattgaagacatcattacaaagatgcaagatgacaagacagggggtgtgcccatcagaacagtcaagagctttctctccaaaatccccagtgtcgtcacaggtactgacattgtgcagtggcttatgaagaacctttccattgaggacccagttgaagcaatacacttggggagccttatcgctgcccagggctacatctttccaatctcagaccatgttctcaccatgaaggatgatggcaccttttatcgtttccaggctccgtacttctggccttcgaactgctgggaacctgaaaacactgactatgccatctatctctgtaagaggacaatgcaaaataaagcaaggctggaactggcagattatgaagcagaaaacttagcaagactccagagggcctttgcgaggaagtgggaattcatctttatgcaagcagaagcacaagtaaagattgaccggaaaaaagacaagacagaaaggaaaattttggatagtcaagaacgagccttttgggatgtccacaggcctgtgccaggctgtgtgaacacaacagaaatggatatccgaaaatgtcgacgtttgaagaatccacaaaaggttaaaaagtccgtgtatggcgtgactgaagagtcccaggcacagagcccggtgcatgtactcagccaaccaatcaggaaaacaacaaaagaggacatccggaaacagataacatttttgaacgcacagatcgacagacattgtttgaaaatgtccaaagtggctgaaagtttaattgcctacacggaacaatatgtggaatatgaccctttgataacaccagctgagccatccaacccttggatcagcgatgacgttgctttgtgggacatagagatgagcaaagagcccagccaacagcgagtaaaaagatggggcttctctttcgatgagatattgaaggaccaggtggggcgggaccagtttctacgattcctggagtccgaattcagttcagaaaacctcaggttctggctggctgtccaagatcttaagaaacaacccctacaggatgtggccaagagggtagaagaaatctggcaagagtttctggctccaggggctccaagtgcaatcaacctggattctcacagctatgagataaccagtcaaaatgtcaaagatggagggagatatacatttgaagacgcccaggagcacatctacaagctgatgaagagtgacagctatgcccgcttcctccggtcaaatgcttaccaggatttgctgctggccaagaagaagccagaaagtgagcaaggtcgtagaacttccctagaaaagttcactcgcagtgtgggaaagtcgctggcgggcaagcgcctcacgggcctgatgcagtcctcctgaccgttcctaccgcaggtccagggcctgggcccgcggaccccacaggcaggcggcggcgctccacatctgcggacagagtttccttacgaggagacttggtcactgtgaaggagaaagagtgaggg

SEQ ID NO: 17729 - DNA, 1564 bp, Homo sapiens
  source 1..1564: mol_type = unassigned DNA
atggctcaaggatccggggatcaaagagcagtgggggttgctgacccagaggagagttctccaaacatgatcgtttactgcaaaattgaagacatcattacaaagatgcaagatgacaagacagggggtgtgcccatcagaacagtcaagagctttctctccaaaatccccagtgtcgtcacaggtactgacattgtgcagtggcttatgaagaacctttccattgaggacccagttgaagcaatacacttggggagccttatcgctgcccagggctacatctttccaatctcagaccatgttctcaccatgaaggatgatggcaccttttatcgtttccaggctccgtacttctggccttcgaactgctgggaacctgaaaacactgactatgccatctatctctgtaagaggacaatgcaaaataaagcaaggctggaactggcagattatgaagcagaaaacttagcaagactccagagggcctttgcgaggaagtgggaattcatctttatgcaagcagaagcacaagtaaagattgaccggaaaaaagacaagacagaaaggaaaattttggatagtcaagaacgagccttttgggatgtccacaggcctgtgccaggctgtgtgaacacaacagaaatggatatccgaaaatgtcgacgtttgaagaatccacaaaaggttaaaaagtccgtgtatggcgtgactgaagagtcccaggcacagagcccggtgcatgtactcagccaaccaatcaggaaaacaacaaaagaggacatccggaaacagataacatttttgaacgcacagatcgacagacattgtttgaaaatgtccaaagtggctgaaagtttaattgcctacacggaacaatatgtggaatatgaccctttgataacaccagctgagccatccaacccttggatcagcgatgacgttgctttgtgggacatagagatgagcaaagagcccagccaacagcgagtaaaaagatggggcttctctttcgatgagatattgaaggaccaggtggggcgggaccagtttctacgattcctggagtccgaattcagttcagaaaacctcaggttctggctggctgtccaagatcttaagaaacaacccctacaggatgtggccaagagggtagaagaaatctggcaagagtttctggctccaggggctccaagtgcaatcaacctggattctcacagctatgagataaccagtcaaaatgtcaaagatggagggagatatacatttgaagacgcccaggagcacatctacaagctgatgaagagtgacagctatgcccgcttcctccggtcaaatgcttaccaggatttgctgctggccaagaagaaggtgtggctactgtgatgggcagtgtggagcctggcctcctgtcgattcccctgctggaggatgccaatggaggggctcctttggaggaggccgacaccctcatacatggctctaatgcccattttttctaagaactagaggaaagaaaaattataggaacttttgataactccagcccagatctcatggatgaagg

SEQ ID NO: 17730 - DNA, 1497 bp, Homo sapiens
  source 1..1497: mol_type = unassigned DNA
atggctcaaggatccggggatcaaagagcagtgggggttgctgacccagaggagagttctccaaacatgatcgtttactgcaaaattgaagacatcattacaaagatgcaagatgacaagacagggggtgtgcccatcagaacagtcaagagctttctctccaaaatccccagtgtcgtcacaggtactgacattgtgcagtggcttatgaagaacctttccattgaggacccagttgaagcaatacacttggggagccttatcgctgcccagggctacatctttccaatctcagaccatgttctcaccatgaaggatgatggcaccttttatcgtttccaggctccgtacttctggccttcgaactgctgggaacctgaaaacactgactatgccatctatctctgtaagaggacaatgcaaaataaagcaaggctggaactggcagattatgaagcagaaaacttagcaagactccagagggcctttgcgaggaagtgggaattcatctttatgcaagcagaagcacaagtaaagattgaccggaaaaaagacaagacagaaaggaaaattttggatagtcaagaacgagccttttgggatgtccacaggcctgtgccaggctgtgtgaacacaacagaaatggatatccgaaaatgtcgacgtttgaagaatccacaaaaggttaaaaagtccgtgtatggcgtgactgaagagtcccaggcacagagcccggtgcatgtactcagccaaccaatcaggaaaacaacaaaagaggacatccggaaacagataacatttttgaacgcacagatcgacagacattgtttgaaaatgtccaaagtggctgaaagtttaattgcctacacggaacaatatgtggaatatgaccctttgataacaccagctgagccatccaacccttggatcagcgatgacgttgctttgtgggacatagagatgagcaaagagcccagccaacagcgagtaaaaagatggggcttctctttcgatgagatattgaaggaccaggtggggcgggaccagtttctacgattcctggagtccgaattcagttcagaaaacctcaggttctggctggctgtccaagatcttaagaaacaacccctacaggatgtggccaagagggtagaagaaatctggcaagagtttctggctccaggggctccaagtgcaatcaacctggattctcacagctatgagataaccagtcaaaatgtcaaagatggagggagatatacatttgaagacgcccaggagcacatctacaagctgatgaagagtgacagctatgcccgcttcctccggtcaaatgcttaccaggatttgctgctggccaagaagaagccagaaagtgagcaaggtcgtagaacttccctagaaaagttcactcgcagtgtgtgtctgcagcttctcttctagggatgaaaatgcaaaaaagagcaagcggctccctctgcagaaggtgcacccttg

SEQ ID NO: 17731 - DNA, 1476 bp, Homo sapiens
  source 1..1476: mol_type = unassigned DNA
atggctcaaggatccggggatcaaagagcagtgggggttgctgacccagaggagagttctccaaacatgatcgtttactgcaaaattgaagacatcattacaaagatgcaagatgacaagacagggggtgtgcccatcagaacagtcaagagctttctctccaaaatccccagtgtcgtcacaggtactgacattgtgcagtggcttatgaagaacctttccattgaggacccagttgaagcaatacacttggggagccttatcgctgcccagggctacatctttccaatctcagaccatgttctcaccatgaaggatgatggcaccttttatcgtttccaggctccgtacttctggccttcgaactgctgggaacctgaaaacactgactatgccatctatctctgtaagaggacaatgcaaaataaagcaaggctggaactggcagattatgaagcagaaaacttagcaagactccagagggcctttgcgaggaagtgggaattcatctttatgcaagcagaagcacaagtaaagattgaccggaaaaaagacaagacagaaaggaaaattttggatagtcaagaacgagccttttgggatgtccacaggcctgtgccaggctgtgtgaacacaacagaaatggatatccgaaaatgtcgacgtttgaagaatccacaaaaggttaaaaagtccgtgtatggcgtgactgaagagtcccaggcacagagcccggtgcatgtactcagccaaccaatcaggaaaacaacaaaagaggacatccggaaacagataacatttttgaacgcacagatcgacagacattgtttgaaaatgtccaaagtggctgaaagtttaattgcctacacggaacaatatgtggaatatgaccctttgataacaccagctgagccatccaacccttggatcagcgatgacgttgctttgtgggacatagagatgagcaaagagcccagccaacagcgagtaaaaagatggggcttctctttcgatgagatattgaaggaccaggtggggcgggaccagtttctacgattcctggagtccgaattcagttcagaaaacctcaggttctggctggctgtccaagatcttaagaaacaacccctacaggatgtggccaagagggtagaagaaatctggcaagagtttctggctccaggggctccaagtgcaatcaacctggattctcacagctatgagataaccagtcaaaatgtcaaagatggagggagatatacatttgaagacgcccaggagcacatctacaagctgatgaagagtgacagctatgcccgcttcctccggtcaaatgcttaccaggatttgctgctggccaagaagaagccagaaagtgagcaaggtcgtagaacttccctagaaaagttcactcgcagtgtgggatgaaaatgcaaaaaagagcaagcggctccctctgcagaaggtgcacccttg

SEQ ID NO: 17732 - DNA, 1497 bp, Homo sapiens
  source 1..1497: mol_type = unassigned DNA
atggctcaaggatccggggatcaaagagcagtgggggttgctgacccagaggagagttctccaaacatgatcgtttactgcaaaattgaagacatcattacaaagatgcaagatgacaagacagggggtgtgcccatcagaacagtcaagagctttctctccaaaatccccagtgtcgtcacaggtactgacattgtgcagtggcttatgaagaacctttccattgaggacccagttgaagcaatacacttggggagccttatcgctgcccagggctacatctttccaatctcagaccatgttctcaccatgaaggatgatggcaccttttatcgtttccaggctccgtacttctggccttcgaactgctgggaacctgaaaacactgactatgccatctatctctgtaagaggacaatgcaaaataaagcaaggctggaactggcagattatgaagcagaaaacttagcaagactccagagggcctttgcgaggaagtgggaattcatctttatgcaagcagaagcacaagtaaagattgaccggaaaaaagacaagacagaaaggaaaattttggatagtcaagaacgagccttttgggatgtccacaggcctgtgccaggctgtgtgaacacaacagaaatggatatccgaaaatgtcgacgtttgaagaatccacaaaaggttaaaaagtccgtgtatggcgtgactgaagagtcccaggcacagagcccggtgcatgtactcagccaaccaatcaggaaaacaacaaaagaggacatccggaaacagataacatttttgaacgcacagatcgacagacattgtttgaaaatgtccaaagtggctgaaagtttaattgcctacacggaacaatatgtggaatatgaccctttgataacaccagctgagccatccaacccttggatcagcgatgacgttgctttgtgggacatagagatgagcaaagagcccagccaacagcgagtaaaaagatggggcttctctttcgatgagatattgaaggaccaggtggggcgggaccagtttctacgattcctggagtccgaattcagttcagaaaacctcaggttctggctggctgtccaagatcttaagaaacaacccctacaggatgtggccaagagggtagaagaaatctggcaagagtttctggctccaggggctccaagtgcaatcaacctggattctcacagctatgagataaccagtcaaaatgtcaaagatggagggagatatacatttgaagacgcccaggagcacatctacaagctgatgaagagtgacagctatgcccgcttcctccggtcaaatgcttaccaggatttgctgctggccaagaagaagccagaaagtgagcaaggtcgtagaacttccctagaaaagttcactcgcagtgtgcttctcttctagggatgaaaatgcaaaaaagagcaagcggctccctctgcagaaggtgcacccttgatcgcccag

SEQ ID NO: 17733 - DNA, 986 bp, Homo sapiens
  source 1..986: mol_type = unassigned DNA
aaataaggcagaaaggaatgccggcctcgagcaaggacaccggttcatgcccaaatcacttctgctttcagccaacagactgtttctgccaaaagatggacgcagctagattttttttttttttgtaccgataatctgtcttaaaacttggagaggatctcttttcccctgtgaagtcaggaaaatgacagcaagcagcatggattggagcttctaaaatcacctctgctttgaccttgaggggccgtggtagaggggagacagcaccggcttagaaaccccacggctcggctctagtcccagcatcagtggagcaccaaggggagaaagtattcatcactgaggtactgacattgtgcagtggcttatgaagaacctttccattgaggacccagttgaagcaatacacttggggagccttatcgctgcccagggctacatctttccaatctcagaccatgttctcaccatgaaggatgatggcaccttttatcgtttccaggctccgtacttctggccttcgaactgctgggaacctgaaaacactgactatggaggaagacattgaagaaggaaagccatctatctctgtaagaggacaatgcaaaataaagcaaggctggaactggcagattatgaagcagaaaacttagcaagactccagagggcctttgcgaggaagtgggaattcatctttatgcaagcagaagcacaagtaaagattgaccggaaaaaagacaagacagaaaggaaaattttggatagtcaagaacgagccttttgggatgtccacaggcctgtggcacatcagagaatggtgaacagcacttcagcactgtccttggggccattttaaacagcaaaatcaccaacaaaaagtacagaaatgcagaaaagttggcactaaattagccctaaatagaagggtctgaaacaaaaaggcaggacgtcaccttgttcaatttcagtgggaaacacacatatca

SEQ ID NO: 17734 - DNA, 896 bp, Homo sapiens
  source 1..896: mol_type = unassigned DNA
cgttgcaggtactgacattgtgcagtggcttatgaagaacctttccattgaggacccagttgaagcaatacacttggggagccttatcgctgcccagggctacatctttccaatctcagaccatgttctcaccatgaaggatgatggcaccttttatcgtttccaggctccgtacttctggccttcgaactgctgggaacctgaaaacactgactatgccatctatctctgtaagaggacaatgcaaaataaagcaaggctggaactggcagattatgaagcactccccactggaagaggagtcctgagaaatccagcctttggttttgctcctggagataccagcaggtggcaaagactcgttaattccccaataaccacagacaattttcccgattttcagcaacctttgaaacaagtgctgtgtgagttgcattcttgtaaaacaccttcatgaagagaggaatcaggtgaaccatagagacttcagacttaatgggaaaacttagcaagactccagagggcctttgcgaggaagtgggaattcatctttatgcaagcagaagcacaagtaaagattgaccggaaaaaagacaagacagaaaggaaaattttggatagtcaagaacgagccttttgggatgtccacaggcctgtgccaggctgtgtgaacacaacagaaatggatatccgaaaatgtcgacgtttgaagaatccacaaaaggttaaaaagtccgtgtatggcgtgactgaagagtcccaggcacagagcccggtgcatgtactcagccaaccaatcaggaaaacaacaaaagaggacatccggaaacagataacatttttgaacgcacagatcgacagacattgtttgaaaatgtccaaagtggctgaaaggt

SEQ ID NO: 17735 - DNA, 1828 bp, Homo sapiens
  source 1..1828: mol_type = unassigned DNA
cgttgcaggtactgacattgtgcagtggcttatgaagaacctttccattgaggacccagttgaagcaatacacttggggagccttatcgctgcccagggctacatctttccaatctcagaccatgttctcaccatgaaggatgatggcaccttttatcgtttccaggctccgtacttctggccttcgaactgctgggaacctgaaaacactgactatgccatctatctctgtaagaggacaatgcaaaataaagcaaggctggaactggcagattatgaagcagaaaacttagcaagactccagagggcctttgcgaggaagtgggaattcatctttatgcaagcagaagcacaagtaaagattgaccggaaaaaagacaagacagaaaggaaaattttggatagtcaagaacgagccttttgggatgtccacaggcctgtgccaggctgtgtgaacacaacagaaatggatatccgaaaatgtcgacgtttgaagaatccacaaaaggttaaaaagtccgtgtatggcgtgactgaagagtcccaggcacagagcccggtgcatgtactcagccaaccaatcaggaaaacaacaaaagaggacatccggaaacagataacatttttgaacgcacagatcgacagacattgtttgaaaatgtccaaagtggctgaaagtttaattgcctacacggaacaatatgtggaatatgaccctttgataacaccagctgagccatccaacccttggatcagcgatgacgttgctttgtgggacatagagatgagcaaagagcccagccaacagcgagtaaaaagatggggcttctctttcgatgagatattgaaggaccaggtggggcgggaccagtttctacgattcctggagtccgaattcagttcagaaaacctcaggttctggctggctgtccaagatcttaagaaacaacccctacaggatgtggccaagagggtagaagaaatctggcaagagtttctggctccaggggctccaagtgcaatcaacctggattctcacagctatgagataaccagtcaaaatgtcaaagatggagggagatatacatttgaagacgcccaggagcacatctacaagctgatgaagagtgacagctatgcccgcttcctccggtcaaatgcttaccaggatttgctgctggccaagaagaagccagaaagtgagcaaggtcgtagaacttccctagaaaagttcactcgcagtgtgaatgtgcagaacacaaggcctgcgggtgcctggtctatcttcatggctgctttgccaatggccgtgtggctccgcacaccaagaagctgccacgggctgtcagagtcaaggcttctgggacttccttcactccatgatggcctgagagaaggacagagcctgcctcagtcctgtccggggagcagcagcaccgcagcagagggggccagagaaagagcatccaatggcaggagtctggcaaggcgacagcactgccaatgtcacggtcaaggagaggagacccaactctgcctgtggtccagactggaaagttcaaagagaagtcagagagcttcaagtctgaggacttcaaaggctaagaagaaaagacagactgtcaagcaaggaccgaaagcctggccttaacatcatagcacattacactgggaaatggagatggagcatccaagacaacacttaacccaaccttgtaatcttctgcagcaaaagtggtgggggaattctgatacgtgctctgtcctggttaatactagaaggttctgaggcatccataattctaaataattaaaggagtcaatcaat

SEQ ID NO: 17736 - DNA, 1110 bp, Homo sapiens
  source 1..1110: mol_type = unassigned DNA
aaaacactgactatgaaggaggaagacattgaagaaggaaagccatctatctctgtaagaggacaatgcaaaataaagcaaggctggaactggcagattatgaagcagaaaacttagcaagactccagagggcctttgcgaggaagtgggaattcatctttatgcaagcagaagcacaagtaaagattgaccggaaaaaagacaagacagaaaggaaaattttggatagtcaagaacgagccttttgggatgtccacaggcctgtgccaggctgtgtgaacacaacagaaatggatatccgaaaatgtcgacgtttgaagaatccacaaaaggttaaaaagtccgtgtatggcgtgactgaagagtcccaggcacagagcccggtgcatgtactcagccaaccaatcaggaaaacaacaaaagaggacatccggaaacagataacatttttgaacgcacagatcgacagacattgtttgaaaatgtccaaagtggctgaaagtttaattgcctacacggaacaatatgtggaatatgaccctttgataacaccagctgagccatccaacccttggatcagcgatgacgttgctttgtgggacatagagatgagcaaagagcccagccaacagcgagtaaaaagatggggcttctctttcgatgagatattgaaggaccaggtggggcgggaccagtttctacgattcctggagtccgaattcagttcagaaaacctcaggttctggctggctgtccaagatcttaagaaacaacccctacaggatgtggccaagagggtagaagaaatctggcaagagtttctggctccaggggctccaagtgcaatcaacctggattctcacagctatgagataaccagtcaaaatgtcaaagatggagggagatatacatttgaagacgcccaggagcacatctacaagctgatgaagagtgacagctatgcccgcttcctccggtcaaatgcttaccaggatttgctgctggccaagaagaagccagaaagtgagcaaggtcgtagaacttccctagaaaagttcactcgcagtgtgttgtattccaacactccactcgctaagaggccctgatccc

SEQ ID NO: 17737 - DNA, 688 bp, Homo sapiens
  source 1..688: mol_type = unassigned DNA
ctaaattagccctaaatagaagggtctgaaacaaaaaggcaggacgtcaccttgttcaatttcagtgggaaacacacatatcaggctactcaagccaggctgtgtgaacacaacagaaatggatatccgaaaatgtcgacgtttgaagaatccacaaaaggttaaaaagtccgtgtatggcgtgactgaagagtcccaggcacagagcccggtgcatgtactcagccaaccaatcaggaaaacaacaaaagaggacatccggaaacaggtgaatgaattgacagcttgcactctcaggaggagacgtggccagtttaaaaaccctttcaaatgttcaactctgaagattgagcaagctttgagttcctggaaaccacagtggaacccagctgtgggtgattgaaccttttaagtgctgtgtgtgaacaagccacggaagcttgagagaaagaattctctacccagttcctccagcagttactagaaaagggcgtaaatgagtcatcccatgccttggggtaactgctgtaatggggtttcccacagtccgctgtgggagctggaggaaggagggggctcatgtcacacagtccttataattggaatgcaccagctcaggatggtctactttattgctgtgatttgaaaggaaagtttaagaataaataaagctctactcccaatgcca

SEQ ID NO: 17738 - DNA, 548 bp, Homo sapiens
  source 1..548: mol_type = unassigned DNA
aaatcataagctggactttgaagaatacacaggataatagtagacgaagaagcaggagagagaatattccaagctggaggaccaaatgaggaaagaggtggccgtgggactctcccactccataaggtcctgagaggacacgtagatgccgactagctgtatggagcgtgctgttctaggcatccacgtgtctgttataaaccagacaagattgatgatccgagttccacacagtgtcggctgaagggagaagcaattaaaagagaacacagtggggcaccaggttcatctcgagagctcttgtctctggcagttgccctgagtccaaggaagacctcagaaggttcactaggcccagcaggatccaccacttaccaaacccatgattaataggaacagagctccggtcatctctatatccagctgagtgatgtacattttcatgtggcacccaaatcatcctgcaaaaaggaccctgagccctcaggaaccgcagggagcctgcagagctcccagggtcctcagggccttcccacaggggctcagca

SEQ ID NO: 17739 - DNA, 454 bp, Homo sapiens
  source 1..454: mol_type = unassigned DNA
agaacttccctagaaaagttcactcgcagtgtgggaaagtcgctggcgggcaagcgcctcacgggcctgatgcagtcctcctgaccgttcctaccgcaggtccagggcctgggcccgcggaccccacaggcaggcggcggcgctccacatctgcggacagagtttccttacgaggagacttggtcactgtgaaggagaaagagtgagggcaatgaagggcgatggtggggagactcggtgggtgaatggggagaccagaaagaaagagtccacagagcctgggctgggcccggtggaggctcctgtttacagccctctcttctttgtacagttgtattccaacactccactcgctaagaggccctgatcccagctcattcaggggagaacacgtcgtggggttcctgtcacgactatcacttgagattatattattatcctcactccctcgctg

SEQ ID NO: 17740 - DNA, 5400 bp, Homo sapiens
  source 1..5400: mol_type = unassigned DNA
cagattgaagacatcattacaaagatgcaagatgacaagacagggggtgtgcccatcagaacagtcaagagctttctctccaaaatccccagtgtcgtcacaggtactgacattgtgcagtggcttatgaagaacctttccattgaggacccagttgaagcaatacacttggggagccttatcgctgcccagggctacatctttccaatctcagaccatgttctcaccatgaaggatgatggcaccttttatcgtttccaggctccgtacttctggccttcgaactgctgggaacctgaaaacactgactatgccatctatctctgtaagaggacaatgcaaaataaagcaaggctggaactggcagattatgaagcagaaaacttagcaagactccagagggcctttgcgaggaagtgggaattcatctttatgcaagcagaagcacaagtaaagattgaccggaaaaaagacaagacagaaaggaaaattttggatagtcaagaacgagccttttgggatgtccacaggcctgtgccaggctgtgtgaacacaacagaaatggatatccgaaaatgtcgacgtttgaagaatccacaaaaggttaaaaagtccgtgtatggcgtgactgaagagtcccaggcacagagcccggtgcatgtactcagccaaccaatcaggaaaacaacaaaagaggacatccggaaacagataacatttttgaacgcacagatcgacagacattgtttgaaaatgtccaaagtggctgaaagtttaattgcctacacggaacaatatgtggaatatgaccctttgataacaccagctgagccatccaacccttggatcagcgatgacgttgctttgtgggacatagagatgagcaaagagcccagccaacagcgagtaaaaagatggggcttctctttcgatgagatattgaaggaccaggtggggcgggaccagtttctacgattcctggagtccgaattcagttcagaaaacctcaggttctggctggctgtccaagatcttaagaaacaacccctacaggatgtggccaagagggtagaagaaatctggcaagagtttctggctccaggggctccaagtgcaatcaacctggattctcacagctatgagataaccagtcaaaatgtcaaagatggagggagatatacatttgaagacgcccaggagcacatctacaagctgatgaagagtgacagctatgcccgcttcctccggtcaaatgcttaccaggatttgctgctggccaagaagaagggaaagtcgctggcgggcaagcgcctcacgggcctgatgcagtcctcctgaccgttcctaccgcaggtccagggcctgggcccgcggaccccacaggcaggcggcggcgctccacatctgcggacagagtttccttacgaggagacttggtcactgtgaaggagaaagagtgagggcaatgaagggcgatggtggggagactcggtgggtgaatggggagaccagaaagaaagagtccacagagcctgggctgggcccggtggaggctcctgtttacagccctctcttctttgtacagttgtattccaacactccactcgctaagaggccctgatcccagctcattcaggggagaacacgtcgtggggttcctgtcacgactatcacttgagattatattattatcctcactccctcgctgtctggagacggtcacaccttctggcaaattcaagaggcatgagtggaccgagagcacatccagcatttgcatcacctccctggcacctcccatagttacagccactacatccccaccgccgcctgtcatccctcacgtctctgtggccacccgggtgtcactgccagcaccaggcactgctttcacgtaaaatgtccaaatcacatcttcagcaagaaagcaacctcacggattgccccgcctcaaggtctttccaccctctttgagatcagcgttcggagaggtccccgccagcccggtggctgccctcaggtcccgtcacatgtctcaagggtccagcgttcgaggaagcactgttgtagatgacagagctttttgtttcacagctgcggggattctgctgaccatcttttagaaaattatttcataatttattctggctttgcccccttgctccttggtttattccctcatgttttactcaaaataaacatggccatgaactcaggggccattgggattctcccctctggcagccccaggtgggagctgggagggtccccagcccaggaggtggctggattgcagggctggcagcccccacgtggtggcatcctgacaggcacagtgagacccttgctgggtcaggtctcctttgtgtgtgaagctggggcagagtatgctacgaagggaccaggccaggccacagggctctcctcccagtctttatctgaaggcccagccaaagcacccctctaaaccggtcacctaggggaaatgcaaaaacctgcaaaagatccacctgtattccctgtgtgtgtgtgtcaaaatgaccatttgccaacctggctgtgaggtaatgtatgtaaagcaccgagtcaggtgcctgatacgcagtaggtgcttagcaaacggtagctaatactatcatcattgtcattgttattgtgacacccatgagcccacagacagagctgtattaagtaacctgttttgaatccagacattcactcccccacttgctatgactaccctcctttgatctatttttggtcataggtaaaaaaaaaaatctctcttgggagcatataaacaaaaaacatagaagcaataaagcgatcgctggtatttcttttctcatgcagccaaattcgccagctggtgaccaaaggctcagatgcttgcttatttgcagacccggcctcctgggtgctccccagtgacccatctttccaccccaccacctccaagtcctgtctatgtctgcttccacacagccctgtccccagggcaccagccttctgtccctcacagcagtgccatcgcgggcattaggagtcttcgttatgttgtatccttgtgagttcttgactaccatgcccaagtttcccccactggcaatggttcctctcttggaggtacagtggaaaccagagagatgacagatgttgagtcctcagtgtctcagaggcagcaattcttgctggacacctgcacatgctcagcacagaggctggtactttggaggcactaaccacttgatgagtaaatcaatggcataaagccccattccaagttatggggtcttttgacaggcccctttcatcctctttctctttgtataaacctcatgtttcagaacaaaattacagtctaagttcatttgcccccagccttgcccaaggatccccgggctgtgctgacccctaggcatagggcaaagggtgttcccaagcagcaggcacctcagtgccctcagttatccagggcaaggggcctggctgccccctgctcctccccatgatgcaggggctttctaagccaggctgcagacagggcagggttggcttcttggccattccctctgtgcccccttctccttctgactggtctcaccctggagatccccagaggatctgaccagagccaggtggactgtggccctgagatggagctggctgcaggcttacaagcacctctggggacatccagaggggagggtcagtaagcacaacggagctagggagacttcagatggactcaaacccagagcaataatactctcacaccaccccacagctaaggcactcatgttccccagtagatcaagccagaagctttgcaagaagggagtggaacgaggctgcctatccaaggtccatctaccacgcagaacttggtcatgcaagtacatttggaaaatctggtcttggcccgtcccccattggcctggtctacacagccaaaaattcagactagattagatgtttgcaggcaattctgtagcaaagcaaattcccctaccccgtcccttccccctagaagctgccttagcctccctgactgggtgtggtctctgggcctaggactcctccctatgaggaaaagtgctctccagccacatcttggcagccccacaaccacagcatcagggcagctgcagcaagtgaccacccacccgtcgggttagacacacaaggcaccaggcactggcatctgactaaaataacctttccctacatgggaagaggaaagcttgtaggctggcacatataaacgtccagccgcagccagatggcctgaactaagcagcaggaactctctgggctggggaggagcctcctgcccttctagaaagtgatgcgtcagctttgttctcctgggaaggtgttgctataccccaggaacaaagcagggcccaactgccagtgcagtcagctgggcctgcgctccaggctcaccaccgctaagtggtcaggtaccgggccagcatcctgggagggacctcttgcgactctgagttgcagcttggactagctgaacacatggggacatgctccaggggcttcttccctggcaggattcctgggatttcaaactacctcaccaacaggacgctgaaccaggagcctgccacccaactggcccccttggtgattgtggaaggtgatgtttttcctaaaatgcatccctcctgttctgctccatatacatgtgcttcaaaaaccaccaccaggaaagccttcccagaagagggaaaggattaagggctctcttcctttgggccctgcagaatgtattggagggaggtgttgctgcaaggtccaggagctgggaaactctgggctcggggggagataatgcaccaccagcctcaaaaaggagctgcccaagttgaatatgtagcaaagaccatgggataagttgaatagtggccagacgaatcactaataactcaccatgggaccctctgaagagaggcctgtgctcgtgtaaccatagcaacagcagatgccagcaacctactcattagtaccacccagtgataaggcatcccctgggctagacccaggggccataaagtagcaaagtagcaaatgtagcaataaagggcccgggtctatacggggacagggtccaaatgaccaggacttggccctctccccagccccgatgagggctcagagccagctgctgtcagctgtctggggagggaaggccctgctccataccaggggtccctgttctatactctaagcccactcaccgcatgatcacggactcatcggaatggcctcctcttagtgcatgtggttctctttagtttatttttctggaatttggggattggaccccagaaccaaacatgctggtacagtctaaaaataaatgacttgaacccacttcaatcc

SEQ ID NO: 17741 - DNA, 5453 bp, Homo sapiens
  source 1..5453: mol_type = unassigned DNA
agattgaagacatcattacaaagatgcaagatgacaagacagggggtgtgcccatcagaacagtcaagagctttctctccaaaatccccagtgtcgtcacaggtactgacattgtgcagtggcttatgaagaacctttccattgaggacccagttgaagcaatacacttggggagccttatcgctgcccagggctacatctttccaatctcagaccatgttctcaccatgaaggatgatggcaccttttatcgtttccaggctccgtacttctggccttcgaactgctgggaacctgaaaacactgactatgccatctatctctgtaagaggacaatgcaaaataaagcaaggctggaactggcagattatgaagcagaaaacttagcaagactccagagggcctttgcgaggaagtgggaattcatctttatgcaagcagaagcacaagtaaagattgaccggaaaaaagacaagacagaaaggaaaattttggatagtcaagaacgagccttttgggatgtccacaggcctgtgccaggctgtgtgaacacaacagaaatggatatccgaaaatgtcgacgtttgaagaatccacaaaaggttaaaaagtccgtgtatggcgtgactgaagagtcccaggcacagagcccggtgcatgtactcagccaaccaatcaggaaaacaacaaaagaggacatccggaaacagataacatttttgaacgcacagatcgacagacattgtttgaaaatgtccaaagtggctgaaagtttaattgcctacacggaacaatatgtggaatatgaccctttgataacaccagctgagccatccaacccttggatcagcgatgacgttgctttgtgggacatagagatgagcaaagagcccagccaacagcgagtaaaaagatggggcttctctttcgatgagatattgaaggaccaggtggggcgggaccagtttctacgattcctggagtccgaattcagttcagaaaacctcaggttctggctggctgtccaagatcttaagaaacaacccctacaggatgtggccaagagggtagaagaaatctggcaagagtttctggctccaggggctccaagtgcaatcaacctggattctcacagctatgagataaccagtcaaaatgtcaaagatggagggagatatacatttgaagacgcccaggagcacatctacaagctgatgaagagtgacagctatgcccgcttcctccggtcaaatgcttaccaggatttgctgctggccaagaagaagccagaaagtgagcaaggtcgtagaacttccctagaaaagttcactcgcagtgtgggaaagtcgctggcgggcaagcgcctcacgggcctgatgcagtcctcctgaccgttcctaccgcaggtccagggcctgggcccgcggaccccacaggcaggcggcggcgctccacatctgcggacagagtttccttacgaggagacttggtcactgtgaaggagaaagagtgagggcaatgaagggcgatggtggggagactcggtgggtgaatggggagaccagaaagaaagagtccacagagcctgggctgggcccggtggaggctcctgtttacagccctctcttctttgtacagttgtattccaacactccactcgctaagaggccctgatcccagctcattcaggggagaacacgtcgtggggttcctgtcacgactatcacttgagattatattattatcctcactccctcgctgtctggagacggtcacaccttctggcaaattcaagaggcatgagtggaccgagagcacatccagcatttgcatcacctccctggcacctcccatagttacagccactacatccccaccgccgcctgtcatccctcacgtctctgtggccacccgggtgtcactgccagcaccaggcactgctttcacgtaaaatgtccaaatcacatcttcagcaagaaagcaacctcacggattgccccgcctcaaggtctttccaccctctttgagatcagcgttcggagaggtccccgccagcccggtggctgccctcaggtcccgtcacatgtctcaagggtccagcgttcgaggaagcactgttgtagatgacagagctttttgtttcacagctgcggggattctgctgaccatcttttagaaaattatttcataatttattctggctttgcccccttgctccttggtttattccctcatgttttactcaaaataaacatggccatgaactcaggggccattgggattctcccctctggcagccccaggtgggagctgggagggtccccagcccaggaggtggctggattgcagggctggcagcccccacgtggtggcatcctgacaggcacagtgagacccttgctgggtcaggtctcctttgtgtgtgaagctggggcagagtatgctacgaagggaccaggccaggccacagggctctcctcccagtctttatctgaaggcccagccaaagcacccctctaaaccggtcacctaggggaaatgcaaaaacctgcaaaagatccacctgtattccctgtgtgtgtgtgtcaaaatgaccatttgccaacctggctgtgaggtaatgtatgtaaagcaccgagtcaggtgcctgatacgcagtaggtgcttagcaaacggtagctaatactatcatcattgtcattgttattgtgacacccatgagcccacagacagagctgtattaagtaacctgttttgaatccagacattcactcccccacttgctatgactaccctcctttgatctatttttggtcataggtaaaaaaaaaaatctctcttgggagcatataaacaaaaaacatagaagcaataaagcgatcgctggtatttcttttctcatgcagccaaattcgccagctggtgaccaaaggctcagatgcttgcttatttgcagacccggcctcctgggtgctccccagtgacccatctttccaccccaccacctccaagtcctgtctatgtctgcttccacacagccctgtccccagggcaccagccttctgtccctcacagcagtgccatcgcgggcattaggagtcttcgttatgttgtatccttgtgagttcttgactaccatgcccaagtttcccccactggcaatggttcctctcttggaggtacagtggaaaccagagagatgacagatgttgagtcctcagtgtctcagaggcagcaattcttgctggacacctgcacatgctcagcacagaggctggtactttggaggcactaaccacttgatgagtaaatcaatggcataaagccccattccaagttatggggtcttttgacaggcccctttcatcctctttctctttgtataaacctcatgtttcagaacaaaattacagtctaagttcatttgcccccagccttgcccaaggatccccgggctgtgctgacccctaggcatagggcaaagggtgttcccaagcagcaggcacctcagtgccctcagttatccagggcaaggggcctggctgccccctgctcctccccatgatgcaggggctttctaagccaggctgcagacagggcagggttggcttcttggccattccctctgtgcccccttctccttctgactggtctcaccctggagatccccagaggatctgaccagagccaggtggactgtggccctgagatggagctggctgcaggcttacaagcacctctggggacatccagaggggagggtcagtaagcacaacggagctagggagacttcagatggactcaaacccagagcaataatactctcacaccaccccacagctaaggcactcatgttccccagtagatcaagccagaagctttgcaagaagggagtggaacgaggctgcctatccaaggtccatctaccacgcagaacttggtcatgcaagtacatttggaaaatctggtcttggcccgtcccccattggcctggtctacacagccaaaaattcagactagattagatgtttgcaggcaattctgtagcaaagcaaattcccctaccccgtcccttccccctagaagctgccttagcctccctgactgggtgtggtctctgggcctaggactcctccctatgaggaaaagtgctctccagccacatcttggcagccccacaaccacagcatcagggcagctgcagcaagtgaccacccacccgtcgggttagacacacaaggcaccaggcactggcatctgactaaaataacctttccctacatgggaagaggaaagcttgtaggctggcacatataaacgtccagccgcagccagatggcctgaactaagcagcaggaactctctgggctggggaggagcctcctgcccttctagaaagtgatgcgtcagctttgttctcctgggaaggtgttgctataccccaggaacaaagcagggcccaactgccagtgcagtcagctgggcctgcgctccaggctcaccaccgctaagtggtcaggtaccgggccagcatcctgggagggacctcttgcgactctgagttgcagcttggactagctgaacacatggggacatgctccaggggcttcttccctggcaggattcctgggatttcaaactacctcaccaacaggacgctgaaccaggagcctgccacccaactggcccccttggtgattgtggaaggtgatgtttttcctaaaatgcatccctcctgttctgctccatatacatgtgcttcaaaaaccaccaccaggaaagccttcccagaagagggaaaggattaagggctctcttcctttgggccctgcagaatgtattggagggaggtgttgctgcaaggtccaggagctgggaaactctgggctcggggggagataatgcaccaccagcctcaaaaaggagctgcccaagttgaatatgtagcaaagaccatgggataagttgaatagtggccagacgaatcactaataactcaccatgggaccctctgaagagaggcctgtgctcgtgtaaccatagcaacagcagatgccagcaacctactcattagtaccacccagtgataaggcatcccctgggctagacccaggggccataaagtagcaaagtagcaaatgtagcaataaagggcccgggtctatacggggacagggtccaaatgaccaggacttggccctctccccagccccgatgagggctcagagccagctgctgtcagctgtctggggagggaaggccctgctccataccaggggtccctgttctatactctaagcccactcaccgcatgatcacggactcatcggaatggcctcctcttagtgcatgtggttctctttagtttatttttctggaatttggggattggaccccagaaccaaacatgctggtacagtctaaaaataaatgacttgaacccacttcaatcc

SEQ ID NO: 17742 - DNA, 5342 bp, Homo sapiens
  source 1..5342: mol_type = unassigned DNA
agattgaagacatcattacaaagatgcaagatgacaagacagggggtgtgcccatcagaacagtcaagagctttctctccaaaatccccagtgtcgtcacaggtactgacattgtgcagtggcttatgaagaacctttccattgaggacccagttgaagcaatacacttggggagccttatcgctgcccagggctacatctttccaatctcagaccatgttctcaccatgaaggatgatggcaccttttatcgtttccaggctccgtacttctggccttcgaactgctgggaacctgaaaacactgactatgccatctatctctgtaagaggacaatgcaaaataaagcaaggctggaactggcagattatgaagcagaaaacttagcaagactccagagggcctttgcgaggaagtgggaattcatctttatgcaagcagaagcacaagtaaagattgaccggaaaaaagacaagacagaaaggaaaattttggatagtcaagaacgagccttttgggatgtccacaggcctgtgccaggctgtgtgaacacaacagaaatggatatccgaaaatgtcgacgtttgaagaatccacaaaaggttaaaaagtccgtgtatggcgtgactgaagagtcccaggcacagagcccggtgcatgtactcagccaaccaatcaggaaaacaacaaaagaggacatccggaaacagataacatttttgaacgcacagatcgacagacattgtttgaaaatgtccaaagtggctgaaagcaaagagcccagccaacagcgagtaaaaagatggggcttctctttcgatgagatattgaaggaccaggtggggcgggaccagtttctacgattcctggagtccgaattcagttcagaaaacctcaggttctggctggctgtccaagatcttaagaaacaacccctacaggatgtggccaagagggtagaagaaatctggcaagagtttctggctccaggggctccaagtgcaatcaacctggattctcacagctatgagataaccagtcaaaatgtcaaagatggagggagatatacatttgaagacgcccaggagcacatctacaagctgatgaagagtgacagctatgcccgcttcctccggtcaaatgcttaccaggatttgctgctggccaagaagaagccagaaagtgagcaaggtcgtagaacttccctagaaaagttcactcgcagtgtgggaaagtcgctggcgggcaagcgcctcacgggcctgatgcagtcctcctgaccgttcctaccgcaggtccagggcctgggcccgcggaccccacaggcaggcggcggcgctccacatctgcggacagagtttccttacgaggagacttggtcactgtgaaggagaaagagtgagggcaatgaagggcgatggtggggagactcggtgggtgaatggggagaccagaaagaaagagtccacagagcctgggctgggcccggtggaggctcctgtttacagccctctcttctttgtacagttgtattccaacactccactcgctaagaggccctgatcccagctcattcaggggagaacacgtcgtggggttcctgtcacgactatcacttgagattatattattatcctcactccctcgctgtctggagacggtcacaccttctggcaaattcaagaggcatgagtggaccgagagcacatccagcatttgcatcacctccctggcacctcccatagttacagccactacatccccaccgccgcctgtcatccctcacgtctctgtggccacccgggtgtcactgccagcaccaggcactgctttcacgtaaaatgtccaaatcacatcttcagcaagaaagcaacctcacggattgccccgcctcaaggtctttccaccctctttgagatcagcgttcggagaggtccccgccagcccggtggctgccctcaggtcccgtcacatgtctcaagggtccagcgttcgaggaagcactgttgtagatgacagagctttttgtttcacagctgcggggattctgctgaccatcttttagaaaattatttcataatttattctggctttgcccccttgctccttggtttattccctcatgttttactcaaaataaacatggccatgaactcaggggccattgggattctcccctctggcagccccaggtgggagctgggagggtccccagcccaggaggtggctggattgcagggctggcagcccccacgtggtggcatcctgacaggcacagtgagacccttgctgggtcaggtctcctttgtgtgtgaagctggggcagagtatgctacgaagggaccaggccaggccacagggctctcctcccagtctttatctgaaggcccagccaaagcacccctctaaaccggtcacctaggggaaatgcaaaaacctgcaaaagatccacctgtattccctgtgtgtgtgtgtcaaaatgaccatttgccaacctggctgtgaggtaatgtatgtaaagcaccgagtcaggtgcctgatacgcagtaggtgcttagcaaacggtagctaatactatcatcattgtcattgttattgtgacacccatgagcccacagacagagctgtattaagtaacctgttttgaatccagacattcactcccccacttgctatgactaccctcctttgatctatttttggtcataggtaaaaaaaaaaatctctcttgggagcatataaacaaaaaacatagaagcaataaagcgatcgctggtatttcttttctcatgcagccaaattcgccagctggtgaccaaaggctcagatgcttgcttatttgcagacccggcctcctgggtgctccccagtgacccatctttccaccccaccacctccaagtcctgtctatgtctgcttccacacagccctgtccccagggcaccagccttctgtccctcacagcagtgccatcgcgggcattaggagtcttcgttatgttgtatccttgtgagttcttgactaccatgcccaagtttcccccactggcaatggttcctctcttggaggtacagtggaaaccagagagatgacagatgttgagtcctcagtgtctcagaggcagcaattcttgctggacacctgcacatgctcagcacagaggctggtactttggaggcactaaccacttgatgagtaaatcaatggcataaagccccattccaagttatggggtcttttgacaggcccctttcatcctctttctctttgtataaacctcatgtttcagaacaaaattacagtctaagttcatttgcccccagccttgcccaaggatccccgggctgtgctgacccctaggcatagggcaaagggtgttcccaagcagcaggcacctcagtgccctcagttatccagggcaaggggcctggctgccccctgctcctccccatgatgcaggggctttctaagccaggctgcagacagggcagggttggcttcttggccattccctctgtgcccccttctccttctgactggtctcaccctggagatccccagaggatctgaccagagccaggtggactgtggccctgagatggagctggctgcaggcttacaagcacctctggggacatccagaggggagggtcagtaagcacaacggagctagggagacttcagatggactcaaacccagagcaataatactctcacaccaccccacagctaaggcactcatgttccccagtagatcaagccagaagctttgcaagaagggagtggaacgaggctgcctatccaaggtccatctaccacgcagaacttggtcatgcaagtacatttggaaaatctggtcttggcccgtcccccattggcctggtctacacagccaaaaattcagactagattagatgtttgcaggcaattctgtagcaaagcaaattcccctaccccgtcccttccccctagaagctgccttagcctccctgactgggtgtggtctctgggcctaggactcctccctatgaggaaaagtgctctccagccacatcttggcagccccacaaccacagcatcagggcagctgcagcaagtgaccacccacccgtcgggttagacacacaaggcaccaggcactggcatctgactaaaataacctttccctacatgggaagaggaaagcttgtaggctggcacatataaacgtccagccgcagccagatggcctgaactaagcagcaggaactctctgggctggggaggagcctcctgcccttctagaaagtgatgcgtcagctttgttctcctgggaaggtgttgctataccccaggaacaaagcagggcccaactgccagtgcagtcagctgggcctgcgctccaggctcaccaccgctaagtggtcaggtaccgggccagcatcctgggagggacctcttgcgactctgagttgcagcttggactagctgaacacatggggacatgctccaggggcttcttccctggcaggattcctgggatttcaaactacctcaccaacaggacgctgaaccaggagcctgccacccaactggcccccttggtgattgtggaaggtgatgtttttcctaaaatgcatccctcctgttctgctccatatacatgtgcttcaaaaaccaccaccaggaaagccttcccagaagagggaaaggattaagggctctcttcctttgggccctgcagaatgtattggagggaggtgttgctgcaaggtccaggagctgggaaactctgggctcggggggagataatgcaccaccagcctcaaaaaggagctgcccaagttgaatatgtagcaaagaccatgggataagttgaatagtggccagacgaatcactaataactcaccatgggaccctctgaagagaggcctgtgctcgtgtaaccatagcaacagcagatgccagcaacctactcattagtaccacccagtgataaggcatcccctgggctagacccaggggccataaagtagcaaagtagcaaatgtagcaataaagggcccgggtctatacggggacagggtccaaatgaccaggacttggccctctccccagccccgatgagggctcagagccagctgctgtcagctgtctggggagggaaggccctgctccataccaggggtccctgttctatactctaagcccactcaccgcatgatcacggactcatcggaatggcctcctcttagtgcatgtggttctctttagtttatttttctggaatttggggattggaccccagaaccaaacatgctggtacagtctaaaaataaatgacttgaacccacttcaatcc

SEQ ID NO: 17743 - DNA, 664 bp, Homo sapiens
  source 1..664: mol_type = unassigned DNA
atggaaactcggaaccgccgggcggcgcgttccttctcgcccagccttgcaatccatgccgagaggaaggcagtgcgagcccgcgccagcgcccagctcccgggacagggtcggcaatgctgctgagcagaacttgatcgcgctccttcctcgctgctagtggaagcgatgctgcacggcacagctagcgcttccccggctctccttcaagctgaaggttaccgacccgcgcagccagccccagcactgtgagctgcgcgcctcaggtccgggctccggctgcttggcggcggcgcccagggcaacaaccgggccgcccgcgccggggcgcactgcaccagcggcttcggcttggtggatgtgtatgcatgagttctgcaccgaatgggcgcaaaaagcgccccagccggtccacccgctcctcgatcttccagatcagcaagcccccgctgcagagcggagattgggagcgcaggggcagcggctccgagagcgcccacaaaacccaacgagccctggacgactgcaagatgcccggaagatggtgagatccatccagaaatctgtcggctttacatccagctgcagtgctgcttagaaatgtataccacagagatgctaaaatccatatgtctgctggggtctcttcagtttcatcgaaaag

SEQ ID NO: 17744 - DNA, 4160 bp, Homo sapiens
  source 1..4160: mol_type = unassigned DNA
agccttgcaatccatgccgagaggaaggcagtgcgagcccgcgccagcgcccagctcccgggacagggtcggcaatgctgctgagcagaacttgatcgcgctccttcctcgctgctagtggaagcgatgctgcacggcacagctagcgcttccccggctctccttcaagctgaaggttaccgacccgcgcagccagccccagcactgtgagctgcgcgcctcaggtccgggctccggctgcttggcggcggcgcccagggcaacaaccgggccgcccgcgccggggcgcactgcaccagcggcttcggcttggtggatgtgtatgcatgagttctgcaccgaatgggcgcaaaaagcgccccagccggtccacccgctcctcgatcttccagatcagcaagcccccgctgcagagcggagattgggagcgcaggggcagcggctccgagagcgcccacaaaacccaacgagccctggacgactgcaagatgcttgtccaagagttcaacacacaagtggccctgtaccgagagctggtcatttctattggggatgtctcggtcagctgcccctcactccgggcggaaatgcacaagacaagaaccaaaggctgtgaaatggcccgtcaggcacaccaaaaattggctgccatctcaggcccggaagatggtgagatccatccagaaatctgtcggctttacatccagctgcagtgctgcttagaaatgtataccacagagatgctaaaatccatatgtctgctggggtctcttcagtttcatcgaaaaggaaaggaacctggcgggggaaccaagagtttggattgcaaaattgaggagagtgctgaaacacctgccctagaagactcctcatcatcccccgtagatagtcagcaacattcctggcaggtttccacagacattgagaacactgaaagagacatgagagaaatgaaaaaccttttaagcaaactcagggaaactatgcctttaccattgaaaaatcaagatgacagcagccttctgaatctaactccctaccccctggtgagaagacggaagagaaggttctttgggctgtgttgtctcatctcaagctaggtggctcctcctggaaacccactgagaacatctgaaaaaaaatcacaaaacccgaggacctccagacagctgaaccacacagttattggtttttgactatgttttctatgcttccttattacttttatctgcctccccctgcccttttaaatgattttacacttgaaagcagctgccgtcaagaaaaaaaagaacagattcaaaaaccaggctgtttttaaaagggaattttaaagctgacattgtgcatgtctgctccaaaccacgccatgacagatgcaagaattatgatttttaaattatttaaaggttttttaaatgtattatacagaggaaaaatatttcacatataatagtatatctatagctcttgctgatctcatgttaaaatttatcgtatatgaaagaagtctttaaacatagaaatctatttaaaactgaaaaactgtgttcaaaaatccaatctatcaatatcattagaaataatattataagcaaacatataccacctcacctattgctttctctgcactcatttacatttagtcttccattctgtcagaatctaagagcttcaacataaaagtatcttaatttataaagcaacaaaaaccacatatgaaaagtactaaaattttgtaaatacacaataatcctaataccttcgtacaaatgcatatgggcaactaatttctttttgatccaatgatgtctttttcagcttcttggagaatgaagtaatccagttaggaaatggtgtagtaacatatacaattgccctcaaatgtaaaatcaaatattattacattttgttctaattgaaatctgaagcatggtgtctgcacatcagcatagtgttaaatcttatagggcatgctggaattagctcagattataaaaatatttaacattttacattgttaataaagttttttagttaagctaagcttgtctcattttagatgactatgcagataagatttttccaacgtgtacttggtgtcttgtcttatgcttagactcttgaaagcaggacacattaagcaatactatattttagaaaggaggaagccacatgctttgtttttctgctcacagctttgttgtgatcttccttcactaaacttgtaacatggtacaaattttgttataccgtctcctgttcttcctttggcccatttcccagacagaatttcccatgggttgagagatcaagtctttgcactttttttcttgttttccatagtctgaaaaaccttcaagtcagacaggaggcaccagtgtccagtacaatagaaggatgagctagatgccgataagtggtttatccaagacacatctttagtcccaaccctgttctttaccaatacttatgtgcacaggcatttatatgtataccaatatttttacctaaaaactaaatatattaaggccttttgctttagtgaagatgaactactgtaataattattgtattaggttgaattatatgaaatttcctatatgtgactgttttgacctacaaaatggcaatttcttatagttcaccctaatatccaatgtggaaattatacttggaattgtcttctagctcttttgattgaaagtgaaagaattaaagggttggaagagaacgttatacaggtctctatttagatcataccagctggtttttggccttattctttgaatctagagttgtgttccaaggaaccagtaattaatgcatggttataggtatacctggcttcaaaaaaaagaagtagccgtggaaagctatatgagaaaatcacaattttctgaatcaaatatttgtaaaacaatttggctatttaaagactcttagggtaaatactccctggaaaagcaagcaatccagacttatctggtctgcaaaccttgatttcagcttaatatcctttcctgaatctaattcattttcacccactaaggtcatttcatttaagatccattgtttttgaaattttgaagtagcccagtttggcagctctcagcacctgcctctgccctctcctatacttcaactatattgaactctagcttcaatctagttcctactaatccatgcaaaagttattaactgataagcccaatcttgttcagcacgttcttctaaatgcctgacctaaataacttctgcttggttaacttgtgttcattctcaccttagcctcagtgtgaaagtaacacttaccttctgtgcaattgtcctttgtacaactgaagactgttaataaattcaggtctcacctccatgtctgaaaaggctatagtagctattcatggagatgggaatttgtctaattacctagccagagtttgcatatttaaggtaatatattcagctaccgtatcttttattcatagtgcctgttttccagcctttgatcagttttgtagttcccgtggataaactccaagatctaaagatcctctttcagtagcatatactaaaattaagtttagtgctcaaaaccctggtaacctacactggcccaaggttacagtaggtaattcaccgtctcacattagacaggccaatgcatcccttaggagctgccccactctcctctcacctaccaaaggattttctcaggtgtggttccaagcgataaagttctactgtctcggcttcctgctggtaattcgctttcagattagcaataacactgagctgatctctagggttaagaagagaacattgaactcattttgtcgcatgtacccacaggcttgaaacagaaaatgatgtaaacttttgtggcatacattcacccattttcccaccatatctttactatcctgtgttgatttttttttcaaattacaaagacaatacatgttctttgtgggaaatctgaaaaatactaccaaatagaaaataaaaatcacctgaattccaccacgaccacattgtttaaaaccacatttctgggttttaaatcagtcagtggctgggcccaaaggcacttttgggtaagataagtgaagaaatgcccacaaggccaaggtgtcacttaaaaaaacaaacaaaaaaaa

SEQ ID NO: 17745 - DNA, 559 bp, Homo sapiens
  source 1..559: mol_type = unassigned DNA
attgagcatttttccctctcggagctgagacaaatggctgatgagtgaaatcttgagaatgttcacagcttttctctttcattctgttgcagcccggaagatggtgagatccatccagaaatctgtcggctttacatccagctgcagtgctgcttagaaatgtataccacagagatgctaaaatccatatgtctgctggggtctcttcagtttcatcgaaaaggaaaggaacctggcgggggaaccaagagtttggattgcaaaattgaggagagtgctgaaacacctgccctagaagactcctcatcatcccccgtagatagtcagcaacattcctggcaggtttccacagacattgagaacactgaaagagacatgagagaaatgaaaaaccttttaagcaaactcagggaaactatgcctttaccattgaaaaatcaagtcaaaactcggctccacaatggtttactttaaatcaactttcagtggagaagaaaggaaggtggccaagggcaggaattttaatgatgacagcagccttctgaatctaactccctac

SEQ ID NO: 17746 - DNA, 5606 bp, Homo sapiens
  source 1..5606: mol_type = unassigned DNA
gttcagggaccacgcttggagaaccactacactagggcaagcaggaagagagtcctccttctggaactgaagcaggcagtgtgaagacccatgtggaacaccttaacccgaagcctctctgaccatccagttggcaaagaccctcaggccatgaggactggccaaagacagaacaaagggatgaggactcgactgggatgcctgtctcacaagtcagactcgtgtagtgatttcacagctattcttccagacaaacccaaccgcgctctcaagagattatcgacagaagaagctacgaggtgggcagattcctttgatgtgcttctctctcataagtatggggtggctgcattccgtgccttcttgaagacggagttcagtgaggagaacctggaattctggttggcctgtgaggagttcaagaagaccaggtcaactgcaaaactggtctctaaggcccataggatctttgaggagtttgtggatgtgcaggctccacgggaggtaaacattgacttccagacccgagaagccacgaggaagaacctgcaggagccatccctgacttgctttgaccaagcccaaggaaaagtacacagcctcatggagaaagactcttaccccaggttcctgaggtccaaaatgtacttagatctgctgtcccaaagccagaggaggctcagttagacctcagaagggaactcctggaaatcaccggctttcccctccacttgctgccaagatcatattctaatgtgaaatgtcataggtgttcaaaagcggtggcattgggggtgggaggctgggggtgaggagggaatgaagggccattccaaagtatgacccagctgccggagcttggactctattccatttacccatgtttgtgttttggttagtggtagcgccttgccgctgtcacccttttctgggtcagcaacttgcccttcatataatgccttgggtcacctctgctgagagggcagatttgctgtgctaggctaatctgtaaataatgcaaatgcaattcccaccacctccacaccctcctcggttaggattcctgactctccacttgttgtaaatccctgggaggaatagctgaaagacttgggctcaactctgtgatttgtagtggccagctctgctcactgggatctcacagcttaggagagaggtttctgtggaattccaggtttctagttctgtcattgacaggtgacctctcagagaaggagtgaaatccatggagttgtttgtttcttccatttccattggaccagtgtgaaaaactgtgattacttcccatcttggcctaggaaattcacaagactaccctaaccttacatttccagaaagagtcttgggtgatgttcttcatgacttctgaagtggaactgccattaagaaagatacagcttgcaaatcttcctcaattctacgaagaacttttccagaagtcaagagacgagggcaagtagcaccagtagacttctattcaaaggggtaccatgtaacctgtctgttgctcagtgtcttctctgccctcacctctctgcagcatcatacatcactgatgtcttaggatgacagcttggcaaagggaggtgaattcctatagcatggagtgctcccatggtgcctaatactttccctgtatctccacctccccccttccatgccggtcatgtaattatgatgggggagaatgggaatttaggctgaaactctttccagcatacttcctgggaaaatgctttcttagaaagatctctctcttggatactatgaagcaccttctttcttgatctttgaccttttggaattgagcatgaaataggaggtgtggctaagaagatcactgtgaacatctggacgtggacaaccttcctaaaatgctttcatggtaccctgcagctgctcttggaaatgtgtcaggcaattcttccttggaggatgagtgagcagcctggaacctactctagccacccaggaaaaagctgactttggcacaagactagtgcccaggagatgaacctttagcagagagaccggaaagtgaaagaggggcatgtaagaggctggtttccaggtggagaggataacagagtggagttactattggaataattcacgaccagtggatttggattcattgcagatctacaaaacgttcagcttgactaagtggaacagcacatgattaggcataagctctggagtgcagatgattgagaactgggctgaaccattttccttttaaggggtgaggggccttttaacgttatgctggtggcgttctagtgcttgtgttcctctccagtaactttgagaatctcttccttttttagctatagctagaccaggccaagaaagcccttgagtcccactagtgctagggccactgcactgctacagcacattgttatctgtgagtgagggtgggtgtgactgtgtgaacctcaaggggagagaagaacacatgtctcctagccctcacagacaccgaaaagacctgtggaattttgtgtttgagaactccaaagcctcaaatgggtgttcctagttagatcaggtagtatcctcccaaccgtggttaaaaaaacaaatcattctttcttagataaagctgccagaattaatttaatgattaaattctctaacagggtattttaaacattgtttacatatgaaatgtgcatctgctgccaactctactgtcgaatatgaggtgcatataaattagaactgcacagagttatagaaatgtgaaacattctgaaaggggatttttctccacttccactattccaaggagaaaagcctgaacaagagtgtcgtgcgatggcctcatagagaggcctagagttcttgccaactattgaggaaacgaaggctgcagatggtggtgtcatggcgccctggtgacttcctcccacaatggggaggtgtgaaagaccaagcttggggatcctgaattttgcagctaagcaagggtatgtgggcatgtgtccatgtgtagaggaacgtgatagctaaatttatggtactcctgtggagtgtctctgtgtgtttgtgtgtgtgtgacaactgtgagcattagactagtacacggcagacatgatcttcccgtggggtggagctttcctcataccttgtatgccctgcttcccacaagaggcacagagctctccactctgatgcctactttcaggcactctggtcgtgccaacccagattttggtctgtgatgaaacaaagagaaatgtttacaacatctagagcaatatccaagcatacctcatccctgagcttccatgtttcccagtcctgccctctctcccattgcctcttccgcaagcccatgtccttgggtatcacttccatttatttcctgtcttccttggctcctcaagccgagcctgtgctgtggacttgccttctggacttgaggcttgctcagtcctgggcctatgcaggctccaggcaagccagggcagggcaagtccaggcaagtctaggcagagctgtgacttctagaattgctctccatccctgagtgatcttgccccactggagggctaacttgtttgggggctggtgtgagattcgtcattgcccttggcaaactaaatagaatactgtcagtatcaaccattcatggccttgggcacctctggggtgaggaagaatcctctgaggcagtccttctcattaaacttgagcatgcacaggaatcacctggaaagcctgtgacacgtgctaattcccaggtgcacacccagagatgctgatctgatagacctgagatggggcccagaaatccacatttttaataagttcctagatggctagtggcctgtggacttggactcttagacagagtctcacgaccttggctgctccttagaatcacctagggagtttttaaaacccagatgtccaggtcccaccccagaacagccaaatcagaagcttttgttagagacccaggcatcagtcatttttaaagctccacaggtgattccaatgtgcagctgaacttaggaagcattgagtctaaggagtgaggaggaacacagcgcgggggcgggggggctgggggaggggggagacacagctgtgtgggccaagggggctggtgtatctccacatgcaagcacgtagataccgaggaacctggccagccctgcagcctgactcgggatggctgcctctatgccctctgcgtctgactttctcctttgagataaaggtgttttggcccaagctgagtgcattgctgggcagcggccatgccgaaggtggtagctgaagggacccttgatcgaaagacgctctgccatgctttctgagtcctgtctcctccaagcttgtctcctagactgtttcccctgtctgttttcctgcgcccttgtgtttggccatttttgcattaggctgtgtctctgtacccaaggccacgtgacaaggtagttggaacccccactcaagtggtgagtgaagagcgtcgtggtaataataatagtagtaacacaacttccaaatttctcagtggagagtgtcacgtcctgggggtatcaagatctgtgaggcctttccaagccctcaccattccctctttggtcccacgttgggtgggcagctgggaaggtcctagttgattttaatctccggtgctttccccagaactgctgctctgaataaaccaaagctgtgaaagagtgttctgcgcaggctgcgggcccagcctctgggtgcaggccctgggcacttgagctgagcagctcagctggctctgctgtgagggaaagccgtgaacttaactgtgctgagagctgggtgagggcaaaatggggaagactgaagaagaaggagcaggtgggagagaccagccgctaacatggtgtctacttctccgtggatcagagaagggatgagtagcaaatgcagaggcagggtggtctcccagcaacaaggatgtccagagttctcctgaccctgtctgcacccacttccatgcaaggcagaggcatcacagttttccatcccaggccacccttcactcttccaagtgtcaggcctctttaaatctgcatccctttgggttagaagcaagagaggtggcaaagtctccctggcactgagagcctgtcccaccatgccactcggcatgagatggtggaggaagaagccaagagcagggatgccttcctgtccccgtggcctctcaggactccacaagatgctgtggaccaagatgagagatttcaggatggggccactggccttcctaggttgggctctgggtcctttcaataaactgttcctttcctgattcttactcccttctggtccttccactcccttccctctgccaggtatggaaaaggtggctgggctcggtgtgcgctccaaccccggtagcattagctgagtcacgcggcgagcacacaacagatttgtagcagctcatctgccatataaaccgcttggctgatggagtcctcattgagttttttcattatcgtgtaaagtggaatcatgtcattcacctttactataaacaaggctgtgagaacataataaacagaacctgaacaagc

SEQ ID NO: 17747 - DNA, 1432 bp, Homo sapiens
  source 1..1432: mol_type = unassigned DNA
gcttcagtatttactggatgtgacaagcagagagaagagctttcagtggggccgcttgctgcctggctcaagtggtgggagaacaccttaacccgaagcctctctgaccatccagttggcaaagaccctcaggccatgaggactggccaaagacagtgagaggacgtgcaagggtaaattcctgagccccgcagtcttatttcctgccctgacgtccctgcataccagcccaagggttaaccgtaagctgatgcctgtatggcggccttactgatgccacgcaggaacaaagggatgaggactcgactgggatgcctgtctcacaagtcagactcgtgtagtgatttcacagctattcttccagacaaacccaaccgcgctctcaagagattatcgacagaagaagctacgaggtgggcagattcctttgatgtgcttctctctcataagtatggggtggctgcattccgtgccttcttgaagacggagttcagtgaggagaacctggaattctggttggcctgtgaggagttcaagaagaccaggtcaactgcaaaactggtctctaaggcccataggatctttgaggagtttgtggatgtgcaggctccacgggaggtaaacattgacttccagacccgagaagccacgaggaagaacctgcaggagccatccctgacttgctttgaccaagcccaaggaaaagtacacagcctcatggagaaagactcttaccccaggttcctgaggtccaaaatgtacttagatctgctgtcccaaagccagaggaggctcagttagacctcagaagggaactcctggaaatcaccggctttcccctccacttgctgccaagatcatattctaatgtgaaatgtcataggtgttcaaaagcggtggcattgggggtgggaggctgggggtgaggagggaatgaagggccattccaaagtatgacccagctgccggagcttggactctattccatttacccatgtttgtgttttggttagtggtagcgccttgccgctgtcacccttttctgggtcagcaacttgcccttcatataatgccttgggtcacctctgctgagagggcagatttgctgtgctaggctaatctgtaaataatgcaaatgcaattcccaccacctccacaccctcctcggttaggattcctgactctccacttgttgtaaatccctgggaggaatagctgaaagacttgggctcaactctgtgatttgtagtggccagctctgctcactgggatctcacagcttaggagagaggtttctgtggaattccaggtttctagttctgtcattgacaggtgacctctcagagaaggagtgaaatccatggagttgtttgtttcttccatttccattggaccagtgtgaaaaactgtgattacttcccatcttggccta

SEQ ID NO: 17748 - DNA, 859 bp, Homo sapiens
  source 1..859: mol_type = unassigned DNA
ggaccacgcttggagaaccactacactagggcaagcaggaagagagtcctccttctggaactgaagcaggcagtgtgaagacccatgtggaacaccttaacccgaagcctctctgaccatccagttggcaaagaccctcaggccatgaggactggccaaagacagtgagaggacgtgcaagggtaaattcctgagccccgcagtcttatttcctgccctgacgtccctgcataccagcccaagggttaaccgtaagctgatgcctgtatggcggccttactgatgccacgcaggaacaaagggatgaggactcgactgggatgcctgtctcacaagtcagactcgtgtagtgatttcacagctattcttccagacaaacccaaccgcgctctcaagagattatcgacagaagaagctacgaggtgggcagattcctttgatgtgcttctctctcataagtatggggtggctgcattccgtgccttcttgaagacggagttcagtgaggagaacctggaattctggttggcctgtgaggagttcaagaagaccaggtcaactgcaaaactggtctctaaggcccataggatctttgaggagtttgtggatgtgcaggctccacgggaggtaaacattgacttccagacccgagaagccacgaggaagaacctgcaggagccatccctgacttgctttgaccaagcccaaggaaaagtacacagcctcatggagaaagactcttaccccaggttcctgaggtccaaaatgtacttagatctgctgtcccaaagccagaggaggctcagttagacctcagaagggaactcctggaaatcaccggctttcccctccacttgct

SEQ ID NO: 17749 - DNA, 843 bp, Homo sapiens
  source 1..843: mol_type = unassigned DNA
gggaggtgtgttgtgcatgcctgtgtgtgtatatgtgtgtgtgtgcccctatgtgttcatgcacacatgcccttcactcgccgaggatttgactgctaaaagaaagatctactttttccccagaacaccttaacccgaagcctctctgaccatccagttggcaaagaccctcaggccatgaggactggccaaagacagtgagaggacgtgcaagggtaaattcctgagccccgcagtcttatttcctgccctgacgtccctgcataccagcccaagggttaaccgtaagctgatgcctgtatggcggccttactgatgccacgcaggaacaaagggatgaggactcgactgggatgcctgtctcacaagtcagactcgtgtagtgatttcacagctattcttccagacaaacccaaccgcgctctcaagagattatcgacagaagaagctacgaggtgggcagattcctttgatgtgcttctctctcataagtatggggtggctgcattccgtgccttcttgaagacggagttcagtgaggagaacctggaattctggttggcctgtgaggagttcaagaagaccaggtcaactgcaaaactggtctctaaggcccataggatctttgaggagtttgtggatgtgcaggctccacgggaggtaaacattgacttccagacccgagaagccacgaggaagaacctgcaggagccatccctgacttgctttgaccaagcccaaggaaaagtacacagcctcatggagaaagactcttaccccaggttcctgaggtccaaaatgtacttagatctgctgtcccaaagccagaggaggctcagttag

SEQ ID NO: 17750 - DNA, 781 bp, Homo sapiens
  source 1..781: mol_type = unassigned DNA
gtgatgctgacactgctggttcagggaccacgcttggagaaccactacactagggcaagcaggaagagagtcctccttctggaactgaagcaggcagtgtgaagacccatgtggaacaccttaacccgaagcctctctgaccatccagttggcaaagaccctcaggccatgaggactggccaaagacagtgagaggacgtgcaagggtaaattcctgagccccgcagtcttatttcctgccctgacgtccctgcataccagcccaagggttaaccgtaagctgatgcctgtatggcggccttactgatgccacgcaggaacaaagggatgaggactcgactgggatgcctgtctcacaagtcagactcgtgtagtgatttcacagctattcttccagacaaacccaaccgcgctctcaagagattatcgacagaagaagctacgaggtgggcagattcctttgatgtgcttctctctcataagtatttcacaaaagaagagctgtgatcctgatgctattctcatcatgaatttcaaagcagtgatttgtttctggatcaaagaagttttggcatcactattagtatatgtatcctggattttagaaatgtaatttccattcttttcctctatctggtcttggaacccattcaccagcttattttctccagttgttcggggatacaagaggactctggtttttaggacagcattttcataaatagagaacttaaaataaattgtttttgttgttgtgctcttgtatttttccaagcctggg

SEQ ID NO: 17751 - DNA, 563 bp, Homo sapiens
  source 1..563: mol_type = unassigned DNA
ctttacgctccccactcccggtgcagcagccaaccttcagccagcagcggggctcattagaagagggtcccctggacacttgatttttagctcactggtgactggaaagagttaatacctattctttgctgccccccgcacagcctctgggtgcagagggaggcagctgtgggctgtggggacttctccctgagctgcagccagaggagcttcagaacaccttaacccgaagcctctctgaccatccagttggcaaagaccctcaggccatgaggactggccaaagacagtgagaggacgtgcaagggtaaattcctgagccccgcagtcttatttcctgccctgacgtccctgcataccagcccaagggttaaccgtaagctgatgcctgtatggcggccttactgatgccacgcaggaacaaagggatgaggactcgactgggatgcctgtctcacaagtcagactcgtgtagtgatttcacagctattcttccagacaaacccaaccgcgctctcaagagattatcgacagaagaagctacgaggtgggcagattccttt

SEQ ID NO: 17752 - DNA, 566 bp, Homo sapiens
  source 1..566: mol_type = unassigned DNA
cccttttcatgagatgcagagcctggagaggagcggagccggcaggagcagcatgttgcagccgctattctaggggcgctgggtgaagtgggctgccctctgccaccctctcccaggtgccaggaggaggtggctgactctatcactcagggcctcaccgaaccatgcccagctggggcccgcaccagccacaccttcccagctgcgctgcccaccgccaggtgatgctgacactgctggttcagggaccacgcttggagaaccactacactagggcaagcaggaagagagtcctccttctggaactgaagcaggcagtgtgaagacccatgtggaacaccttaacccgaagcctctctgaccatccagttggcaaagaccctcaggccatgaggactggccaaagacagtgagaggacgtgcaagggtaaattcctgagccccgcagtcttatttcctgccctgacgtccctgcataccagcccaagggttaaccgtaagctgatgcctgtatggcggccttactgatgccacgcaggaacaaagggatgaggactcgactggga

SEQ ID NO: 17753 - DNA, 2736 bp, Homo sapiens
  source 1..2736: mol_type = unassigned DNA
aagttggaggcgcctagtgagggtcagggaggcccggcccgcgccctccccgcccagccgcctccccgtcgaccacccagggctggggcgagccaggctgcctttcgaacttgggggcttctcctcttgtctcccactggtgctctggccgtgaatccatccaggcgccaggagatgacaatccggtaccaaggccggcagtacaggctgaggatggcatttctccaaaaggtttccaagctgcgtcctgggcctggagactgagacagagatccacggactgcagtgcaggcagcccaccccagatccgagtcatataaggttgaaatatcagtaaaaaacatgcagacccaaagatggggaccaaaatccaaagccagagggtcctggaaatcagagggtcttacaacataacaggcagtacaggccatggctcaggctaggcgtggaacagactgcagttctcttctacaaatcaatctagactggacagacagaactccaagggaggaaagaaaaatgaatctgatgttacttcttgaaaccacattttctgaagtcaccatttttatgtatctatcaactcatcatttttatgtatatatcaatatgattttatgatcttattttttcctactaatgtgatgaattaccttgattgattttagaatattaaatcacttttgtattcctggaataaaccctagatggatgcttgattttttctaattccttagcaaaaatgctaatattttatttaggattttgcatctatattcacaagtgaggatttttttcctctcctgacaccaaccaattctccaacacaaactgagtgtcctacaattcaatttaattctgacactacccagagttagcattagcctccacagatttaaggcctcagccctacaagactgtcccaatcagactccagttgcaagtcctgggccacccatacttctgggcaactggttacaaattgggggttcttatgaccacctcccacaggcttgacaatttgctagaatgattagtggaaagcaagaaagtgcttaacttaatattactggtttattacaaaggatacaattcaggaaaagccaaatggaagtgatgcatggagcaaggcaagggagaatgagcacagagctttcctaccctctccaggcacaccactctcccagcaccttgatgtgttcaccaacctggaagctctctgaaccccatcatttagaggttttaatggaagtttcattacataggcatgacttttttttttttttttttttttttttttttgagacggagtctcgctctgtcgcccaggctggagtgcagtggcaccatctcggctcactgcaacctccaccccccaggttcaagcaattctcctgcctcagcctcccaagtagttgggactacaggtggacaccaccatgcccagctaatttttgtatctttagtagagacggggtttcaccatgttggccaggctggtcttgaactcctgacctcaggtgatccgcctgccttggcttcccaaagtgctgggattataggcatgagccctacatagcaatgactgattgaatctttgaacactggtgattacttcaatctccagccccttgtccctctcccctccccagaagtcagtgggtggggctaaaagttccaaccctctaatcatgcctagttctcctttttttttttttagttgtttatttttcttggcatgcagaataagagctattgtctaggtctttctggtgacctcttcatcctgaactacctagaagcctccagccactagtcatttcattagtatacaaaagacactcttgccattgtggagatttcaggagtttcgggagccatgtgccaggaaccagggacaaaacccaaatatttattttttctcataccacaatgattgacattggtctgtaattttttctgcttataatatcctagtccagtttttctattaaggttatggccacataaaaagagttgggaactatactctgttttgctattctttggtagagtttgtccaagtttatgcaagattggtattattcttttttttttagagacaggttctcactctgtcacccagactggagtagcagtgatgccatcacagctcattcactataaccttgaactcctgggctcaagcaatcctcccacctaagcctcctaagtacctgggactacaggtgcacgctgccatgccctgctaatttttaaatttttggtagaggcggtgccttactgtattgtccaggctggtcttgaactcctagactcaagtgattctcctacctcagcctcccaaagtgctgggtgtataggtgtgagccaccacacacagcccatggtattattctttaaatatttggaagaattaactgatgaagcaagccatctggggcttggaattctttgtgagaagttcttgaatagattccatttatttatgagatattggctattcagattttacttttttatgtgggctttggaaagttgtatttttcagggggtttgtctattttatccaagttgtcaatattttggtgtaaagacaataatattctcttatctttgttatatttgtgggatctgtattgatattcctttctaatattgaaaatttgtcttttttgtttctgttgatcagtattgtttggagtctatcaatataaataatattttcaaataacc

SEQ ID NO: 17754 - DNA, 1144 bp, Homo sapiens
  source 1..1144: mol_type = unassigned DNA
gagggtcagggaggcccggcccgcgccctccccgcccagccgcctccccgtcgaccacccagggctggggcgagccaggctgcctttcgaacttgggggcttctcctcttgtctcccactggtgctctggccgtgaatccatccaggcgccaggagatgacaatccggtaccaaggccggcagtacaggctgaggatggcatttctccaaaaggtttccaagctgcgtcctgggcctggagactgagacagagatccacggactgcagtgcaggcagcccaccccagatccgagtcatataaggttgaaatatcagtaaaaaacatgcagacccaaagatggggaccaaaatccaaagccagagggtcctggaaatcagagggtcttacaacataacaggcagtacaggccatggctcaggctaggcgtggaacagactgcagttctcttctacaaatcaatctagactggacagacagaactccaagggaggaaagaaaaatgaatctgatgttacttcttgaaaccacattttctgaagtcaccatttttatgtccagtcacatcttctatgcctatctcagctgctgacacgtgactcagctgctcccattttccttggaaaagtaggagctggaaaggacctcagtcagaggtcatccacatcaaccatctcatttcactgatgaggaaactgagacttggaccaggggaagtcagctgccatgttgtgaggacactcaagcaatcctatggagaggcccatgtgatgaggaactgaagcctcctgccaacagccatgtgagggcaccatcttggaagcagatccgccaacttcacccaagccttcagatgaatatagccctgaccgacatcttcactacaatctcatgagagaacctgcgccagcactacctagctatgatgctgcaaaattcctgacccatagaaactgtgagataataaatgcctgttgtgttaagccacaagttttgtggaaatttgttactcagcaataactaacatgagagttagctgaaggtcacattcttgttgagtagtggaaagggttttgttaacccttcacccactgtggttcacttgataaatgatagatgaataaagagtgaaaatgagcacaaaa

SEQ ID NO: 17755 - DNA, 563 bp, Homo sapiens
  source 1..563: mol_type = unassigned DNA
cgtcgaccacccagggctggggcgagccaggctgcctttcgaacttgggggcttctcctcttgtctcccactggtgctctggccgtgaatccatccaggcgccaggagatgacaatccggtaccaaggccggcagtacaggctgaggatggcatttctccaaaaggttgaaatatcagtaaaaaacatgcagacccaaagatggggaccaaaatccaaagccagagggtcctggaaatcagagggtcttacaacataacaggcagtacaggccatggctcaggctaggcgtggaacagactgcagttctcttctacaaatcaatctagactggacagacagaactccaagggaggaaagaaaaatgaatctgatgttacttcttgaaaccacattttctgaagtcaccatttttatgtatctatcaactcatcatttttatgtatatatcaatatgattttatgatcttattttttcctactaatgtgatgaattaccttgattgattttagaatattaaatcacttttgtattcctggaataaaccctagatggatgcttga

SEQ ID NO: 17756 - DNA, 2308 bp, Homo sapiens
  source 1..2308: mol_type = unassigned DNA
atgacaatccggtaccaaggccggcagtacaggctgaggatggcatttctccaaaagattgaagcgctcgtgaaggacatgcagaacccagagacaggggtccgaatgcagaaccagagggtcctggtcaccagcgttcctcatgccatgacaggaagtgatgttctgcaatggatcgtccagcggctttggatctccagtctggaggcacagaacttgggcaactttattgtcaggtatggctacatttaccccctgcaagaccccaagaatctcattctcaagcctgatggcagcctctacagatttcagacaccgtatttctggcccacccagcagtggccagctgaagataccgattacgccatctatctggccaagcgaaatatcaaaaagaaagggattttggaagaatatgaaaaggaaaattacaatttcttgaaccaaaaaatgaactataagtgggactttgtcattatgcaggccaaagagcagtacagggctggaaaggagaggaacaaagcagacagatatgccctggactgccaggagaaggcatactggctggtgcaccgatgccctcctggaatggacaatgtgctggactacggcctggaccgagtgaccaatccgaatgaagtcaaggtaaaccagaaacaaacagtcgttgctgtcaaaaaagagatcatgtattaccaacaggccttgatgaggtccacagtgaagtcttctgtgtccctgggagggattgtgaaatacagtgagcagttctcatccaacgatgccatcatgtcaggctgcctccccagcaacccctggatcaccgatgacacccagttctgggacttaaatgccaaattggtggaaatcccaaccaagatgcgagtggaacgatgggccttcaacttcagcgaattgatccgagaccccaaaggtcgacagagcttccagtacttcctcaagaaagaattcagtggagagaatctgggattctgggaagcctgcgaggatctgaagtatggagatcagtccaaagtcaaggagaaagcagaggagatttacaagctgttcctggccccgggggcgaggcgctggatcaacatagatggcaaaaccatggacatcacagtgaaggggctgaagcacccccaccgctatgtgctggacgccgcacaaacccacatttacatgctcatgaagaaggattcttatgctcgctatttaaaatctccgatctataaggacatgctggccaaagctattgaacctcaggaaaccaccaagaaaagctccaccctcccttttatgcggcgtcacctgcgctccagcccaagccctgtcatcctgagacagctggaagaggaagccaaggcccgagaagcagccaacactgtggacatcacccagccgggccagcacatggctcccagcccccatctgaccgtgtacaccgggacctgcatgcccccgtctccttctagccccttctcctcctcctgccgctcccccaggaagcctttcgcctcacccagccgcttcatccggcgacccagcaccaccatctgcccctcacccatcagagtggccttggagagctcatcgggcttggagcagaaaggggagtgcagcgggtccatggccccccgtgggccctctgtcaccgagagcagcgaggcctccctcgacacctcctggcctcgcagccggcccagggcccctcctaaggcccgcatggctctgtccttcagcaggtttctgagacgaggctgtctggcctcacctgtctttgccaggctctcacccaagtgccctgctgtgtcccacgggagggtgcagcccctgggggacgtgggccagcagctgccacgattgaaatccaagagagtagcaaactttttccagatcaaaatggatgtgcccacggggagcgggacctgcttgatggactcggaggatgctggaacaggagagtcgggtgaccgggccacagaaaaggaggtcatctgcccctgggagagcctgtaaggaaagaggcaggctgagctgggggctctggaccaggaagatgctctgacagatgccatggtatgggccacaggacacacttgctcgagaaccaaagtgcatttgggtgacatttgaagattggggagacaagatggggtagattgtggcaaagaatgctctggctggttaccaggggccaactccttctcctcttcctgaccctccctcccctgggcagaagaaacgcatgtggaccagaagactttccctgctgccttaaaaccaataaaaggttaacttt

SEQ ID NO: 17757 - DNA, 761 bp, Homo sapiens
  source 1..761: mol_type = unassigned DNA
tccccgtcgacgcccagggctggggcgagccaggctgcctttcgaacttggggggcttctcctcttgtctcccactggtgctctggctgtgaatccatccaggggccaggatgacaatccgacaccaaggccagcagtacaggccgaggatggcatttctccaaaagattgaagcgctcgtgaaggacatgcagaacccagagacaggggtccgaatgcagaaccagagggtcctggtcaccagcgttcctcatgccatgacaggaagtgatgttctgcaatggatcgtccagcggctttggatctccagtctgggtgagagctcatctggcactcagttatccgggacagctttgtgtacagcaccatgggagaaactaaatagagacttagcctgtgtttctgagaaatttacattttaattggacagacatgaccttcgtgtgtaaaagtaccagaatcaaaagcaaaggcaggataatttggggacgaaagagttattttgtacaaaatatttagagcataaataacagggataagtggggaggactcagtcaagaaagtcctggagggggtgctgtgtatagctggtcttgaaagaagtgatgcttgtgaattggtgaagaggagctctgagggtcttcctataaggggacactagcaagagcaatggtttagaaatggaatgagtggaaagtggaggagtgacaagggagattgagagtcatggctccagatggctatggagggtggcagagggg

SEQ ID NO: 17758 - DNA, 2078 bp, Homo sapiens
  source 1..2078: mol_type = unassigned DNA
ggctggggcgagccaggctgcctttcgaacttggggggcttctcctcttgtctcccactggtgctctggctgtgaatccatccaggggccaggatgacaatccgacaccaaggccagcagtacaggccgaggatggcatttctccaaaagattgaagcgctcgtgaaggacatgcagaacccagagacaggggtccgaatgcagaaccagagggtcctggtcaccagcgttcctcatgccatgacaggaagtgatgttctgcaatggatcgtccagcggctttggatctccagtctggaggcacagaacttgggcaactttattgtcaggtatggctacatttaccccctgcaagaccccaagaatctcattctcaagcctgatggcagcctctacagatttcagacaccgtatttctggcccacccagcagtggccagctgaagataccgattacgccatctatctggccaagcgaaatatcaaaaagaaagggattttggaagaatatgaaaaggaaaattacaatttcttgaaccaaaaaatgaactataagtgggactttgtcattatgcaggccaaagagcagtacagggctggaaaggagaggaacaaagcagacagatatgccctggactgccaggagaaggcatactggctggtgcaccgatgccctcctggaatggacaatgtgctggactacggcctggaccgagtgaccaatccgaatgaagtcaagaaacaaacagtcgttgctgtcaaaaaagagatcatgtattaccaacaggccttgatgaggtccacagtgaagtcttctgtgtccctgggagggattgtgaaatacagtgagcagttctcatccaacgatgccatcatgtcaggctgcctccccagcaacccctggatcaccgatgacacccagttctgggacttaaatgccaaattggtggaaatcccaaccaagatgcgagtggaacgatgggccttcaacttcagcgaattgatccgagaccccaaaggtcgacagagcttccagtacttcctcaagaaagaattcagtggagagaatctgggattctgggaagcctgcgaggatctgaagtatggagatcagtccaaagtcaaggagaaagcagaggagatttacaagctgttcctggccccgggggcgaggcgctggatcaacatagatggcaaaaccatggacatcacagtgaaggggctgaagcacccccaccgctatgtgctggacgccgcacaaacccacatttacatgctcatgaagaaggattcttatgctcgctatttaaaatctccgatctataaggacatgctggccaaagctattgaacctcaggaaaccaccaagaaaagctccaccctcccttttatgcggcgtcacctgcgctccagcccaagccctgtcatcctgagacagctggaagaggaagccaaggcccgagaagcagccaacactgtggacatcacccagccgggccagcacatggctcccagcccccatctgaccgtgtacaccgggacctgcatgcccccgtctccttctagccccttctcctcctcctgccgctcccccaggaagcctttcgcctcacccagccgcttcatccggcgacccagcaccaccatctgcccctcacccatcagagtggccttggagagctcatcgggcttggagcagaaaggggagtgcagcgggtccatggccccccgtgggccctctgtcaccgagagcagcgaggcctccctcgacacctcctggcctcgcagccggcccagggcccctcctaaggcccgcatggctctgtccttcagcaggtttctgagacgaggctgtctggcctcacctgtctttgccaggctctcacccaagtgccctgctgtgtcccacgggagggtgcagcccctgggggacgtgggccagcagctgccacgattgaaatccaagagagtagcaaagtaagaacccgaaggggacgtgccgtatgcatgggtggctgtgggtgtgcaggcctctgcatgtgaatatgcatgctttgggctggggactgggatgggtga

SEQ ID NO: 17759 - DNA, 2387 bp, Homo sapiens
  source 1..2387: mol_type = unassigned DNA
ggcgagccaggctgcctttcgaacttggggggcttctcctcttgtctcccactggtgctctggctgtgaatccatccaggggccaggatgacaatccgacaccaaggccagcagtacaggccgaggatggcatttctccaaaagattgaagcgctcgtgaaggacatgcagaacccagagacaggggtccgaatgcagaaccagagggtcctggtcaccagcgttcctcatgccatgacaggaagtgatgttctgcaatggatcgtccagcggctttggatctccagtctggaggcacagaacttgggcaactttattgtcaggtatggctacatttaccccctgcaagaccccaagaatctcattctcaagcctgatggcagcctctacagatttcagacaccgtatttctggcccacccagcagtggccagctgaagataccgattacgccatctatctggccaagcgaaatatcaaaaagaaagggattttggaagaatatgaaaaggaaaattacaatttcttgaaccaaaaaatgaactataagtgggactttgtcattatgcaggccaaagagcagtacagggctggaaaggagaggaacaaagcagacagatatgccctggactgccaggagaaggcatactggctggtgcaccgatgccctcctggaatggacaatgtgctggactacggcctggaccgagtgaccaatccgaatgaagtcaaggtaaaccagaaacaaacagtcgttgctgtcaaaaaagagatcatgtattaccaacaggccttgatgaggtccacagtgaagtcttctgtgtccctgggagggattgtgaaatacagtgagcagttctcatccaacgatgccatcatgtcaggctgcctccccagcaacccctggatcaccgatgacacccagttctgggacttaaatgccaaattggtggaaatcccaaccaagatgcgagtggaacgatgggccttcaacttcagcgaattgatccgagaccccaaaggtcgacagagcttccagtacttcctcaagaaagaattcagtggagagaatctgggattctgggaagcctgcgaggatctgaagtatggagatcagtccaaagtcaaggagaaagcagaggagatttacaagctgttcctggccccgggggcgaggcgctggatcaacatagatggcaaaaccatggacatcacagtgaaggggctgaagcacccccaccgctatgtgctggacgccgcacaaacccacatttacatgctcatgaagaaggattcttatgctcgctatttaaaatctccgatctataaggacatgctggccaaagctattgaacctcaggaaaccaccaagaaaaggcaactccaccctcccttttatgcggcgtcacctgcgctccagcccaagccctgtcatcctgagacagctggaagaggaagccaaggcccgagaagcagccaacactgtggacatcacccagccgggccagcacatggctcccagcccccatctgaccgtgtacaccgggacctgcatgcccccgtctccttctagccccttctcctcctcctgccgctcccccaggaagcctttcgcctcacccagccgcttcatccggcgacccagcaccaccatctgcccctcacccatcagagtggccttggagagctcatcgggcttggagcagaaaggggagtgcagcgggtccatggccccccgtgggccctctgtcaccgagagcagcgaggcctccctcgacacctcctggcctcgcagccggcccagggcccctcctaaggcccgcatggctctgtccttcagcaggtttctgagacgaggctgtctggcctcacctgtctttgccaggctctcacccaagtgccctgctgtgtcccacgggagggtgcagcccctgggggacgtgggccagcagctgccacgattgaaatccaagagagtagcaaactttttccagatcaaaatggatgtgcccacggggagcgggacctgcttgatggactcggaggatgctggaacaggagagtcgggtgaccgggccacagaaaaggaggtcatctgcccctgggagagcctgtaaggaaagaggcaggctgagctgggggctctggaccaggaagatgctctgacagatgccatggtatgggccacaggacacacttgctcgagaaccaaagtgcatttgggtgacatttgaagattggggagacaagatggggtagattgtggcaaagaatgctctggctggttaccaggggccaactccttctcctcttcctgaccctccctcccctgggcagaagaaacgcatgtggaccagaagactttccctgctgccttaaaaccaataa

SEQ ID NO: 17760 - DNA, 2384 bp, Homo sapiens
  source 1..2384: mol_type = unassigned DNA
ctttcgaacttggggggcttctcctcttgtctcccactggtgctctggctgtgaatccatccaggggccaggatgacaatccgacaccaaggccagcagtacaggccgaggatggcatttctccaaaagattgaagcgctcgtgaaggacatgcagaacccagagacaggggtccgaatgcagaaccagagggtcctggtcaccagcgttcctcatgccatgacaggaagtgatgttctgcaatggatcgtccagcggctttggatctccagtctggaggcacagaacttgggcaactttattgtcaggtatggctacatttaccccctgcaagaccccaagaatctcattctcaagcctgatggcagcctctacagatttcagacaccgtatttctggcccacccagcagtggccagctgaagataccgattacgccatctatctggccaagcgaaatatcaaaaagaaagggattttggaagaatatgaaaaggaaaattacaatttcttgaaccaaaaaatgaactataagtgggactttgtcattatgcaggccaaagagcagtacagggctggaaaggagaggaacaaagcagacagatatgccctggactgccaggagaaggcatactggctggtgcaccgatgccctcctggaatggacaatgtgctggactacggcctggaccgagtgaccaatccgaatgaagtcaagaaacaaacagtcgttgctgtcaaaaaagagatcatgtattaccaacaggccttgatgaggtccacagtgaagtcttctgtgtccctgggagggattgtgaaatacagtgagcagttctcatccaacgatgccatcatgtcaggctgcctccccagcaacccctggatcaccgatgacacccagttctgggacttaaatgccaaattggtggaaatcccaaccaagatgcgagtggaacgatgggccttcaacttcagcgaattgatccgagaccccaaaggtcgacagagcttccagtacttcctcaagaaagaattcagtggagagaatctgggattctgggaagcctgcgaggatctgaagtatggagatcagtccaaagtcaaggagaaagcagaggagatttacaagctgttcctggccccgggggcgaggcgctggatcaacatagatggcaaaaccatggacatcacagtgaaggggctgaagcacccccaccgctatgtgctggacgccgcacaaacccacatttacatgctcatgaagaaggattcttatgctcgctatttaaaatctccgatctataaggacatgctggccaaagctattgaacctcaggaaaccaccaagaaaagctccaccctcccttttatgcggcgtcacctgcgctccagcccaagccctgtcatcctgagacagctggaagaggaagccaaggcccgagaagcagccaacactgtggacatcacccagccgggccagcacatggctcccagcccccatctgaccgtgtacaccgggacctgcatgcccccgtctccttctagccccttctcctcctcctgccgctcccccaggaagcctttcgcctcacccagccgcttcatccggcgacccagcaccaccatctgcccctcacccatcagagtggccttggagagctcatcgggcttggagcagaaaggggagtgcagcgggtccatggccccccgtgggccctctgtcaccgagagcagcgaggcctccctcgacacctcctggcctcgcagccggcccagggcccctcctaaggcccgcatggctctgtccttcagcaggtttctgagacgaggctgtctggcctcacctgtctttgccaggctctcacccaagtgccctgctgtgtcccacgggagggtgcagcccctgggggacgtgggccagcagctgccacgattgaaatccaagagagtagcaaactttttccagatcaaaatggatgtgcccacggggagcgggacctgcttgatggactcggaggatgctggaacaggagagtcgggtgaccgggccacagaaaaggaggtcatctgcccctgggagagcctgtaaggaaagaggcaggctgagctgggggctctggaccaggaagatgctctgacagatgccatggtatgggccacaggacacacttgctcgagaaccaaagtgcatttgggtgacatttgaagattggggagacaagatggggtagattgtggcaaagaatgctctggctggttaccaggggccaactccttctcctcttcctgaccctccctcccctgggcagaagaaacgcatgtggaccagaagactttccctgctgccttaaaaccaataaaaggttaactttaagtttcttggaa

SEQ ID NO: 17761 - DNA, 2375 bp, Homo sapiens
  source 1..2375: mol_type = unassigned DNA
gaacttggggggcttctcctcttgtctcccactggtgctctggctgtgaatccatccaggggccaggatgacaatccgacaccaaggccagcagtacaggccgaggatggcatttctccaaaagattgaagcgctcgtgaaggacatgcagaacccagagacaggggtccgaatgcagaaccagagggtcctggtcaccagcgttcctcatgccatgacaggaagtgatgttctgcaatggatcgtccagcggctttggatctccagtctggaggcacagaacttgggcaactttattgtcaggtatggctacatttaccccctgcaagaccccaagaatctcattctcaagcctgatggcagcctctacagatttcagacaccgtatttctggcccacccagcagtggccagctgaagataccgattacgccatctatctggccaagcgaaatatcaaaaagaaagggattttggaagaatatgaaaaggaaaattacaatttcttgaaccaaaaaatgaactataagtgggactttgtcattatgcaggccaaagagcagtacagggctggaaaggagaggaacaaagcagacagatatgccctggactgccaggagaaggcatactggctggtgcaccgatgccctcctggaatggacaatgtgctggactacggcctggaccgagtgaccaatccgaatgaagtcaaggtaaaccagaaacaaacagtcgttgctgtcaaaaaagagatcatgtattaccaacaggccttgatgaggtccacagtgaagtcttctgtgtccctgggagggattgtgaaatacagtgagcagttctcatccaacgatgccatcatgtcaggctgcctccccagcaacccctggatcaccgatgacacccagttctgggacttaaatgccaaattggtggaaatcccaaccaagatgcgagtggaacgatgggccttcaacttcagcgaattgatccgagaccccaaaggtcgacagagcttccagtacttcctcaagaaagaattcagtggagagaatctgggattctgggaagcctgcgaggatctgaagtatggagatcagtccaaagtcaaggagaaagcagaggagatttacaagctgttcctggccccgggggcgaggcgctggatcaacatagatggcaaaaccatggacatcacagtgaaggggctgaagcacccccaccgctatgtgctggacgccgcacaaacccacatttacatgctcatgaagaaggattcttatgctcgctatttaaaatctccgatctataaggacatgctggccaaagctattgaacctcaggaaaccaccaagaaaagctccaccctcccttttatgcggcgtcacctgcgctccagcccaagccctgtcatcctgagacagctggaagaggaagccaaggcccgagaagcagccaacactgtggacatcacccagccgggccagcacatggctcccagcccccatctgaccgtgtacaccgggacctgcatgcccccgtctccttctagccccttctcctcctcctgccgctcccccaggaagcctttcgcctcacccagccgcttcatccggcgacccagcaccaccatctgcccctcacccatcagagtggccttggagagctcatcgggcttggagcagaaaggggagtgcagcgggtccatggccccccgtgggccctctgtcaccgagagcagcgaggcctccctcgacacctcctggcctcgcagccggcccagggcccctcctaaggcccgcatggctctgtccttcagcaggtttctgagacgaggctgtctggcctcacctgtctttgccaggctctcacccaagtgccctgctgtgtcccacgggagggtgcagcccctgggggacgtgggccagcagctgccacgattgaaatccaagagagtagcaaactttttccagatcaaaatggatgtgcccacggggagcgggacctgcttgatggactcggaggatgctggaacaggagagtcgggtgaccgggccacagaaaaggaggtcatctgcccctgggagagcctgtaaggaaagaggcaggctgagctgggggctctggaccaggaagatgctctgacagatgccatggtatgggccacaggacacacttgctcgagaaccaaagtgcatttgggtgacatttgaagattggggagacaagatggggtagattgtggcaaagaatgctctggctggttaccaggggccaactccttctcctcttcctgaccctccctcccctgggcagaagaaacgcatgtggaccagaagactttccctgctgccttaaaaccaataaaaggttaacttt

SEQ ID NO: 17762 - DNA, 1472 bp, Homo sapiens
  source 1..1472: mol_type = unassigned DNA
tccatccaggggccaggatgacaatccgacaccaaggccagcagtacaggccgaggatggcatttctccaaaagattgaagcgctcgtgaaggacatgcagaacccagagacaggggtccgaatgcagaaccagagggtcctggtcaccagcgttcctcatgccatgacaggaagtgatgttctgcaatggatcgtccagcggctttggatctccagtctggaggcacagaacttgggcaactttattgtcaggtatggctacatttaccccctgcaagaccccaagaatctcattctcaagcctgatggcagcctctacagatttcagacaccgtatttctggcccacccagcagtggccagctgaagataccgattacgccatctatctggccaagcgaaatatcaaaaagaaagggattttggaagaatatgaaaaggaaaattacaatttcttgaaccaaaaaatgaactataagtgggactttgtcattatgcaggccaaagagcagtacagggctggaaaggagaggaacaaagcagacagatatgccctggactgccaggagaaggcatactggctggtgcaccgatgccctcctggaatggacaatgtgctggactacggcctggaccgagtgaccaatccgaatgaagtcaagaaacaaacagtcgttgctgtcaaaaaagagatcatgtattaccaacaggccttgatgaggtccacagtgaagtcttctgtgtccctgggagggattgtgaaatacagtgagcagttctcatccaacgatgccatcatgtcaggctgcctccccagcaacccctggatcaccgatgacacccagttctgggacttaaatgccaaattggtggaaatcccaaccaagatgcgagtggaacgatgggccttcaacttcagcgaattgatccgagaccccaaaggtcgacagagcttccagtacttcctcaagaaagaattcagtggagagaatctgggattctgggaagcctgcgaggatctgaagtatggagatcagtccaaagtcaaggagaaagcagaggagatttacaagctgttcctggccccgggggcgaggcgctggatcaacatagatggcaaaaccatggacatcacagtgaaggggctgaagcacccccaccgctatgtgctggacgccgcacaaacccacatttacatgctcatgaagaaggattcttatgctcgctatttaaaatctccgatctataaggacatgctggccaaagctattgaacctcaggaaaccaccaagaaaagctccaccctcccttttatgcggcgtcacctgcgctccagcccaagccctgtcatcctgagacagctggaagaggaagccaaggcccgagaagcagccaacactgtggacatcacccaggtcatgagcaagctggaccgcaggagccaactccaaaaagagctgcctcctaaataa

SEQ ID NO: 17763 - DNA, 645 bp, Homo sapiens
  source 1..645: mol_type = unassigned DNA
caaaagattgaagcgctcgtgaaggacatgcagaacccagagacaggggtccgaatgcagaaccagagggtcctggtcaccagcgttcctcatgccatgacaggaagtgatgttctgcaatggatcgtccagcggctttggatctccagtctggaggcacagaacttgggcaactttattgtcaggtatggctacatttaccccctgcaagaccccaagaatctcattctcaagcctgatggcagcctctacagatttcagacaccgtatttctggcccacccagcagtggccagctgaagataccgattacgccatctatctggccaagcgaaatatcaaaaagaaagggattttggaagaatatgaaaaggaaaattacaatttcttgaaccaaaaaatgaactataagtgggactttgtcattatgcaggccaaagagcagtacagggctggaaaggagaggaacaaagcagacagatatgccctggactgccaggagaaggcatactggctggtgcaccgatgccctcctggaatggacaatgtgctggactacggcctggaccgagtgaccaatccgaatgaagtcaaggtaaaccagctatctatctatctcctgtctgtgcactctggctgctgtgga

SEQ ID NO: 17764 - DNA, 2238 bp, Homo sapiens
  source 1..2238: mol_type = unassigned DNA
ctgggatcaggcaaccctctcacctcagcctcccaagtagctgggactacaggtgcacgctaccatgcctggctaatttttttgtacttttagtaaagacggggttttgtcatgttgctcgggctagcctcaaactcctgggctcaagcgatcctccctcctcggcctcccaaagtgctgggattacaggcttgagccaccgcacctggccttccccatttttctcttaatccatatctcagacaggaatctgtatctctcactctacagatcattctgtaggcactatgctaaactgacaccagtttcaaatttagtccttaattgatcttggcctttaggtgagcaaagttacagtggtaaattacgctccttcgcttacaaaatctcttgcttggtatttattccccaggggttacatagaatagagtggaggcagtagacatggagaaatcctatcttttaagaaagaaaaaaatgggcatttttctcatggggaaggatttttatttttcaaatgggtgtttgaactgtaatgatttcatgacatctgcctaacggttttgtttctttgtcttacagaaacaaacagtcgttgctgtcaaaaaagagatcatgtattaccaacaggccttgatgaggtccacagtgaagtcttctgtgtccctgggagggattgtgaaatacagtgagcagttctcatccaacgatgccatcatgtcaggctgcctccccagcaacccctggatcaccgatgacacccagttctgggacttaaatgccaaattggtggaaatcccaaccaagatgcgagtggaacgatgggccttcaacttcagcgaattgatccgagaccccaaaggtcgacagagcttccagtacttcctcaagaaagaattcagtggagagaatctgggattctgggaagcctgcgaggatctgaagtatggagatcagtccaaagtcaaggagaaagcagaggagatttacaagctgttcctggccccgggggcgaggcgctggatcaacatagatggcaaaaccatggacatcacagtgaaggggctgaagcacccccaccgctatgtgctggacgccgcacaaacccacatttacatgctcatgaagaaggattcttatgctcgctatttaaaatctccgatctataaggacatgctggccaaagctattgaacctcaggaaaccaccaagaaaagctccaccctcccttttatgcggcgtcacctgcgctccagcccaagccctgtcatcctgagacagctggaagaggaagccaaggcccgagaagcagccaacactgtggacatcacccagccgggccagcacatggctcccagcccccatctgaccgtgtacaccgggacctgcatgcccccgtctccttctagccccttctcctcctcctgccgctcccccaggaagcctttcgcctcacccagccgcttcatccggcgacccagcaccaccatctgcccctcacccatcagagtggccttggagagctcatcgggcttggagcagaaaggggagtgcagcgggtccatggccccccgtgggccctctgtcaccgagagcagcgaggcctccctcgacacctcctggcctcgcagccggcccagggcccctcctaaggcccgcatggctctgtccttcagcaggtttctgagacgaggctgtctggcctcacctgtctttgccaggctctcacccaagtgccctgctgtgtcccacgggagggtgcagcccctgggggacgtgggccagcagctgccacgattgaaatccaagagagtagcaaactttttccagatcaaaatggatgtgcccacggggagcgggacctgcttgatggactcggaggatgctggaacaggagagtcgggtgaccgggccacagaaaaggaggtcatctgcccctgggagagcctgtaaggaaagaggcaggctgagctgggggctctggaccaggaagatgctctgacagatgccatggtatgggccacaggacacacttgctcgagaaccaaagtgcatttgggtgacatttgaagattggggagacaagatggggtagattgtggcaaagaatgctctggctggttaccaggggccaactccttctcctcttcctgaccctccctcccctgggcagaagaaacgcatgtggaccagaagactttccctgctgccttaaaaccaataaaaggttaactttaa

SEQ ID NO: 17765 - DNA, 923 bp, Homo sapiens
  source 1..923: mol_type = unassigned DNA
aaagcctgcgagcgccagccgagatcgcagcccaacccatggccgggtctcctagccgcgccgcgggccggcgactgcagcttcccctgctgtgcctcttcctccagggcgccactgccgtcctctttgctgtctttgtccgctacaaccacaaaaccgacgctgccctctggcaccggagcaaccacagtaacgcggacaatgaattttactttcgctacccaaaagagtctcactctgttgcccaggctggagtgcaacggcgcaatctcggctcactgcaaccttcacctcccaggttcaagcgattcacccgcctcagcctcccgagaagctgggattacaggcacccaccaaaacacctagataagttttgtatttttagtagagatgaggtttcgccatgttggccaggctggtcttgaattcctgacctcaggtgatccacccacctcggcctcccaatgtgctgggattacaggtgtgagccactgcacctggccctattaccctactttctgtatgcagagctcatcagcaggctatccccacctcaccctgttctagacccaacaaaatgaagctcaaaatgctaaggatatagagagtgaggtggaaacttggacttgggtgtgaagcaccagagcccccacccaccctaggcagaaggggctacagctcctccctccccatatttcatccacagccctggctagaaaagaaggatagagagttgggagggaacagtccagagtctgacagaactaagctgttgcgtaagggtctgacctggctgcttgccatgaacccctgacttgcttctcctcgaagcctccttattacaaagctttccctggagtccagcctcttgcccctgtgctgcaatggtaggctctccttggacatacagcatttcatccctg

SEQ ID NO: 17766 - DNA, 1927 bp, Homo sapiens
  source 1..1927: mol_type = unassigned DNA
aaagcctgcgagcgccagccgagatcgcagcccaacccatggccgggtctcctagccgcgccgcgggccggcgactgcagcttcccctgctgtgcctcttcctccagggcgccactgccgtcctctttgctgtctttgtccgctacaaccacaaaaccgacgctgccctctggcaccggagcaaccacagtaacgcggacaatgaattttactttcgctacccaaatggagtttcgctcttgttgcccaggctggagtgcaatggcacaatctcggctcaccacaacctctgcctcccgggttcaagcgattctcctgcctcagtctcctgagtagctgggattacaggcttccaggacgtgcatgccatggtcttcgtgggctttggcttcctcatggtcttcctgcagcgttacggcttcagcagcgtgggcttcaccttcctcctggccgcctttgccctgcagtggtccacactggtccagggctttctccactccttccacggtggccacatccatgttggcgtggagagcatgatcaatgctgacttttgtgcgggggccgtgctcatctcctttggtgccgtcctgggcaagaccgggcctacccagctgctgctcatggccctgctggaggtggtgctgtttggcatcaatgagtttgtgctccttcatctcctgggggtgagagtctggggagggatggagtcgggggtggggggtggtcaaggtcagcctctgagccaggagcgtgggggtgggggcggggtgctgcctctcaccccacctccccaggtgagagatgccggaggctccatgactatccacacctttggtgcctacttcgggctcgtcctttcgcgggttctgtacaggccccagctggagaagagcaagcaccgccagggctccgtctaccattcagacctcttcgccatgattgggaccatcttcctgtggatcttctggcctagcttcaatgctgcactcacagcgctgggggctgggcagcatcggacggccctcaacacatactactccctggctgccagcacccttggcacctttgccttgtcagcccttgtaggggaagatgggaggcttgacatgcccatccttgaatcaaaattcaaagtccaagacacatgtggagtccacaacctccatgggatgccgggggtcctgggggccctcctgggggtccttgtggctggacttgccacccatgaagcttacggagatggcctggagagtgtgtttccactcatagccgagggccagcgcagtgccacgtcacaggccatgcaccagctcttcgggctgtttgtcacactgatgtttgcctctgtgggcgggggccttggaggcatcatattggtcttatgcctcctagacccctgtgccctgtggcactgggtggcaccctcctccatggtggggggcagagaagcctcacagatcctcccctaccaccaccagggctcctgctgaagctaccctttctggactcccccccagactcccagcactacgaggaccaagttcactggcaggtgcctggcgagcatgaggataaagcccagagacctctgagggtggaggaggcagacactcaggcctaacccactgccagcccctgagaggacacgctccttttcgaagatgctgactggctgctactaggaagttctttttgagctcccattcctccagctgcaagaagggagccatgagccagaaggaggcccctttccacaggcagcgtctccacagggagaggggcaacaggaggctgggaaatggtggggagtggggccgtaactgggtacaatagggggaacctcaccagatgcccaacccgactgccctaccagcctgcacatgggtagaagaggccaaattgaggcacccaagtgatccactgg

SEQ ID NO: 17767 - DNA, 1789 bp, Homo sapiens
  source 1..1789: mol_type = unassigned DNA
aaagcctgcgagcgccagccgagatcgcagcccaacccatggccgggtctcctagccgcgccgcgggccggcgactgcagcttcccctgctgtgcctcttcctccagggcgccactgccgtcctctttgctgtctttgtccgctacaaccacaaaaccgacgctgccctctggcaccggagcaaccacagtaacgcggacaatgaattttactttcgctacccaagcttccaggacgtgcatgccatggtcttcgtgggctttggcttcctcatggtcttcctgcagcgttacggcttcagcagcgtgggcttcaccttcctcctggccgcctttgccctgcagtggtccacactggtccagggctttctccactccttccacggtggccacatccatgttggcgtggagagcatgatcaatgctgacttttgtgcgggggccgtgctcatctcctttggtgccgtcctgggcaagaccgggcctacccagctgctgctcatggccctgctggaggtggtgctgtttggcatcaatgagtttgtgctccttcatctcctgggggtgagagatgccggaggctccatgactatccacacctttggtgcctacttcgggctcgtcctttcgcgggttctgtacaggccccagctggagaagagcaagcaccgccagggctccgtctaccattcagacctcttcgccatgattgggaccatcttcctgtggatcttctggcctagcttcaatgctgcactcacagcgctgggggctgggcagcatcggacggccctcaacacatactactccctggctgccagcacccttggcacctttgccttgtcagcccttgtaggggaagatgggaggcttgacatggtccacatccaaaatgcagcgctggctggaggggttgtggtggggacctcaagtgaaatgatgctgacaccctttggggctctggcagctggcttcttggctgggactgtctccacgctggggtacaagttcttcacgcccatccttgaatcaaaattcaaagtccaagacacatgtggagtccacaacctccatgggatgccgggggtcctgggggccctcctgggggtccttgtggctggacttgccacccatgaagcttacggagatggcctggagagtgtgtttccactcatagccgagggccagcgcagtgccacgtcacaggccatgcaccagctcttcgggctgtttgtcacactgatgtttgcctctgtgggcgggggccttggagggctcctgctgaagctaccctttctggactcccccccagactcccagcactacgaggaccaagttcactggcaggtgcctggcgagcatgaggataaagcccagagacctctgagggtggaggaggcagacactcaggcctaacccactgccagcccctgagaggacacgctccttttcgaagatgctgactggctgctactaggaagttctttttgagctcccattcctccagctgcaagaagggagccatgagccagaaggaggcccctttccacaggcagcgtctccacagggagaggggcaacaggaggctgggaaatggtggggagtggggccgtaactgggtacaatagggggaacctcaccagatgcccaacccgactgccctaccagcctgcacatgggtagaagaggccaaattgaggcacccaagtgatccactggccccacgtcacacagttacagtgaagcccaagccaggcctggttgagggtgataaacgccactgtctctaa

SEQ ID NO: 17768 - DNA, 1912 bp, Homo sapiens
  source 1..1912: mol_type = unassigned DNA
aaagcctgcgagcgccagccgagatcgcagcccaacccatggccgggtctcctagccgcgccgcgggccggcgactgcagcttcccctgctgtgcctcttcctccagggcgccactgccgtcctctttgctgtctttgtccgctacaaccacaaaaccgacgctgccctctggcaccggagcaaccacagtaacgcggacaatgaattttactttcgctacccaaatggagtttcgctcttgttgcccaggctggagtgcaatggcacaatctcggctcaccacaacctctgcctcccgggttcaagcgattctcctgcctcagtctcctgagtagctgggattacaggcttccaggacgtgcatgccatggtcttcgtgggctttggcttcctcatggtcttcctgcagcgttacggcttcagcagcgtgggcttcaccttcctcctggccgcctttgccctgcagtggtccacactggtccagggctttctccactccttccacggtggccacatccatgttggcgtggagagcatgatcaatgctgacttttgtgcgggggccgtgctcatctcctttggtgccgtcctgggcaagaccgggcctacccagctgctgctcatggccctgctggaggtggtgctgtttggcatcaatgagtttgtgctccttcatctcctgggggtgagagatgccggaggctccatgactatccacacctttggtgcctacttcgggctcgtcctttcgcgggttctgtacaggccccagctggagaagagcaagcaccgccagggctccgtctaccattcagacctcttcgccatgattgggaccatcttcctgtggatcttctggcctagcttcaatgctgcactcacagcgctgggggctgggcagcatcggacggccctcaacacatactactccctggctgccagcacccttggcacctttgccttgtcagcccttgtaggggaagatgggaggcttgacatggtccacatccaaaatgcagcgctggctggaggggttgtggtggggacctcaagtgaaatgatgctgacaccctttggggctctggcagctggcttcttggctgggactgtctccacgctggggtacaagttcttcacgcccatccttgaatcaaaattcaaagtccaagacacatgtggagtccacaacctccatgggatgccgggggtcctgggggccctcctgggggtccttgtggctggacttgccacccatgaagcttacggagatggcctggagagtgtgtttccactcatagccgagggccagcgcagtgccacgtcacaggccatgcaccagctcttcgggctgtttgtcacactgatgtttgcctctgtgggcgggggccttggagggctcctgctgaagctaccctttctggactcccccccagactcccagcactacgaggaccaagttcactggcaggtgcctggcgagcatgaggataaagcccagagacctctgagggtggaggaggcagacactcaggcctaacccactgccagcccctgagaggacacgctccttttcgaagatgctgactggctgctactaggaagttctttttgagctcccattcctccagctgcaagaagggagccatgagccagaaggaggcccctttccacaggcagcgtctccacagggagaggggcaacaggaggctgggaaatggtggggagtggggccgtaactgggtacaatagggggaacctcaccagatgcccaacccgactgccctaccagcctgcacatgggtagaagaggccaaattgaggcacccaagtgatccactggccccacgtcacacagttacagtgaagcccaagccaggcctggttgagggtgataaacgccactgtctctaa

SEQ ID NO: 17769 - DNA, 1862 bp, Homo sapiens
  source 1..1862: mol_type = unassigned DNA
aaagcctgcgagcgccagccgagatcgcagcccaacccatggccgggtctcctagccgcgccgcgggccggcgactgcagcttcccctgctgtgcctcttcctccagggcgccactgccgtcctctttgctgtctttgtccgctacaaccacaaaaccgacgctgccctctggcaccggagcaaccacagtaacgcggacaatgaattttactttcgctacccaaaagagtctcactctgttgcccaggctggagtgcaacggcgcaatctcggctcactgcaaccttcacctcccaggcttccaggacgtgcatgccatggtcttcgtgggctttggcttcctcatggtcttcctgcagcgttacggcttcagcagcgtgggcttcaccttcctcctggccgcctttgccctgcagtggtccacactggtccagggctttctccactccttccacggtggccacatccatgttggcgtggagagcatgatcaatgctgacttttgtgcgggggccgtgctcatctcctttggtgccgtcctgggcaagaccgggcctacccagctgctgctcatggccctgctggaggtggtgctgtttggcatcaatgagtttgtgctccttcatctcctgggggtgagagatgccggaggctccatgactatccacacctttggtgcctacttcgggctcgtcctttcgcgggttctgtacaggccccagctggagaagagcaagcaccgccagggctccgtctaccattcagacctcttcgccatgattgggaccatcttcctgtggatcttctggcctagcttcaatgctgcactcacagcgctgggggctgggcagcatcggacggccctcaacacatactactccctggctgccagcacccttggcacctttgccttgtcagcccttgtaggggaagatgggaggcttgacatggtccacatccaaaatgcagcgctggctggaggggttgtggtggggacctcaagtgaaatgatgctgacaccctttggggctctggcagctggcttcttggctgggactgtctccacgctggggtacaagttcttcacgcccatccttgaatcaaaattcaaagtccaagacacatgtggagtccacaacctccatgggatgccgggggtcctgggggccctcctgggggtccttgtggctggacttgccacccatgaagcttacggagatggcctggagagtgtgtttccactcatagccgagggccagcgcagtgccacgtcacaggccatgcaccagctcttcgggctgtttgtcacactgatgtttgcctctgtgggcgggggccttggagggctcctgctgaagctaccctttctggactcccccccagactcccagcactacgaggaccaagttcactggcaggtgcctggcgagcatgaggataaagcccagagacctctgagggtggaggaggcagacactcaggcctaacccactgccagcccctgagaggacacgctccttttcgaagatgctgactggctgctactaggaagttctttttgagctcccattcctccagctgcaagaagggagccatgagccagaaggaggcccctttccacaggcagcgtctccacagggagaggggcaacaggaggctgggaaatggtggggagtggggccgtaactgggtacaatagggggaacctcaccagatgcccaacccgactgccctaccagcctgcacatgggtagaagaggccaaattgaggcacccaagtgatccactggccccacgtcacacagttacagtgaagcccaagccaggcctggttgagggtgataaacgccactgtctctaa

SEQ ID NO: 17770 - DNA, 2424 bp, Homo sapiens
  source 1..2424: mol_type = unassigned DNA
agcccaacccatggccgggtctcctagccgcgccgcgggccggcgactgcagcttcccctgctgtgcctcttcctccagggcgccactgccgtcctctttgctgtctttgtccgctacaaccacaaaaccgacgctgccctctggcaccggagcaaccacagtaacgcggacaatgaattttactttcgctacccaaatggagtttcgctcttgttgcccaggctggagtgcaatggcacaatctcggctcaccacaacctctgcctcccgggttcaagcgattctcctgcctcagtctcctgagtagctgggattacaggcttccaggacgtgcatgccatggtcttcgtgggctttggcttcctcatggtcttcctgcagcgttacggcttcagcagcgtgggcttcaccttcctcctggccgcctttgccctgcagtggtccacactggtccagggctttctccactccttccacggtggccacatccatgttggcgtggagagcatgatcaatgctgacttttgtgcgggggccgtgctcatctcctttggtgccgtcctgggcaagaccgggcctacccagctgctgctcatggccctgctggaggtggtgctgtttggcatcaatgagtttgtgctccttcatctcctgggggtgagagatgccggaggctccatgactatccacacctttggtgcctacttcgggctcgtcctttcgcgggttctgtacaggccccagctggagaagagcaagcaccgccagggctccgtctaccattcagacctcttcgccatgattgggaccatcttcctgtggatcttctggcctagcttcaatgctgcactcacagcgctgggggctgggcagcatcggacggccctcaacacatactactccctggctgccagcacccttggcacctttgccttgtcagcccttgtaggggaagatgggaggcttgacatggtccacatccaaaatgcagcgctggctggaggggttgtggtggggacctcaagtgaaatgatgctgacaccctttggggctctggcagctggcttcttggctgggactgtctccacgctggggtacaagttcttcacgcccatccttgaatcaaaattcaaagtccaagacacatgtggagtccacaacctccatgggatgccgggggtcctgggggccctcctgggggtccttgtggctggacttgccacccatgaagcttacggagatgggtgagtttcctcccaacccgtactgcagtcgtcatccatctggaatgacctctgtcattctctttcactgtgtgtgaccaagaaaaaagaatgaattcattcattcatccatattctgggagcaaaggaaattggagttaacaaaaccaacccagaaactgccttcctggtcctctatcaagtgcagcagaaggtcatggaacaaatgacttcaagagtgttacttgttactgaagggtcagtaagagataatgacctttaggatctatttttgcacatcaagggtgggcaaaagcaacccgcaaatggagtcttaaaaggtgcctaggtgtctgctggcctacaagggtgggaaggtgttccaggctgtgggcctggcttgagcagtggcctggaggtgagactcagcctggcatgcaccctcgagaccctcttggccacttcctgttccccagtgtgagttccagtgccatgagcagccctggccccgggctgcatccctctctctccctacccctgcctttcctctatctggtctccctgcagcctggagagtgtgtttccactcatagccgagggccagcgcagtgccacgtcacaggccatgcaccagctcttcgggctgtttgtcacactgatgtttgcctctgtgggcgggggccttggagggctcctgctgaagctaccctttctggactcccccccagactcccagcactacgaggaccaagttcactggcaggtgcctggcgagcatgaggataaagcccagagacctctgagggtggaggaggcagacactcaggcctaacccactgccagcccctgagaggacacgctccttttcgaagatgctgactggctgctactaggaagttctttttgagctcccattcctccagctgcaagaagggagccatgagccagaaggaggcccctttccacaggcagcgtctccacagggagaggggcaacaggaggctgggaaatggtggggagtggggccgtaactgggtacaatagggggaacctcaccagatgcccaacccgactgccctaccagcctgcacatgggtagaagaggccaaattgaggcacccaagtgatccactggccccacgtcacacagttacagtgaagcccaagccaggcctggttgagggtgataaacgccactgt

SEQ ID NO: 17771 - DNA, 1984 bp, Homo sapiens
  source 1..1984: mol_type = unassigned DNA
tggccgggtctcctagccgcgccgcgggccggcgactgcagcttcccctgctgtgcctcttcctccagggcgccactgccgtcctctttgctgtctttgtccgctacaaccacaaaaccgacgctgccctctggcaccggagcaaccacagtaacgcggacaatgaattttactttcgctacccaaatggagtttcgctcttgttgcccaggctggagtgcaatggcacaatctcggctcaccacaacctctgcctcccgggttcaagcgattctcctgcctcagtctcctgagtagctgggattacaggcttccaggacgtgcatgccatggtcttcgtgggctttggcttcctcatggtcttcctgcagcgttacggcttcagcagcgtgggcttcaccttcctcctggccgcctttgccctgcagtggtccacactggtccagggctttctccactccttccacggtggccacatccatgttggcgtggagagcatgatcaatgctgacttttgtgcgggggccgtgctcatctcctttggtgccgtcctgggcaagaccgggcctacccagctgctgctcatggccctgctggaggtggtgctgtttggcatcaatgagtttgtgctccttcatctcctgggggtgagagtctggggagggatggagtcgggggtggggggtggtcaaggtcagcctctgagccaggagcgtgggggtgggggcggggtgctgcctctcaccccacctccccaggtgagagatgccggaggctccatgactatccacacctttggtgcctacttcgggctcgtcctttcgcgggttctgtacaggccccagctggagaagagcaagcaccgccagggctccgtctaccattcagacctcttcgccatgattgggaccatcttcctgtggatcttctggcctagcttcaatgctgcactcacagcgctgggggctgggcagcatcggacggccctcaacacatactactccctggctgccagcacccttggcacctttgccttgtcagcccttgtaggggaagatgggaggcttgacatggtccacatccaaaatgcagcgctggctggaggggttgtggtggggacctcaagtgaaatgatgctgacaccctttggggctctggcagctggcttcttggctgggactgtctccacgctggggtacaagttcttcacgcccatccttgaatcaaaattcaaagtccaagacacatgtggagtccacaacctccatgggatgccgggggtcctgggggccctcctgggggtccttgtggctggacttgccacccatgaagcttacggagatggcctggagagtgtgtttccactcatagccgagggccagcgcagtgccacgtcacaggccatgcaccagctcttcgggctgtttgtcacactgatgtttgcctctgtgggcgggggccttggagggctcctgctgaagctaccctttctggactcccccccagactcccagcactacgaggaccaagttcactggcaggtgcctggcgagcatgaggataaagcccagagacctctgagggtggaggaggcagacactcaggcctaacccactgccagcccctgagaggacacgctccttttcgaagatgctgactggctgctactaggaagttctttttgagctcccattcctccagctgcaagaagggagccatgagccagaaggaggcccctttccacaggcagcgtctccacagggagaggggcaacaggaggctgggaaatggtggggagtggggccgtaactgggtacaatagggggaacctcaccagatgcccaacccgactgccctaccagcctgcacatgggtagaagaggccaaattgaggcacccaagtgatccactggccccacgtcacacagttacagtgaagcccaagccaggcctggttgagggtgataaacgccactgtctctaa

SEQ ID NO: 17772 - DNA, 324 bp, Homo sapiens
  source 1..324: mol_type = unassigned DNA
ggggccctcctgggggtccttgtggctggacttgccacccatgaagcttacggagatggcctggagagtgtgtttccactcatagccgagggccagcgcagtgccacgtcacaggccatgcaccagctcttcgggctgtttgtcacactgatgtttgcctctgtgggcgggggccttggagactcccagcactacgaggaccaagttcactggcaggtgcctggcgagcatgaggataaagcccagagacctctgagggtggaggaggcagacactcaggcctaacccactgccagcccctgagaggacacgctccttttcgaa

SEQ ID NO: 17773 - DNA, 720 bp, Homo sapiens
  source 1..720: mol_type = unassigned DNA
tattctgggagcaaaggaaattggagttaacaaaaccaacccagaaactgccttcctggtcctctatcaagtgcagcagaaggtcatggaacaaatgacttcaagagtgttacttgttactgaagggtcagtaagagataatgacctttaggatctatttttgcacatcaagggtgggcaaaagcaacccgcaaatggagtcttaaaaggtgcctaggtgtctgctggcctacaagggtgggaaggtgttccaggctgtgggcctggcttgagcagtggcctggaggtgagactcagcctggcatgcaccctcgagaccctcttggccacttcctgttccccagtgtgagttccagtgccatgagcagccctggccccgggctgcatccctctctctccctacccctgcctttcctctatctggtctccctgcagcctggagagtgtgtttccactcatagccgagggccagcgcagtgccacgtcacaggccatgcaccagctcttcgggctgtttgtcacactgatgtttgcctctgtgggcgggggccttggagacccctgtgccctgtggcactgggtggcaccctcctccatggtggggggcagagaagcctcacagatcctcccctaccaccaccagggctcctgctgaagctaccctttctggactcccccccagactcccagcactacgaggaccaagttcactggcaggtg

SEQ ID NO: 17774 - DNA, 1862 bp, Homo sapiens
  source 1..1862: mol_type = unassigned DNA
gccagcccggccaggcacccctgcagcatggcctggaacaccaacctccgctggcggctgccgctcacctgcctgctcctgcaggtgattatggtgattctcttcggggtgttcgtgcgctacgacttcgaggccgacgcccactggtggtcagagaggacgcacaagaacttgagcgacatggagaacgaattctactatcgctacccaagcttccaggacgtgcacgtgatggtcttcgtgggcttcggcttcctcatgactttcctgcagcgctacggcttcagcgccgtgggcttcaacttcctgttggcagccttcggcatccagtgggcgctgctcatgcagggctggttccacttcttacaagaccgctacatcgtcgtgggcgtggagaacctcatcaacgctgacttctgcgtggcctctgtctgcgtggcctttggggcagttctgggtaaagtcagccccattcagctgctcatcatgactttcttccaagtgaccctcttcgctgtgaatgagttcattctccttaacctgctaaaggtgaaggatgcaggaggctccatgaccatccacacatttggcgcctactttgggctcacagtgacccggatcctctaccgacgcaacctagagcagagcaaggagagacagaattctgtgtaccagtcggacctctttgccatgattggcaccctcttcctgtggatgtactggcccagcttcaactcagccatatcctaccatggggacagccagcaccgagccgccatcaacacctactgctccttggcagcctgcgtgcttacctcggtggcaatatccagtgccctgcacaagaagggcaagctggacatggtgcacatccagaatgccacgctcgcaggaggggtggccgtgggtaccgctgctgagatgatgctcatgccttacggtgccctcatcatcggcttcgtctgcggcatcatctccaccctgggttttgtatacctgaccgcggcatcgtgggtgctgtgacagcggcctccgccagccttgaagtctatggaaaagaagggcttgtccattcctttgactttcaaggtttcaacggggactggaccgcaagaacacagggaaagttccagatttatggtctcttggtgaccctggccatggccctgatgggtggcatcattgtggggctcattttgagattaccattctggggacaaccttcagatgagaactgctttgaggatgcggtctactgggagatgcctgaagggaacagcactgtctacatccctgaggaccccaccttcaagccctcaggaccctcagtaccctcagtacccatggtgtccccactacccatggcttcctcggtacccttggtaccctaggctcccagggcaggctccacagactgtcctggggcccagaggagctggtgctgacctagctagggatgcaagagtgagcaagcagcacccccacctgctggcttggcctcaaggtgcctccacccctgccctccccttcatcccagggggtctgactgagaatggagaaggagaagctacaaagtgggcatccaagccgggttctggctgcagaagttctgcctctgcctggggtcttggccacattggagaaaaacaggctcaaagtggggctgggacctggtgggtgaacctgagctctcccaggagacaacttagctgccagtcaccacctatgaggctcttctaccccgtgcctgcacctcggccagcatctcctatgctccctgggtcccccagacctctctgtgttgtgtgcgtggcagcctccaggaataaacattcttgttgtcctttgtaaaatggtgtgaa

SEQ ID NO: 17775 - DNA, 1982 bp, Homo sapiens
  source 1..1982: mol_type = unassigned DNA
ctcaaaagccccgccggcctccgagcgtccgaaccgcccgctgccagcccggccaggcacccctgcagcatggcctggaacaccaacctccgctggcggctgccgctcacctgcctgctcctgcaggtgattatggtgattctcttcggggtgttcgtgcgctacgacttcgaggccgacgcccactggtggtcagagaggacgcacaagaacttgagcgacatggagaacgaattctactatcgctacccaagcttccaggacgtgcacgtgatggtcttcgtgggcttcggcttcctcatgactttcctgcagcgctacggcttcagcgccgtgggcttcaacttcctgttggcagccttcggcatccagtgggcgctgctcatgcagggctggttccacttcttacaagaccgctacatcgtcgtgggcgtggagaacctcatcaacgctgacttctgcgtggcctctgtctgcgtggcctttggggcagttctgggtaaagtcagccccattcagctgctcatcatgactttcttccaagtgaccctcttcgctgtgaatgagttcattctccttaacctgctaaaggtgaaggatgcaggaggctccatgaccatccacacatttggcgcctactttgggctcacagtgacccggatcctctaccgacgcaacctagagcagagcaaggagagacagaattctgtgtaccagtcggacctctttgccatgattggcaccctcttcctgtggatgtactggcccagcttcaactcagccatatcctaccatggggacagccagcaccgagccgccatcaacacctactgctccttggcagcctgcgtgcttacctcggtggcaatatccagtgccctgcacaagaagggcaagctggacatggtgcacatccagaatgccacgctcgcaggaggggtggccgtgggtaccgctgctgagatgatgctcatgccttacggtgccctcatcatcggcttcgtctgcggcatcatctccaccctgggttttgtatacctgaccccattcctggagtcccggctgcacatccaggacacatgtggcattaacaatctgcatggcattcctggcatcataggcggcatcgtgggtgctgtgacagcggcctccgccagccttgaagtctatggaaaagaagggcttgtccattcctttgactttcaaggtttcaacggggactggaccgcaagaacacagggaaagttccagatttatggtctcttggtgaccctggccatggccctgatgggtggcatcattgtggggctcattttgagattaccattctggggacaaccttcagatgagaactgctttgaggatgcggtctactgggagatgcctgaagggaacagcactgtctacatccctgaggaccccaccttcaagccctcaggaccctcagtaccctcagtacccatggtgtccccactacccatggcttcctcggtacccttggtaccctaggctcccagggcaggtgaggagcaggctccacagactgtcctggggcccagaggagctggtgctgacctagctagggatgcaagagtgagcaagcagcacccccacctgctggcttggcctcaaggtgcctccacccctgccctccccttcatcccagggggtctgactgagaatggagaaggagaagctacaaagtgggcatccaagccgggttctggctgcagaagttctgcctctgcctggggtcttggccacattggagaaaaacaggctcaaagtggggctgggacctggtgggtgaacctgagctctcccaggagacaacttagctgccagtcaccacctatgaggctcttctaccccgtgcctgcacctcggccagcatctcctatgctccctgggtcccccagacctctctgtgttgtgtgcgtggcagcctccaggaataaacattcttgttgtcctttgtaaaa

SEQ ID NO: 17776 - DNA, 1014 bp, Homo sapiens
  source 1..1014: mol_type = unassigned DNA
ggacagccagcaccgagccgccatcaacacctactgctccttggcagcctgcgtgcttacctcggtggcaatatccagtgccctgcacaagaagggcaagctggacatggtgcacatccagaatgccacgctcgcaggaggggtggccgtgggtaccgctgctgagatgatgctcatgccttacggtgccctcatcatcggcttcgtctgcggcatcatctccaccctgggttttgtatacctgaccccattcctggagtcccggctgcacatccaggacacatgtggcattaacaatctgcatggcattcctggcatcataggcggcatcgtgggtgctgtgacagcggcctccgccagccttgaagtctatggaaaagaagggcttgtccattcctttgactttcaaggtttcaacggggactggaccgcaagaacacagggaaagttccagatttatggtctcttggtgaccctggccatggccctgatgggtggcatcattgtggggctcattttgagattaccattctggggacaaccttcagatgagaactgctttgaggatgcggtctactgggagatgcctgaagggaacagcactgtctacatccctgaggaccccaccttcaagccctcaggaccctcagtaccctcagtacccatggtgtccccactacccatggcttcctcggtacccttggtaccctaggctcccagggcaggtgaggagcagggggtctgactgagaatggagaaggagaagctacaaagtgggcatccaagccgggttctggctgcagaagttctgcctctgcctggggtcttggccacattggagaaaaacaggctcaaagtggggctgggacctggtgggtgaacctgagctctcccaggagacaacttagctgccagtcaccacctatgaggctcttctaccccgtgcctgcacctcggccagcatctcctatgctccctgggtcccccagacctctctgtgttgtgtgcgtggca

SEQ ID NO: 17777 - DNA, 1405 bp, Homo sapiens
  source 1..1405: mol_type = unassigned DNA
aaccgcccgctgccagcccggccaggcacccctgcagcatggcctggaacaccaacctccgctggcggctgccgctcacctgcctgctcctgcaggtgattatggtgattctcttcggggtgttcgtgcgctacgacttcgaggccgacgcccactggtggtcagagaggacgcacaagaacttgagcgacatggagaacgaattctactatcgctacccaagcttccaggacgtgcacgtgatggtcttcgtgggcttcggcttcctcatgactttcctgcagcgctacggcttcagcgccgtgggcttcaacttcctgttggcagccttcggcatccagtgggcgctgctcatgcagggctggttccacttcttacaagaccgctacatcgtcgtgggcgtggagaacctcatcaacgctgacttctgcgtggcctctgtctgcgtggcctttggggcagttctgggtaaagtcagccccattcagctgctcatcatgactttcttccaagcaccctcttcctgtggatgtactggcccagcttcaactcagccatatcctaccatggggacagccagcaccgagccgccatcaacacctactgctccttggcagcctgcgtgcttacctcggtggcaatatccagtgccctgcacaagaagggcaagctggacatggtgcacatccagaatgccacgctcgcaggaggggtggccgtgggtaccgctgctgagatgatgctcatgccttacggtgccctcatcatcggcttcgtctgcggcatcatctccaccctgggttttgtatacctgaccccattcctggagtcccggctgcacatccaggacacatgtggcattaacaatctgcatggcattcctggcatcataggcggcatcgtgggtgctgtgacagcggcctccgccagccttgaagtctatggaaaagaagggcttgtccattcctttgactttcaaggtttcaacggggactggaccgcaagaacacagggaaagttccagatttatggtctcttggtgaccctggccatggccctgatgggtggcatcattgtggggctcattttgagattaccattctggggacaaccttcagatgagaactgctttgaggatgcggtctactgggagatgcctgaagggaacagcactgtctacatccctgaggaccccaccttcaagccctcaggaccctcagtaccctcagtacccatggtgtccccactacccatggcttcctcggtacccttggtaccctaggctcccagggcaggtgaggagcaggctccacagactgtcctggggcccagaggagctggtgctgacctagctagggatgcaagagtgagcaagcagcacccccacctgctggcttggcctcaa

SEQ ID NO: 17778 - DNA, 1388 bp, Homo sapiens
  source 1..1388: mol_type = unassigned DNA
gcgtccgaaccgcccgctgccagcccggccaggcacccctgcagcatggcctggaacaccaacctccgctggcggctgccgctcacctgcctgctcctgcaggtgattatggtgattctcttcggggtgttcgtgcgctacgacttcgaggccgacgcccactggtggtcagagaggacgcacaagaacttgagcgacatggagaacgaattctactatcgctacccaagcttccaggacgtgcacgtgatggtcttcgtgggcttcggcttcctcatgactttcctgcagcgctacggcttcagcgccgtgggcttcaacttcctgttggcagccttcggcatccagtgggcgctgctcatgcagggctggttccacttcttacaagaccgctacatcgtcgtgggcgtggagaacgattctccagggtgggagtcgtccaagtgtcatacataggagggtctcccttcccctacgacaaaggctgcagggacttgaggctagactttcctctgggggcagggtccgaccgggcccggcacatcaaaatcgcccagccctgtgtcctgagagaccgcagcccacgggactctggtgggagaactgggatgtctgcaccagcctcagaggctccttgtgaaggaaacaccgaatggggactccagccaaatggagcctcatcaacgctgacttctgcgtggcctctgtctgcgtggcctttggggcagttctgggtaaagtcagccccattcagctgctcatcatgactttcttccaagtgaccctcttcgctgtgaatgagttcattctccttaacctgctaaaggtgaaggatgcaggaggctccatgaccatccacacatttggcgcctactttgggctcacagtgacccggatcctctaccgacgcaacctagagcagagcaaggagagacagaattctgtgtaccagtcggacctctttgccatgattggcaccctcttcctgtggatgtactggcccagcttcaactcagccatatcctaccatggggacagccagcaccgagccgccatcaacacctactgctccttggcagcctgcgtgcttacctcggtggcaatatccagtgccctgcacaagaagggcaagctggacatggtgcacatccagaatgccacgctcgcaggaggggtggccgtgggtaccgctgctgagatgatgctcatgccttacggtgccctcatcatcggcttcgtctgcggcatcatctccaccctgggttttgtatacctgaccgtaagtgccccaggcaaggggctgggggctagagaatgctgaggtctttgtgttcctgacagtgagctgagggttcctagggagggggctgagggctagagaatcctgg

SEQ ID NO: 17779 - DNA, 591 bp, Homo sapiens
  source 1..591: mol_type = unassigned DNA
tgggggcatttagcccagaaatgggggtcagggtagacttcctggagtggtgtggaaggctaagtggggggtaaggaaggcagggagggccttccaggaagagcccctgcatgactaaagctgcagaggtggaaacagctgggtgtggggtcatctctagagctaaaggacaggatgcctgcctgagctgtggggctgtatctaatgcctctcctcccgggcccattgggcctgtctggtctgaccaggcaccctcttcctgtggatgtactggcccagcttcaactcagccatatcctaccatggggacagccagcaccgagccgccatcaacacctactgctccttggcagcctgcgtgcttacctcggtggcaatatccagtgccctgcacaagaagggcaagctggacatggtgcacatccagaatgccacgctcgcaggaggggtggccgtgggtaccgctgctgagatgatgctcatgccttacggtgccctcatcatcggcttcgtctgcggcatcatctccaccctgggttttgtatacctgaccgtaagtgccccaggcaaggggctgggggctagagaatg

SEQ ID NO: 17780 - DNA, 2075 bp, Homo sapiens
  source 1..2075: mol_type = unassigned DNA
ggcgtaattaaaaagcggcggaagaaggtgggagggtcatgacgcagcgagtttcagtcgtgacttttctgggggcatcgcggcgtcccctttttttgcctttaaagtaaaacgtcgccccgacgcaccccccgcgtatttcggggggcggaggcggcgggccacggcgcgaagaggggcggtgctgacgccggccggtcacgtgggcgtgttgtgggggggaggggcgccgccgcgcggtcggttccgggcggttgggagcgcgcgagctagcgagcgagaggcagccgcgcccgccgccgcccctgctctgtatgccgctctctcccggcgcggccgccgccgatcacagcagcaggagccaccgccgccgcggttgatgtggttgggccggggctgaggaggccgccaagatgccgcagtccaagtcccggaagatcgcgatcctgggctaccggtctgtggggaaatcctcattgacgattcaatttgttgaaggccaatttgtggactcctacgatccaaccatagaaaacacttttacaaagttgatcacagtaaatggacaagaatatcatcttcaacttgtagacacagccgggcaagatgaatattctatctttcctcagacatactccatagatattaatggctatattcttgtgtattctgttacatcaatcaaaagttttgaagtgattaaagttatccatggcaaattgttggatatggtggggaaagtacaaatacctattatgttggttgggaataagaaagacctgcatatggaaagggtgatcagttatgaagaagggaaagctttggcagaatcttggaatgcagcttttttggaatcttctgctaaagaaaatcagactgctgtggatgtttttcgaaggataattttggaggcagaaaaaatggacggggcagcttcacaaggcaagtcttcatgctcggtgatgtgattctgctgcaaagcctgaggacactgggaatatattctacctgaagaagcaaactgcccgttctccttgaagataaactatgcttcttttttcttctgttaacctgaaagatatcatttgggtcagagctcccctcccttcagattatgttaactctgagtctgtccaaatgagttcacttccattttcaaattttaagcaatcatattttcaatttatatattgtatttcttaatattatgaccaagaattttatcggcattaatttttcagtgtagtttgttgtttaaaataatgtaatcatcaaaatgatgcatattgttacactactattaactaggcttcagtatatcagtgtttatttcattgtgttaaatgtatacttgtaaataaaatagctgcaaacctcagtcctttgtgctacttgatgtggctttcaaagaagagaagccttgtcctgagtttctcacttggcttcaggaaggccccaggttggattccagaaaccagtgaagatgtggccacaggaggaggtgtgctgaggtggctgctgaccgtggactccctgcgcagtggcctgcagatgttggggctgggttacagctgattgaagctgagtggccctggggggtctgtgaggggagttcctccccagtgatgaaattctctccttccaccctcaaatccctagaccttgactgaaatgctccgtggtcgggagcctggtcaaggaggaggagctgctgagaggcattgttcgcccttgctcatagcttagctcgatgtccgtgtcagacaggagatgattgagaacagccttgcctgtcactgtcctagaacaccctggagtttagtgttctgtgtcagagtcttgggagcctccttcagacccagatgacgggcctccctctgtccaaggagcagctgtaaaggagaagagggatttcatttgtttggtggctgttaccttgtctgtaagtcaaacttggagttgagcagtgctttttaaacgattcccttttgcagctaaaatttcacagggctatttctaatacgtaagcaaatgttaccattgactttattaataaaatatagttttgctttgca

SEQ ID NO: 17781 - DNA, 900 bp, Homo sapiens
  source 1..900: mol_type = unassigned DNA
ggccgccgaggagtccgggtctcgtctggggaagtgaggcggcgccggggagccgcgctagaggctgccgcgagggagtcacacctgcctccccgccttcgccgcgggcgcgcgtgaccggggctggcggtctcccccaccccgcccccgatggaaatcctcattgacgattcaatttgttgaaggccaatttgtggactcctacgatccaaccatagaaaacacttttacaaagttgatcacagtaaatggacaagaatatcatcttcaacttgtagacacagccgggcaagatgaatattctatctttcctcagacatactccatagatattaatggctatattcttgtgtattctgttacatcaatcaaaagttttgaagtgattaaagttatccatggcaaattgttggatatggtggggaaagtacaaatacctattatgttggttgggaataagaaagacctgcatatggaaagggtgatcagttatgaagaagggaaagctttggcagaatcttggaatgcagcttttttggaatcttctgctaaagaaaatcagactgctgtggatgtttttcgaaggataattttggaggcagaaaaaatggacggggcagcttcacaaggcaagtcttcatgctcggtgatgtgattctgctgcaaagcctgaggacactgggaatatattctacctgaagaagcaaactgcccgttctccttgaagataaactatgcttcttttttcttctgttaacctgaaagatatcatttgggtcagagctcccctcccttcagattatgttaactctgagtctgtccaaatgagttcacttccattttcaaattttaagcaatcatattttcaatttatatattgtatttcttaatattatgacc

SEQ ID NO: 17782 - DNA, 1153 bp, Homo sapiens
  source 1..1153: mol_type = unassigned DNA
ggcatcgcggcgtcccctttttttgcctttaaagtaaaacgtcgccccgacgcaccccccgcgtatttcggggggcggaggcggcgggccacggcgcgaagaggggcggtgctgacgccggccggtcacgtgggcgtgttgtgggggggaggggcgccgccgcgcggtcggttccgggcggttgggagcgcgcgagctagcgagcgagaggcagccgcgcccgccgccgcccctgctctgtatgccgctctctcccggcgcggccgccgccgatcacagcagcaggagccaccgccgccgcggttgatgtggttgggccggggctgaggaggccgccaagatgccgcagtccaagtcccggaagatcgcgatcctgggctaccggtctgtgggttcctcaagccaggacctacgcacctgttgtgagtggtgttatagttctgcagggcgcacaggtgcatccccatgggcacatttaatttagggaaatcctcattgacgattcaatttgttgaaggccaatttgtggactcctacgatccaaccatagaaaacacttttacaaagttgatcacagtaaatggacaagaatatcatcttcaacttgtagacacagccgggcaagatgaatattctatctttcctcagacatactccatagatattaatggctatattcttgtgtattctgttacatcaatcaaaagttttgaagtgattaaagttatccatggcaaattgttggatatggtggggaaagtacaaatacctattatgttggttgggaataagaaagacctgcatatggaaagggtgatcagttatgaagaagggaaagctttggcagaatcttggaatgcagcttttttggaatcttctgctaaagaaaatcagactgctgtggatgtttttcgaaggataattttggaggcagaaaaaatggacggggcagcttcacaaggcaagtcttcatgctcggtgatgtgattctgctgcaaagcctgaggacactgggaatatattctacctgaagaagcaaactgcccgttctccttgaagataaactatgcttcttttttcttctgttaacctgaaagatatcatttgggtcagagctcccctcccttcagattatgttaactctgagtctgtc

SEQ ID NO: 17783 - DNA, 744 bp, Homo sapiens
  source 1..744: mol_type = unassigned DNA
accggttggaagtttgaagccttcaaacctagccggcgcccaacagcgcggtagcagcgaggtgtatttttagctcccgggcgggcagccccgcccccccctccccgcctccttgtttcccccaatgggagatggagtttccgacacgtcatcgcgcggctgtgcaggagctgtccaatcggcgctcggggagaatggcgtaattaaaaagcggcggaagaagggaaatcctcattgacgattcaatttgttgaaggccaatttgtggactcctacgatccaaccatagaaaacacttttacaaagttgatcacagtaaatggacaagaatatcatcttcaacttgtagacacagccgggcaagatgaatattctatctttcctcagacatactccatagatattaatggctatattcttgtgtattctgttacatcaatcaaaagttttgaagtgattaaagttatccatggcaaattgttggatatggtggggaaagtacaaatacctattatgttggttgggaataagaaagacctgcatatggaaagggtgatcagttatgaagaagggaaagctttggcagaatcttggaatgcagcttttttggaatcttctgctaaagaaaatcagactgctgtggatgtttttcgaaggataattttggaggcagaaaaaatggacggggcagcttcacaaggcaagtcttcatgctcggtgatgtgattctgctgcaaagcctga

SEQ ID NO: 17784 - DNA, 764 bp, Homo sapiens
  source 1..764: mol_type = unassigned DNA
agtcagggttgctgagtgtcagatgtatgcacatgtgaatggattgctaggaaaaaacaggagttctttgtgttcattttatgttatgttaaaatggtgagtctgtgacattttacatttttccagctggcaacataacatacatttaaaaacttcaacattaaaatggatgtctaatttatactttttgttttatagttttgaagtgattaaagttatccatggcaaattgttggatatggtggggaaagtacagtaagtagtaccattttatctgcttgttagagaaacttcttttaatagtatcttctgagcaatacaatctggcacttactggtttgtcttttttttcttacaaatagaatacctattatgttggttgggaataagaaagacctgcatatggaaagggtgatcagttatgaagaagggaaagctttggcagaatcttggaatgcagcttttttggaatcttctgctaaagaaaatcaggtaacagattctataaacctcattttgcattgcgttctcatcagtcgcagggatgtgttccttgcagttggcatttgacctctgtcttgatcactcctgtgtaacatctggccttcctccatttctaataccaagttttgtgttgctttaggaagatactacttaggtgtttataaattcagtcagtattctacttacagtggaacctaggatatttgtaggataaacagaaactattagtaaaggaaatactaccttttgtaaacatatat

SEQ ID NO: 17785 - DNA, 501 bp, Homo sapiens
  source 1..501: mol_type = unassigned DNA
atggaggggttcaaagtcactaattgttcaaatatcaacatggaacctgggatccagcctttattggcagcctgaatccatgctcttgtctctgttctcttgatttcctcctctgcattttgaggagttgggaccgcgaggtgttctggctcttgggtgagccttccctagtcagtcaaggaaatcctcattgacgattcaatttgttgaaggccaatttgtggactcctacgatccaaccatagaaaacacttttacaaagttgatcacagtaaatggacaagaatatcatcttcaacttgtagacacagccgggcaagatgaatattctatctttcctcagacatactccatagatattaatggctatattcttgtgtattctgttacatcaatcaaaagttttgaagtgattaaagttatccatggcaaattgttggatatggtggggaaagtacaaatacctattatgttggttgggaataagaaagacctgcatat

SEQ ID NO: 17786 - DNA, 557 bp, Homo sapiens
  source 1..557: mol_type = unassigned DNA
tccatcctagagtcatcggctcattgatctgattgaaagccaagagatactggcatcacccagagaatgtatgtacctaggaaagaacacaggagcaggctgaatgtactagggcactctaggaaaagctgttcaagttgtaatgtaaacagttggttctttgctgaatgagttgggtgattaaaatttgcatttatgtggtttctcagcccagtggtaggctttccgtttgaatgccttacctgtttcactttgaatatcctcagtcagggttgctgagtgtcagatgtatgcacatgtgaatggattgctaggaaaaaacaggagttctttgtgttcattttatgttatgttaaaatggtgagtctgtgacattttacatttttccagctggcaacataacatacatttaaaaacttcaacattaaaatggatgtctaatttatactttttgttttatagttttgaagtgattaaagttatccatggcaaattgttggatatggtggggaaagtacaaatacctattatgttggttgggaataagaaagacctgc

SEQ ID NO: 17787 - DNA, 2372 bp, Homo sapiens
  source 1..2372: mol_type = unassigned DNA
atctgccaccgcagtctggttggagctgttgtcttgtatgctcagcgaggcccggagagacccgggagagagctaggccgagtccaccgcccgagtctgctgcccgagcccgcgttacgcacaaagccgccgatccccggcctggggtgagcagagcgaccaccgcccgggagcagcgcggcgagacgcacggtgcgccctatgcccccgcgcccccaccgcccccgccgcggcagccgaagcgcagcgagagaacgcgccaccgcggggcccgggtgcagctagcgaccctctcgccacctgcgcgcagcccgaggtgagcagtgagcggcgagcgggagggcagcgaggcgttcgcgggccccctcctgctgcccgggcccggcccgctcatggcggccatccgcaagaagctggtggtggtgggcgacggcgcgtgtggcaagacgtgcctgctgatcgtgttcagtaaggacgagttccccgaggtgtacgtgcccaccgtcttcgagaactatgtggccgacattgaggtggacggcaagcaggtggagctggcgctgtgggacacggcgggccaggaggactacgaccgcctgcggccgctctcctacccggacaccgacgtcattctcatgtgcttctcggtggacagcccggactcgctggagaacatccccgagaagtgggtccccgaggtgaagcacttctgtcccaatgtgcccatcatcctggtggccaacaaaaaagacctgcgcagcgacgagcatgtccgcacagagctggcccgcatgaagcaggaacccgtgcgcacggatgacggccgcgccatggccgtgcgcatccaagcctacgactacctcgagtgctctgccaagaccaaggaaggcgtgcgcgaggtcttcgagacggccacgcgcgccgcgctgcagaagcgctacggctcccagaacggctgcatcaactgctgcaaggtgctatgagggccgcgcccgtcgcgcctgcccctgccggcacggctccccctcctggaccagtcccccgcgagcccggagaaggggagacccgtgtcccacaaggaccccaccggcctgcctggcatctgtctgctgacgcctctggcttgcgccaggacttggcgtgggcaccgggcgcccccatcccagtgtctgtgtgcgtccagctgtgttgcacaggcctgggctccccactgagtgccaagggtcccctgagcatgcttttctgaagagccgggcctcagagtgtgtggctgtgtgtctgttcgactcccctcgccccattttcaccccacccccgcctctgatccccgggggcgagattggcgcgggagtgtggccgcgccccatcagatgttcgcccttcaccagcgggagcttgatatcccttgtctgtaacatagaccccgggtactgcgggaggggagggctgctggggaggatggggggatgttatataaatatagatataattttattttcggagctaagatggtgttatttaagggtggtgatgggtgagcgctctggcccaggctgggccagactcccgcccaagcatgaacaggacttgaccatctttccaacccctggggaagacatttgcaactgacttggggaggacacagcttcagcacagcctctcctgcgggccagcccgctgcgaaccctccaccagctaccggagggaggagggaggatgcgctgtggggttgtttttgccataagcgaactttgtgcctgtcctagaagtgaaaattgttcagtccaagaaactgatgttatttgatttatttaaaggctaaaatttgtttttttattctttgcacaattgtttcattgtttgacacttaatgcactcgtcatttgcatacgacagtagcattctgaccacacttgtacgctgtaacctcatctacttctgatgtttttaaaaaatgacttttaacaaggagagggaaaagaaacccactaaattttgctttgtttccttgaagaatgtggcaacactgttttgtgattttatttgtgcaggtcatgcacacagttttgataaagggcagtaacaagtattggggcctattttttttttttccacaaggcattctctaaagctatgtgaaattttctctgcacctctgtacagagaatacacctgcccctgtatatccttttttcccctcccctccctcccagtggtacttctactaaattgttgtcttgttttttattttttaaataaactgacaaatgacaaaatggtgagcttatgatgtttacataaaagttctataagctgtgtatacagttttttatgtaaaatattaaaagactatgatgatgacatttataaaa

SEQ ID NO: 17788 - DNA, 4473 bp, Homo sapiens
  source 1..4473: mol_type = unassigned DNA
ggggtgggggcaggcgaaggggagggctgcgggtggaaaggggcgagcccctctcgcccgggactgggaagagcggccacggcgccgggcgaggcggcagggcgaggcagtgccatgctgcctttgtgcaaagttgggcggcgggcggcgcgccgcgcgcaggggccccgcacacccgcgaccgcgcgcagccgtggctgctgctgagtggcgggggcccccccgctccccccggcccttgaaggcggagagagctcgcgtctcgctcggcttcagggtaagtccagctgtgagcagagtgttctgttcttcacttccagcaagccagagtttcataaatggacgctgacatggactacgaaagacccaacgttgaaactatcaaatgtgtggtcgtgggtgacaatgccgtggggaagacgcgcttgatctgtgccagggcgtgcaacaccacactcacgcagtatcagctgctggccacccacgtgccaacagtgtgggcgattgaccagtaccgcgtgtgccaggaggtcttggagcgttctcgggatgttgttgatgaagtgagtgtttctctcaggctttgggatacttttggtgatcatcacaaagacagacgctttgcatatggcaggtctgatgttgtggtcctctgtttttcgattgctaatcccaattccctaaatcatgtgaaaagcatgtggtatccagaaatcaagcacttttgccctcgaacacccgttatccttgttgggtgccagcttgatctccgctatgccgacctggaagctgttaatcgagccaggcgcccgttagcaaggcccataaagagaggggatattttgcccccagaaaaaggccgagaggtagcaaaggaacttggcttaccatactatgaaacaagcgtgtttgaccagtttggtatcaaggatgtgtttgacaatgcaatccgagcagcgctgatttcccgcaggcacctgcaattctggaaatcccacctaaagaaagtccagaaacctttacttcaggcacccttcctacctccaaaagcccctccaccggtcatcaaaattccagagtgtccttccatggggacaaatgaagctgcctgtttactggacaatcctctatgtgccgatgttctgttcatccttcaggaccaggaacacatctttgcacatcgaatttacctcgctacctcttcttccaaattttatgatctgtttttaatggaatgtgaagaatccccaaatgggagtgaaggagcctgtgagaaagagaagcagagcagagatttccaggggcggatattgagtgtcgacccagaggaagaaagggaggagggcccgcctaggattcctcaggccgaccagtggaagtcttcaaacaagagcctggtggaggctctggggctggaagccgagggtgcagttcctgagacacagactttgaccggatggagtaaggggttcattggcatgcacagggaaatgcaagtcaaccccatttcaaagcggatggggcccatgactgtggtcaggatggacgcttcagtccagccaggcccttttcggaccctgctccagtttctttatacgggacaactggatgaaaaggaaaaggatttggtgggcctggctcagatcgcagaggtcctcgagatgttcgatttgaggatgatggtggaaaacatcatgaacaaggaagccttcatgaaccaggagattacgaaagcctttcacgtaaggaaagccaatcggataaaagagtgtctcagcaagggaacgttctcggacgtgacatttaaattggacgatggagccatcagtgcccacaagccgctgctgatctgtagctgtgagtggatggcagccatgttcggggggtcatttgtggaaagtgccaacagtgaggtgtatctcccgaacataaacaagatatcaatgcaagcagtattggattatctctataccaagcagttgtctcctaacttggatctggacccgctggaattaattgccttggcaaacagattttgcctgccacacttggttgcacttgcagaacagcatgccgttcaggagttgaccaaagccgccacgagtggcgtgggcattgacggagaagtgctctcttacttggaattggctcagtttcacaatgcccaccagttggccgcctggtgtttgcaccacatctgcaccaactacaacagtgtatgctccaagttccgtaaggaaatcaaatcaaaatctgcagacaaccaggaatacttcgagcggcaccgctggccccctgtgtggtacctgaaggaagaagatcactaccagcgtgtgaaaagggaacgagagaaggaagatattgcactaaataagcatcgctcaagacgaaagtggtgcttctggaattcatctccagcagtggcctgaagaggaagagaaaaaaaacaaaaaacagaaaccaatcggtaatctgatccaccacttttcaaagcactactataaaattcgtcttgttagagatacgacatagttcaggtttcgggcactgatcttcctccacttttgtgcatttatctttgttaggatcaaagcacaagctcaccatcaatgagcctggacaaaaagggaagctgactctcactgcattccttaaactgatatgtatattttttttgttaggaggcttaataaactttagtctgttattttgtttctttttatacaaagaaaaaaaattcagctttcatgtttctgattccagattggaaaatatttttatatggtctgttgtattttgttgaaatgaaaatactgtgtattactttattttacaggccacaattgattatgaagtcaccctgtgattctctttgcccacatgaccaccgagcattattacgtaattagagggttatccttttgttgtgaaaggaaggaggggactgaaatctcccaaagtgcaaattggagagtgtttaatctttgttctgttgaataacatcggtgtaattacaaagtcaactccaagaatgtgtatttacaatatttgccatgttaagtgctggtaattatatggttatatgtgccatgtaaaatatagtgatatcaaatattctgttgtttccaatgtctagtttcaagaggacaatctttataatcattagaagggcttattaaatcccagcattatccagggcaaactcactggtggacctgaatacataagataccattagtgcgctggtgttcggattgctgtattagggtttacatctctcagtattccttgaacttgccatgcttctgcatgcagattcttcactgacttgaattgagatgggcaagggaaaaggtccctggactccctcctgccatctacaggcttgtcacatctcaccaccagaaacaggcttcctcaggcttctcacctgtggccaacttcactttgtaagacccatatttttaactcttcccagggaaaattcatgttgctgcagaagtaggctaaggcagaccacccacttctgctgaaatgcattgggagcctgtgaaagcacaaagctggaggctgggcgcctgcgttctcctacacggaaaggaatctaattccaagagtctaggaaatggtgctattgtgagttcgttctgactctttctcattctgagttttcagtgttaaactaggaagtgtgacagcaggggagctttcgtgaggcagtcagtcattgcttctctgtaaattaaaatgttacagcacacacatacacacacagagagcatttcaaggccacagctccacacctgccatgggatgttaatgtggcagggggtggggctcattctgttgggaggtcaaattaccaatgccaaggactgttgattttgtttttatttttattttttcttctagcttttcagaagatggaaatgagacagttgagtccaaaccccaatgctgacagccatatgcatttgaaaatctatctagattacagatgggcatttattactggcagtggaaacaccagatagaagatcttaggagaggcccagaaatgcatcaccttgtcatgacaaaagagaaggcagtagagtagggatagttacaaatgcatccatcttaattattttcaataggcttgtaaatcttatcgatggaaggagaaaggagacaagatgtggaagaattgacatgtatcccaccataaaatggtagaagatgagttttcaatgagtagtcatagttgaaattttacaaccaaagctcccatttgattgtaatcttgccaaaatataatggatgtataaatgaacttggggtataagcaataatatccactagtgttgttatcagctactgtaaccaagtggctggttcatttggttgatgctgattatggcctttaaccatggtggtttgttgtgtgttttttatttcacaaaaagccaataaaattgtttagctataaaa

SEQ ID NO: 17789 - DNA, 4339 bp, Homo sapiens
  source 1..4339: mol_type = unassigned DNA
ggcgggacccagagccgccgcgggagcttccagcgtccccaggttttataataatcaagaagcacatgaaagaggcctcttcatcaagcattcttgactaagttatgaaaatggaattgaagtttattttcccccttcatatggtaagtccagctgtgagcagagtgttctgttcttcacttccagcaagccagagtttcataaatggacgctgacatggactacgaaagacccaacgttgaaactatcaaatgtgtggtcgtgggtgacaatgccgtggggaagacgcgcttgatctgtgccagggcgtgcaacaccacactcacgcagtatcagctgctggccacccacgtgccaacagtgtgggcgattgaccagtaccgcgtgtgccaggaggtcttggagcgttctcgggatgttgttgatgaagtgagtgtttctctcaggctttgggatacttttggtgatcatcacaaagacagacgctttgcatatggcaggtctgatgttgtggtcctctgtttttcgattgctaatcccaattccctaaatcatgtgaaaagcatgtggtatccagaaatcaagcacttttgccctcgaacacccgttatccttgttgggtgccagcttgatctccgctatgccgacctggaagctgttaatcgagccaggcgcccgttagcaaggcccataaagagaggggatattttgcccccagaaaaaggccgagaggtagcaaaggaacttggcttaccatactatgaaacaagcgtgtttgaccagtttggtatcaaggatgtgtttgacaatgcaatccgagcagcgctgatttcccgcaggcacctgcaattctggaaatcccacctaaagaaagtccagaaacctttacttcaggcacccttcctacctccaaaagcccctccaccggtcatcaaaattccagagtgtccttccatggggacaaatgaagctgcctgtttactggacaatcctctatgtgccgatgttctgttcatccttcaggaccaggaacacatctttgcacatcgaatttacctcgctacctcttcttccaaattttatgatctgtttttaatggaatgtgaagaatccccaaatgggagtgaaggagcctgtgagaaagagaagcagagcagagatttccaggggcggatattgagtgtcgacccagaggaagaaagggaggagggcccgcctaggattcctcaggccgaccagtggaagtcttcaaacaagagcctggtggaggctctggggctggaagccgagggtgcagttcctgagacacagactttgaccggatggagtaaggggttcattggcatgcacagggaaatgcaagtcaaccccatttcaaagcggatggggcccatgactgtggtcaggatggacgcttcagtccagccaggcccttttcggaccctgctccagtttctttatacgggacaactggatgaaaaggaaaaggatttggtgggcctggctcagatcgcagaggtcctcgagatgttcgatttgaggatgatggtggaaaacatcatgaacaaggaagccttcatgaaccaggagattacgaaagcctttcacgtaaggaaagccaatcggataaaagagtgtctcagcaagggaacgttctcggacgtgacatttaaattggacgatggagccatcagtgcccacaagccgctgctgatctgtagctgtgagtggatggcagccatgttcggggggtcatttgtggaaagtgccaacagtgaggtgtatctcccgaacataaacaagatatcaatgcaagcagtattggattatctctataccaagcagttgtctcctaacttggatctggacccgctggaattaattgccttggcaaacagattttgcctgccacacttggttgcacttgcagaacagcatgccgttcaggagttgaccaaagccgccacgagtggcgtgggcattgacggagaagtgctctcttacttggaattggctcagtttcacaatgcccaccagttggccgcctggtgtttgcaccacatctgcaccaactacaacagtgtatgctccaagttccgtaaggaaatcaaatcaaaatctgcagacaaccaggaatacttcgagcggcaccgctggccccctgtgtggtacctgaaggaagaagatcactaccagcgtgtgaaaagggaacgagagaaggaagatattgcactaaataagcatcgctcaagacgaaagtggtgcttctggaattcatctccagcagtggcctgaagaggaagagaaaaaaaacaaaaaacagaaaccaatcggtaatctgatccaccacttttcaaagcactactataaaattcgtcttgttagagatacgacatagttcaggtttcgggcactgatcttcctccacttttgtgcatttatctttgttaggatcaaagcacaagctcaccatcaatgagcctggacaaaaagggaagctgactctcactgcattccttaaactgatatgtatattttttttgttaggaggcttaataaactttagtctgttattttgtttctttttatacaaagaaaaaaaattcagctttcatgtttctgattccagattggaaaatatttttatatggtctgttgtattttgttgaaatgaaaatactgtgtattactttattttacaggccacaattgattatgaagtcaccctgtgattctctttgcccacatgaccaccgagcattattacgtaattagagggttatccttttgttgtgaaaggaaggaggggactgaaatctcccaaagtgcaaattggagagtgtttaatctttgttctgttgaataacatcggtgtaattacaaagtcaactccaagaatgtgtatttacaatatttgccatgttaagtgctggtaattatatggttatatgtgccatgtaaaatatagtgatatcaaatattctgttgtttccaatgtctagtttcaagaggacaatctttataatcattagaagggcttattaaatcccagcattatccagggcaaactcactggtggacctgaatacataagataccattagtgcgctggtgttcggattgctgtattagggtttacatctctcagtattccttgaacttgccatgcttctgcatgcagattcttcactgacttgaattgagatgggcaagggaaaaggtccctggactccctcctgccatctacaggcttgtcacatctcaccaccagaaacaggcttcctcaggcttctcacctgtggccaacttcactttgtaagacccatatttttaactcttcccagggaaaattcatgttgctgcagaagtaggctaaggcagaccacccacttctgctgaaatgcattgggagcctgtgaaagcacaaagctggaggctgggcgcctgcgttctcctacacggaaaggaatctaattccaagagtctaggaaatggtgctattgtgagttcgttctgactctttctcattctgagttttcagtgttaaactaggaagtgtgacagcaggggagctttcgtgaggcagtcagtcattgcttctctgtaaattaaaatgttacagcacacacatacacacacagagagcatttcaaggccacagctccacacctgccatgggatgttaatgtggcagggggtggggctcattctgttgggaggtcaaattaccaatgccaaggactgttgattttgtttttatttttattttttcttctagcttttcagaagatggaaatgagacagttgagtccaaaccccaatgctgacagccatatgcatttgaaaatctatctagattacagatgggcatttattactggcagtggaaacaccagatagaagatcttaggagaggcccagaaatgcatcaccttgtcatgacaaaagagaaggcagtagagtagggatagttacaaatgcatccatcttaattattttcaataggcttgtaaatcttatcgatggaaggagaaaggagacaagatgtggaagaattgacatgtatcccaccataaaatggtagaagatgagttttcaatgagtagtcatagttgaaattttacaaccaaagctcccatttgattgtaatcttgccaaaatataatggatgtataaatgaacttggggtataagcaataatatccactagtgttgttatcagctactgtaaccaagtggctggttcatttggttgatgctgattatggcctttaaccatggtggtttgttgtgtgttttttatttcacaaaaagccaataaaattgtttagctataaaa

SEQ ID NO: 17790 - DNA, 376 bp, Homo sapiens
  source 1..376: mol_type = unassigned DNA
atctttccttcaccagacaaccaggaatacttcgagcggcaccgctggccccctgtgtggtacctgaaggaagaagatcactaccagcgtgtgaaaagggaacgagagaaggaagatattgcactaaataagcatcgctcaagacgaaagtggtgcttctggaattcatctccagcagtggcctgaagaggaagagaaaaaaaacaaaaaacagaaaccaatcggatcaaagcacaagctcaccatcaatgagcctggacaaaaagggaagctgactctcactgcattccttaaactgatatgtatattttttttgttaggaggcttaataaactttagtctgttattttgtttctttttatacaaagaaaaaaaa

SEQ ID NO: 17791 - DNA, 447 bp, Homo sapiens
  source 1..447: mol_type = unassigned DNA
cagttggccgcctggtgtttgcaccacatctgcaccaactacaacagtgtatgctccaagttccgtaaggaaatcaaatcaaaatctgcagacaaccaggaatacttcgagcggcaccgctggccccctgtgtggtacctgaaggaagaagatcactaccagcgtgtgaaaagggaacgagagaaggaagatattgcactaaataagcatcgctcaagacgaaagtggtgcttctggaattcatctccagcagtggcctgaagaggaagagaaaaaaaacaaaaaacagaaaccaatcggatcaaagcacaagctcaccatcaatgagcctggacaaaaagggaagctgactctcactgcattccttaaactgatatgtatattttttttgttaggaggcttaataaactttagtctgttattttgtttctttttatacaaagaaaa

SEQ ID NO: 17792 - DNA, 518 bp, Homo sapiens
  source 1..518: mol_type = unassigned DNA
gaacagcatgccgttcaggagttgaccaaagccgccacgagtggcgtgggcattgacggagaagtgctctcttacttggaattggctcagtttcacaatgcccaccagttggccgcctggtgtttgcaccacatctgcaccaactacaacagtgtatgctccaagttccgtaaggaaatcaaatcaaaatctgcaggtgagactgtgtgaggcccccattcatccagctctcctcacctctcatggaagcttttatcttctatgtccctggaaaggaacatggtcagcaggcagctcatggatgattcctcgagactggctggtggtcacatattaatacaaccaggaatacttcgagcggcaccgctggccccctgtgtggtacctgaaggaagaagatcactaccagcgtgtgaaaagggaacgagagaaggaagatattgcactaaataagcatcgctcaagacgaaagtggtgcttctggaattcatctccagcagtggcctgaagaggaagag

SEQ ID NO: 17793 - DNA, 475 bp, Homo sapiens
  source 1..475: mol_type = unassigned DNA
tcaggatggacgcttcagtccagccaggcccttttcggaccctgctccagtttctttatacgggacaactggatgaaaaggaaaaggatttggtgggcctggctcagatcgcagaggtcctcgagatgttcgatttgaggatgatggtggaaaacatcatgaacaaggaagccttcatgaaccaggagattacgaaagcctttcacgtaaggaaagccaatcggataaaagagtgtctcagcaagggaacgttctcgggtgtatctcccgaacataaacaagatatcaatgcaagcagtattggattatctctataccaagcagttgtctcctaacttggatctggacccgctggaattaattgccttggcaaacagattttgcctgccacacttggttgcacttgcagatttgttcagttgggaagctgaagcaggtctgcataggatatatgaacttaaatgcctttctctgg

SEQ ID NO: 17794 - DNA, 575 bp, Homo sapiens
  source 1..575: mol_type = unassigned DNA
accttctgccatgattggaaatttcctgaggcctccccagaagcagaatcctgtacagcctgcagaattgtgagccattaaatctcttttctttataaattacctagtcgcaggtatgtctttatagtgtgtgagaagagactaacacaccagtagataatctaaggtagatctcctttacatcagacagataactcagctaatacagttggtgacaaaggagactctgaaggggaggagccaggggaagaaaatatcctgtctcattctgctgcctctgatctctgcattgactaaacctaactagaagccagaggccaaaggaatctgtcgatatacaagctagcttcccagtggatggagcaggatggagaagaggaagaacgggcctggagggacaaacaaagggttaaaagaaaaggtccatccacatcgtggcgctggggaacgagggggacacattccaccaggacaaccggccgtcggggcttatccgcacttacctggggagaagccctctggtctccggggacgagagcagcttgttgctgaacgcggccagcacggtcgcgcgt

SEQ ID NO: 17795 - DNA, 560 bp, Homo sapiens
  source 1..560: mol_type = unassigned DNA
accttctgccatgattggaaatttcctgaggcctccccagaagcagaatcctgtacagcctgcagaattataactcagctaatacagttggtgacaaaggagactctgaaggggaggagccaggggaagaaaatatcctgtctcattctgctgcctctgatctctgcattgactaaacctaactagaagccagaggccaaaggaatctgtcgatatacaagctagcttcccagtggatggagcaggatggagaagaggaagaacgggcctggagggacaaacaaagggttaaaagaaaaggtccatccacatcgtggcgctggggaacgagggggacacattccaccaggacaaccggccgtcggggcttatccgcacttacctggggagaagccctctggtctccggggacgagagcagcttgttgctgaacgcggccagcacggtcgcgcgtccggtgttcaccgagtatcaggccagtgcgtttgggaatgtcaagctggtggtccacgactgtcccgtctgggacatatttgacagtgattggtacacttctcgaa

SEQ ID NO: 17796 - DNA, 1511 bp, Homo sapiens
  source 1..1511: mol_type = unassigned DNA
attgactaaacctaactagaagccagaggccaaaggaatctgtcgatatacaagctagcttcccagtggatggagcaggatggagaagaggaagaacgggcctggagggacaaacaaagggttaaaagaaaaggtccatccacatcgtggcgctggggaacgagggggacacattccaccaggacaaccggccgtcggggcttatccgcacttacctggggagaagccctctggtctccggggacgagagcagcttgttgctgaacgcggccagcacggtcgcgcgtccggtgttcaccgagtatcaggccagtgcgtttgggaatgtcaagctggtggtccacgactgtcccgtctgggacatatttgacagtgattggtacacttctcgaaatctaattgggggcgctgacatcattgtgatcaaatacaacgttaatgacaagttttcattccatgaagtaaaggataattatattccagtgataaaaagagcattaaattcagttccagtaattattgctgctgttggtaccagacaaaatgaagagttaccttgtacatgcccactatgtacctcagacagagggagctgtgttagtacaactgaagggatccaacttgcaaaagaactaggagcgacctatcttgaactccacagccttgatgacttctacataggaaagtattttggaggagtgttggagtattttatgattcaagccttaaatcagaagacaagtgaaaaaatgaagaaaagaaaaatgagcaactcctttcatggaattagaccacctcaacttgaacaaccagaaaaaatgcctgtcttaaaggctgaagcgtcacattataactctgacttaaataacttgctgttctgctgccagtgtgtggacgtggtattttacaaccccaatttaaagaaagttgtagaggcccacaagatcgttctctgcgctgtaagccatgttttcatgctgcttttcaatgtgaagagtcccactgacattcaggattccagtatcatccgaactacccaggatctttttgctataaacagagatactgcatttccaggtgctagccatgaatcttcaggcaacccaccattacgagtcattgttaaagacgccctcttctgttcttgtttatcagacatccttcgcttcatttattcaggtatcttgtcaagtggttctggttacttacaatctcataagctttggaaatgaaatgtgcctgtgacactcaagggtactggttagttttacagtggtctttacctaccatctgagattaagattatacatgaaatattatttgctttatatataagaattggtccaagctttctgttttccttacaaatgtacttgcctcatcttttccctatcaatttcattttattgtggtaaaatacatagaacataaattttaccatcttaaccatttttaagaacacagttcagtggaattaaacacattcataatgttgtgtaactatcaccacc

SEQ ID NO: 17797 - DNA, 547 bp, Homo sapiens
  source 1..547: mol_type = unassigned DNA
gacaaatgagaaagcggcagacgtggtccatccacatcgtggcgctggggaacgagggggacacattccaccaggacaaccggccgtcggggcttatccgcacttacctggggagaagccctctggtctccggggacgagagcagcttgttgctgaacgcggccagcacggtcgcgcgtccggtgttcaccgagtatcaggccagtgcgtttgggaatgtcaagctggtggtccacgactgtcccgtctgggacatatttgacagtgattggtacacttctcgaaatctaattgggggcgctgacatcattgtgatcaaatacaacgttaatgacaagttttcattccatgaagtaaaggataattatattccagtgataaaaagagcattaaattcagttccagtaattattgctgctgttggtaccagacaaaatgaagagttaccttgtacatgcccactatgtacctcagacagagggagctgtgttagtacaactgaagggatccaacttgcaaaagaactaggagcgacctatcttgaact

SEQ ID NO: 17798 - DNA, 1432 bp, Homo sapiens
  source 1..1432: mol_type = unassigned DNA
cgcgcgggcggctcctttgtgtccagccgccgccaccggagctcccggggcctccgcggggagcgcgtcccccgcatccgcccgacccccggggctggcacgtgctgcgcccggtccgctgagggggcggaggccccgatctccccgaccccccttctctgcttagaggaggaggagcagcggcagcggcagcaggaggcgacagctgccagccgaggaggcgcggcggagaggggactgcggtcagctgcgtccacttggggctgtgcggcggtcccgcgcccggcgatgttcccgggcactccctgagtagcggcagcttatcccccgcccgctagcccgccctggtccccggctcgctcgctggctggcgcggccccggccccgctctgcgtcggccccgccgcggtggaggcgcgcgagggggacgcggccggggatgagcggattgcgggtgaactcgccgcccgggggccccgcgaagccgtgagccgctgcttttctccgagtcgccgccctgcccttggatttgagatcatgtccatccacatcgtggcgctggggaacgagggggacacattccaccaggacaaccggccgtcggggcttatccgcacttacctggggagaagccctctggtctccggggacgagagcagcttgttgctgaacgcggccagcacggtcgcgcgtccggtgttcaccgagtatcaggccagtgcgtttgggaatgtcaagctggtggtccacgactgtcccgtctgggtaaggaagagcagctgctccgcgctgaggctgaagaagcttttctttccttttttttccccctcccccttctgcccacttccgtgagtgtggagtgtccgcgttacatgggtcaaatttttaaacatttttgagaaaatctttggtcctttgtttcactgggcagggaacagccctgtcagagaacactcttaggaagatagaaggccccagtgggaatgtggagcacttactggtacacttcacgactgtgggttgacccttggtaggcagcagacagttgaatgtgccaactccaagggacggggtcactaagtttcatcagcaaaaagcagtgtttttttatgtctaccctatgggtgatagtgtaatattggtgttctaaaaatacatccctctcaaagctcaacacaggcaaaaatacttttcactgggacagttcagaaatagttcctctggaaagcggaggaaaagacagggactgggagttaattttaaatgactcatttatagcactattaattgatctctgaaaacttaattttaataatgcaaatactctttatgtgttagccatttgtcttagtgactcataaatcagaaataacattactaatgttgtttggaaaacttttaaaaaattaaaatttgtaataattgaacaaaa

SEQ ID NO: 17799 - DNA, 5537 bp, Homo sapiens
  source 1..5537: mol_type = unassigned DNA
ccgccaccggagctcccggggcctccgcggggagcgcgtcccccgcatccgcccgacccccggggctggcacgtgctgcgcccggtccgctgagggggcggaggccccgatctccccgaccccccttctctgcttagaggaggaggagcagcggcagcggcagcaggaggcgacagctgccagccgaggaggcgcggcggagaggggactgcggtcagctgcgtccacttggggctgtgcggcggtcccgcgcccggcgatgttcccgggcactccctgagtagcggcagcttatcccccgcccgctagcccgccctggtccccggctcgctcgctggctggcgcggccccggccccgctctgcgtcggccccgccgcggtggaggcgcgcgagggggacgcggccggggatgagcggattgcgggtgaactcgccgcccgggggccccgcgaagccgtgagccgctgcttttctccgagtcgccgccctgcccttggatttgagatcatgtccatccacatcgtggcgctggggaacgagggggacacattccaccaggacaaccggccgtcggggcttatccgcacttacctggggagaagccctctggtctccggggacgagagcagcttgttgctgaacgcggccagcacggtcgcgcgtccggtgttcaccgagtatcaggccagtgcgtttgggaatgtcaagctggtggtccacgactgtcccgtctgggacatatttgacagtgattggtacacttctcgaaatctaattgggggcgctgacatcattgtgatcaaatacaacgttaatgacaagttttcattccatgaagtaaaggataattatattccagtgataaaaagagcattaaattcagttccagtaattattgctgctgttggtaccagacaaaatgaagagttaccttgtacatgcccactatgtacctcagacagagggagctgtgttagtacaactgaagggatccaacttgcaaaagaactaggagcgacctatcttgaactccacagccttgatgacttctacataggaaagtattttggaggagtgttggagtattttatgattcaagccttaaatcagaagacaagtgaaaaaatgaagaaaagaaaaatgagcaactcctttcatggaattagaccacctcaacttgaacaaccagaaaaaatgcctgtcttaaaggctgaagcgtcacattataactctgacttaaataacttgctgttctgctgccagtgtgtggacgtggtattttacaaccccaatttaaagaaagttgtagaggcccacaagatcgttctctgcgctgtaagccatgttttcatgctgcttttcaatgtgaagagtcccactgacattcaggattccagtatcatccgaactacccaggatctttttgctataaacagagatactgcatttccaggtgctagccatgaatcttcaggcaacccaccattacgagtcattgttaaagacgccctcttctgttcttgtttatcagacatccttcgcttcatttattcaggtgcttttcagtgggaagaattggaagaagatatcaggaagaagttgaaagattctggggatgtttcaaatgtaatcgagaaagttaaatgcattttaaaaacaccaggaaagattaattgcctaaggaattgcaaaacctatcaagccagaaaacctttgtggttttataacacttccctcaagtttttccttaataagccgatgcttgccgatgttgtcttcgaaattcaaggtacgacagtgccagcccacagggccatcctggtggcccgttgtgaagtgatggcagccatgtttaatggtaattacatggaagcaaagagtgtcctgattcccgtttatggtgtttccaaagagactttcttgtcatttttagaatacctgtacacagactcctgctgcccagctggcatattccaggccatgtgtctcctgatctgtgccgagatgtaccaagtgtccagactgcagcacatctgtgagctgttcatcattacccagctgcagagcatgccaagcagggaactggcatccatgaaccttgatatagttgacctgcttaaaaaggccaagtttcaccactctgattgcctttcaacctggctacttcatttcattgctactaactacctcatcttcagtcaaaagcctgaatttcaggatctttcagtggaagaacgcagttttgttgaaaagcacagatggccgtcgaatatgtacttgaagcagcttgcggaatacaggaagtatattcactcccggaaatgtcgttgcttagtaatgtaacctggagcttttatacactacatttcttttttattattatgaagaatgggatacctccaggttccagtaaaattcttctgaccgaaaccaatgtgggtgttagaaaaattaccatatagcttaatatgtttattagttctctttggaaaaaaactaccactgtggtcttaaaagggaacaaaatataccataggctaaaactaaggctttcactctagaatgcaaagctgttttgcagctgttttcccttaaagatgtcctgttgctttagtgatatttagacccctctcagttaagaaatgcttagattaaaaaaaaaaaattacgtaggattaatacagaaatttaatcatgtctgattaattgctctattaaaataaggggcatttaaagacccagcataaccatttgtataatgagaaatctaggggaaaaccaatcagtccaacatgagattttaggaatagaaatttgccggccatttggaaagtgaaatgccacttagttctcaattgatgacagtgtttgaatcatcataaaaaaaatacctgcttttcatctggacaacccaattgagccactttatctccttttggcaatctgagtaggcggggaacctaggcagggctggctttcttagcgtgtaacttgtgtagcagcacagggcccacacttagaaggaccccacacttggttcaaggctctgctatagcggaaattcttaataatgtttgaagaagggccccatgatttcattttgtgctgagccctcaaaattatgtctgtttcgtggtgggaaatatcctatgttttcttgctcaaacacctttctctctgaaagcagaaaaaggcactgatataaagggaagagaaggaggctcaccggagggaagagaacatagtgaagattcccgcctttggggaggtctggaccacccagggcctccactgccaccttggctggcaagggagaaatgtgttgtgttgtcttagctttaaaacagtcacagttcttgctctatcatagatgaacaaatactttcttgatcattctgtaagaccaggaggttggtaagagtgactaaccagcctaactttaatacacatgtataaagatgttcacagagaaagatgctctgtagagaatttgctaccgaagttggctcaagaatttgtttttagtgttatttaccaagattaggacgtcagtggcttaaattctttgaattcttttcaaggactgcaagattatttgataaagagtagcatgaatcttgtgctctaatattacacagtaagttcaaagaaaggatgtaagtcaaagacttgttacatagagggaaaatggactgggatagaggacagactgatagtttctttctttcatatcacatgtatagagaaataattatatcagaaactcacaaacctagacatggaaaaacagattactgtctattgtcagcatcattttcatctgtaagtcactactggaatatatttttcttttaatttccagtgactttagaatacacacagtttttccgacttttcaaaaatttgattaaatggttttatagtataatattgggaccccataccgttagcccttgtatgtataccaacactgccaaagtaaaacattaggtcaggcatggtggctcaggcctgtaatcccagcattttgggaggctgaggcaagtggataacttgaggtcatgagttcgaaaccagcctggccaaaacagtgaaaccccgtctctactaaaaatacaaaattagccagatgtggtggcgcacacctgtaatcccagctactcaggaagctgaggcaggaaaatcgcttgaacctgggaggtggaagttgcagtgagccgagatcgcaccactgcactccagcctgggtgacaagagcgaaactccatctcaaaaaaaaaaaaaaaaccaaagtgaaacactaaaaattccctatagatatattccaggaaatattttaattgggctgattttaattaggctgtatcattgatgattactggaatcgattttatgtcttttgtattttaatcacttgagttaatcaaccactggcaaatcccatttgacaaagattagcattgtaaaaaacagatactgtggtagatttctagaaattcattcacatttaagacttctaaaatggaataatagccttttgtttttcatgagcatattcgcacccctatatgaattacagcatttaaagttcaaaatcagtaacttttaatctaggaaattgaaaaatattaagttgcaaagcaaaaaaaggtattttcttgaaaatactatttaatgtttaactagactataggtagttccttaaggttgtttgacctgaagtggagttgggtttggaagctggtgcccagttggtgtggagtgtgtagttttgttatgaaagttctctaccacctacctgtgtgagtgacaccaacatccagatgtcacagctctccagagctagtcagaagagaaatcaaattagtgtttaaacccatttgcatattgacttgtcagtacctttaactcaatttaatataacaagaaatcgtaaaatacttataacctatcttagagaaatgagtgctggttttgagagttgttttttaactgaaagattatttctagatgggtagtgctttgtgctggtttctgcttccatatatttcccagtcattttaattagagaagatactctatggtagaactaaggcctttcctttcttggccaaagtctttaccctatttaaccctttgtatatttctgactgctcactgttcatattataggggaccagatttgtaatatagaattctccataacatgaatgaaattaattctgtccaagccagcatggtggcttcatattaagtagtaacagaagtctgaacaattggataaatttgacttccaagacagctaaacttttcaactgcaattttaaaaactacactacactgttatagttaatctgacaaaaatgtcctcaaagagtactttattttatttaaagcatctgtttaattcaacctttaataattttgcaaagaagggtatgtgtgtattttaatatagcctgacctgaatttatatgtttttagctttagtatttaactttttgtaacaaataaaccttttttaaaacaagtttaa

SEQ ID NO: 17800 - DNA, 483 bp, Homo sapiens
  source 1..483: mol_type = unassigned DNA
gcgtgccgtgcgccccagggacaggggctggtgcccatcctcgccgcgcgctgtcccccgcacttcctgttccgaggagagacccgcgcgctgaccgtgcttcccttctcccctcgccccctctgtccgtgcaggtccatccacatcgtggcgctggggaacgagggggacacattccaccaggacaaccggccgtcggggcttatccgcacttacctggggagaagccctctggtctccggggacgagagcagcttgttgctgaacgcggccagcacggtcgcgcgtccggtgttcaccgagtatcaggccagtgcgtttgggaatgtcaagctggtggtccacgactgtcccgtctgggacatatttgacagtgattggtacacttctcgaaatctaattgggggcgctgacatcattgtgatcaaatacaacgttaatgacaagttttcattccatgaagtaaaggataattatattcca

SEQ ID NO: 17801 - DNA, 333 bp, Homo sapiens
  source 1..333: mol_type = unassigned DNA
ctggtctccggggacgagagcagcttgttgctgaacgcggccagcacggtcgcgcgtccggtgttcaccgagtatcaggccagtgcgtttgggaatgtcaagctggtggtccacgactgtcccgtctggaagagttaccttgtacatgcccactatgtacctcagacagagggagctgtgttagtacaactgaagggatccaacttgcaaaagaactaggagcgacctatcttgaactccacagccttgatgacttctacataggaaagtattttggaggagtgttggagtattttatgattcaagccttaaatcagaagacaagtgaaaaaa

SEQ ID NO: 17802 - DNA, 693 bp, Homo sapiens
  source 1..693: mol_type = unassigned DNA
tgacatcattgtgatcaaatacaacgttaatgacaagttttcattccatgaagtaaaggataattatattccagtgataaaaagagcattaaattcagttccagtaattattgctgctgttggtaccagacaaaatgaagagttaccttgtacatgcccactatgtacctcagacagagggagctgtgttagtacaactgaagggatccaacttgcaaaagaactaggagcgacctatcttgaactccacagccttgatgacttctacataggaaagtattttggaggagtgaaaaaatgcctgtcttaaaggctgaagcgtcacattataactctgacttaaataacttgctgttctgctgccagtgtgtggacgtggtattttacaaccccaatttaaagaaagttgtagaggcccacaagatcgttctctgcgctgtaagccatgttttcatgctgcttttcaatgtgaagagtcccactgacattcaggattccagtatcatccgaactacccaggatctttttgctataaacagagatactgcatttccaggtgctagccatgaatcttcaggcaacccaccattacgagtcattgttaaagacgccctcttctgttcttgtttatcagacatccttcgcttcatttattcaggtgcttttcagtgggaagaattggaagaagatatc

SEQ ID NO: 17803 - DNA, 883 bp, Homo sapiens
  source 1..883: mol_type = unassigned DNA
aagactcatagggtttcaggaccttgcagcttctcagcaatggagctgagttttcacttaggcaatttgtttactgctgtgaatgccaaagagagcagtgttgttcactgacaggcagcccatacagttcttaaagattaattgcctaaggaattgcaaaacctatcaagccagaaaacctttgtggttttataacacttccctcaagtttttccttaataagccgatgcttgccgatgttgtcttcgaaattcaaggtacgacagtgccagcccacagggccatcctggtggcccgttgtgaagtgatggcagccatgtttaatggtaattacatggaagcaaagagtgtcctgattcccgtttatggtgtttccaaagagactttcttgtcatttttagaatacctgtacacagactcctgctgcccagctggcatattccaggccatgtgtctcctgatctgtgccgagatgtaccaagtgtccagactgcagcacatctgtgagctgttcatcattacccagctgcagagcatgccaagcagggaactggcatccatgaaccttgatatagttgacctgcttaaaaaggccaagtttcaccactctgattgcctttcaacctggctacttcatttcattgctactaactacctcatcttcagtcaaaagcctgaatttcaggatctttcagtggaagaacgcagttttgttgaaaagcacagatggccgtcgaatatgtacttgaagcagcttgcggaatacaggaagtatattcactcccggaaatgtcgttgcttagtaatgtaacctggagcttttatacactacatttcttttttattattatgaagaatgggatacctccaggttccagtaaaa

SEQ ID NO: 17804 - DNA, 990 bp, Homo sapiens
  source 1..990: mol_type = unassigned DNA
ttgccgatgttgtcttcgaaattcaaggtacgacagtgccagcccacagggccatcctggtggcccgttgtgaagtgatggcagccatgtttaatggtaattacatggaagcaaagagtgtcctgattcccgtttatggtgtttccaaagagactttcttgtcatttttagaatacctgtacacagactcctgctgcccagctggcatattccaggccatgtgtctcctgatctgtgccgagatgtaccaagtgtccagactgcagcacatctgtgagctgttcatcattacccagctgcagagcatgccaagcagggaactggcatccatgaaccttgatatagttgacctgcttaaaaaggccaagtttcaccactctgattgcctttcaacctggctacttcatttcattgctactaactacctcatcttcagtcaaaagcctgaatttcaggatctttcaggtagattgctaatttctgttttgaaaagaaaactttatgttctttgttcttagatttgagacataagttgtagaagtagtacttttagcaaaataagaatagtcaatgtaataaatttcttgtaaattatgcagtgtggtaattgaggaaacaatttatagtcacctgtgttacataagtgccttaacctgtgttacacaagaagttttctaatgattattttatagctccatccgtttttaaatgcattttctttccctgaaatagataaggtgacaaaatgtgtcctcaggtgacatttggttgtgaaaagtgatatcttagttctaactacctaagtcagcagcaaagtttaaacagtacagatttaaaaattttttataaaggaatttaactcttgttaactatattatatttagctttattgtactggatatctgtatttactgagtatacctatatgggagtcccttatattactttggaataacagtttttcatatataaaaaatgttgtgaaactta

SEQ ID NO: 17805 - DNA, 492 bp, Homo sapiens
  source 1..492: mol_type = unassigned DNA
actaagtaacaaattgttgtcttgacttgcaaattgttggtttcaaggtcaacatctgaactttctttattgctccctttaaaattaagaagtttctggattaatggtagttatcactcccaaattcagattctgcatatcagcctagctgtccctaatgtggtagtctaattagaaggaaaattgctggaataaccctgcaggtttatctcacttgtttcttgtttcccttttgaacctttcaggtacgacagtgccagcccacagggccatcctggtggcccgttgtgaagtgatggcagccatgtttaatggtaattacatggaagcaaagagtgtcctgattcccgtttatggtgtttccaaagagactttcttgtcatttttagaatacctgtacacagactcctgctgcccagctggcatattccaggccatgtgtctcctgatctgtgccgagatgtaccaagtgtccagactgcagcacatctg

SEQ ID NO: 17806 - DNA, 474 bp, Homo sapiens
  source 1..474: mol_type = unassigned DNA
aaaagaagaagaagaaaggaaagaaaaaaaagataaaatggaataaaagtgcagaatgctgactccctcgaggcttttcctaaccattctattctatggtggatgctacggtcagcatgtttttttaattgttgttttttgttggtggggggtgtttagatcattaaagaaatggtttcatcatccactttctctcatgtcccttttctcatcagctggcatattccaggccatgtgtctcctgatctgtgccgagatgtaccaagtgtccagactgcagcacatctgtgagctgttcatcattacccagctgcagagcatgccaagcagggaactggcatccatgaaccttgatatagttgacctgcttaaaaaggccaagtttcaccactctgattgcctttcaacctggctacttcatttcattgctactaactacctcatcttcagtcaaaagcctgaatttcaggatct

SEQ ID NO: 17807 - DNA, 653 bp, Homo sapiens
  source 1..653: mol_type = unassigned DNA
cgagatgtaccaagtgtccagactgcagcacatctgtgagctgttcatcattacccagctgcagagcatgccaagcagggaactggcatccatgaaccttgatatagttgacctgcttaaaaaggccaagtttcaccactctgattgcctttcaacctggctacttcatttcattgctactaactacctcatcttcagtcaaaagcctgaatttcaggatctttcagtggaagaacgcagttttgttgaaaagcacagatggccgtcgaatatgtacttgaagcagcttgcggaatacaggaagtatattcactcccggaaatgtcgttgcttagtaataaaaaggcactgatataaagggaagagaaggaggctcaccggagggaagagaacatagtgaagattcccgcctttggggaggtctggaccacccagggcctccactgccaccttggctggcaagggagaaatgtgttgtgttgtcttagctttaaaacagtcacagttcttgctctatcatagatgaacaaatactttcttgatcattctgtaagaccaggaggttggtaagagtgactaaccagcctaactttaatacacatgtataaagatgttcacagagaaagatgctctgtagagaatttgctaccgaa

SEQ ID NO: 17808 - DNA, 591 bp, Homo sapiens
  source 1..591: mol_type = unassigned DNA
ctacctcatcttcagtcaaaagcctgaatttcaggatctttcaggaagttttatggtgaaaccagagtatcttcaaagaggcggggccaaggccagagctggacaccacgactgccacgtaagaggaatcccaagcatactgcgatcaagggaagggaagaaaatccactcccagaagcagctttttactgtgactctcatcgttactagaattaaaatggcaaaatgagaaagccagattctgagtcacggagggggagctaagtgacagctctgtccagagaaaaggatgtggcagggctgggaggcccctcacgtggtcagggctccggacttcccacttcccacttccctccaaagtaggctctgccacagagtctgagcctcctctcttttttcattcttttacctcagaaccctgtggccaggctccttccagaggcccctgccaggaggtccagggtctgtttcagggccctcaggctgttgccttaagttccctcagcctgaggtttatccacacgacttgcacctgctactcactcagagcctttctcttctccggtctgttgttggctcctcccttcctgg

SEQ ID NO: 17809 - DNA, 496 bp, Homo sapiens
  source 1..496: mol_type = unassigned DNA
catcttcagtcaaaagcctgaatttcaggatctttcagtctttttcttaaaacttcagtggaagaacgcagttttgttgaaaagcacagatggccgtcgaatatgtacttgaagcagcttgcggaatacaggaagtatattcactcccggaaatgtcgttgcttagtaatgtaacctggagcttttatacactacatttcttttttattattatgaagaatgggatacctccaggttccagtaaaattcttctgaccgaaaccaatgtgggtgttagaaaaattaccatatagcttaatatgtttattagttctctttggaaaaaaactaccactgtggtcttaaaagggaacaaaatataccataggctaaaactaaggctttcactctagaatgcaaagctgttttgcagctgttttcccttaaagatgtcctgttgctttagtgatatttagacccctctcagttaagaaatgcttagattaaaaaaaaaaaa

SEQ ID NO: 17810 - DNA, 1129 bp, Homo sapiens
  source 1..1129: mol_type = unassigned DNA
attcctgccccgccgggcctgccccgcgcagtctgggtctctgcgccgcagccgcccgcccgcccgctcagcgcccggccccgggatgacggcggcccaggccgcgggtgaggaggcgccaccaggcgtgcggtccgtcaaggtggtcctggtgggcgacggcggctgcgggaagacgtcgctgctgatggtcttcgccgatggggccttccccgagagctacacccccacggtgtttgagcggtacatggtcaacctgcaagtgaaaggcaaacctgtgcacctccacatctgggacacagcagggcaagatgactatgaccgcctgcggcccctgttctaccctgacgccagcgtcctgctgctttgcttcgatgtcaccagcccgaacagctttgacaacatctttaaccggtggtacccagaagtgaatcatttctgcaagaaggtacccatcatcgtcgtgggctgcaagactgacctgcgcaaggacaaatcactggtgaacaagctccgaagaaacggattggagcctgtgacctaccacaggggccaggagatggcgaggtccgtgggcgcggtggcctacctcgagtgctcggctcggctccatgacaacgtccacgccgtcttccaggaggccgccgaggtggccctcagcagccgcggtcgcaacttctggcggcggattacccagggcttttgcgtggtgacctgagcggctcggggcgtcccagcgacgcgggaaggggcagggcgctgacctgctgctgagctggctgggctggacccggtccctaggctgtgaccgccgaactccactgcaacagacgggcgccaccaaagccaggccctgaggcctgggagtcctggactgagaaagggggttcctgggcccacctgctctgtgtagggctcgtcctgcggtgcccgagaatcactcgctaacccctatgcccggtcccggaccgacatcctggagccgcctgtgcagcctgatgccccctcgtggctgctcccagggctgcacctgccaggacctaatgttcttaggtccctctggccagaacccacacccggccccttcccacctgtcatactggtaactgtaacaagaaaaacgacatca

SEQ ID NO: 17811 - DNA, 602 bp, Homo sapiens
  source 1..602: mol_type = unassigned DNA
gcgccgcagccgcccgcccgcccgctcagcgcccggccccgggatgacggcggcccaggccgcgggtgaggaggcgccaccaggcgtgcggtccgtcaaggtggtcctggtgggcgacggcggctgcgggaagacgtcgctgctgatggtcttcgccgatggggccttccccgagagctacacccccacggtgtttgagcggtacatggtcaacctgcaagtgaaaggcaaacctgtgcacctccacatctgggacacagcagggcaagatgactatgaccgcctgcggcccctgttctaccctgacgccagcgtcctgctgctttgcttcgatgtcaccagcccgaacagctttgacaacatctttaaccggtttctccctaggtgctggctttgctgattatccatatcagagctcaggctggggagcaagagagtggtccactgagagggccagaactctccagggctcacacatgccccccacatgccccctcgcccccctgcagtggtacccagaagtgaatcatttctgcaagaaggtacccatcatcgtcgtgggctgcaagactgacctgcgcaaggacaaatcactggtgaac

SEQ ID NO: 17812 - DNA, 538 bp, Homo sapiens
  source 1..538: mol_type = unassigned DNA
cgcccggccccgggatgacggcggcccaggccgcgggtgaggaggcgccaccaggcgtgcggtccgtcaaggtggtcctggtgggcgacggcggctgcgggaagacgtcgctgctgatggtcttcgccgatggggccttccccgagtggtacccagaagtgaatcatttctgcaagaaggtacccatcatcgtcgtgggctgcaagactgacctgcgcaaggacaaatcactggtgaacaagctccgaagaaacggattggagcctgtgacctaccacaggggccaggagatggcgaggtccgtgggcgcggtggcctacctcgagtgctcggctcggctccatgacaacgtccacgccgtcttccaggaggccgccgaggtggccctcagcagccgcggtcgcaacttctggcggcggattacccagggcttttgcgtggtgacctgagcggctcggggcgtcccagcgacgcgggaaggggcagggcgctgacctgctgctgagctggctgggctggacccggtccctaggctgtg

SEQ ID NO: 17813 - DNA, 1837 bp, Homo sapiens
  source 1..1837: mol_type = unassigned DNA
gctcgctctaaccattccccctgcttctgtggcaggcagtaatccccgctttccatcctctagtcagcttcttcccagccagccacaagcgaacaggctcgcaagcagcggatgaaacaggaagtctgacagcttgagtctgcagtgggacccctagtgttttcccactccatgtcctggcatcgttccccagaagtacaaacacacacacacagagctcccattgttgcagccttcctcagcccactgatcctaatatggaattcagcaggaaacccatgatttcctgacactcggcaagctggaggaagcaaagggaaaaaaactccattaaaaagcccagctttcctccatgttagatgtgacttggaaaatgagaaagatttagcaaaattccaccgtatcttttgccaggctagagacagggagagcagagtaaaaccctcaggctgctgaaatttctaggctgttaggaagcccctcgaattctgtgaaaatgagggtttcttaactcacactgagagcggaaaggggcagacccttttcataactccctcaagtgtgtgttacctttctttaccagcatggtaagcaacaggacatatcccagcctcggacatgtctgtatgatccaaggtacccaaagtcagacagagtaaactcaagcctggcactggctttctgccgcttcatgtgctttggaaaaagcaggagaagcaatagcagcaggagtccccagcagctggagccgcaagaatgaactgcaaagagggaactgacagcagctgcggctgcaggggcaacgacgagaagaagatgttgaagtgtgtggtggtgggggacggtgccgtggggaaaacctgcctgctgatgagctacgccaacgacgccttcccagaggaatacgtgcccactgtgtttgaccactatgcagttactgtgactgtgggaggcaagcaacacttgctcggactgtatgacaccgcgggacaggaggactacaaccagctgaggccactctcctaccccaacacggatgtgtttttgatctgcttctctgttgtctgggacctgcctccaccccatccagggatgagaatggcagccaatctctgtggccaagctccagccaaaaaggagggcacgaccagaaaggaactccctttgcacggaggcttgccccatcaccctctgagccctcccaacacagcacactagtcagcccactgccacgacctccctgccagccagaagcatccgtactgcacgctgtctgagaatgctgggcctggattgcagacagtgccgctgctgatcgcatcaaaaacaaagtcaaaggccatctcacattttacaaatccccagctcatgaacgtgaagctgataggaaatcaccccagggaacccgaaaaagaaacttgattcctctattgctggccttacttgatgtcttttataaaacttgggactacaatactaacctttttttctgaatctgctgttctacccatgtgtctcacattcatttgtattatttcaagaaattgacagagaaagaacctgtcaaaaaaaaaaaaaaaacaacctacatttcaagtactatttcccttctctcccatctaattgctaaagattttctttcatacgcacacactccagtgactggaaaaacgggagttttcagtcaaagcttgacatttagagaaaacaaggactttctgcctttataaatggaaatcaactgtgtatgaactataactctgcagaggttatgaattcatcctttacaaacaataatgaacttttagtcctgtaataaatgaaatgttattaggca

SEQ ID NO: 17814 - DNA, 3302 bp, Homo sapiens
  source 1..3302: mol_type = unassigned DNA
cggcaagctggaggaagcaaagggaaaaaaactccattaaaaagcccagctttcctccatgttagatgtgacttggaaaatgagaaagatttagcaaaattccaccgtatcttttgccaggctagagacagggagagcagagtaaaaccctcaggctgctgaaatttctaggctgttaggaagcccctcgaattctgtgaaaatgagggtttcttaactcacactgagagcggaaaggggcagacccttttcataactccctcaagtgtgtgttacctttctttaccagcatggtaagcaacaggacatatcccagcctcggacatgtctgtatgatccaaggtacccaaagtcagacagagtaaactcaagcctggcactggctttctgccgcttcatgtgctttggaaaaagcaggagaagcaatagcagcaggagtccccagcagctggagccgcaagaatgaactgcaaagagggaactgacagcagctgcggctgcaggggcaacgacgagaagaagatgttgaagtgtgtggtggtgggggacggtgccgtggggaaaacctgcctgctgatgagctacgccaacgacgccttcccagaggaatacgtgcccactgtgtttgaccactatgcagttactgtgactgtgggaggcaagcaacacttgctcggactgtatgacaccgcgggacaggaggactacaaccagctgaggccactctcctaccccaacacggatgtgtttttgatctgcttctctgtcgtaaaccctgcctcttaccacaatgtccaggaggaatgggtccccgagctcaaggactgcatgcctcacgtgccttatgtcctcatagggacccagattgatctccgtgatgacccaaaaaccttggcccgtttgctgtatatgaaagagaaacctctcacttacgagcatggtgtgaagctcgcaaaagcgatcggagcacagtgctacttggaatgttcagctctgactcagaaaggtctcaaagcggtttttgatgaagcaatcctcaccattttccaccccaagaaaaagaagaaacgctgttctgagggtcacagctgctgttcaattatctgaggttgtctgggacctgcctccaccccatccagggatgagaatggcagccaatctctgtggccaagctccagccaaaaaggagggcacgaccagaaaggaactccctttgcacggaggcttgccccatcaccctctgagccctcccaacacagcacactagtcagcccactgccacgacctccctgccagccagaagcatccgtactgcacgctgtctgagaatgctgggcctggattgcagacagtgccgctgctgatcgcatcaaaaacaaagtcaaaggccatctcacattttacaaatccccagctcatgaacgtgaagctgataggaaatcaccccagggaacccgaaaaagaaacttgattcctctattgctggccttacttgatgtcttttataaaacttgggactacaatactaacctttttttctgaatctgctgttctacccatgtgtctcacattcatttgtattatttcaagaaatgtactaatttccagttcactcaggccttactaatccataccaaattagcctaaagacaaggcattttatattcatttctattttcagcatgtttctaccaaagctattagaaccaacacgtacctctgaatgcccgattataagaagacatgagaagactttaaaagttttggaaatttacagagccatgatttttgaacctaattgaaagaaaaccatctgaattgttgcaggtccacatttttgccaaagatacactctatagatgcttagtagtggcctgatttttttccatgtattgccacgacaaactaaaaatgaactgtgtttaagaatgtagtatttctgtttttcatccaagttgattgggggaagaatatggcaggatccatcttttacagtattttgtattcagtaaagtggacattcctgctcctcccttcccccattgcatgccctcttcctcccttgatttcactttctctcatgcccggatccttttattctccccagttataacccagttataaaagaaagatctgagcataaagatacgtgtttaaaaataactaaaagtaaaggaaagtgccttaatttttctatttgcttcaactgaaagtgcttctcagctcgccccatgtaagttctcattccatgtaaatgacattttccagttacaactggtactgagattttgcctctctctttccttactcatcctcccaaatgtctttgtgggagccatatcagtggataccaagctctgtatccatttgtcccctgccctccacaatgtgtgacatagaacagggactttggccctgggaaagcaaaagctcccagtaaggaatcctgtgcccaatgatgtaaaacaattccaaacatccaggaatttttgtatcatagagcgaattacttcctatcttttcattagaggctatgaggacttctaattagtcttagttgcttataagtgccctggaatcacccaggtaggcacttaatttttttttcagttgcatgagcaaagtgcttcttagtagtgtgaaattacaacaactttaagactttccagattcaagctcccactgttggaaaaagccagcctttctaatctcttctgctactggaataagcacttaagaattgcgtgatagccaggcaccgtggctcatgcctgtaatcccaacacttagggaggctgaggtgggtgggccgcttgagctcaggagttcaagaccagcctgggtaatatagtgagatcctgtgtctctataaaaaaattaaaaattagtcagttgtagtgacacatacctgtagtcccagctactcaggaggctgaggtggaaggatcacttgagcccagaaggtaaggctgcagtgagctgtgactgtgccactacactccagcctgagtgacagagaaagaacctgtcaaaaaaaaaaaaaaaacaacctacatttcaagtactatttcccttctctcccatctaattgctaaagattttctttcatacgcacacactccagtgactggaaaaacgggagttttcagtcaaagcttgacatttagagaaaacaaggactttctgcctttataaatggaaatcaactgtgtatgaactataactctgcagaggttatgaattcatcctttacaaacaataatgaacttttagtcctgtaataaatgaaatgttattaggca

SEQ ID NO: 17815 - DNA, 580 bp, Homo sapiens
  source 1..580: mol_type = unassigned DNA
tttctttaccagcatggtaagcaacaggacatatcccagcctcggacatgtctgtatgatccaaggtacccaaagtcagacagagtaaactcaagcctggcactggctttctgccgcttcatgtgctttggaaaaagcaggagaagcaatagcagcaggagtccccagcagctggagccgcaagaatgaactgcaaagagggaactgacagcagctgcggctgcaggggcaacgacgagaagaagatgttgaagtgtgtggtggtgggggacggtgccgtggggaaaacctgcctgctgatgagctacgccaacgacgccttcccagaggaatacgtgcccactgtgtttgaccactatgcagttactgtgactgtgggaggcaagcaacacttgctcggactgtatgacaccgcgggacaggtacatttttattatcttgattcattggagggcggtggtgtaggggagaaaaagatccatttgcttatgcagatgggactcatagcacagatattacccattctgatcatttggggccaatttattgtctgcctaaatgacgaccaaaagcacattct

SEQ ID NO: 17816 - DNA, 548 bp, Homo sapiens
  source 1..548: mol_type = unassigned DNA
gagccgcaagaatgaactgcaaagagggaactgacagcagctgcggctgcaggggcaacgacgagaagaagatgttgaagtgtgtggtggtgggggacggtgccgtggggaaaacctgcctgctgatgagctacgccaacgacgccttcccagaggaatacgtgcccactgtgtttgaccactatgcagttactgtgactgtgggaggcaagcaacacttgctcggactgtatgacaccgcgggacaggaggactacaaccagctgaggccactctcctaccccaacacggatgtgtttttgatctgcttctctgtcgtaaaccctgcctcttaccacaatgtccaggaggaatgggtccccgagctcaaggactgcatgcctcacgtgccttatgtcctcatagggacccagattgatctccgtgatgacccaaaaaccttggcccgtttgctgtatatgaaagagaaacctctcacttacgagcatggtgtgaagctcgcaaaagcggtacagtcagatttgaatttcattttaaatgtatgctga

SEQ ID NO: 17817 - DNA, 4372 bp, Homo sapiens
  source 1..4372: mol_type = unassigned DNA
gggctccacggagtgaataggaggcggctcaggcttcctggctcgcgtgggcgccagaaagcggaacctcccgggccagtcgcgcggtggtcaccctcttgggagctggggaggaggctgcggaggctggcccggctccttcgggcgtcgcttcccggaccgggtgcgcggggtcccccggaacgtgtgttccaggtcctcccgcgccagtgttcgcagtccccgcctggtcgcggcggcgcctcgggcgcgggtgcaggcgcgcggcgcgcaggcggggggcgctgtggtcttggcgcggggaccgagccgctcggccagacccgcctcttttccctccccgccagcccgcccgcctgcccgccccccacgcgtcgtgtcgccgggaagccgggcggagacagagcgcttgggatccacggcgctcggaccgctgtcctccaacagcgcagggcagagcggctggcgccgccggagcgcggagccacgaccctccctggccgcctttgtctactggccgtgcggcccggaaccgccactctccagggccggggacgcgcccgcagctgtcggtgacagctcctccctaccgcaaccctccggggcggaggggcggtcgggccgggccctgctagcccgcgaccgcaagcccgcgctcgcggatcgatgcccccgcagcagggggaccccgcgttccccgaccgctgcgaggcgcctccggtgccgccgcgtcgggagcgcggtggacgcgggggacgcgggcctggggagccggggggccgggggcgtgcggggggtgccgaggggcgcggcgtcaagtgcgtgctggtcggcgacggcgcggtgggcaagacgagcctggtggtgagctacaccaccaacggctaccccaccgagtacatccctactgccttcgacaacttctccgcggtggtgtctgtggatgggcggcccgtgagactccaactctgtgacactgccggacaggatgaatttgacaagctgaggcctctctgctacaccaacacagacatcttcctgctctgcttcagtgtcgtgagcccctcatccttccagaacgtcagtgagaaatgggtgccggagattcgatgccactgtcccaaagcccccatcatcctagttggaacgcagtcggatctcagagaagatgtcaaagtcctcattgagttggacaaatgcaaagaaaagccagtgcctgaagaggcggctaagctgtgcgccgaggaaatcaaagccgcctcctacatcgagtgttcagccttgactcaaaaaaacctcaaagaggtctttgatgcagccatcgtcgctggcattcaatactcggacactcagcaacagccaaagaagtctaaaagcaggactccagataaaatgaaaaacctctccaagtcctggtggaagaagtactgctgtttcgtatgatgctggcaagacacccagaaaggctattttcagatgaaatcgatattagaagctatattagctgaaacaactccttttactgcgtagaacctatatcgagagtgtgtgtatatgtattataggaggagctctcaattttatgtattctttctgcctttaattttcttgtttgtttgagcttagggatgagatacttatgcaagatatttttgaagtaaattaaacatttttcacatctctggaaatttagagttctagacctctggttaatttatatctaatatgaagaagacacctctaatctggatgttaagaatgaagttctgctacattataatgtacagaagagcaaaagggaggaacactatggttaaccctctcttgattaagggctacttaatgcacagtgcattatgtacacaggtcaaccatggtaacaatagttcttagctttgaaactccatgcaaaccatgccttttttttaaggagcaaaaatctgagaaaaaaagtgagagacctctgcctacaaaacctcaaaccagtcacttttgtcaattgctaatacccagttacttatgatttaaaaacaaccaacagaaaacatcccactgactgtatggcactctgtagtcaaaaaaggaaacttccttattgggacttttctttcttagtccagttgtgttgacacatatgaacacagacaaagtgctatgcggaggaaagcaagtgttggtcagtagtttcatgttttagggagtggttcctgtggagatcagaaagtgacatttgctttcggtactgtaatacgtgcaccaaactgcctcaatcctaggtaacgagggcaacagggagcacctgtctggattgtttttaaacctccatactcaagctgtctcttcggcagggaggtgaatactcttgaaaggccaacagcaagtgtttgtgggacacaacacagataattttttcttaagtcggccaagatgtacttctctgtgtgcacacccatgcacactcatgcacacagatacataggtctgtatggctgtatttgctgttgattcagactttcacaccattaatggggaaaagcgtggccacaaaaacagatgctaggaagcttggcttcctcttcttgttgacccttttttgaaccaacatcttttttattatattcagagtatgtttttaagtgtatcttaatatatacattttttaggacatcttaaatctaaacaaaaaataaaatgaacatctcttgaaacctgttaaaacaaccagttaaagccacagatggctttcagggcagtagcagcagaggccagtggactctgaggactcctgaggggcggggcgtgtagccagccaggtgcatgccgggaccatggcccccatacttggctgcttcctgtgacagtgaaatacatccttcaaggtggcagctgttagggctgaatcttctggagaaaaaggtgccatctcaggagaatagcttttactctggtaggaatgcttccgagacaccacaaggcagcctgaacactcagttgcagggtcgggcttgcggtgggtgacccagagccaccaaagtcacatccacaactaatgagggaaatctgtaaagccagttagatagaagaattttatttttctgtgggttttgtgttgtcttttttatgttaaaaagaaatccagtttgtgtttttctatagaaaaagtaaaagatcaggttatactttaggttaggggttctatttattcctgttagtaaataaaattaacaaatttctttgtttaacaaaagattaatctttaaaccactaaaatacatagactgattgattattcaacacattggaattgatgtcggtcatagtttcctgaagcatttagttacaacctgaaggaataaaatgatttgtggaaatgcttaaaatagacctaactgaatacagtctcatcttgccgcgcctggcttacctatctgtggaaagctaggcttcccaggctgggctctgcctgtctggtgcctggaggtgtgggagggaagatgagttatttaactggtaagcgatttgaaacactatttttatattaaagtaaatggcatggagtatagtgcaaattcatttttaagatagaacacaaaacttgaaagaagttttatgcgtgtgacagtgtatggggctgcagttggtctccctggaggggacttccacacctcctgcctttaggccatgggtggaaagtgctcagtgaagtacacctgtgtggcccagttctgaaagctttatacagttgaattttaagtggggttgataacaccttggactgttagtgttaaaaatctagtgggttgacctttaaatgcaacagtttttaaaatatattgctgcattttatagaatagtaaaggtacgattatacttgagattttcctccatttttatttcttcgtgaacatagagtttggggccgaaaatgtttttaaagtatgtgtttgagttaaatataaagttggttcacttcaaagctaaaaaattgttaaacttgcagcttggtattgcagagaagattttataagaattttgctttagagaatgccactttggctgaactacaagtgtaggccaccattataatttataaatacagcatacttcaaaactgtttgttatctcttgttaccatgtatgtataaatggaccttttataaccttgttctctgcttgacagactcaagagaaactacccaggtattacacaagccaaaatgggagcaaggccttctctccagactatcgtaacctggtgccttaccaagttgtgcttttctgttttcaagtgtaaatgatgttgagcagaatgttgtacttgaaaatgctataagtgagatggtatgaaataaattctgacttatgaatataa

SEQ ID NO: 17818 - DNA, 3793 bp, Homo sapiens
  source 1..3793: mol_type = unassigned DNA
tttttttttttttttttttttttgagagggagccttgctctgttgtccaggctggagtgcagtggcataatctcagctcactgcaacccctatctcccaggttcaagcctcagccttctgcatagctgggactacaggcatgcaccaccacacccagctagtttttgtattttttagtagagacagagtttcactatatgttggccaggctggtctcgaactcctgacctcagctgatccacctgcctcggcctcccagagtgctgggattacagacgtaagccaccatgcccggctggaatcattcatttcttttcaagtgggtatcttatggtattttagggcatggctgggagcagttttgttttctcttctcaagactgagtgtttgcaggatgtcatagagttcatgtctgcagctcacagtgtcattgcctgtgtccccagctccacgtactggcaggtgtgctgcaagctgggtaggtgccctgtgtccctgggataccttaaccgacactcctggccctcctctgcaagctgtgccctgatcctccctgcagggactggggattgggtctgctcacctagaagccaggatacctggctgagggcacttctctccctcttctctttgaacagagtggccacaaactcaaaggtgcgggagcaagtgcggctggagctgagcttcgtcaactcagacctgcagatgctcaaggaagagctggaggggctgaacatctcggtgggcgtctatcagaacacagaggaggcatttacgattcccctgattcctcttggcctgaaggaaacgaaagacgtcgactttgcagtcgtcctcaaggattttatcctggaacattacagtgaagatggctatttatatgaagatgaaattgcagatcttatggatctgagacaagtatgactctctcaccggggttccggtcagccagcagaacctgctgctggagaaggccagtgtcctgttcaacactggggccctctacacccagattgggacccggtgtgatcggcagacgcaggctgggctggagagtgccatagatgcctttcagagagccgcaggggttttaaattacctgaaagacacatttacccatactccaagttacgacatgagccctgccatgctcagcgtgctcgtcaaaatgatgcttgcacaagcccaagaaagcgtgtttgagaaaatcagccttcctgggatccggaatgaattcttcatgctggtgaaggtggctcaggaggctgctaaggtgggagaggtctaccaacagctacacgcagccatgagccaggcgccggtgaaagagaacatcccctactcctgggccagcttagcctgcgtgaaggcccaccactacgcggccctggcccactacttcactgccatcctcctcatcgaccaccaggtgaagccaggcacggatctggaccaccaggagaagtgcctgtcccagctctacgaccacatgccagaggggctgacacccttggccacactgaagaatgatcagcagcgccgacagctggggaagtcccacttgcgcagagccatggctcatcacgaggagtcggtgcgggaggccagcctctgcaagaagctgcggagcattgaggtgctacagaaggtgctgtgtgccgcacaggaacgctcccggctcacgtacgcccagcaccaggaggaggatgacctgctgaacctgatcgacgcccccagtgttgttgctaaaactgagcaagaggttgacattatattgccccagttctccaagctgacagtcacggacttcttccagaagctgggccccttatctgtgttttcggctaacaagcggtggacgcctcctcgaagcatccgcttcactgcagaagaaggggacttggggttcaccttgagagggaacgcccccgttcaggttcacttcctggatccttactgctctgcctcggtggcaggagcccgggaaggagattatattgtctccattcagcttgtggattgtaagtggctgacgctgagtgaggttatgaagctgctgaagagctttggcgaggacgagatcgagatgaaagtcgtgagcctcctggactccacatcatccatgcataataagagtgccacatactccgtgggaatgcagaaaacgtactccatgatctgcttagccattgatgatgacgacaaaactgataaaaccaagaaaatctccaagaagctttccttcctgagttggggcaccaacaagaacagacagaagtcagccagcaccttgtgcctcccatcggtcggggctgcacggcctcaggtcaagaagaagctgccctcccctttcagccttctcaactcagacagttcttggtactaatgtgaggaaacaaacatgttcaggccctgaacatttccggtgctgactcggccttaaacgtttgtgccataatggaaaatatctatctatctgttctcaaatcctgtttttctcatagtgtaaactcacatttgatgtgtttttatgaaggaaagtaaccaagaaacctctaggaattagtgaaaaaagaacttttttgaggtgtgttactatactgctgtaagttatttattatataaagtattgtaaatagaatagtgttgaagatatgaaatatggctatttttaatggtgacaattatgacttttagtcactattaaattggggttacctatatcagtacaatttgtagttgtttccaggtttggctaataatcattccttaacctagaattcagatgatcctggaattaaggcaggtcagaggactgtaatgatagaattaaattagtgtcactaaaaactgtcccaaagtgctgcttcctaataggaattcattaacctaaaacaagatgttactattatatcgatagactatgaatgctatttctagaaaaagtctagtgccaaatttgtcttattaaataaaaacaatgtaggagcagcttttcttctagtttgatgtcatttaagaattactaacacagtggcagtgttagatgaagatgctgtctacaaggtagataatatactgtttgatactcaaaacatttttcattttgtttaaagtagaagttacataattctatattttaagtcttgggtaaaaaagtagttttacattttataaagtaaagatgtaaatgattcaggtttaaagctctatttgacttcctttttttgtttgagatagcgtcttgctgtgttgcccaggctggagtgcagtggtgtgatctcagctcagtgcaacctccgccccctgggatcaagcgattctcctacctcagcctcccaaatagctgggactacaaggtgccctccagcatgcctggctgatttttgtatttttagttgaggtgaggtttcaccatgttggccaggcgggtttcgaaatcctgacctcaaatgatccacccacctcagcctcccaaagtgctgggattacaggcatgagccaccacaaccgtcccactattttactttttaaaatgacattcctactgattgatttttatcttgctataagttcgatgacaccgtgaatctaataaggttcactgttgacacagtacaagttacatagctaaaatacatagcattgaagactaattttaaggattgacaagagtttattttctattgtgcaatatcttaaaggaagcaaccacctttgggaaagtgtatctgctgctcctagggccatgcttgtatacatatttaaataaacatattcatttacccg

SEQ ID NO: 17819 - DNA, 3500 bp, Homo sapiens
  source 1..3500: mol_type = unassigned DNA
agtccgccgtccgccctccgcgcccgcgccgctagcatgaccgacgcgctgttgcccgcggccccccagccgctggagaaggagaacgacggctactttcggaagggctgtaatccccttgcacaaaccggccggagtaaattgcagaatcaaagagctgctttgaatcagcagatcctgaaagccgtgcggatgaggaccggagcggaaaaccttctgaaagtggccacaaactcaaaggtgcgggagcaagtgcggctggagctgagcttcgtcaactcagacctgcagatgctcaaggaagagctggaggggctgaacatctcggtgggcgtctatcagaacacagaggaggcatttacgattcccctgattcctcttggcctgaaggaaacgaaagacgtcgactttgcagtcgtcctcaaggattttatcctggaacattacagtgaagatggctatttatatgaagatgaaattgcagatcttatggatctgagacaagcttgtcggacgcctagccgggatgaggccggggtggaactgctgatgacatacttcatccagctgggctttgtcgagagtcgattcttcccgcccacacggcagatgggactcctgttcacctggtatgactctctcaccggggttccggtcagccagcagaacctgctgctggagaaggccagtgtcctgttcaacactggggccctctacacccagattgggacccggtgtgatcggcagacgcaggctgggctggagagtgccatagatgcctttcagagagccgcaggggttttaaattacctgaaagacacatttacccatactccaagttacgacatgagccctgccatgctcagcgtgctcgtcaaaatgatgcttgcacaagcccaagaaagcgtgtttgagaaaatcagccttcctgggatccggaatgaattcttcatgctggtgaaggtggctcaggaggctgctaaggtgggagaggtctaccaacagctacacgcagccatgagccaggcgccggtgaaagagaacatcccctactcctgggccagcttagcctgcgtgaaggcccaccactacgcggccctggcccactacttcactgccatcctcctcatcgaccaccaggtgaagccaggcacggatctggaccaccaggagaagtgcctgtcccagctctacgaccacatgccagaggggctgacacccttggccacactgaagaatgatcagcagcgccgacagctggggaagtcccacttgcgcagagccatggctcatcacgaggagtcggtgcgggaggccagcctctgcaagaagctgcggagcattgaggtgctacagaaggtgctgtgtgccgcacaggaacgctcccggctcacgtacgcccagcaccaggaggaggatgacctgctgaacctgatcgacgcccccagtgttgttgctaaaactgagcaagaggttgacattatattgccccagttctccaagctgacagtcacggacttcttccagaagctgggccccttatctgtgttttcggctaacaagcggtggacgcctcctcgaagcatccgcttcactgcagaagaaggggacttggggttcaccttgagagggaacgcccccgttcaggttcacttcctggatccttactgctctgcctcggtggcaggagcccgggaaggagattatattgtctccattcagcttgtggattgtaagtggctgacgctgagtgaggttatgaagctgctgaagagctttggcgaggacgagatcgagatgaaagtcgtgagcctcctggactccacatcatccatgcataataagagtgccacatactccgtgggaatgcagaaaacgtactccatgatctgcttagccattgatgatgacgacaaaactgataaaaccaagaaaatctccaagaagctttccttcctgagttggggcaccaacaagaacagacagaagtcagccagcaccttgtgcctcccatcggtcggggctgcacggcctcaggtcaagaagaagctgccctcccctttcagccttctcaactcagacagttcttggtactaatgtgaggaaacaaacatgttcaggccctgaacatttccggtgctgactcggccttaaacgtttgtgccataatggaaaatatctatctatctgttctcaaatcctgtttttctcatagtgtaaactcacatttgatgtgtttttatgaaggaaagtaaccaagaaacctctaggaattagtgaaaaaagaacttttttgaggtgtgttactatactgctgtaagttatttattatataaagtattgtaaatagaatagtgttgaagatatgaaatatggctatttttaatggtgacaattatgacttttagtcactattaaattggggttacctatatcagtacaatttgtagttgtttccaggtttggctaataatcattccttaacctagaattcagatgatcctggaattaaggcaggtcagaggactgtaatgatagaattaaattagtgtcactaaaaactgtcccaaagtgctgcttcctaataggaattcattaacctaaaacaagatgttactattatatcgatagactatgaatgctatttctagaaaaagtctagtgccaaatttgtcttattaaataaaaacaatgtaggagcagcttttcttctagtttgatgtcatttaagaattactaacacagtggcagtgttagatgaagatgctgtctacaaggtagataatatactgtttgatactcaaaacatttttcattttgtttaaagtagaagttacataattctatattttaagtcttgggtaaaaaagtagttttacattttataaagtaaagatgtaaatgattcaggtttaaagctctatttgacttcctttttttgtttgagatagcgtcttgctgtgttgcccaggctggagtgcagtggtgtgatctcagctcagtgcaacctccgccccctgggatcaagcgattctcctacctcagcctcccaaatagctgggactacaaggtgccctccagcatgcctggctgatttttgtatttttagttgaggtgaggtttcaccatgttggccaggcgggtttcgaaatcctgacctcaaatgatccacccacctcagcctcccaaagtgctgggattacaggcatgagccaccacaaccgtcccactattttactttttaaaatgacattcctactgattgatttttatcttgctataagttcgatgacaccgtgaatctaataaggttcactgttgacacagtacaagttacatagctaaaatacatagcattgaagactaattttaaggattgacaagagtttattttctattgtgcaatatcttaaaggaagcaaccacctttgggaaagtgtatctgctgctcctagggccatgcttgtatacatatttaaataaacatattcatttacccg

SEQ ID NO: 17820 - DNA, 2378 bp, Homo sapiens
  source 1..2378: mol_type = unassigned DNA
agtccgccgtccgccctccgcgcccgcgccgctagcatgaccgacgcgctgttgcccgcggccccccagccgctggagaaggagaacgacggctactttcggaagggctgtaatccccttgcacaaaccggccggagtaaattgcagaatcaaagagctgctttgaatcagcagatcctgaaagccgtgcggatgaggaccggagcggaaaaccttctgaaagtggccacaaactcaaaggtgcgggagcaagtgcggctggagctgagcttcgtcaactcagacctgcagatgctcaaggaagagctggaggggctgaacatctcggtgggcgtctatcagaacacagagattttatcctggaacattacagtgaagatggctatttatatgaagatgaaattgcagatcttatggatctgagacaagcttgtcggacgcctagccgggatgaggccggggtggaactgctgatgacatacttcatccagctgggctttgtcgagagtcgattcttcccgcccacacggcagatgggactcctgttcacctggtatgactctctcaccggggttccggtcagccagcagaacctgctgctggagaaggccagtgtcctgttcaacactggggccctctacacccagattgggacccggtgtgatcggcagacgcaggctgggctggagagtgccatagatgcctttcagagagccgcaggggttttaaattacctgaaagacacatttacccatactccaagttacgacatgagccctgccatgctcagcgtgctcgtcaaaatgatgcttgcacaagcccaagaaagcgtgtttgagaaaatcagccttcctgggatccggaatgaattcttcatgctggtgaaggtggctcaggaggctgctaaggtgggagaggtctaccaacagctacacgcagccatgagccaggcgccggtgaaagagaacatcccctactcctgggccagcttagcctgcgtgaaggcccaccactacgcggccctggcccactacttcactgccatcctcctcatcgaccaccaggtgaagccaggcacggatctggaccaccaggagaagtgcctgtcccagctctacgaccacatgccagaggggctgacacccttggccacactgaagaatgatcagcagcgccgacagctggggaagtcccacttgcgcagagccatggctcatcacgaggagtcggtgcgggaggccagcctctgcaagaagctgcggagcattgaggtgctacagaaggtgctgtgtgccgcacaggaacgctcccggctcacgtacgcccagcaccaggaggaggatgacctgctgaacctgatcgacgcccccagtgttgttgctaaaactgagcaagaggttgacattatattgccccagttctccaagctgacagtcacggacttcttccagaagctgggccccttatctgtgttttcggctaacaagcggtggacgcctcctcgaagcatccgcttcactgcagaagaaggggacttggggttcaccttgagagggaacgcccccgttcaggttcacttcctggatccttactgctctgcctcggtggcaggagcccgggaaggagattatattgtctccattcagcttgtggattgtaagtggctgacgctgagtgaggttatgaagctgctgaagagctttggcgaggacgagatcgagatgaaagtcgtgagcctcctggactccacatcatccatgcataataagagtgccacatactccgtgggaatgcagaaaacgtactccatgatctgcttagccattgatgatgacgacaaaactgataaaaccaagaaaatctccaagaagctttccttcctgagttggggcaccaacaagaacagacagaagtcagccagcaccttgtgcctcccatcggtcggggctgcacggcctcaggtcaagaagaagctgccctcccctttcagccttctcaactcagacagttcttggtactaatgtgaggaaacaaacatgttcaggccctgaacatttccggtgctgactcggccttaaacgtttgtgccataatggaaaatatctatctatctgttctcaaatcctgtttttctcatagtgtaaactcacatttgatgtgtttttatgaaggaaagtaaccaagaaacctctaggaattagtgaaaaaagaacttttttgaggtgtgttactatactgctgtaagttatttattatataaagtattgtaaatagaatagtgttgaagatatgaaatatggctatttttaatggtgacaattatgacttttagtcactattaaattggggttacctatatcagtacaatttgtagttgt

SEQ ID NO: 17821 - DNA, 706 bp, Homo sapiens
  source 1..706: mol_type = unassigned DNA
gcgcgatcttggttcactgcaacctccacctcctgggttcaagtaattctcctgcctcaggctgctgagtagctgggattacaggtggcaggagcccgggaaggagattatattgtctccattcagcttgtggattgtaagtggctgacgctgagtgaggttatgaagctgctgaagagctttggcgaggacgagatcgagatgaaagtcgtgagcctcctggactccacatcatccatgcataataagagtgccacatactccgtgggaatgcagaaaacgtactccatgatctgcttagccattgatgatgacgacaaaactgataaaaccaagaaaatctccaagaagctttccttcctgagttggggcaccaacaagaacagacagaagtcagccagcaccttgtgcctcccatcggtcggggctgcacggcctcaggtcaagaagaagctgccctcccctttcagccttctcaactcagacagttcttggtactaatgtgaggaaacaaacatgttcaggccctgaacatttccggtgctgactcggccttaaacgtttgtgccataatggaaaatatctatctatctgttctcaaatcctgtttttctcatagtgtaaactcacatttgatgtgtttttatgaaggaaagtaaccaagaaacctctaggaattagtgaaaaaagaacttttttgaggtgt

SEQ ID NO: 17822 - DNA, 562 bp, Homo sapiens
  source 1..562: mol_type = unassigned DNA
tttcttgatgcgaacttacgcaaatacctattttgttaatggggactgattcaaggatttgagtgaacaaaacgttgacttaatttcaacaatactttttcaggtggcaggagcccgggaaggagattatattgtctccattcagcttgtggattgtaagtggctgacgctgagtgaggttatgaagctgctgaagagctttggcgaggacgagatcgagatgaaagtcgtgagcctcctggactccacatcatccatgcataataagagtgccacatactccgtgggaatgcagaaaacgtactccatgatctgcttagccattgatgatgacgacaaaactgataaaaccaagaaaatctccaagaagctttccttcctgagttggggcaccaacaagaacagacagaagtcagccagcaccttgtgcctcccatcggtcggggctgcacggcctcaggtcaagaagaagctgccctcccctttcagccttctcaactcagacagttcttggtactaatgtgaggaaacaaacatgttcaggccctgaacatttccggtg

SEQ ID NO: 17823 - DNA, 540 bp, Homo sapiens
  source 1..540: mol_type = unassigned DNA
aagatggctttccaggttctcgcatgactgctgtagcatgtatgcccccagatgtgtcatttgtccctgaacaaggccaagtgagatcttcaaggacagcaggcaaaattccctttagctttcaagcgtctgatccagccttcaaatcctacacctaacgatgctctcttccaaagggccccttatctgtgttttcggctaacaagcggtggacgcctcctcgaagcatccgcttcactgcagaagaaggggacttggggttcaccttgagagggaacgcccccgttcaggttcacttcctggatccttactgctctgcctcggtggcaggagcccgggaaggagattatattgtctccattcagcttgtggattgtaagtggctgacgctgagtgaggttatgaagctgctgaagagctttggcgaggacgagatcgagatgaaagtcgtgagcctcctggactccacatcatccatggtgagcgctgacacctccctgggcagtcagtggtggcgtggagtgaaatctgcatgagttc

SEQ ID NO: 17824 - DNA, 468 bp, Homo sapiens
  source 1..468: mol_type = unassigned DNA
agttattctcttaagggggataagtgggggctgcaagtgaagaaactaaaatggagtctgtccggctctctctgctaggagagagtcactcaggttaaaacaaggtagggtatcacaggctctagctatccaggcagatcctttagaaaagagaacatccaacctcttgggctgccccttgggcctttatgctctgcttggtggatctgcaagtcacgtgggtgctggcttccgtctgcagggaagtcccacttgcgcagagccatggctcatcacgaggagtcggtgcgggaggccagcctctgcaagaagctgcggagcattgaggtgctacagaaggtgctgtgtgccgcacaggaacgctcccggctcacgtacgcccagcaccaggaggaggatgacctgctgaacctgatcgacgcccccagtgttgttgctaaaactgagcaagaggttgacattatattg

SEQ ID NO: 17825 - DNA, 6321 bp, Homo sapiens
  source 1..6321: mol_type = unassigned DNA
atgcaggccttcccacaagggcccggcagcatgacaaggtgaaggcagagtatgtgcatctcaaccatccgctcaccctcgtgaccagagagcgcgatttggccgtgaaggagaaacaccagctccaagccaagctggagaacctagaacaggtcctgaagcatatgcgagaggcggctgaacggcggcagcagctgcagttggagcatgaccaggccctggctgttctcagtgccaagcagcaggaaattgaccttctgcagaagtccaaggttcgagagctggaagagaaatgccggactcaaagtgagcagttcaacctgctgtcccgggacctggagaagttccggcagcacgctggcaagattgacctgctgggtggcagcgcggtggcccccctggacatctccacggcccccagcaagcctttcccacagttcatgaatggcctagccacctccctcggcaaaggtcaggagagcgctattggaggcagctctgcgatcggtgaatatatccggccccttccgcagcctggtgacaggccggagcctctgtccgccaagcccaccttcctgtcgagatccggtagcgcaagatgcagatctgagtcagacatggagaatgaacggaattccaatacctccaagcagagatactcggggaaggtccacctctgtgttgcccgctatagttacaaccccttcgatggaccgaacgagaaccccgaagctgagctgcccctcacggcgggaaaatacctctacgtctatggagacatggatgaggatgggttctatgaaggagagctcctcgatggccagaggggtctggtgccctccaacttcgtggactttgtgcaggacaacgagtcgcggttggcaagcacgctggggaacgagcaggatcagaacttcatcaaccattccggcatcggcctggagggagagcacatcctggacctccactccccaacccacatagatgcgggcatcaccgacaacagtgccgggaccctggacgtgaacatcgacgacatcggagaagacatcgtgccttaccctagaaaaatcaccctcatcaaacaactcgccaaaagtgttattgtgggctgggagcccccggcggtgccaccaggatggggaacggtgagcagctacaacgtcctggtggacaaggagacacgcatgaacctcacgctggggagcagaactaaagccctcatcgagaagctcaacatggcagcctgcacctaccgcatctccgtgcagtgcgtcaccagcaggggcagctcggatgagctgcagtgcacgctgctggtgggcaaggacgtggtggtggccccctcccacctgcgggtggacaacatcacgcagatctccgcccagctctcctggctacccaccaacagcaactacagccacgtcatcttcctcaacgaggaggagttcgacatcgtcaaggccgccaggtacaagtaccagttcttcaatctcaggcccaacatggcctataaggtgaaggttctggccaaaccccaccagatgccgtggcagctcccgctggagcaaagggagaagaaggaggcctttgtggagttctccacgttgcctgcaggacccccagcacccccacaagatgttaccgtccaggctggggtgacccccgccaccatccgggtctcctggagaccacctgtgctgacgcccaccgggctgtccaatggcgcaaacgttaccggctacggcgtgtatgccaaagggcagagggtggctgaagtcatcttccccacggcagacagcacggccgtggagcttgtgcggctgcggagcctggaggccaagggcgtgaccgtgcggaccctctccgcccagggcgagtccgtggactctgcagttgctgccgttccccccgagctcctggtgcctcctaccccccacccgagacctgcaccccaatcaaagccattagcaagttctggagtccccgaaaccaaagacgagcacctgggtccccacgccaggatggatgaggcctgggagcagagccgtgcacctggccctgtgcatgggcacatgctggagccgcccgtgggccccggaaggcggtcgccctcacccagccgcatcctgccacagccacagggcaccccggtgtccaccaccgtcgccaaggccatggcccgggaggccgcgcagagggtggccgagagcagcaggttagagaaaaggagcgtcttcctagagagaagcagcgcggggcagtacgccgcctcagacgaggaggacgcctatgactctccagacttcaagaggaggggcgcctcggtggacgacttcctgaaaggctctgaacttggcaagcagccgcactgttgccatggagacgagtaccacacagagagcagccgggggtctgacctctcagacatcatggaggaggacgaggaggagctgtattctgaaatgcagctggaagatgggggaaggaggcggcccagcggcacgtcccacaatgccctcaagattttagggaacccagcctctgcaggacgggtggatcacatgggccggaggtttccccgtggcagcgctggtcctcagaggtcccggcccgtgacagtcccatccatcgacgattacgggcgagaccgcctttctccagacttctatgaagagtcagaaactgaccctggtgccgaagagctcccggcccggatctttgtggctctctttgactacgacccgctcaccatgtccccaaacccagatgctgcagaggaggagcttccctttaaagaaggccagatcatcaaggtttatggtgataaagacgctgatggattctaccgtggggaaacctgtgcccggcttggccttattccttgtaacatggtctctgagatacaagcagatgatgaggagatgatggatcagcttcttagacagggctttctccctctgaatacacctgtggagaaaatagagagaagcaggagaagtggcaggcgtcattcggtatcgacgcggagaatggtggccctgtatgactacgaccccagagaaagctcgcccaacgtcgatgtcgaggccgaacttacattttgcacaggagatattattacagtttttggtgaaattgatgaagatggattttattatggggagctgaatgggcagaaaggccttgtgccctcaaacttcttggaagaagtgcctgatgacgtagaagtctatctttctgatgctccatcccactactctcaagatacgccaatgcgctcaaaggcaaaaaggaagaagagtgttcatttcacaccttaatcaggcaatgtagccttcacgtaagtgagcaactgaagataccgataaagataccaacttaagctaccttaaccgggccagtgtggtagacttaaggcttcattgtggggttaaaaaaaaaaaaagatacaaagaaatatgtctcaaaaaactattggacctaaataattagaatattacttggtctcagttgtaaagcaactgaatttatagtgaagcaaatcatctttaataatcatttcctactatttgcattaagaatatttgaaaggccaacattgggaacatatttcttaacaagctaactgtgtgtttacatagagagagctgcatattgcattgttagccactcttggaaaaagcacaacctaacaaacatgtttactataggaagctttactttagaaacttaacccaaggtcaagcagatgagtagtgaacacaggtgatcgagtgttggctctgaacactccaaacactggctcgagtggccagaacgtgttttccttaagtaaccctgcctctaccttacgagagagctatgctcctcctcaaagcacaatcatcctgtgacagaagttgctgcaacacgcgtttgttgttggtataccaatgcaatactaagttgatgaagcacgcagctcaaatgatcacattagatggaatagatggtatcttcaggtgtactttgggatgctttactaggtgttttccattagaattagaccttgattttaaatccaagcaagcttgaagccccttggcttacagcatttgcctgctgaatactaaacactcacatggcaagagttgctctggagaggtagggccagaggaatgctgctgcactgccaactcaggcacatgcttagctgtaaagggaagcgaggtgaagtcgtcctgcagcgtattagagtaaaagtctacccctctgaagcactattaagcgcttaacgtatatttaaatactaccatgtgctatctactgaggaagattcatgttcaattatttggaaataatgcaagcatccactaagggcctttaagctttctttgattataattaaggttcattttagtttttttttttctttcaaccagtgtgccatctccaatatttctatagtataccaaccaccccaggaatgcactttaacaatatcaggattttatataaccaaatagtttcaaatacaacaaaattccctttatgaactttcgctttttaagactactgatgggtactcggccaactttactatcaacctaatttcagatcatgtctcccctgcccttagtcttcatttatgaagtgaattattacctgccttagctttgccaaagcaacggccaccccgcactccctcgagacagagaaacggaacccacacatttatgtctggggcctctctctggcgtgctgtgggagaggacctttgcttctcatggcatacttcaacaactgaaagaacaaatgaacccccctgacctttcctggtgggaaacggggacagtacgatgttaccaagtgaattctgttgttggcgctcacacactcaataaactgtaacactgtacctactaggttcctcctgagggttcaggtacagcaaggagagctccatcccccacagtccatctccattcggggtcacctacgtcatctatgggttctggtagtcctgggagaggcagggaaatgtcctcgaaaaagaaaaaggggctgctttccaaaggcaagaaactgctgaaaaagctgggtgcagtgaaatgattcatgtgcttccggacaactgccaaatctatgtaattttctttaattccaaactagggctttcatgactcaagtacttcctaaaaaaacccaatcttctcccctgacaccagtagagaaatgcacttttgcactaccaaccactttaaaccaaccacgagaacaaagaggagcggttgctctctgtcaccgctggcagtctgctctcattgtccaagctctgatttgggaggtgggaggggacgtcttattaacaaacgggggcgcatagctatcacctgtagctccctccctacctgtaattccagtctttgtgcatttgtcatctgcccttaaaggaatgattttcaacctttctcccttctcaaaatgcttgcctcataatgcataactttcactttgactctggtcttgaaattcctagtttaattcgccttgatgttctgccttataaatgcacaatgatttgtactgtctaataaaaacagtgtatactttgtatgtgtcgtgcattcagtggtcttcatcctgacacagtggtttgagatcaagttgtacaggctgtgcattttaagatactagtttcagtctttcaaagccagccaggctacacacagaaaatgtttactcaatcattcaaaaaagagaaaaggagagaaagtaactttgtttggtaaagcaccagtactccaaccttccagaaagccgattatcttcattgcttttaatgttctattctgtggcatatggttttctgttactttcgttgtcaaaatgccatacccaaatacacagcaatgaatggcacacaagtaatccacataatgcataagccacaccaaaaccagactcaatttaaatctgctccaaatgagtccatacccatcttcatcattggcatttgaacaaaagacttacttacaaagttgctggcagatgtatttgatggttactcttttgtaattcttgtccacttgtaaattgtttttactctttatacatacttttcagactgcctttcttttgtaatttatggacggtttataaatgaatgacaaagctttccccattgtgtcttcaaaaacgctattataaattgtaatataatagtatgtggtagatttattattaaaggaaatccatgtgtggttaagctctgtgtgggtgtgtgcatgtgcacagttagtgtaaaatattttctagaaataaaatttgttattttat

SEQ ID NO: 17826 - DNA, 552 bp, Homo sapiens
  source 1..552: mol_type = unassigned DNA
gagagaagcaggagaagtggcaggcgtcattcggtatcgacgcggagaatggtggccctgtatgactacgaccccagagaaagctcgcccaacgtcgatgtcgaggccgaacttacattttgcacaggagatattattacagtttttggtgaaattgatgaagatggattttattatggggagctgaatgggcagaaaggccttgtgccctcaaacttcttggaagaagtgcctgatgacgtagaagtctatctttctgatgctccatcccactactctcaagatacgccaatgcgctcaaaggcaaaaagggttcctcctgagggttcaggtacagcaaggagagctccatcccccacagtccatctccattcggggtcacctacgtcatctatgggttctggtagtcctgggagaggcagggaaatgtcctcgaaaaagaaaaaggggctgctttccaaaggcaagaaactgctgaaaaagctgggtgcagtgaaatgattcatgtgcttccggacaactgccaaatctatgtaattttctttaattcca

SEQ ID NO: 17827 - DNA, 994 bp, Homo sapiens
  source 1..994: mol_type = unassigned DNA
ctttgactaacatacaaacattttaaacgtgggctgtgcttagctttccattttgcagagtgtgtgggtcctgggaaggctccccagcatgggccatcctgcccctggcacggccgcagcccctgccccagcctgtgctctctgaggaggcccccgaggcccagccctgtctcaatgctttcacatgcagtgtggccaggtacagagtgtggctgtggttatgtgcttctccaattcatctgacctagacctcccgatctatttccacctacatgttaagacacaaaaaagacaaaagtcaaggaaccgctgccatcctcactgctttccaaagctgcatttcccgtgcacgctcctcagttaggctcactgccgctctgttcttcacccccacttgctcgcagacgattacgggcgagaccgcctttctccagacttctatgaagagtcagaaactgaccctggtgccgaagagctcccggcccggatctttgtggctctctttgactacgacccgctcaccatgtccccaaacccagatgctgcagaggaggagcttccctttaaagaaggccagatcatcaaggtttatggtgataaagacgctgatggattctaccgtggggaaacctgtgcccggcttggccttattccttgtaacatggtctctgagatacaagcagatgatgaggagatgatggatcagcttcttagacagggctttctccctctgaatacacctgtggagaaaatagagagaagcaggagaagtggcaggcgtcattcggtatcgacgcggagaatggtggccctgtatgactacgaccccagagaaagctcgcccaacgtcgatgtcgaggccgaacttacattttgcacaggagatattattacagtttttggtgaaattgatgaagatggattttattatggggagctgaatgggcagaaaggccttgtgccctcaaacttcttggaagaagtgcctgatgac

SEQ ID NO: 17828 - DNA, 3685 bp, Homo sapiens
  source 1..3685: mol_type = unassigned DNA
gaaaatgaactgaaggatgccacccagggagagtatctcctgagatcccatcatgcaggccttcccacaagggcccggcagcatgacaaggtgaaggcagagtatgtgcatctcaaccatccgctcaccctcgtgaccagagagcgcgatttggccgtgaaggagaaacaccagctccaagccaagctggagaacctagaacaggtcctgaagcatatgcgagaggcggctgaacggcggcagcagctgcagttggagcatgaccaggccctggctgttctcagtgccaagcagcaggaaattgaccttctgcagaagcctcagaaaaccaacctccagtgtccgcactttaggaagtgtcccatgctttcacagttgacgatgacgttcgttagcactcttggtttcaagcgacagaaaacccaaacaggaaattgtttttgtgcccatcactgaaaatgtggcttcagacatggctagatccagggctcaaatctgctggcctcagacccagtagaatccaaggcctccccgacatcaccaggacttggctgctctctgccctcctctggatcagcttcagccttggtttccctgtggagacccccagccactccagccctgaccctcctggtggcaaagtggctgcagcctcacctcctcccaagccaaagtccaatagaaaggggcttccctctcccgcagcattctcaggcagaggcccattgccctccgtaggccccacaccacccaggtcaccagtcgctgagggttcagactgtgcttggcacaggggaggtccagaccccagccagtccagaggttcttcccaggagaggagctcctgacgctggaggaagaggcctgaggaacaggcctgttacccagaggatccgctatccaggaggctcaggttgaggctaagaaggagcatgaaggcgcagtgcggctgctagagtccaaggttcgagagctggaagagaaatgccggactcaaagtgagcagttcaacctgctgtcccgggacctggagaagttccggcagcacgctggcaagattgacctgctgggtggcagcgcggtggcccccctggacatctccacggcccccagcaagcctttcccacagttcatgaatggcctagccacctccctcggcaaaggtcaggagagcgctattggaggcagctctgcgatcggtgaatatatccggccccttccgcagcctggtgacaggccggagcctctgtccgccaagcccaccttcctgtcgagatccggtagcgcaagatgcagatctgagtcagacatggagaatgaacggaattccaatacctccaagcagagatactcggggaaggtccacctctgtgttgcccgctatagttacaaccccttcgatggaccgaacgagaaccccgaagctgagctgcccctcacggcgggaaaatacctctacgtctatggagacatggatgaggatgggttctatgaaggagagctcctcgatggccagaggggtctggtgccctccaacttcgtggactttgtgcaggacaacgagtcgcggttggcaagcacgctggggaacgagcaggatcagaacttcatcaaccattccggcatcggcctggagggagagcacatcctggacctccactccccaacccacatagatgcgggcatcaccgacaacagtgccgggaccctggacgtgaacatcgacgacatcggagaagacatcgtgccttaccctagaaaaatcaccctcatcaaacaactcgccaaaagtgttattgtgggctgggagcccccggcggtgccaccaggatggggaacggtgagcagctacaacgtcctggtggacaaggagacacgcatgaacctcacgctggggagcagaactaaagccctcatcgagaagctcaacatggcagcctgcacctaccgcatctccgtgcagtgcgtcaccagcaggggcagctcggatgagctgcagtgcacgctgctggtgggcaaggacgtggtggtggccccctcccacctgcgggtggacaacatcacgcagatctccgcccagctctcctggctacccaccaacagcaactacagccacgtcatcttcctcaacgaggaggagttcgacatcgtcaaggccgccaggtacaagtaccagttcttcaatctcaggcccaacatggcctataaggtgaaggttctggccaaaccccaccagatgccgtggcagctcccgctggagcaaagggagaagaaggaggcctttgtggagttctccacgttgcctgcaggacccccagcacccccacaagatgttaccgtccaggctggggtgacccccgccaccatccgggtctcctggagaccacctgtgctgacgcccaccgggctgtccaatggcgcaaacgttaccggctacggcgtgtatgccaaagggcagagggtggctgaagtcatcttccccacggcagacagcacggccgtggagcttgtgcggctgcggagcctggaggccaagggcgtgaccgtgcggaccctctccgcccagggcgagtccgtggactctgcagttgctgccgttccccccgagctcctggtgcctcctaccccccacccgagacctgcaccccaatcaaagccattagcaagttctggagtccccgaaaccaaagacgagcacctgggtccccacgccaggatggatgaggcctgggagcagagccgtgcacctggccctgtgcatgggcacatgctggagccgcccgtgggccccggaaggcggtcgccctcacccagccgcatcctgccacagccacagggcaccccggtgtccaccaccgtcgccaaggccatggcccgggaggccgcgcagagggtggccgagagcagcaggttagagaaaaggagcgtcttcctagagagaagcagcgcggggcagtacgccgcctcagacgaggaggacgcctatgactctccagacttcaagaggaggggcgcctcggtggacgacttcctgaaaggctctgaacttggcaagcagatggtctcctaacagagctggaattagattgaaccgaggcctgaagaagacctgtttccacgcctttccccatgtgccacgttctcctcacctatccaggagtgaatcatcaccttccctgcaatctgctcagattacaaacccggaggaaaggctggagcacttgttctctgggtgaaggacccatacccccactggtttttgagatcggcattcagcgctgtcttatggcagccacagccccaggtggccccagagcccttgacatgtggccacctggggctgagtgtgactgaggccctgaatttttacttctataaaattagttccagattagtttacattctaattagtttacatgtaaacagccacacgtggctggtggccaccagtgctgacgcccagctctggatgaccacacctgctacaagagatgacttttctagagaagagtagaaacacagcggcagaaacacagctctgcacttccgagggcctcccactccttctgatgagactgcagaggaagtctgtttggccaagcatgctattaacacgttttcctgcttgttttgttttttaacagagcaaacaggtctgtttctattaaaatttaaaaagcgttaa

SEQ ID NO: 17829 - DNA, 770 bp, Homo sapiens
  source 1..770: mol_type = unassigned DNA
gtgaaggcagagtatgtgcatctcaaccatccgctcaccctcgtgaccagagagcgcgatttggccgtgaaggagaaacaccagctccaagccaagctggagaacctagaacaggtcctgaagcatatgcgagaggcggctgaacggcggcagcagctgcagttggagcatgaccaggccctggctgttctcagtgccaagcagcaggaaattgaccttctgcagaaggctcaggttgaggctaagaaggagcatgaaggcgcagtgcggctgctagaggtaaggagcgtgcccctgctttctgcccgggggtgggggacgttggggagagttgccctgatgcctgctagaaataatagatgatgtttatgaagtgcgcctggtgcaccagttactagatgccattcatgtgtcttctcatgtcatcctcacaagcaaccagtactacaggtgccaggaccaggtccgttcttacagggaaactgaggcacagagaggttaagcagctttcccttggccacacatccagacccagaactgtgtgtctcagatgtggtctgctgtcctctggtggctcctcttgggtggaaagtgagggggcgtggctcactcgcttgcttgtgaattaatttccccaggggtaaaggccggtggaccttccggaggccatcctggtctctgatgaactgccttggggtacctttttaaggtatgacacccatcctggggaggcatttgtaggatcagagaaaggagggcctggggaatca

SEQ ID NO: 17830 - DNA, 5047 bp, Homo sapiens
  source 1..5047: mol_type = unassigned DNA
ctctcccgccgcgcctccgcctgcccgcccccgccggccgaggctgggctgcgggaggcggccgggcggccccgagcttcgctagggcgaccaaaacaaaggcagcatccggggctgggtggatgcaaacaaccatgaaagactgggttctcgctctccccggctctgctgctgctgctgctgccgccgccgccgctgctcctcctcctgccgccgccgctagggctccgctgtgagggggaagcaggggcgcagctgctgggcgtgcatccgaaaggtgagagccagagagcgagcagagggggcgggcaggccacgaaaatgtcctcggccgtggggccccgcggtcctcgcccacccacggtgcctccccccatgcaagagctgcccgacctgagccacctgaccgaagaggagaggaacattatcatggcagtgatggaccggcagaaggaagaggaggaaaaagaagaagccatgctcaagtgtgttgtcagggacatggcgaagcctgctgcctgcaaaacaccaagaaatgctgaaaaccagccccaccaaccttcaccgagattgcatcaacagtttgaaagctataaggaacaagtgagaaaaataggggaagaagcgcggcgttaccagggcgagcacaaagacgatgctccgacttgtggaatctgtcataaaacaaagtttgctgatgggtgcggtcatctctgctcctattgtcgcactaagttctgtgcgcgctgcggaggccgcgtgtctctacggtcaaacaacgaggacaaagtggttatgtgggtatgcaatttatgtcgaaagcaacaagaaatcttaaccaaatctggggcatggttctttggaagtggccctcagcagacaagtcaggatggaaccctgagtgatacagctacaggtgctggctctgaggtaccaagagaaaagaaagcacgactccaagagcgatcgcggtctcagacacccctaagcacagcagctgcctcctcccaggatgctgctcctcccagcgcaccaccagacaggagcaaaggggctgagccctcgcagcaagccttggggcctgaacagaagcaggcttcatccaggtctagaagtgaacctcctagagagagaaagaagaccccagggctttccgagcagaatggcaaaggagccctgaagagcgagcggaaacgcgtgccaaagacctcagcgcagcccgtggagggggccgtcgaagaacgggagcgcaaagaaaggcgggaaagccgaaggcttgagaaagggcgatcacaggattacccagacacgccggaaaaacgggatgagggcaaagcggcggatgaggaaaagcaaagaaaagaggaggattatcagaccaggtaccgcagcgacccgaacctagctcggtacccggtgaaaccgccgcctgaggagcagcagatgcgcatgcacgcccgggtgtcccgcgccaggcacgagcggcgccacagcgacgtggcgctcccgcgcaccgaggcgggcgcggcgctgccggagggcaaggccggcaaacgcgcgccggcggcagccagggcctcgccgccggactcgccgcgggcttactcggctgagagaactgcggagaccagggcgccgggcgccaagcagctaacgaaccacagcccgccggcgcccagacatgggccggttcccgcagaagccccggagctcaaagcccaggagcccctcaggaagcagagccgcctggaccccagctcggcggtcctcatgcggaaggccaagcgcgagaaggtggagaccatgctgcggaacgactctttgagctcagaccagtccgagtcggtgcggccgtccccgcccaagccgcaccggtccaagagaggcggcaagaagcggcagatgtcggtgagcagctctgaggaggagggcgtgtcgacgcccgagtacaccagctgcgaggacgtggagctggagagcgagagcgtcagcgagaaaggtgatttggattattactggttggatcctgccacgtggcacagccgggagacatcacctattagttcgcatcctgtaacgtggcaaccatctaaagagggggaccgattaattggacgtgttattcttaacaagagaacaaccatgcccaaagactcaggtgcattgctgggtctgaaagttgttggaggaaaaatgactgacttaggacgacttggtgctttcatcaccaaagtaaagaagggtagcctagcagatgtagttggacacctaagagcaggggatgaagttctagaatggaatggtaaacccctgccgggagctacaaatgaagaagtttacaacattattttagaatcaaaatcagaacctcaagttgaaattattgtttcaaggcctattggtgacattccccggattcctgagagctcccaccctccactggagtccagttcaagttcctttgaatctcagaagatggaaaggccttccatttctgttatttctccaacaagtcctggagctctaaaagatgccccacaagtcttaccagggcaactttctgtgaagttgtggtatgataaagtgggacaccagctgattgtaaatgttctgcaagcaacagatctacctgctagagtagatggacgtcctcgaaatccctatgtaaaaatgtattttcttccagatagaagtgataaaagtaaaaggaggaccaaaacagtaaagaaaatactagaaccaaaatggaatcaaacttttgtctattcacatgtacatcgtagagattttagagaacgaatgttagaaataactgtgtgggaccaaccaagagtgcaagaagaagaaagtgaatttcttggagagatcctcatagaattggagacagcgcttttagatgatgaaccgcattggtataaacttcagacacatgatgagtcttcactacctctgcctcagccatcacctttcatgccaaggcgacatattcatggagaaagctctagcaaaaagctacaaagatctcagcgaatcagtgatagtgacatctcagattatgaggttgatgatggtattggcgtagttcctccagtaggctataggtctagtgctagagaaagtaaatctacaacattaactgtgccagaacagcaaagaacaactcatcaccgctcacgttcagtatctcctcatcgcggcaatgatcagggaaagccgcgttcacgtttaccaaatgtgccattacagaggagtttagatgaaattcatccaacaagaaggtcacgttctccaaccagacaccatgatgcctcccgaagtccagttgatcatagaaccagagatgtggatagtcagtatttatcagaacaagacagtgagcttcttatgctgcccagagcaaaacgaggacgaagtgcagaatgcctacatactaccagtgaactgcagccctttcttgacagggctaggagtgctagtaccaactgcttgagaccagatactagtttgcattcaccagaacgagaaagaatgcaccgacagagaagtccaacacaatctcctccagcagacacatcgttcagcagtcgcaggggaagacagctcccacaagtgccagtgagaagcggcagtatagaacaagcaagcttagtagtggaggagcgaacaagacagatgaaaatgaaagtgcatcgatttaagcagacaacagggtctggttctagtcaagaacttgatcgcgagcaatattccaagtataacatacataaagatcagtacagaagctgtgataacgtctctgccaaatcatcagatagtgatgtcagtgatgtttccgccatttcccgaaccagcagtgcctcacgcctcagcagcacaagctttatgtcagagcaatctgagcgccccaggggtagaatcagttcatttacccccaaaatgcaaggcagacggatggggacttcaggaagatccatcatgaagagcaccagtgtcagtggagagatgtacacactggagcataatgacggcagccagtcagacacagctgtgggtacagttggagcaggtggaaagaaacggagatccagccttagtgccaaagtggttgccatagtgtctcgaaggagtagaagcacatcccagcttagtcaaacagagtcgggccacaaaaagttaaaaagtaccatccagagaagcacagaaacaggcatggcagctgaaatgagaaagatggtaaggcagccgagccgagagtctactgatggcagcatcaacagttacagctctgagggcaatttaatatttcctggagtgcgactgggagctgacagtcaattcagtgattttcttgatggattgggaccagcccagcttgttggccgccaaacccttgccacccctgcaatggctccatatgtcaaagtatatcttttggaaaatggggcctgtatagccaagaagaagacaagaattgcacgaaaaacccttgatcctttgtatcagcagtctctggtttttgatgaaagtccacagggtaaagttcttcaggtgattgtctggggagactatggcagaatggaccacaaatgctttatgggtgtggctcagatcttgttggaagaactcgacctgtccagcatggtgatcggatggtacaaattgttcccaccgtcctcactggtggatcccacactcactcccctcacccggcgggcttcccagtcatctctggaaagttcaactgggcctccctgtattcgatcatagtgaactcataccagagtcattccaataaaactctacttttcaggataataatctgaaccagatatttcatgatcgaaagcattgttggagacagacaatcaacttgtgttttgcctgtagtagtttttcaataatatgtcccaattgttatttaaaacatggcttcatatgacagaacaaggcaatctatcaaatttacaggaagaatcaacatgctggtgagagtcactgatgcttctaacaaatagaaaaagaggaaactttaaatccacgcatacac

SEQ ID NO: 17831 - DNA, 4428 bp, Homo sapiens
  source 1..4428: mol_type = unassigned DNA
atgtcctcggccgtggggccccgcggtcctcgcccacccacggtgcctccccccatgcaagagctgcccgacctgagccacctgaccgaagaggagaggaacattatcatggcagtgatggaccggcagaaggaagaggaggaaaaagaagaagccatgctcaagtgtgttgtcagggacatggcgaagcctgctgcctgcaaaacaccaagaaatgctgaaaaccagccccaccaaccttcaccgagattgcatcaacagtttgaaagctataaggaacaagtgagaaaaataggggaagaagcgcggcgttaccagggcgagcacaaagacgatgctccgacttgtggaatctgtcataaaacaaagtttgctgatgggtgcggtcatctctgctcctattgtcgcactaagttctgtgcgcgctgcggaggccgcgtgtctctacggtcaaacaacgaggacaaagtggttatgtgggtatgcaatttatgtcgaaagcaacaagaaatcttaaccaaatctggggcatggttctttggaagtggccctcagcagacaagtcaggatggaaccctgagtgatacagctacaggtgctggctctgaggtaccaagagaaaagaaagcacgactccaagagcgatcgcggtctcagacacccctaagcacagcagctgcctcctcccaggatgctgctcctcccagcgcaccaccagacaggagcaaaggggctgagccctcgcagcaagccttggggcctgaacagaagcaggcttcatccaggtctagaagtgaacctcctagagagagaaagaagaccccagggctttccgagcagaatggcaaaggagccctgaagagcgagcggaaacgcgtgccaaagacctcagcgcagcccgtggagggggccgtcgaagaacgggagcgcaaagaaaggcgggaaagccgaaggcttgagaaagggcgatcacaggattacccagacacgccggaaaaacgggatgagggcaaagcggcggatgaggaaaagcaaagaaaagaggaggattatcagaccaggtaccgcagcgacccgaacctagctcggtacccggtgaaaccgccgcctgaggagcagcagatgcgcatgcacgcccgggtgtcccgcgccaggcacgagcggcgccacagcgacgtggcgctcccgcgcaccgaggcgggcgcggcgctgccggagggcaaggccggcaaacgcgcgccggcggcagccagggcctcgccgccggactcgccgcgggcttactcggctgagagaactgcggagaccagggcgccgggcgccaagcagctaacgaaccacagcccgccggcgcccagacatgggccggttcccgcagaagccccggagctcaaagcccaggagcccctcaggaagcagagccgcctggaccccagctcggcggtcctcatgcggaaggccaagcgcgagaaggtggagaccatgctgcggaacgactctttgagctcagaccagtccgagtcggtgcggccgtccccgcccaagccgcaccggtccaagagaggcggcaagaagcggcagatgtcggtgagcagctctgaggaggagggcgtgtcgacgcccgagtacaccagctgcgaggacgtggagctggagagcgagagcgtcagcgagaaaggtgatttggattattactggttggatcctgccacgtggcacagccgggagacatcacctattagttcgcatcctgtaacgtggcaaccatctaaagagggggaccgattaattggacgtgttattcttaacaagagaacaaccatgcccaaagactcaggtgcattgctgggtctgaaagttgttggaggaaaaatgactgacttaggacgacttggtgctttcatcaccaaagtaaagaagggtagcctagcagatgtagttggacacctaagagcaggggatgaagttctagaatggaatggtaaacccctgccgggagctacaaatgaagaagtttacaacattattttagaatcaaaatcagaacctcaagttgaaattattgtttcaaggcctattggtgacattccccggattcctgagagctcccaccctccactggagtccagttcaagttcctttgaatctcagaagatggaaaggccttccatttctgttatttctccaacaagtcctggagctctaaaagatgccccacaagtcttaccagggcaactttctgtgaagttgtggtatgataaagtgggacaccagctgattgtaaatgttctgcaagcaacagatctacctgctagagtagatggacgtcctcgaaatccctatgtaaaaatgtattttcttccagatagaagtgataaaagtaaaaggaggaccaaaacagtaaagaaaatactagaaccaaaatggaatcaaacttttgtctattcacatgtacatcgtagagattttagagaacgaatgttagaaataactgtgtgggaccaaccaagagtgcaagaagaagaaagtgaatttcttggagagatcctcatagaattggagacagcgcttttagatgatgaaccgcattggtataaacttcagacacatgatgagtcttcactacctctgcctcagccatcacctttcatgccaaggcgacatattcatggagaaagctctagcaaaaagctacaaagatctcagcgaatcagtgatagtgacatctcagattatgaggttgatgatggtattggcgtagttcctccaggctataggtctagtgctagagaaagtaaatctacaacattaactgtgccagaacagcaaagaacaactcatcaccgctcacgttcagtatctcctcatcgcggcaatgatcagggaaagccgcgttcacgtttaccaaatgtgccattacagaggagtttagatgaaattcatccaacaagaaggtcacgttctccaaccagacaccatgatgcctcccgaagtccagttgatcatagaaccagagatgtggatagtcagtatttatcagaacaagacagtgagcttcttatgctgcccagagcaaaacgaggacgaagtgcagaatgcctacatactaccagaatgcaccgacagagaagtccaacacaatctcctccagcagacacatcgttcagcagtcgcaggggaagacagctcccacaagtgccagtgagaagcggcagtatagaacaagcaagcttagtagtggaggagcgaacaagacagatgaaaatgaaagtgcatcgatttaagcagacaacagggtctggttctagtcaagaacttgatcgcgagcaatattccaagtataacatacataaagatcagtacagaagctgtgataacgtctctgccaaatcatcagatagtgatgtcagtgatgtttccgccatttcccgaaccagcagtgcctcacgcctcagcagcacaagctttatgtcagagcaatctgagcgccccaggggtagaatcagacggatggggacttcaggaagatccatcatgaagagcaccagtgtcagtggagagatgtacacactggagcataatgacggcagccagtcagacacagctgtgggtacagttggagcaggtggaaagaaacggagatccagccttagtgccaaagtggttgccatagtgtctcgaaggagtagaagcacatcccagcttagtcaaacagagtcgggccacaaaaagttaaaaagtaccatccagagaagcacagaaacaggcatggcagctgaaatgagaaagatggtaaggcagccgagccgagagtctactgatggcagcatcaacagttacagctctgagggcaatttaatatttcctggagtgcgactgggagctgacagtcaattcagtgattttcttgatggattgggaccagcccagcttgttggccgccaaacccttgccacccctgcaatgggtgatatacaaataggaatggaggacaaaaagggccaattagaagtggaagtcattagagcacgaagcctcacacaaaagcctggttccaaatctacacctgctccatatgtcaaagtatatcttttggaaaatggggcctgtatagccaagaagaagacaagaattgcacgaaaaacccttgatcctttgtatcagcagtctctggtttttgatgaaagtccacagggtaaagttcttcaggtgattgtctggggagactatggcagaatggaccacaaatgctttatgggtgtggctcagatcttgttggaagaactcgacctgtccagcatggtgatcggatggtacaaattgttcccaccgtcctcactggtggatcccacactcactcccctcacccggcgggcttcccagtcatctctggaaagttcaactgggcctccctgtattcgatcatag

SEQ ID NO: 17832 - DNA, 4116 bp, Homo sapiens
  source 1..4116: mol_type = unassigned DNA
atgtcctcggccgtggggccccgcggtcctcgcccacccacggtgcctccccccatgcaagagctgcccgacctgagccacctgaccgaagaggagaggaacattatcatggcagtgatggaccggcagaaggaagaggaggaaaaagaagaagccatgctcaagtgtgttgtcagggacatggcgaagcctgctgcctgcaaaacaccaagaaatgctgaaaaccagccccaccaaccttcaccgagattgcatcaacagtttgaaagctataaggaacaagtgagaaaaataggggaagaagcgcggcgttaccagggcgagcacaaagacgatgctccgacttgtggaatctgtcataaaacaaagtttgctgatgggtgcggtcatctctgctcctattgtcgcactaagttctgtgcgcgctgcggaggccgcgtgtctctacggtcaaacaacgaggacaaagtggttatgtgggtatgcaatttatgtcgaaagcaacaagaaatcttaaccaaatctggggcatggttctttggaagtggccctcagcagacaagtcaggatggaaccctgagtgatacagctacaggtgctggctctgaggtaccaagagaaaagaaagcacgactccaagagcgatcgcggtctcagacacccctaagcacagcagctgcctcctcccaggatgctgctcctcccagcgcaccaccagacaggagcaaaggggctgagccctcgcagcaagccttggggcctgaacagaagcaggcttcatccaggtctagaagtgaacctcctagagagagaaagaagaccccagggctttccgagcagaatggcaaaggagccctgaagagcgagcggaaacgcgtgccaaagacctcagcgcagcccgtggagggggccgtcgaagaacgggagcgcaaagaaaggcgggaaagccgaaggcttgagaaagggcgatcacaggattacccagacacgccggaaaaacgggatgagggcaaagcggcggatgaggaaaagcaaagaaaagaggaggattatcagaccaggtaccgcagcgacccgaacctagctcggtacccggtgaaaccgccgcctgaggagcagcagatgcgcatgcacgcccgggtgtcccgcgccaggcacgagcggcgccacagcgacgtggcgctcccgcgcaccgaggcgggcgcggcgctgccggagggcaaggccggcaaacgcgcgccggcggcagccagggcctcgccgccggactcgccgcgggcttactcggctgagagaactgcggagaccagggcgccgggcgccaagcagctaacgaaccacagcccgccggcgcccagacatgggccggttcccgcagaagccccggagctcaaagcccaggagcccctcaggaagcagagccgcctggaccccagctcggcggtcctcatgcggaaggccaagcgcgagaaggtggagaccatgctgcggaacgactctttgagctcagaccagtccgagtcggtgcggccgtccccgcccaagccgcaccggtccaagagaggcggcaagaagcggcagatgtcggtgagcagctctgaggaggagggcgtgtcgacgcccgagtacaccagctgcgaggacgtggagctggagagcgagagcgtcagcgagaaaggtgatttggattattactggttggatcctgccacgtggcacagccgggagacatcacctattagttcgcatcctgtaacgtggcaaccatctaaagagggggaccgattaattggacgtgttattcttaacaagagaacaaccatgcccaaagactcaggtgcattgctgggtctgaaagttgttggaggaaaaatgactgacttaggacgacttggtgctttcatcaccaaagtaaagaagggtagcctagcagatgtagttggacacctaagagcaggggatgaagttctagaatggaatggtaaacccctgccgggagctacaaatgaagaagtttacaacattattttagaatcaaaatcagaacctcaagttgaaattattgtttcaaggcctattggtgacattccccggattcctgagagctcccaccctccactggagtccagttcaagttcctttgaatctcagaagatggaaaggccttccatttctgttatttctccaacaagtcctggagctctaaaagatgccccacaagtcttaccagggcaactttctgtgaagttgtggtatgataaagtgggacaccagctgattgtaaatgttctgcaagcaacagatctacctgctagagtagatggacgtcctcgaaatccctatgtaaaaatgtattttcttccagatagaagtgataaaagtaaaaggaggaccaaaacagtaaagaaaatactagaaccaaaatggaatcaaacttttgtctattcacatgtacatcgtagagattttagagaacgaatgttagaaataactgtgtgggaccaaccaagagtgcaagaagaagaaagtgaatttcttggagagatcctcatagaattggagacagcgcttttagatgatgaaccgcattggtataaacttcagacacatgatgagtcttcactacctctgcctcagccatcacctttcatgccaaggcgacatattcatggagaaagctctagcaaaaagctacaaagatctcagcgaatcagtgatagtgacatctcagattatgaggttgatgatggtattggcgtagttcctccagtaggctataggtctagtgctagagaaagtaaatctacaacattaactgtgccagaacagcaaagaacaactcatcaccgctcacgttcagtatctcctcatcgcggcaatgatcagggaaagccgcgttcacgtttaccaaatgtgccattacagaggagtttagatgaaattcatccaacaagaaggtcacgttctccaaccagacaccatgatgcctcccgaagtccagttgatcatagaaccagagatgtggatagtcagtatttatcagaacaagacagtgagcttcttatgctgcccagagcaaaacgaggacgaagtgcagaatgcctacatactaccagtgaactgcagccctttcttgacagggctaggagtgctagtaccaactgcttgagaccagatactagtttgcattcaccagaacgagaaaggggtagatggtccccctccctagataggagacgacctcctagtcccaggattcaaatccagcatgcgtctccggagaatgacagaatgcaccgacagagaagtccaacacaatctcctccagcagacacatcgttcagcagtcgcaggggaagacagctcccacaagtgccagtgagaagcggcagtatagaacaagagtcgggccacaaaaagttaaaaagtaccatccagagaagcacagaaacaggcatggcagctgaaatgagaaagatggtaaggcagccgagccgagagtctactgatggcagcatcaacagttacagctctgagggcaatttaatatttcctggagtgcgactgggagctgacagtcaattcagtgattttcttgatggattgggaccagcccagcttgttggccgccaaacccttgccacccctgcaatgggtgatatacaaataggaatggaggacaaaaagggccaattagaagtggaagtcattagagcacgaagcctcacacaaaagcctggttccaaatctacacctgctccatatgtcaaagtatatcttttggaaaatggggcctgtatagccaagaagaagacaagaattgcacgaaaaacccttgatcctttgtatcagcagtctctggtttttgatgaaagtccacagggtaaagttcttcaggtgattgtctggggagactatggcagaatggaccacaaatgctttatgggtgtggctcagatcttgttggaagaactcgacctgtccagcatggtgatcggatggtacaaattgttcccaccgtcctcactggtggatcccacactcactcccctcacccggcgggcttcccagtcatctctggaaagttcaactgggcctccctgtattcgatcatag

SEQ ID NO: 17833 - DNA, 3876 bp, Homo sapiens
  source 1..3876: mol_type = unassigned DNA
atgtcctcggccgtggggccccgcggtcctcgcccacccacggtgcctccccccatgcaagagctgcccgacctgagccacctgaccgaagaggagaggaacattatcatggcagtgatggaccggcagaaggaagaggaggaaaaagaagaagccatgctcaagtgtgttgtcagggacatggcgaagcctgctgcctgcaaaacaccaagaaatgctgaaaaccagccccaccaaccttcaccgagattgcatcaacagtttgaaagctataaggaacaagtgagaaaaataggggaagaagcgcggcgttaccagggcgagcacaaagacgatgctccgacttgtggaatctgtcataaaacaaagtttgctgatgggtgcggtcatctctgctcctattgtcgcactaagttctgtgcgcgctgcggaggccgcgtgtctctacggtcaaacaacgaggacaaagtggttatgtgggtatgcaatttatgtcgaaagcaacaagaaatcttaaccaaatctggggcatggttctttggaagtggccctcagcagacaagtcaggatggaaccctgagtgatacagctacaggtgctggctctgaggtaccaagagaaaagaaagcacgactccaagagcgatcgcggtctcagacacccctaagcacagcagctgcctcctcccaggatgctgctcctcccagcgcaccaccagacaggagcaaaggggctgagccctcgcagcaagccttggggcctgaacagaagcaggcttcatccaggtctagaagtgaacctcctagagagagaaagaagaccccagggctttccgagcagaatggcaaaggagccctgaagagcgagcggaaacgcgtgccaaagacctcagcgcagcccgtggagggggccgtcgaagaacgggagcgcaaagaaaggcgggaaagccgaaggcttgagaaagggcgatcacaggattacccagacacgccggaaaaacgggatgagggcaaagcggcggatgaggaaaagcaaagaaaagaggaggattatcagaccaggtaccgcagcgacccgaacctagctcggtacccggtgaaaccgccgcctgaggagcagcagatgcgcatgcacgcccgggtgtcccgcgccaggcacgagcggcgccacagcgacgtggcgctcccgcgcaccgaggcgggcgcggcgctgccggagggcaaggccggcaaacgcgcgccggcggcagccagggcctcgccgccggactcgccgcgggcttactcggctgagagaactgcggagaccagggcgccgggcgccaagcagctaacgaaccacagcccgccggcgcccagacatgggccggttcccgcagaagccccggagctcaaagcccaggagcccctcaggaagcagagccgcctggaccccagctcggcggtcctcatgcggaaggccaagcgcgagaaggtggagaccatgctgcggaacgactctttgagctcagaccagtccgagtcggtgcggccgtccccgcccaagccgcaccggtccaagagaggcggcaagaagcggcagatgtcggtgagcagctctgaggaggagggcgtgtcgacgcccgagtacaccagctgcgaggacgtggagctggagagcgagagcgtcagcgagaaaggtgatttggattattactggttggatcctgccacgtggcacagccgggagacatcacctattagttcgcatcctgtaacgtggcaaccatctaaagagggggaccgattaattggacgtgttattcttaacaagagaacaaccatgcccaaagactcaggtgcattgctgggtctgaaagttgttggaggaaaaatgactgacttaggacgacttggtgctttcatcaccaaagtaaagaagggtagcctagcagatgtagttggacacctaagagcaggggatgaagttctagaatggaatggtaaacccctgccgggagctacaaatgaagaagtttacaacattattttagaatcaaaatcagaacctcaagttgaaattattgtttcaaggcctattggtgacattccccggattcctgagagctcccaccctccactggagtccagttcaagttcctttgaatctcagaagatggaaaggccttccatttctgttatttctccaacaagtcctggagctctaaaagatgccccacaagtcttaccagggcaactttctgtgaagttgtggtatgataaagtgggacaccagctgattgtaaatgttctgcaagcaacagatctacctgctagagtagatggacgtcctcgaaatccctatgtaaaaatgtattttcttccagatagaagtgataaaagtaaaaggaggaccaaaacagtaaagaaaatactagaaccaaaatggaatcaaacttttgtctattcacatgtacatcgtagagattttagagaacgaatgttagaaataactgtgtgggaccaaccaagagtgcaagaagaagaaagtgaatttcttggagagatcctcatagaattggagacagcgcttttagatgatgaaccgcattggtataaacttcagacacatgatgagtcttcactacctctgcctcagccatcacctttcatgccaaggcgacatattcatggagaaagctctagcaaaaagctacaaagatctcagcgaatcagtgatagtgacatctcagattatgaggttgatgatggtattggcgtagttcctccaggctataggtctagtgctagagaaagtaaatctacaacattaactgtgccagaacagcaaagaacaactcatcaccgctcacgttcagtatctcctcatcgcggcaatgatcagggaaagccgcgttcacgtttaccaaatgtgccattacagaggagtttagatgaaattcatccaacaagaaggtcacgttctccaaccagacaccatgatgcctcccgaagtccagttgatcatagaaccagagatgtggatagtcagtatttatcagaacaagacagaatgcaccgacagagaagtccaacacaatctcctccagcagacacatcgttcagcagtcgcaggggaagacagctcccacaagtgccagtgagaagcggcagtatagaacaagagtcgggccacaaaaagttaaaaagtaccatccagagaagcacagaaacaggcatggcagctgaaatgagaaagatggtaaggcagccgagccgagagtctactgatggcagcatcaacagttacagctctgagggcaatttaatatttcctggagtgcgactgggagctgacagtcaattcagtgattttcttgatggattgggaccagcccagcttgttggccgccaaacccttgccacccctgcaatgggtgatatacaaataggaatggaggacaaaaagggccaattagaagtggaagtcattagagcacgaagcctcacacaaaagcctggttccaaatctacacctgctccatatgtcaaagtatatcttttggaaaatggggcctgtatagccaagaagaagacaagaattgcacgaaaaacccttgatcctttgtatcagcagtctctggtttttgatgaaagtccacagggtaaagttcttcaggtgattgtctggggagactatggcagaatggaccacaaatgctttatgggtgtggctcagatcttgttggaagaactcgacctgtccagcatggtgatcggatggtacaaattgttcccaccgtcctcactggtggatcccacactcactcccctcacccggcgggcttcccagtcatctctggaaagttcaactgggcctccctgtattcgatcatag

SEQ ID NO: 17834 - DNA, 5079 bp, Homo sapiens
  source 1..5079: mol_type = unassigned DNA
atgtcctcggccgtggggccccgcggtcctcgcccacccacggtgcctccccccatgcaagagctgcccgacctgagccacctgaccgaagaggagaggaacattatcatggcagtgatggaccggcagaaggaagaggaggaaaaagaagaagccatgctcaagtgtgttgtcagggacatggcgaagcctgctgcctgcaaaacaccaagaaatgctgaaaaccagccccaccaaccttcaccgagattgcatcaacagtttgaaagctataaggaacaagtgagaaaaataggggaagaagcgcggcgttaccagggcgagcacaaagacgatgctccgacttgtggaatctgtcataaaacaaagtttgctgatgggtgcggtcatctctgctcctattgtcgcactaagttctgtgcgcgctgcggaggccgcgtgtctctacggtcaaacaacgaggacaaagtggttatgtgggtatgcaatttatgtcgaaagcaacaagaaatcttaaccaaatctggggcatggttctttggaagtggccctcagcagacaagtcaggatggaaccctgagtgatacagctacaggtgctggctctgaggtaccaagagaaaagaaagcacgactccaagagcgatcgcggtctcagacacccctaagcacagcagctgcctcctcccaggatgctgctcctcccagcgcaccaccagacaggagcaaaggggctgagccctcgcagcaagccttggggcctgaacagaagcaggcttcatccaggtctagaagtgaacctcctagagagagaaagaagaccccagggctttccgagcagaatggcaaaggagccctgaagagcgagcggaaacgcgtgccaaagacctcagcgcagcccgtggagggggccgtcgaagaacgggagcgcaaagaaaggcgggaaagccgaaggcttgagaaagggcgatcacaggattacccagacacgccggaaaaacgggatgagggcaaagcggcggatgaggaaaagcaaagaaaagaggaggattatcagaccaggtaccgcagcgacccgaacctagctcggtacccggtgaaaccgccgcctgaggagcagcagatgcgcatgcacgcccgggtgtcccgcgccaggcacgagcggcgccacagcgacgtggcgctcccgcgcaccgaggcgggcgcggcgctgccggagggcaaggccggcaaacgcgcgccggcggcagccagggcctcgccgccggactcgccgcgggcttactcggctgagagaactgcggagaccagggcgccgggcgccaagcagctaacgaaccacagcccgccggcgcccagacatgggccggttcccgcagaagccccggagctcaaagcccaggagcccctcaggaagcagagccgcctggaccccagctcggcggtcctcatgcggaaggccaagcgcgagaaggtggagaccatgctgcggaacgactctttgagctcagaccagtccgagtcggtgcggccgtccccgcccaagccgcaccggtccaagagaggcggcaagaagcggcagatgtcggtgagcagctctgaggaggagggcgtgtcgacgcccgagtacaccagctgcgaggacgtggagctggagagcgagagcgtcagcgagaaaggtgatttggattattactggttggatcctgccacgtggcacagccgggagacatcacctattagttcgcatcctgtaacgtggcaaccatctaaagagggggaccgattaattggacgtgttattcttaacaagagaacaaccatgcccaaagactcaggtgcattgctgggtctgaaagttgttggaggaaaaatgactgacttaggacgacttggtgctttcatcaccaaagtaaagaagggtagcctagcagatgtagttggacacctaagagcaggggatgaagttctagaatggaatggtaaacccctgccgggagctacaaatgaagaagtttacaacattattttagaatcaaaatcagaacctcaagttgaaattattgtttcaaggcctattggtgacattccccggattcctgagagctcccaccctccactggagtccagttcaagttcctttgaatctcagaagatggaaaggccttccatttctgttatttctccaacaagtcctggagctctaaaagatgccccacaagtcttaccagggcaactttctgtgaagttgtggtatgataaagtgggacaccagctgattgtaaatgttctgcaagcaacagatctacctgctagagtagatggacgtcctcgaaatccctatgtaaaaatgtattttcttccagatagaagtgataaaagtaaaaggaggaccaaaacagtaaagaaaatactagaaccaaaatggaatcaaacttttgtctattcacatgtacatcgtagagattttagagaacgaatgttagaaataactgtgtgggaccaaccaagagtgcaagaagaagaaagtgaatttcttggagagatcctcatagaattggagacagcgcttttagatgatgaaccgcattggtataaacttcagacacatgatgagtcttcactacctctgcctcagccatcacctttcatgccaaggcgacatattcatggagaaagctctagcaaaaagctacaaagatctcagcgaatcagtgatagtgacatctcagattatgaggttgatgatggtattggcgtagttcctccagtaggctataggtctagtgctagagaaagtaaatctacaacattaactgtgccagaacagcaaagaacaactcatcaccgctcacgttcagtatctcctcatcgcggcaatgatcagggaaagccgcgttcacgtttaccaaatgtgccattacagaggagtttagatgaaattcatccaacaagaaggtcacgttctccaaccagacaccatgatgcctcccgaagtccagttgatcatagaaccagagatgtggatagtcagtatttatcagaacaagacagtgagcttcttatgctgcccagagcaaaacgaggacgaagtgcagaatgcctacatactaccagacatcttgttaggcactataaaacattacctcccaagatgcctttattacagagcagttctcactggaatatttacagctcaattctgcctgcacatactaagaccaaatcagtgactagacaggacatttcccttcatcatgaatgctttaactcaacagtattgagatttactgatgaaatactggttagtgaactgcagccctttcttgacagggctaggagtgctagtaccaactgcttgagaccagatactagtttgcattcaccagaacgagaaaggggtagatggtccccctccctagataggagacgacctcctagtcccaggattcaaatccagcatgcgtctccggagaatgacaggcactccagaaagtctgaaagatctagcatccaaaaacagactaggaaaggcactgcctctgatgcagaaagggttctcccaacatgtctttctagaaggggacacgcagccccaagagcaactgatcagccagtcattaggggaaaacatcctgctcgctcaaggtcgagtgagcactctagtatcagaacactgtgttctatgcaccaccttgtccctggagggtcggcgccaccttctccgcttctgacaagaatgcaccgacagagaagtccaacacaatctcctccagcagacacatcgttcagcagtcgcaggggaagacagctcccacaagtgccagtgagaagcggcagtatagaacaagcaagcttagtagtggaggagcgaacaagacagatgaaaatgaaagtgcatcgatttaagcagacaacagggtctggttctagtcaagaacttgatcgcgagcaatattccaagtataacatacataaagatcagtacagaagctgtgataacgtctctgccaaatcatcagatagtgatgtcagtgatgtttccgccatttcccgaaccagcagtgcctcacgcctcagcagcacaagctttatgtcagagcaatctgagcgccccaggggtagaatcagttcatttacccccaaaatgcaaggcagacggatggggacttcaggaagatccatcatgaagagcaccagtgtcagtggagagatgtacacactggagcataatgacggcagccagtcagacacagctgtgggtacagttggagcaggtggaaagaaacggagatccagccttagtgccaaagtggttgccatagtgtctcgaaggagtagaagcacatcccagcttagtcaaacagagtcgggccacaaaaagttaaaaagtaccatccagagaagcacagaaacaggcatggcagctgaaatgagaaagatggtaaggcagccgagccgagagtctactgatggcagcatcaacagttacagctctgagggcaatttaatatttcctggagtgcgactgggagctgacagtcaattcagtgattttcttgatggattgggaccagcccagcttgttggccgccaaacccttgccacccctgcaatgggtgatatacaaataggaatggaggacaaaaagggccaattagaagtggaagtcattagagcacgaagcctcacacaaaagcctggttccaaatctacacctgctccatatgtcaaagtatatcttttggaaaatggggcctgtatagccaagaagaagacaagaattgcacgaaaaacccttgatcctttgtatcagcagtctctggtttttgatgaaagtccacagggtaaagttcttcaggtgattgtctggggagactatggcagaatggaccacaaatgctttatgggtgtggctcagatcttgttggaagaactcgacctgtccagcatggtgatcggatggtacaaattgttcccaccgtcctcactggtggatcccacactcactcccctcacccggcgggcttcccagtcatctctggaaagttcaactgggcctccctgtattcgatcatag

SEQ ID NO: 17835 - DNA, 4442 bp, Homo sapiens
  source 1..4442: mol_type = unassigned DNA
atgtcctcggccgtggggccccgcggtcctcgcccacccacggtgcctccccccatgcaagagctgcccgacctgagccacctgaccgaagaggagaggaacattatcatggcagtgatggaccggcagaaggaagaggaggaaaaagaagaagccatgctcaagtgtgttgtcagggacatggcgaagcctgctgcctgcaaaacaccaagaaatgctgaaaaccagccccaccaaccttcaccgagattgcatcaacagtttgaaagctataaggaacaagtgagaaaaataggggaagaagcgcggcgttaccagggcgagcacaaagacgatgctccgacttgtggaatctgtcataaaacaaagtttgctgatgggtgcggtcatctctgctcctattgtcgcactaagttctgtgcgcgctgcggaggccgcgtgtctctacggtcaaacaacgaggacaaagtggttatgtgggtatgcaatttatgtcgaaagcaacaagaaatcttaaccaaatctggggcatggttctttggaagtggccctcagcagacaagtcaggatggaaccctgagtgatacagctacaggtgctggctctgaggtaccaagagaaaagaaagcacgactccaagagcgatcgcggtctcagacacccctaagcacagcagctgcctcctcccaggatgctgctcctcccagcgcaccaccagacaggagcaaaggggctgagccctcgcagcaagccttggggcctgaacagaagcaggcttcatccaggtctagaagtgaacctcctagagagagaaagaagaccccagggctttccgagcagaatggcaaaggagccctgaagagcgagcggaaacgcgtgccaaagacctcagcgcagcccgtggagggggccgtcgaagaacgggagcgcaaagaaaggcgggaaagccgaaggcttgagaaagggcgatcacaggattacccagacacgccggaaaaacgggatgagggcaaagcggcggatgaggaaaagcaaagaaaagaggaggattatcagaccaggtaccgcagcgacccgaacctagctcggtacccggtgaaaccgccgcctgaggagcagcagatgcgcatgcacgcccgggtgtcccgcgccaggcacgagcggcgccacagcgacgtggcgctcccgcgcaccgaggcgggcgcggcgctgccggagggcaaggccggcaaacgcgcgccggcggcagccagggcctcgccgccggactcgccgcgggcttactcggctgagagaactgcggagaccagggcgccgggcgccaagcagctaacgaaccacagcccgccggcgcccagacatgggccggttcccgcagaagccccggagctcaaagcccaggagcccctcaggaagcagagccgcctggaccccagctcggcggtcctcatgcggaaggccaagcgcgagaaggtggagaccatgctgcggaacgactctttgagctcagaccagtccgagtcggtgcggccgtccccgcccaagccgcaccggtccaagagaggcggcaagaagcggcagatgtcggtgagcagctctgaggaggagggcgtgtcgacgcccgagtacaccagctgcgaggacgtggagctggagagcgagagcgtcagcgagaaaggtgatttggattattactggttggatcctgccacgtggcacagccgggagacatcacctattagttcgcatcctgtaacgtggcaaccatctaaagagggggaccgattaattggacgtgttattcttaacaagagaacaaccatgcccaaagactcaggtgcattgctgggtctgaaagttgttggaggaaaaatgactgacttaggacgacttggtgctttcatcaccaaagtaaagaagggtagcctagcagatgtagttggacacctaagagcaggggatgaagttctagaatggaatggtaaacccctgccgggagctacaaatgaagaagtttacaacattattttagaatcaaaatcagaacctcaagttgaaattattgtttcaaggcctattggtgacattccccggattcctgagagctcccaccctccactggagtccagttcaagttcctttgaatctcagaagatggaaaggccttccatttctgttatttctccaacaagtcctggagctctaaaagatgccccacaagtcttaccagggcaactttctgtgaagttgtggtatgataaagtgggacaccagctgattgtaaatgttctgcaagcaacagatctacctgctagagtagatggacgtcctcgaaatccctatgtaaaaatgtattttcttccagatagaagtgataaaagtaaaaggaggaccaaaacagtaaagaaaatactagaaccaaaatggaatcaaacttttgtctattcacatgtacatcgtagagattttagagaacgaatgttagaaataactgtgtgggaccaaccaagagtgcaagaagaagaaagtgaatttcttggagagatcctcatagaattggagacagcgcttttagatgatgaaccgcattggtataaacttcagacacatgatgagtcttcactacctctgcctcagccatcacctttcatgccaaggcgacatattcatggagaaagctctagcaaaaagctacaaagatctcagcgaatcagtgatagtgacatctcagattatgaggttgatgatggtattggcgtagttcctccaggctataggtctagtgctagagaaagtaaatctacaacattaactgtgccagaacagcaaagaacaactcatcaccgctcacgttcagtatctcctcatcgcggcaatgatcagggaaagccgcgttcacgtttaccaaatgtgccattacagaggagtttagatgaaattcatccaacaagaaggtcacgttctccaaccagacaccatgatgcctcccgaagtccagttgatcatagaaccagagatgtggatagtcagtatttatcagaacaagacagtgagcttcttatgctgcccagagcaaaacgaggacgaagtgcagaatgcctacatactaccagtgaactgcagccctttcttgacagggctaggagtgctagtaccaactgcttgagaccagatactagtttgcattcaccagaacgagaaagaatgcaccgacagagaagtccaacacaatctcctccagcagacacatcgttcagcagtcgcaggggaagacagctcccacaagtgccagtgagaagcggcagtatagaacaagagtcgggccacaaaaagttaaaaagtaccatccagagaagcacagaaacaggcatggcagctgaaatgagaaagatggtaaggcagccgagccgagagtctactgatggcagcatcaacagttacagctctgagggcaatttaatatttcctggagtgcgactgggagctgacagtcaattcagtgattttcttgatggattgggaccagcccagcttgttggccgccaaacccttgccacccctgcaatgggtgatatacaaataggaatggaggacaaaaagggccaattagaagtggaagtcattagagcacgaagcctcacacaaaagcctggttccaaatctacacctgctccatatgtcaaagtatatcttttggaaaatggggcctgtatagccaagaagaagacaagaattgcacgaaaaacccttgatcctttgtatcagcagtctctggtttttgatgaaagtccacagggtaaagttcttcaggtgattgtctggggagactatggcagaatggaccacaaatgctttatgggtgtggctcagatcttgttggaagaactcgacctgtccagcatggtgatcggatggtacaaattgttcccaccgtcctcactggtggatcccacactcactcccctcacccggcgggcttcccagtcatctctggaaagttcaactgggcctccctgtattcgatcatagtgaactcataccagagtcattccaataaaactctacttttcaggataataatctgaaccagatatttcatgatcgaaagcattgttggagacagacaatcaacttgtgttttgcctgtagtagtttttcaataatatgtcccaattgttatttaaaacatggcttcatatgacagaacaaggcaatctatcaaatttacaggaagaatcaacatgctggtgagagtcactgatgcttctaacaaatagaaaaagaggaaactttaaatccacgcatacacgtacacacacacatgcacacacacacacaccaaattgaacaaactggaaactctcactctgtgaaaagttgtattctacacatttctgcacagaccacaagcagtgttatttccctgatgtttgagttgtttt

SEQ ID NO: 17836 - DNA, 7055 bp, Homo sapiens
  source 1..7055: mol_type = unassigned DNA
atgtcctcggccgtggggccccgcggtcctcgcccacccacggtgcctccccccatgcaagagctgcccgacctgagccacctgaccgaagaggagaggaacattatcatggcagtgatggaccggcagaaggaagaggaggaaaaagaagaagccatgctcaagtgtgttgtcagggacatggcgaagcctgctgcctgcaaaacaccaagaaatgctgaaaaccagccccaccaaccttcaccgagattgcatcaacagtttgaaagctataaggaacaagtgagaaaaataggggaagaagcgcggcgttaccagggcgagcacaaagacgatgctccgacttgtggaatctgtcataaaacaaagtttgctgatgggtgcggtcatctctgctcctattgtcgcactaagttctgtgcgcgctgcggaggccgcgtgtctctacggtcaaacaacgaggacaaagtggttatgtgggtatgcaatttatgtcgaaagcaacaagaaatcttaaccaaatctggggcatggttctttggaagtggccctcagcagacaagtcaggatggaaccctgagtgatacagctacaggtgctggctctgaggtaccaagagaaaagaaagcacgactccaagagcgatcgcggtctcagacacccctaagcacagcagctgcctcctcccaggatgctgctcctcccagcgcaccaccagacaggagcaaaggggctgagccctcgcagcaagccttggggcctgaacagaagcaggcttcatccaggtctagaagtgaacctcctagagagagaaagaagaccccagggctttccgagcagaatggcaaaggagccctgaagagcgagcggaaacgcgtgccaaagacctcagcgcagcccgtggagggggccgtcgaagaacgggagcgcaaagaaaggcgggaaagccgaaggcttgagaaagggcgatcacaggattacccagacacgccggaaaaacgggatgagggcaaagcggcggatgaggaaaagcaaagaaaagaggaggattatcagaccaggtaccgcagcgacccgaacctagctcggtacccggtgaaaccgccgcctgaggagcagcagatgcgcatgcacgcccgggtgtcccgcgccaggcacgagcggcgccacagcgacgtggcgctcccgcgcaccgaggcgggcgcggcgctgccggagggcaaggccggcaaacgcgcgccggcggcagccagggcctcgccgccggactcgccgcgggcttactcggctgagagaactgcggagaccagggcgccgggcgccaagcagctaacgaaccacagcccgccggcgcccagacatgggccggttcccgcagaagccccggagctcaaagcccaggagcccctcaggaagcagagccgcctggaccccagctcggcggtcctcatgcggaaggccaagcgcgagaaggtggagaccatgctgcggaacgactctttgagctcagaccagtccgagtcggtgcggccgtccccgcccaagccgcaccggtccaagagaggcggcaagaagcggcagatgtcggtgagcagctctgaggaggagggcgtgtcgacgcccgagtacaccagctgcgaggacgtggagctggagagcgagagcgtcagcgagaaaggtgatttggattattactggttggatcctgccacgtggcacagccgggagacatcacctattagttcgcatcctgtaacgtggcaaccatctaaagagggggaccgattaattggacgtgttattcttaacaagagaacaaccatgcccaaagactcaggtgcattgctgggtctgaaagttgttggaggaaaaatgactgacttaggacgacttggtgctttcatcaccaaagtaaagaagggtagcctagcagatgtagttggacacctaagagcaggggatgaagttctagaatggaatggtaaacccctgccgggagctacaaatgaagaagtttacaacattattttagaatcaaaatcagaacctcaagttgaaattattgtttcaaggcctattggtgacattccccggattcctgagagctcccaccctccactggagtccagttcaagttcctttgaatctcagaagatggaaaggccttccatttctgttatttctccaacaagtcctggagctctaaaagatgccccacaagtcttaccagggcaactttctgtgaagttgtggtatgataaagtgggacaccagctgattgtaaatgttctgcaagcaacagatctacctgctagagtagatggacgtcctcgaaatccctatgtaaaaatgtattttcttccagatagaagtgataaaagtaaaaggaggaccaaaacagtaaagaaaatactagaaccaaaatggaatcaaacttttgtctattcacatgtacatcgtagagattttagagaacgaatgttagaaataactgtgtgggaccaaccaagagtgcaagaagaagaaagtgaatttcttggagagatcctcatagaattggagacagcgcttttagatgatgaaccgcattggtataaacttcagacacatgatgagtcttcactacctctgcctcagccatcacctttcatgccaaggcgacatattcatggagaaagctctagcaaaaagctacaaagatctcagcgaatcagtgatagtgacatctcagattatgaggttgatgatggtattggcgtagttcctccagtaggctataggtctagtgctagagaaagtaaatctacaacattaactgtgccagaacagcaaagaacaactcatcaccgctcacgttcagtatctcctcatcgcggcaatgatcagggaaagccgcgttcacgtttaccaaatgtgccattacagaggagtttagatgaaattcatccaacaagaaggtcacgttctccaaccagacaccatgatgcctcccgaagtccagttgatcatagaaccagagatgtggatagtcagtatttatcagaacaagacagtgagcttcttatgctgcccagagcaaaacgaggacgaagtgcagaatgcctacatactaccagacatcttgttaggcactataaaacattacctcccaagatgcctttattacagagcagttctcactggaatatttacagtgaactgcagccctttcttgacagggctaggagtgctagtaccaactgcttgagaccagatactagtttgcattcaccagaacgagaaagaatgcaccgacagagaagtccaacacaatctcctccagcagacacatcgttcagcagtcgcaggggaagacagctcccacaagtgccagtgagaagcggcagtatagaacaagcaagcttagtagtggaggagcgaacaagacagatgaaaatgaaagtgcatcgatttaagcagacaacagggtctggttctagtcaagaacttgatcgcgagcaatattccaagtataacatacataaagatcagtacagaagctgtgataacgtctctgccaaatcatcagatagtgatgtcagtgatgtttccgccatttcccgaaccagcagtgcctcacgcctcagcagcacaagctttatgtcagagcaatctgagcgccccaggggtagaatcagttcatttacccccaaaatgcaaggcagacggatggggacttcaggaagatccatcatgaagagcaccagtgtcagtggagagatgtacacactggagcataatgacggcagccagtcagacacagctgtgggtacagttggagcaggtggaaagaaacggagatccagccttagtgccaaagtggttgccatagtgtctcgaaggagtagaagcacatcccagcttagtcaaacagagtcgggccacaaaaagttaaaaagtaccatccagagaagcacagaaacaggcatggcagctgaaatgagaaagatggtaaggcagccgagccgagagtctactgatggcagcatcaacagttacagctctgagggcaatttaatatttcctggagtgcgactgggagctgacagtcaattcagtgattttcttgatggattgggaccagcccagcttgttggccgccaaacccttgccacccctgcaatgggtgatatacaaataggaatggaggacaaaaagggccaattagaagtggaagtcattagagcacgaagcctcacacaaaagcctggttccaaatctacacctgctccatatgtcaaagtatatcttttggaaaatggggcctgtatagccaagaagaagacaagaattgcacgaaaaacccttgatcctttgtatcagcagtctctggtttttgatgaaagtccacagggtaaagttcttcaggtgattgtctggggagactatggcagaatggaccacaaatgctttatgggtgtggctcagatcttgttggaagaactcgacctgtccagcatggtgatcggatggtacaaattgttcccaccgtcctcactggtggatcccacactcactcccctcacccggcgggcttcccagtcatctctggaaagttcaactgggcctccctgtattcgatcatagtgaactcataccagagtcattccaataaaactctacttttcaggataataatctgaaccagatatttcatgatcgaaagcattgttggagacagacaatcaacttgtgttttgcctgtagtagtttttcaataatatgtcccaattgttatttaaaacatggcttcatatgacagaacaaggcaatctatcaaatttacaggaagaatcaacatgctggtgagagtcactgatgcttctaacaaatagaaaaagaggaaactttaaatccacgcatacacgtacacacacacatgcacacacacacacaccaaattgaacaaactggaaactctcactctgtgaaaagttgtattctacacatttctgcacagaccacaagcagtgttatttccctgatgtttgagttgttttgttcttttgtgtgttttgtttatttgtgtgttgtttgttggttttcgtttcttgagtttttgttttgttttcaccacatctgttatttccactagtttttttttggctgtgtcatgacaggcctcatgatgctaacagagattcttcccttcttttttccaaaagcaccaaaaaaaagggctgaagtagtctctgtagcatctccccaaagtgttaaacagctacataaggtgaagccaaggaagggtttcactagctttcattttataattatttaaagtcttatgtgtggatacccaagagacaaaaagttatcttccaaaataaataatcacagaagtacttttttaatgaagagcctatctgtttgcattctagaaaattaatttatggtttccattgttttgcatggaagacttttaaagaagtcaatctgcaactaatgctggggactaaaactaactgcataattgtactttgaaaacactccttgtaatgcctttttcttcctgatattaaaaaaatgctcatgtgtataaaccatactttgacttcccaaaaatggtgactaggaatggatttgagcctaagacactttgagctatgcccaggcttctcagccatacctcagtgtagacacatccatctgccctggaaagagcatggtatgagctgttcaatattccactggaaattccagttgaaatattctgcactaaactattgtttttattgaattttagtttacatttctttgagattgatgcaagcacaaagcttgattttttaatgcaaagtatcttactttttggggggaaaataaacaaaatgaactttcaatttgcattttcatttagtttctcttggccttgaatttcccttgtgacattctgtacatgtgctacaaactgcagtctctgcaggtgcattgatatgttctccctccttttatgagtcactccacttttgtgattacacaaatagagcagcatgacttggaactgttcagagctgcatgcacattttgtaaaaaaaaaaaattttaaaaagaaaagaaacaaaaggttatttaataatgtatgttagttccacataggccagcttgtatgttgcatgtacttgtacagtttgcttgttaattactataccgaaataaccaagaaatctaagccatccacttttgttatagacattttgcaggttttagccagactcagtctctgggtctgtggtgaaatgtctatagatggactttattttttaccctccggaaaacgtgatgtagtacggaccaaattccttctaataaatattttggtgtagattcctactgtggggctgtaacacatgtagacactgtgtacacactaggttttaattcatagacatactgcctgcaccaagtgaattatttattattatttacacatgccagaattatctgcccatcattccacagggcacagattgaccactgctcaccatgctgagtaggaggaactgaagcattggtgcacttctactagattccgttctgtcttagtggccaacaatcaactgattataattgggtagtatctttctattttgaccacttgtcttaacactcccctgtgcttttaaatgaaattccaattcatgtatgtaaacatgtttaataaaatttacttttcatgtcagtcagtagccatatgtgttctatgtcttgccagatttccattgtgggttctatggtgcaaaatgggagccaggccatgggaaggggaggctggggtttgttgtctgctgcgggcatttgacttgacttgtcactgcactatattatgtcttaatcgatggcccaaagggtactttgcatcacatacaagttttcacttcgtcagcctgtctaagtgagcacatgactatacttctgaaaagtggcattattaaaaataataaatctcagtaagaatcaaatggaaggttgttttctgctgctgtttgaatgtgctaataaaagagacaactctattg

SEQ ID NO: 17837 - DNA, 3489 bp, Homo sapiens
  source 1..3489: mol_type = unassigned DNA
ttactcggctgagagaactgcggagaccagggcgccgggcgccaagcagctaacgaaccacagcccgccggcgcccagacatgggccggttcccgcagaagccccggagctcaaagcccaggagcccctcaggaagcagagccgcctggaccccagctcggcggtcctcatgcggaaggccaagcgcgagaaggtggagaccatgctgcggaacgactctttgagctcagaccagtccgagtcggtgcggccgtccccgcccaagccgcaccggtccaagagaggcggcaagaagcggcagatgtcggtgagcagctctgaggaggagggcgtgtcgacgcccgagtacaccagctgcgaggacgtggagctggagagcgagagcgtcagcgagaaaggtgatttggattattactggttggatcctgccacgtggcacagccgggagacatcacctattagttcgcatcctgtaacgtggcaaccatctaaagagggggaccgattaattggacgtgttattcttaacaagagaacaaccatgcccaaagactcaggtgcattgctgggtctgaaagttgttggaggaaaaatgactgacttaggacgacttggtgctttcatcaccaaagtaaagaagggtagcctagcagatgtagttggacacctaagagcaggggatgaagttctagaatggaatggtaaacccctgccgggagctacaaatgaagaagtttacaacattattttagaatcaaaatcagaacctcaagttgaaattattgtttcaaggcctattggtgacattccccggattcctgagagctcccaccctccactggagtccagttcaagttcctttgaatctcagaagatggaaaggccttccatttctgttatttctccaacaagtcctggagctctaaaagatgccccacaagtcttaccagggcaactttctgtgaagttgtggtatgataaagtgggacaccagctgattgtaaatgttctgcaagcaacagatctacctgctagagtagatggacgtcctcgaaatccctatgtaaaaatgtattttcttccagatagaagtgataaaagtaaaaggaggaccaaaacagtaaagaaaatactagaaccaaaatggaatcaaacttttgtctattcacatgtacatcgtagagattttagagaacgaatgttagaaataactgtgtgggaccaaccaagagtgcaagaagaagaaagtgaatttcttggagagatcctcatagaattggagacagcgcttttagatgatgaaccgcattggtataaacttcagacacatgatgagtcttcactacctctgcctcagccatcacctttcatgccaaggcgacatattcatggagaaagctctagcaaaaagctacaaagatctcagcgaatcagtgatagtgacatctcagattatgaggttgatgatggtattggcgtagttcctccagtaggctataggtctagtgctagagaaagtaaatctacaacattaactgtgccagaacagcaaagaacaactcatcaccgctcacgttcagtatctcctcatcgcggcaatgatcagggaaagccgcgttcacgtttaccaaatgtgccattacagaggagtttagatgaaattcatccaacaagaaggtcacgttctccaaccagacaccatgatgcctcccgaagtccagttgatcatagaaccagagatgtggatagtcagtatttatcagaacaagacagaatgcaccgacagagaagtccaacacaatctcctccagcagacacatcgttcagcagtcgcaggggaagacagctcccacaagtgccagtgagaagcggcagtatagaacaagcaagcttagtagtggaggagcgaacaagacagatgaaaatgaaagtgcatcgatttaagcagacaacagggtctggttctagtcaagaacttgatcgcgagcaatattccaagtataacatacataaagatcagtacagaagctgtgataacgtctctgccaaatcatcagatagtgatgtcagtgatgtttccgccatttcccgaaccagcagtgcctcacgcctcagcagcacaagctttatgtcagagcaatctgagcgccccaggggtagaatcagttcatttacccccaaaatgcaaggcagacggatggggacttcaggaagatccatcatgaagagcaccagtgtcagtggagagatgtacacactggagcataatgacggcagccagtcagacacagctgtgggtacagttggagcaggtggaaagaaacggagatccagccttagtgccaaagtggttgccatagtgtctcgaaggagtagaagcacatcccagcttagtcaaacagagtcgggccacaaaaagttaaaaagtaccatccagagaagcacagaaacaggcatggcagctgaaatgagaaagatggtaaggcagccgagccgagagtctactgatggcagcatcaacagttacagctctgagggcaatttaatatttcctggagtgcgactgggagctgacagtcaattcagtgattttcttgatggattgggaccagcccagcttgttggccgccaaacccttgccacccctgcaatgggtgatatacaaataggaatggaggacaaaaagggccaattagaagtggaagtcattagagcacgaagcctcacacaaaagcctggttccaaatctacacctgctccatatgtcaaagtatatcttttggaaaatggggcctgtatagccaagaagaagacaagaattgcacgaaaaacccttgatcctttgtatcagcagtctctggtttttgatgaaagtccacagggtaaagttcttcaggtgattgtctggggagactatggcagaatggaccacaaatgctttatgggtgtggctcagatcttgttggaagaactcgacctgtccagcatggtgatcggatggtacaaattgttcccaccgtcctcactggtggatcccacactcactcccctcacccggcgggcttcccagtcatctctggaaagttcaactgggcctccctgtattcgatcatagtgaactcataccagagtcattccaataaaactctacttttcaggataataatctgaaccagatatttcatgatcgaaagcattgttggagacagacaatcaacttgtgttttgcctgtagtagtttttcaataatatgtcccaattgttatttaaaacatggcttcatatgacagaacaaggcaatctatcaaatttacaggaagaatcaacatgctggtgagagtcactgatgcttctaacaaatagaaaaagaggaaactttaaatccacgcatacacgtacacacacacatgcacacacacacacaccaaattgaacaaactggaaactctcactctgtgaaaagttgtattctacacatttctgcacaga

SEQ ID NO: 17838 - DNA, 3542 bp, Homo sapiens
  source 1..3542: mol_type = unassigned DNA
agtaaatgctaccagtccccacaccaccaggcccaccgaagcttgtctacagtattttatccaagcagtcctttgggtaactgcacagtgcctgcagtgacctgagtcagtcatgcaaggagactttcttgttctcacaccaatgttttatttcagtttccattttctgctggtcctgttgttcaatgatataagcagagtgatgaaggaggcgcttcacactcttcttagataagatcttgagcagcagagagtggtttaaacagcaaggcttaaatctctcaagctggatttatttccaagtttgctgtcatgtgtgcacctgggattcatgtctcttcagaagggtgggaagaagtgaggtctgttgattccgaagagggaacaattgaagctcgacgagcagttgctggtgatttggattattactggttggatcctgccacgtggcacagccgggagacatcacctattagttcgcatcctgtaacgtggcaaccatctaaagagggggaccgattaattggacgtgttattcttaacaagagaacaaccatgcccaaagactcaggtgcattgctgggtctgaaagttgttggaggaaaaatgactgacttaggacgacttggtgctttcatcaccaaagtaaagaagggtagcctagcagatgtagttggacacctaagagcaggggatgaagttctagaatggaatggtaaacccctgccgggagctacaaatgaagaagtttacaacattattttagaatcaaaatcagaacctcaagttgaaattattgtttcaaggcctattggtgacattccccggattcctgagagctcccaccctccactggagtccagttcaagttcctttgaatctcagaagatggaaaggccttccatttctgttatttctccaacaagtcctggagctctaaaagatgccccacaagtcttaccagggcaactttctgtgaagttgtggtatgataaagtgggacaccagctgattgtaaatgttctgcaagcaacagatctacctgctagagtagatggacgtcctcgaaatccctatgtaaaaatgtattttcttccagatagaagtgataaaagtaaaaggaggaccaaaacagtaaagaaaatactagaaccaaaatggaatcaaacttttgtctattcacatgtacatcgtagagattttagagaacgaatgttagaaataactgtgtgggaccaaccaagagtgcaagaagaagaaagtgaatttcttggagagatcctcatagaattggagacagcgcttttagatgatgaaccgcattggtataaacttcagacacatgatgagtcttcactacctctgcctcagccatcacctttcatgccaaggcgacatattcatggagaaagctctagcaaaaagctacaaagatctcagcgaatcagtgatagtgacatctcagattatgaggttgatgatggtattggcgtagttcctccaggctataggtctagtgctagagaaagtaaatctacaacattaactgtgccagaacagcaaagaacaactcatcaccgctcacgttcagtatctcctcatcgcggcaatgatcagggaaagccgcgttcacgtttaccaaatgtgccattacagaggagtttagatgaaattcatccaacaagaaggtcacgttctccaaccagacaccatgatgcctcccgaagtccagttgatcatagaaccagagatgtggatagtcagtatttatcagaacaagacagtgagcttcttatgctgcccagagcaaaacgaggacgaagtgcagaatgcctacatactaccagtgaactgcagccctttcttgacagggctaggagtgctagtaccaactgcttgagaccagatactagtttgcattcaccagaacgagaaaggcactccagaaagtctgaaagatctagcatccaaaaacagactaggaaaggcactgcctctgatgcagaaagaatgcaccgacagagaagtccaacacaatctcctccagcagacacatcgttcagcagtcgcaggggaagacagctcccacaagtgccagtgagaagcggcagtatagaacaagcaagcttagtagtggaggagcgaacaagacagatgaaaatgaaagtgcatcgatttaagcagacaacagggtctggttctagtcaagaacttgatcgcgagcaatattccaagtataacatacataaagatcagtacagaagctgtgataacgtctctgccaaatcatcagatagtgatgtcagtgatgtttccgccatttcccgaaccagcagtgcctcacgcctcagcagcacaagctttatgtcagagcaatctgagcgccccaggggtagaatcagttcatttacccccaaaatgcaaggcagacggatggggacttcaggaagatccatcatgaagagcaccagtgtcagtggagagatgtacacactggagcataatgacggcagccagtcagacacagctgtgggtacagttggagcaggtggaaagaaacggagatccagccttagtgccaaagtggttgccatagtgtctcgaaggagtagaagcacatcccagcttagtcaaacagagtcgggccacaaaaagttaaaaagtaccatccagagaagcacagaaacaggcatggcagctgaaatgagaaagatggtaaggcagccgagccgagagtctactgatggcagcatcaacagttacagctctgagggcaatttaatatttcctggagtgcgactgggagctgacagtcaattcagtgattttcttgatggattgggaccagcccagcttgttggccgccaaacccttgccacccctgcaatgggtgatatacaaataggaatggaggacaaaaagggccaattagaagtggaagtcattagagcacgaagcctcacacaaaagcctggttccaaatctacacctgctccatatgtcaaagtatatcttttggaaaatggggcctgtatagccaagaagaagacaagaattgcacgaaaaacccttgatcctttgtatcagcagtctctggtttttgatgaaagtccacagggtaaagttcttcaggtgattgtctggggagactatggcagaatggaccacaaatgctttatgggtgtggctcagatcttgttggaagaactcgacctgtccagcatggtgatcggatggtacaaattgttcccaccgtcctcactggtggatcccacactcactcccctcacccggcgggcttcccagtcatctctggaaagttcaactgggcctccctgtattcgatcatagtgaactcataccagagtcattccaataaaactctacttttcaggataataatctgaaccagatatttcatgatcgaaagcattgttggagacagacaatcaacttgtgttttgcctgtagtagtttttcaataatatgtcccaattgttatttaaaacatggcttcatatgacagaacaaggcaatctatc

SEQ ID NO: 17839 - DNA, 3097 bp, Homo sapiens
  source 1..3097: mol_type = unassigned DNA
gcacagtgcctgcagtgacctgagtcagtcatgcaaggagactttcttgttctcacaccaatgttttatttcagtttccattttctgctggtcctgttgttcaatgatataagcagagtgatgaaggaggcgcttcacactcttcttagataagatcttgagcagcagagagtggtttaaacagcaaggcttaaatctctcaagctggatttatttccaagtttgctgtcatgtgtgcacctgggattcatgtctcttcagaagggtgggaagaagtgaggtctgttgattccgaagagggaacaattgaagctcgacgagcagttgctggtgatttggattattactggttggatcctgccacgtggcacagccgggagacatcacctattagttcgcatcctgtaacgtggcaaccatctaaagagggggaccgattaattggacgtgttattcttaacaagagaacaaccatgcccaaagactcaggtgcattgctgggtctgaaagttgttggaggaaaaatgactgacttaggacgacttggtgctttcatcaccaaagtaaagaagggtagcctagcagatgtagttggacacctaagagcaggggatgaagttctagaatggaatggtaaacccctgccgggagctacaaatgaagaagtttacaacattattttagaatcaaaatcagaacctcaagttgaaattattgtttcaaggcctattggtgacattccccggattcctgagagctcccaccctccactggagtccagttcaagttcctttgaatctcagaagatggaaaggccttccatttctgttatttctccaacaagtcctggagctctaaaagatgccccacaagtcttaccagggcaactttctgtgaagttgtggtatgataaagtgggacaccagctgattgtaaatgttctgcaagcaacagatctacctgctagagtagatggacgtcctcgaaatccctatgtaaaaatgtattttcttccagatagaagtgataaaagtaaaaggaggaccaaaacagtaaagaaaatactagaaccaaaatggaatcaaacttttgtctattcacatgtacatcgtagagattttagagaacgaatgttagaaataactgtgtgggaccaaccaagagtgcaagaagaagaaagtgaatttcttggagagatcctcatagaattggagacagcgcttttagatgatgaaccgcattggtataaacttcagacacatgatgagtcttcactacctctgcctcagccatcacctttcatgccaaggcgacatattcatggagaaagctctagcaaaaagctacaaagatctcagcgaatcagtgatagtgacatctcagattatgaggttgatgatggtattggcgtagttcctccagtaggctataggtctagtgctagagaaagtaaatctacaacattaactgtgccagaacagcaaagaacaactcatcaccgctcacgttcagtatctcctcatcgcggcaatgatcagggaaagccgcgttcacgtttaccaaatgtgccattacagaggagtttagatgaaattcatccaacaagaaggtcacgttctccaaccagacaccatgatgcctcccgaagtccagttgatcatagaaccagagatgtggatagtcagtatttatcagaacaagacagtgagcttcttatgctgcccagagcaaaacgaggacgaagtgcagaatgcctacatactaccagtgaactgcagccctttcttgacagggctaggagtgctagtaccaactgcttgagaccagatactagtttgcattcaccagaacgagaaagaatgcaccgacagagaagtccaacacaatctcctccagcagacacatcgttcagcagtcgcaggggaagacagctcccacaagtgccagtgagaagcggcagtatagaacaagagtcgggccacaaaaagttaaaaagtaccatccagagaagcacagaaacaggcatggcagctgaaatgagaaagatggtaaggcagccgagccgagagtctactgatggcagcatcaacagttacagctctgagggcaatttaatatttcctggagtgcgactgggagctgacagtcaattcagtgattttcttgatggattgggaccagcccagcttgttggccgccaaacccttgccacccctgcaatgggtgatatacaaataggaatggaggacaaaaagggccaattagaagtggaagtcattagagcacgaagcctcacacaaaagcctggttccaaatctacacctgctccatatgtcaaagtatatcttttggaaaatggggcctgtatagccaagaagaagacaagaattgcacgaaaaacccttgatcctttgtatcagcagtctctggtttttgatgaaagtccacagggtaaagttcttcaggtgattgtctggggagactatggcagaatggaccacaaatgctttatgggtgtggctcagatcttgttggaagaactcgacctgtccagcatggtgatcggatggtacaaattgttcccaccgtcctcactggtggatcccacactcactcccctcacccggcgggcttcccagtcatctctggaaagttcaactgggcctccctgtattcgatcatagtgaactcataccagagtcattccaataaaactctacttttcaggataataatctgaaccagatatttcatgatcgaaagcattgttggagacagacaatcaacttgtgttttgcctgtagtagtttttcaataatatgtcccaattgttatttaaaacatggcttcatatgacagaacaaggcaatctatcaaatttacaggaagaatcaacatgctggtgagagtcactgatgcttctaacaaatagaaaaagaggaaactttaaatccacgcatacacgtacacacacacatgcacacacacacacaccaaattgaacaaactggaaactctcactctgtgaaaagttgtattctacacatttctgcacagaccacaagcagtgttatttccctgatgtttgagttgtttt

SEQ ID NO: 17840 - DNA, 2799 bp, Homo sapiens
  source 1..2799: mol_type = unassigned DNA
agaaaagcctgaagaagcacttttgcctgtgttcccaacaatcaattgtgtatactcttggtttatgctttctggtgccagttgtcattgagctgagtaagattcctcagttagggaaactgcagaggaaatgatctgttacacagggcttggcaggaccattgccagtgattgataatgggaccaaatcatttcaggtgatttggattattactggttggatcctgccacgtggcacagccgggagacatcacctattagttcgcatcctgtaacgtggcaaccatctaaagagggggaccgattaattggacgtgttattcttaacaagagaacaaccatgcccaaagactcaggtgcattgctgggtctgaaagttgttggaggaaaaatgactgacttaggacgacttggtgctttcatcaccaaagtaaagaagggtagcctagcagatgtagttggacacctaagagcaggggatgaagttctagaatggaatggtaaacccctgccgggagctacaaatgaagaagtttacaacattattttagaatcaaaatcagaacctcaagttgaaattattgtttcaaggcctattggtgacattccccggattcctgagagctcccaccctccactggagtccagttcaagttcctttgaatctcagaagatggaaaggccttccatttctgttatttctccaacaagtcctggagctctaaaagatgccccacaagtcttaccagggcaactttctgtgaagttgtggtatgataaagtgggacaccagctgattgtaaatgttctgcaagcaacagatctacctgctagagtagatggacgtcctcgaaatccctatgtaaaaatgtattttcttccagatagaagtgataaaagtaaaaggaggaccaaaacagtaaagaaaatactagaaccaaaatggaatcaaacttttgtctattcacatgtacatcgtagagattttagagaacgaatgttagaaataactgtgtgggaccaaccaagagtgcaagaagaagaaagtgaatttcttggagagatcctcatagaattggagacagcgcttttagatgatgaaccgcattggtataaacttcagacacatgatgagtcttcactacctctgcctcagccatcacctttcatgccaaggcgacatattcatggagaaagctctagcaaaaagctacaaagatctcagcgaatcagtgatagtgacatctcagattatgaggttgatgatggtattggcgtagttcctccagtaggctataggtctagtgctagagaaagtaaatctacaacattaactgtgccagaacagcaaagaacaactcatcaccgctcacgttcagtatctcctcatcgcggcaatgatcagggaaagccgcgttcacgtttaccaaatgtgccattacagaggagtttagatgaaattcatccaacaagaaggtcacgttctccaaccagacaccatgatgcctcccgaagtccagttgatcatagaaccagagatgtggatagtcagtatttatcagaacaagacagtgagcttcttatgctgcccagagcaaaacgaggacgaagtgcagaatgcctacatactaccagtgaactgcagccctttcttgacagggctaggagtgctagtaccaactgcttgagaccagatactagtttgcattcaccagaacgagaaaggcactccagaaagtctgaaagatctagcatccaaaaacagactaggaaaggcactgcctctgatgcagaaagaatgcaccgacagagaagtccaacacaatctcctccagcagacacatcgttcagcagtcgcaggggaagacagctcccacaagtgccagtgagaagcggcagtatagaacaagagtcgggccacaaaaagttaaaaagtaccatccagagaagcacagaaacaggcatggcagctgaaatgagaaagatggtaaggcagccgagccgagagtctactgatggcagcatcaacagttacagctctgagggcaatttaatatttcctggagtgcgactgggagctgacagtcaattcagtgattttcttgatggattgggaccagcccagcttgttggccgccaaacccttgccacccctgcaatgggtgatatacaaataggaatggaggacaaaaagggccaattagaagtggaagtcattagagcacgaagcctcacacaaaagcctggttccaaatctacacctgctccatatgtcaaagtatatcttttggaaaatggggcctgtatagccaagaagaagacaagaattgcacgaaaaacccttgatcctttgtatcagcagtctctggtttttgatgaaagtccacagggtaaagttcttcaggtgattgtctggggagactatggcagaatggaccacaaatgctttatgggtgtggctcagatcttgttggaagaactcgacctgtccagcatggtgatcggatggtacaaattgttcccaccgtcctcactggtggatcccacactcactcccctcacccggcgggcttcccagtcatctctggaaagttcaactgggcctccctgtattcgatcatagtgaactcataccagagtcattccaataaaactctacttttcaggataataatctgaaccagatatttcatgatcgaaagcattgttggagacagacaatcaacttgtgttttgcctgtagtagtttttcaataatatgtcccaattgttatttaaaacatggcttcatatgacaga

SEQ ID NO: 17841 - DNA, 2500 bp, Homo sapiens
  source 1..2500: mol_type = unassigned DNA
gattcctcagttagggaaactgcagaggaaatgatctgttacacagggcttggcaggaccattgccagtgattgataatgggaccaaatcatttcaggtgatttggattattactggttggatcctgccacgtggcacagccgggagacatcacctattagttcgcatcctgtaacgtggcaaccatctaaagagggggaccgattaattggacgtgttattcttaacaagagaacaaccatgcccaaagactcaggtgcattgctgggtctgaaagttgttggaggaaaaatgactgacttaggacgacttggtgctttcatcaccaaagtaaagaagggtagcctagcagatgtagttggacacctaagagcaggggatgaagttctagaatggaatggtaaacccctgccgggagctacaaatgaagaagtttacaacattattttagaatcaaaatcagaacctcaagttgaaattattgtttcaaggcctattggtgacattccccggattcctgagagctcccaccctccactggagtccagttcaagttcctttgaatctcagaagatggaaaggccttccatttctgttatttctccaacaagtcctggagctctaaaagatgccccacaagtcttaccagggcaactttctgtgaagttgtggtatgataaagtgggacaccagctgattgtaaatgttctgcaagcaacagatctacctgctagagtagatggacgtcctcgaaatccctatgtaaaaatgtattttcttccagatagaagtgataaaagtaaaaggaggaccaaaacagtaaagaaaatactagaaccaaaatggaatcaaacttttgtctattcacatgtacatcgtagagattttagagaacgaatgttagaaataactgtgtgggaccaaccaagagtgcaagaagaagaaagtgaatttcttggagagatcctcatagaattggagacagcgcttttagatgatgaaccgcattggtataaacttcagacacatgatgagtcttcactacctctgcctcagccatcacctttcatgccaaggcgacatattcatggagaaagctctagcaaaaagctacaaagatctcagcgaatcagtgatagtgacatctcagattatgaggttgatgatggtattggcgtagttcctccagtaggctataggtctagtgctagagaaagtaaatctacaacattaactgtgccagaacagcaaagaacaactcatcaccgctcacgttcagtatctcctcatcgcggcaatgatcagggaaagccgcgttcacgtttaccaaatgtgccattacagaggagtttagatgaaattcatccaacaagaaggtcacgttctccaaccagacaccatgatgcctcccgaagtccagttgatcatagaaccagagatgtggatagtcagtatttatcagaacaagacagaatgcaccgacagagaagtccaacacaatctcctccagcagacacatcgttcagcagtcgcaggggaagacagctcccacaagtgccagtgagaagcggcagtatagaacaagcaagcttagtagtggaggagcgaacaagacagatgaaaatgaaagtgcatcgatttaagcagacaacagggtctggttctagtcaagaacttgatcgcgagcaatattccaagtataacatacataaagatcagtacagaagctgtgataacgtctctgccaaatcatcagatagtgatgtcagtgatgtttccgccatttcccgaaccagcagtgcctcacgcctcagcagcacaagctttatgtcagagcaatctgagcgccccaggggtagaatcagttcatttacccccaaaatgcaaggcagacggatggggacttcaggaagatccatcatgaagagcaccagtgtcagtggagagatgtacacactggagcataatgacggcagccagtcagacacagctgtgggtacagttggagcaggtggaaagaaacggagatccagccttagtgccaaagtggttgccatagtgtctcgaaggagtagaagcacatcccagcttagtcaaacagagtcgggccacaaaaagttaaaaagtaccatccagagaagcacagaaacaggcatggcagctgaaatgagaaagatggtaaggcagccgagccgagagtctactgatggcagcatcaacagttacagctctgagggcaatttaatatttcctggagtgcgactgggagctgacagtcaattcagtgattttcttgatggattgggaccagcccagcttgttggccgccaaacccttgccacccctgcaatgggtgatatacaaataggaatggaggacaaaaagggccaattagaagtggaagtcattagagcacgaagcctcacacaaaagcctggttccaaatctacacctgctccatatgtcaaagtatatcttttggaaaatggggcctgtatag

SEQ ID NO: 17842 - DNA, 2276 bp, Homo sapiens
  source 1..2276: mol_type = unassigned DNA
gtgttagctttaaggaccacaacgtttcatctctctggcttcaggaaggtagcagcttctgtgcattgttttaggaaatggttaattgaggagctaaaagagctttagtgtatgctacactgggagccactttagtacagcacagagcactatagattaatgctgtaatcaatgagaatctgttcactgcagagatctgttttgatgacagcagcacttatggccttgtttagtgtcactgttgtataatgttggacactgcaggcttttttggctttgatttagaatgcaaggaccacagggaattttatttaaaatgttgtattttggtggattttttaattgtgttgtgcatttgctgccattgctagctgaaatttaatgatttgatgccagtggcatttagttaaccactccgatgctgctgttatgtttgctgggtttctgcagtttctactacttcatacattgcactcaggaacaggtgatttggattattactggttggatcctgccacgtggcacagccgggagacatcacctattagttcgcatcctgtaacgtggcaaccatctaaagagggggaccgattaattggacgtgttattcttaacaagagaacaaccatgcccaaagactcaggtgcattgctgggtctgaaagttgttggaggaaaaatgactgacttaggacgacttggtgctttcatcaccaaagtaaagaagggtagcctagcagatgtagttggacacctaagagcaggggatgaagttctagaatggaatggtaaacccctgccgggagctacaaatgaagaagtttacaacattattttagaatcaaaatcagaacctcaagttgaaattattgtttcaaggcctattggtgacattccccggattcctgagagctcccaccctccactggagtccagttcaagttcctttgaatctcagaagatggaaaggccttccatttctgttatttctccaacaagtcctggagctctaaaagatgccccacaagtcttaccagggcaactttctgtgaagttgtggtatgataaagtgggacaccagctgattgtaaatgttctgcaagcaacagatctacctgctagagtagatggacgtcctcgaaatccctatgtaaaaatgtattttcttccagatagaagtgataaaagtaaaaggaggaccaaaacagtaaagaaaatactagaaccaaaatggaatcaaacttttgtctattcacatgtacatcgtagagattttagagaacgaatgttagaaataactgtgtgggaccaaccaagagtgcaagaagaagaaagtgaatttcttggagagatcctcatagaattggagacagcgcttttagatgatgaaccgcattggtataaacttcagacacatgatgagtcttcactacctctgcctcagccatcacctttcatgccaaggcgacatattcatggagaaagctctagcaaaaagctacaaagatctcagcgaatcagtgatagtgacatctcagattatgaggttgatgatggtattggcgtagttcctccagtaggctataggtctagtgctagagaaagtaaatctacaacattaactgtgccagaacagcaaagaacaactcatcaccgctcacgttcagtatctcctcatcgcggcaatgatcagggaaagccgcgttcacgtttaccaaatgtgccattacagaggagtttagatgaaattcatccaacaagaaggtcacgttctccaaccagacaccatgatgcctcccgaagtccagttgatcatagaaccagagatgtggatagtcagtatttatcagaacaagacagtgagcttcttatgctgcccagagcaaaacgaggacgaagtgcagaatgcctacatactaccagtgaactgcagccctttcttgacagggctaggagtgctagtaccaactgcttgagaccagatactagtttgcattcaccagaacgagaaaggtataaaataaagactttcttaatttcttatcatttgtactagtgatttttttcagtcactttgttttgtttcatgacagccttacaggtttattcattcatgtatactttgctaactgtctacatttccccttcccttattatacatgtctatttagagatatgcgtatgtggataaacccaagggtacacatacacatatttctatgaatgttgttgcaaatggcgtggtgtaatttgtaactgcttctggctgctgctttt

SEQ ID NO: 17843 - DNA, 3065 bp, Homo sapiens
  source 1..3065: mol_type = unassigned DNA
gtgttagctttaaggaccacaacgtttcatctctctggcttcaggaaggtagcagcttctgtgcattgttttaggaaatggttaattgaggagctaaaagagctttagtgtatgctacactgggagccactttagtacagcacagagcactatagattaatgctgtaatcaatgagaatctgttcactgcagagatctgttttgatgacagcagcacttatggccttgtttagtgtcactgttgtataatgttggacactgcaggcttttttggctttgatttagaatgcaaggaccacagggaattttatttaaaatgttgtattttggtggattttttaattgtgttgtgcatttgctgccattgctagctgaaatttaatgatttgatgccagtggcatttagttaaccactccgatgctgctgttatgtttgctgggtttctgcagtttctactacttcatacattgcactcaggaacaggtgatttggattattactggttggatcctgccacgtggcacagccgggagacatcacctattagttcgcatcctgtaacgtggcaaccatctaaagagggggaccgattaattggacgtgttattcttaacaagagaacaaccatgcccaaagactcaggtgcattgctgggtctgaaagttgttggaggaaaaatgactgacttaggacgacttggtgctttcatcaccaaagtaaagaagggtagcctagcagatgtagttggacacctaagagcaggggatgaagttctagaatggaatggtaaacccctgccgggagctacaaatgaagaagtttacaacattattttagaatcaaaatcagaacctcaagttgaaattattgtttcaaggcctattggtgacattccccggattcctgagagctcccaccctccactggagtccagttcaagttcctttgaatctcagaagatggaaaggccttccatttctgttatttctccaacaagtcctggagctctaaaagatgccccacaagtcttaccagggcaactttctgtgaagttgtggtatgataaagtgggacaccagctgattgtaaatgttctgcaagcaacagatctacctgctagagtagatggacgtcctcgaaatccctatgtaaaaatgtattttcttccagatagaagtgataaaagtaaaaggaggaccaaaacagtaaagaaaatactagaaccaaaatggaatcaaacttttgtctattcacatgtacatcgtagagattttagagaacgaatgttagaaataactgtgtgggaccaaccaagagtgcaagaagaagaaagtgaatttcttggagagatcctcatagaattggagacagcgcttttagatgatgaaccgcattggtataaacttcagacacatgatgagtcttcactacctctgcctcagccatcacctttcatgccaaggcgacatattcatggagaaagctctagcaaaaagctacaaagatctcagcgaatcagtgatagtgacatctcagattatgaggttgatgatggtattggcgtagttcctccagtaggctataggtctagtgctagagaaagtaaatctacaacattaactgtgccagaacagcaaagaacaactcatcaccgctcacgttcagtatctcctcatcgcggcaatgatcagggaaagccgcgttcacgtttaccaaatgtgccattacagaggagtttagatgaaattcatccaacaagaaggtcacgttctccaaccagacaccatgatgcctcccgaagtccagttgatcatagaaccagagatgtggatagtcagtatttatcagaacaagacagtgagcttcttatgctgcccagagcaaaacgaggacgaagtgcagaatgcctacatactaccagtgaactgcagccctttcttgacagggctaggagtgctagtaccaactgcttgagaccagatactagtttgcattcaccagaacgagaaaggcactccagaaagtctgaaagatctagcatccaaaaacagactaggaaaggcactgcctctgatgcagaaagaatgcaccgacagagaagtccaacacaatctcctccagcagacacatcgttcagcagtcgcaggggaagacagctcccacaagtgccagtgagaagcggcagtatagaacaagagtcgggccacaaaaagttaaaaagtaccatccagagaagcacagaaacaggcatggcagctgaaatgagaaagatggtaaggcagccgagccgagagtctactgatggcagcatcaacagttacagctctgagggcaatttaatatttcctggagtgcgactgggagctgacagtcaattcagtgattttcttgatggattgggaccagcccagcttgttggccgccaaacccttgccacccctgcaatgggtgatatacaaataggaatggaggacaaaaagggccaattagaagtggaagtcattagagcacgaagcctcacacaaaagcctggttccaaatctacacctgctccatatgtcaaagtatatcttttggaaaatggggcctgtatagccaagaagaagacaagaattgcacgaaaaacccttgatcctttgtatcagcagtctctggtttttgatgaaagtccacagggtaaagttcttcaggtgattgtctggggagactatggcagaatggaccacaaatgctttatgggtgtggctcagatcttgttggaagaactcgacctgtccagcatggtgatcggatggtacaaattgttcccaccgtcctcactggtggatcccacactcactcccctcacccggcgggcttcccagtcatctctggaaagttcaactgggcctccctgtattcgatcatagtgaactcataccagagtcattccaataaaactctacttttcaggataataatctgaaccagatatttcatgatcgaaagcattgttggagacagacaatcaacttgtgttttgcctgtagtagtttttcaataatatgtcccaattgttatttaa

SEQ ID NO: 17844 - DNA, 2223 bp, Homo sapiens
  source 1..2223: mol_type = unassigned DNA
cgtcctcgaaatccctatgtaaaaatgtattttcttccagatagaagtgataaaagtaaaaggaggaccaaaacagtaaagaaaatactagaaccaaaatggaatcaaacttttgtctattcacatgtacatcgtagagattttagagaacgaatgttagaaataactgtgtgggaccaaccaagagtgcaagaagaagaaagtgaatttcttggagagatcctcatagaattggagacagcgcttttagatgatgaaccgcattggtataaacttcagacacatgatgagtcttcactacctctgcctcagccatcacctttcatgccaaggcgacatattcatggagaaagctctagcaaaaagctacaaagatctcagcgaatcagtgatagtgacatctcagattatgaggttgatgatggtattggcgtagttcctccagtaggctataggtctagtgctagagaaagtaaatctacaacattaactgtgccagaacagcaaagaacaactcatcaccgctcacgttcagtatctcctcatcgcggcaatgatcagggaaagccgcgttcacgtttaccaaatgtgccattacagaggagtttagatgaaattcatccaacaagaaggtcacgttctccaaccagacaccatgatgcctcccgaagtccagttgatcatagaaccagagatgtggatagtcagtatttatcagaacaagacagtgagcttcttatgctgcccagagcaaaacgaggacgaagtgcagaatgcctacatactaccagtgaactgcagccctttcttgacagggctaggagtgctagtaccaactgcttgagaccagatactagtttgcattcaccagaacgagaaagaatgcaccgacagagaagtccaacacaatctcctccagcagacacatcgttcagcagtcgcaggggaagacagctcccacaagtgccagtgagaagcggcagtatagaacaagcaagcttagtagtggaggagcgaacaagacagatgaaaatgaaagtgcatcgatttaagcagacaacagggtctggttctagtcaagaacttgatcgcgagcaatattccaagtataacatacataaagatcagtacagaagctgtgataacgtctctgccaaatcatcagatagtgatgtcagtgatgtttccgccatttcccgaaccagcagtgcctcacgcctcagcagcacaagctttatgtcagagcaatctgagcgccccaggggtagaatcagttcatttacccccaaaatgcaaggcagacggatggggacttcaggaagatccatcatgaagagcaccagtgtcagtggagagatgtacacactggagcataatgacggcagccagtcagacacagctgtgggtacagttggagcaggtggaaagaaacggagatccagccttagtgccaaagtggttgccatagtgtctcgaaggagtagaagcacatcccagcttagtcaaacagagtcgggccacaaaaagttaaaaagtaccatccagagaagcacagaaacaggcatggcagctgaaatgagaaagatggtaaggcagccgagccgagagtctactgatggcagcatcaacagttacagctctgagggcaatttaatatttcctggagtgcgactgggagctgacagtcaattcagtgattttcttgatggattgggaccagcccagcttgttggccgccaaacccttgccacccctgcaatgggtgatatacaaataggaatggaggacaaaaagggccaattagaagtggaagtcattagagcacgaagcctcacacaaaagcctggttccaaatctacacctgctccatatgtcaaagtatatcttttggaaaatggggcctgtatagccaagaagaagacaagaattgcacgaaaaacccttgatcctttgtatcagcagtctctggtttttgatgaaagtccacagggtaaagttcttcaggtgattgtctggggagactatggcagaatggaccacaaatgctttatgggtgtggctcagatcttgttggaagaactcgacctgtccagcatggtgatcggatggtacaaattgttcccaccgtcctcactggtggatcccacactcactcccctcacccggcgggcttcccagtcatctctggaaagttcaactgggcctccctgtattcgatcatag

SEQ ID NO: 17845 - DNA, 2285 bp, Homo sapiens
  source 1..2285: mol_type = unassigned DNA
cagattatgaggttgatgatggtattggcgtagttcctccagtaggctataggtctagtgctagagaaagtaaatctacaacattaactgtgccagaacagcaaagaacaactcatcaccgctcacgttcagtatctcctcatcgcggcaatgatcagggaaagccgcgttcacgtttaccaaatgtgccattacagaggagtttagatgaaattcatccaacaagaaggtcacgttctccaaccagacaccatgatgcctcccgaagtccagttgatcatagaaccagagatgtggatagtcagtatttatcagaacaagacagtgagcttcttatgctgcccagagcaaaacgaggacgaagtgcagaatgcctacatactaccaggcactccagaaagtctgaaagatctagcatccaaaaacagactaggaaaggcactgcctctgatgcagaaagaatgcaccgacagagaagtccaacacaatctcctccagcagacacatcgttcagcagtcgcaggggaagacagctcccacaagtgccagtgagaagcggcagtatagaacaagaacaagaaaaatataactcttccacaaaagcaagcttagtagtggaggagcgaacaagacagatgaaaatgaaagtgcatcgatttaagcagacaacagggtctggttctagtcaagaacttgatcgcgagcaatattccaagtataacatacataaagatcagtacagaagctgtgataacgtctctgccaaatcatcagatagtgatgtcagtgatgtttccgccatttcccgaaccagcagtgcctcacgcctcagcagcacaagctttatgtcagagcaatctgagcgccccaggggtagaatcagttcatttacccccaaaatgcaaggcagacggatggggacttcaggaagatccatcatgaagagcaccagtgtcagtggagagatgtacacactggagcataatgacggcagccagtcagacacagctgtgggtacagttggagcaggtggaaagaaacggagatccagccttagtgccaaagtggttgccatagtgtctcgaaggagtagaagcacatcccagcttagtcaaacagagtcgggccacaaaaagttaaaaagtaccatccagagaagcacagaaacaggcatggcagctgaaatgagaaagatggtaaggcagccgagccgagagtctactgatggcagcatcaacagttacagctctgagggcaatttaatatttcctggagtgcgactgggagctgacagtcaattcagtgattttcttgatggattgggaccagcccagcttgttggccgccaaacccttgccacccctgcaatgggtgatatacaaataggaatggaggacaaaaagggccaattagaagtggaagtcattagagcacgaagcctcacacaaaagcctggttccaaatctacacctgctccatatgtcaaagtatatcttttggaaaatggggcctgtatagccaagaagaagacaagaattgcacgaaaaacccttgatcctttgtatcagcagtctctggtttttgatgaaagtccacagggtaaagttcttcaggtgattgtctggggagactatggcagaatggaccacaaatgctttatgggtgtggctcagatcttgttggaagaactcgacctgtccagcatggtgatcggatggtacaaattgttcccaccgtcctcactggtggatcccacactcactcccctcacccggcgggcttcccagtcatctctggaaagttcaactgggcctccctgtattcgatcatagtgaactcataccagagtcattccaataaaactctacttttcaggataataatctgaaccagatatttcatgatcgaaagcattgttggagacagacaatcaacttgtgttttgcctgtagtagtttttcaataatatgtcccaattgttatttaaaacatggcttcatatgacagaacaaggcaatctatcaaatttacaggaagaatcaacatgctggtgagagtcactgatgcttctaacaaatagaaaaagaggaaactttaaatccacgcatacacgtacacacacacatgcacacacacacacaccaaattgaacaaactggaaactctcactctgtgaaaagttgtattctacacatttctgcacagaccacaagcagtgttatttccctgatgtttgagttgttttgttcttttgtgtgttttgtttatttgtgtgttgtttgttg

SEQ ID NO: 17846 - DNA, 1513 bp, Homo sapiens
  source 1..1513: mol_type = unassigned DNA
gtgcagtgagcttcttatgctgcccagagcaaaacgaggacgaagtgcagaatgcctacatactaccaggcactccagaaagtctgaaagatctagcatccaaaaacagactaggaaaggcactgcctctgatgcagaaagaatgcaccgacagagaagtccaacacaatctcctccagcagacacatcgttcagcagtcgcaggggaagacagctcccacaagtgccagtgagaagcggcagtatagaacaagagtcgggccacaaaaagttaaaaagtaccatccagagaagcacagaaacaggcatggcagctgaaatgagaaagatggtaaggcagccgagccgagagtctactgatggcagcatcaacagttacagctctgagggcaatttaatatttcctggagtgcgactgggagctgacagtcaattcagtgattttcttgatggattgggaccagcccagcttgttggccgccaaacccttgccacccctgcaatgggtgatatacaaataggaatggaggacaaaaagggccaattagaagtggaagtcattagagcacgaagcctcacacaaaagcctggttccaaatctacacctgctccatatgtcaaagtatatcttttggaaaatggggcctgtatagccaagaagaagacaagaattgcacgaaaaacccttgatcctttgtatcagcagtctctggtttttgatgaaagtccacagggtaaagttcttcaggtgattgtctggggagactatggcagaatggaccacaaatgctttatgggtgtggctcagatcttgttggaagaactcgacctgtccagcatggtgatcggatggtacaaattgttcccaccgtcctcactggtggatcccacactcactcccctcacccggcgggcttcccagtcatctctggaaagttcaactgggcctccctgtattcgatcatagtgaactcataccagagtcattccaataaaactctacttttcaggataataatctgaaccagatatttcatgatcgaaagcattgttggagacagacaatcaacttgtgttttgcctgtagtagtttttcaataatatgtcccaattgttatttaaaacatggcttcatatgacagaacaaggcaatctatcaaatttacaggaagaatcaacatgctggtgagagtcactgatgcttctaacaaatagaaaaagaggaaactttaaatccacgcatacacgtacacacacacatgcacacacacacacaccaaattgaacaaactggaaactctcactctgtgaaaagttgtattctacacatttctgcacagaccacaagcagtgttatttccctgatgtttgagttgttttgttcttttgtgtgttttgtttatttgtgtgttgtttgttggttttcgtttcttgagtttttgttttgttttcaccacatctgttatttccactagtttttttttggctgtgtcatgacaggcctcatgatgct

SEQ ID NO: 17847 - DNA, 1842 bp, Homo sapiens
  source 1..1842: mol_type = unassigned DNA
attatggaggtgaggaggagccacacagaaatatgctcttacgagtcgggccacaaaaagttaaaaagtaccatccagagaagcacagaaacaggcatggcagctgaaatgagaaagatggtaaggcagccgagccgagagtctactgatggcagcatcaacagttacagctctgagggcaagtaagtgctgtcagcacgtctgcatggctgtggaaccaggaattgtgtactaatcagtaagataacaaagccactgagtgttactgtgcagcttctctatttaatcagaagttcaaccatccattttaaaccaccctgatggcttataatttaatatttcctggagtgcgactgggagctgacagtcaattcagtgattttcttgatggattgggaccagcccagcttgttggccgccaaacccttgccacccctgcaatgggtgatatacaaataggaatggaggacaaaaagggccaattagaagtggaagtcattagagcacgaagcctcacacaaaagcctggttccaaatctacacctgctccatatgtcaaagtatatcttttggaaaatggggcctgtatagccaagaagaagacaagaattgcacgaaaaacccttgatcctttgtatcagcagtctctggtttttgatgaaagtccacagggtaaagttcttcaggtgattgtctggggagactatggcagaatggaccacaaatgctttatgggtgtggctcagatcttgttggaagaactcgacctgtccagcatggtgatcggatggtacaaattgttcccaccgtcctcactggtggatcccacactcactcccctcacccggcgggcttcccagtcatctctggaaagttcaactgggcctccctgtattcgatcatagtgaactcataccagagtcattccaataaaactctacttttcaggataataatctgaaccagatatttcatgatcgaaagcattgttggagacagacaatcaacttgtgttttgcctgtagtagtttttcaataatatgtcccaattgttatttaaaacatggcttcatatgacagaacaaggcaatctatcaaatttacaggaagaatcaacatgctggtgagagtcactgatgcttctaacaaatagaaaaagaggaaactttaaatccacgcatacacgtacacacacacatgcacacacacacacaccaaattgaacaaactggaaactctcactctgtgaaaagttgtattctacacatttctgcacagaccacaagcagtgttatttccctgatgtttgagttgttttgttcttttgtgtgttttgtttatttgtgtgttgtttgttggttttcgtttcttgagtttttgttttgttttcaccacatctgttatttccactagtttttttttggctgtgtcatgacaggcctcatgatgctaacagagattcttcccttcttttttccaaaagcaccaaaaaaaagggctgaagtagtctctgtagcatctccccaaagtgttaaacagctacataaggtgaagccaaggaagggtttcactagctttcattttataattatttaaagtcttatgtgtggatacccaagagacaaaaagttatcttccaaaataaataatcacagaagtacttttttaatgaagagcctatctgtttgcattctagaaaattaatttatggtttccattgttttgcatggaagacttttaaagaagtcaatctgcaactaatgctggggactaaaactaactgcataattgtactttgaaaacactccttgtaatgcctttttcttcctgatattaaaaaaa

SEQ ID NO: 17848 - DNA, 1787 bp, Homo sapiens
  source 1..1787: mol_type = unassigned DNA
agttcacaggcagctcagacagatattccagccagccaccgcacaagttatttaaaccaggtcaaagcttctttggcattcagttttccccagagaacaatttaatgctgatacttaattttttcaagatagacaagagtcgggccacaaaaagttaaaaagtaccatccagagaagcacagaaacaggcatggcagctgaaatgagaaagatggtaaggcagccgagccgagagtctactgatggcagcatcaacagttacagctctgagggcaatttaatatttcctggagtgcgactgggagctgacagtcaattcagtgattttcttgatggattgggaccagcccagcttgttggccgccaaacccttgccacccctgcaatgggtgatatacaaataggaatggaggacaaaaagggccaattagaagtggaagtcattagagcacgaagcctcacacaaaagcctggttccaaatctacacctgctccatatgtcaaagtatatcttttggaaaatggggcctgtatagccaagaagaagacaagaattgcacgaaaaacccttgatcctttgtatcagcagtctctggtttttgatgaaagtccacagggtaaagttcttcaggtgattgtctggggagactatggcagaatggaccacaaatgctttatgggtgtggctcagatcttgttggaagaactcgacctgtccagcatggtgatcggatggtacaaattgttcccaccgtcctcactggtggatcccacactcactcccctcacccggcgggcttcccagtcatctctggaaagttcaactgggcctccctgtattcgatcatagtgaactcataccagagtcattccaataaaactctacttttcaggataataatctgaaccagatatttcatgatcgaaagcattgttggagacagacaatcaacttgtgttttgcctgtagtagtttttcaataatatgtcccaattgttatttaaaacatggcttcatatgacagaacaaggcaatctatcaaatttacaggaagaatcaacatgctggtgagagtcactgatgcttctaacaaatagaaaaagaggaaactttaaatccacgcatacacgtacacacacacatgcacacacacacacaccaaattgaacaaactggaaactctcactctgtgaaaagttgtattctacacatttctgcacagaccacaagcagtgttatttccctgatgtttgagttgttttgttcttttgtgtgttttgtttatttgtgtgttgtttgttggttttcgtttcttgagtttttgttttgttttcaccacatctgttatttccactagtttttttttggctgtgtcatgacaggcctcatgatgctaacagagattcttcccttcttttttccaaaagcaccaaaaaaaagggctgaagtagtctctgtagcatctccccaaagtgttaaacagctacataaggtgaagccaaggaagggtttcactagctttcattttataattatttaaagtcttatgtgtggatacccaagagacaaaaagttatcttccaaaataaataatcacagaagtacttttttaatgaagagcctatctgtttgcattctagaaaattaatttatggtttccattgttttgcatggaagacttttaaagaagtcaatctgcaactaatgctggggactaaaactaactgcataattgtactttgaaaacactccttgtaatgcctttttcttcctgatattaaaaaaa

SEQ ID NO: 17849 - DNA, 6674 bp, Homo sapiens
  source 1..6674: mol_type = unassigned DNA
ctctcccgccgcgcctccgcctgcccgcccccgccggccgaggctgggctgcgggaggcggccgggcggccccgagcttcgctagggcgaccaaaacaaaggcagcatccggggctgggtggatgcaaacaaccatgaaagactgggttctcgctctccccggctctgctgctgctgctgctgccgccgccgccgctgctcctcctcctgccgccgccgctagggctccgctgtgagggggaagcaggggcgcagctgctgggcgtgcatccgaaaggtgagagccagagagcgagcagagggggcgggcaggccacgaaaatgtcctcggccgtggggccccgcggtcctcgcccacccacggtgcctccccccatgcaagagctgcccgacctgagccacctgaccgaagaggagaggaacattatcatggcagtgatggaccggcagaaggaagaggaggaaaaagaagaagccatgctcaagtgtgttgtcagggacatggcgaagcctgctgcctgcaaaacaccaagaaatgctgaaaaccagccccaccaaccttcaccgagattgcatcaacagtttgaaagctataaggaacaagtgagaaaaataggggaagaagcgcggcgttaccagggcgagcacaaagacgatgctccgacttgtggaatctgtcataaaacaaagtttgctgatgggtgcggtcatctctgctcctattgtcgcactaagttctgtgcgcgctgcggaggccgcgtgtctctacggtcaaacaacgaggacaaagtggttatgtgggtatgcaatttatgtcgaaagcaacaagaaatcttaaccaaatctggggcatggttctttggaagtggccctcagcagacaagtcaggatggaaccctgagtgatacagctacaggtgctggctctgaggtaccaagagaaaagaaagcacgactccaagagcgatcgcggtctcagacacccctaagcacagcagctgcctcctcccaggatgctgctcctcccagcgcaccaccagacaggagcaaaggggctgagccctcgcagcaagccttggggcctgaacagaagcaggcttcatccaggtctagaagtgaacctcctagagagagaaagaagaccccagggctttccgagcagaatggcaaaggagccctgaagagcgagcggaaacgcgtgccaaagacctcagcgcagcccgtggagggggccgtcgaagaacgggagcgcaaagaaaggcgggaaagccgaaggcttgagaaagggcgatcacaggattacccagacacgccggaaaaacgggatgagggcaaagcggcggatgaggaaaagcaaagaaaagaggaggattatcagaccaggtaccgcagcgacccgaacctagctcggtacccggtgaaaccgccgcctgaggagcagcagatgcgcatgcacgcccgggtgtcccgcgccaggcacgagcggcgccacagcgacgtggcgctcccgcgcaccgaggcgggcgcggcgctgccggagggcaaggccggcaaacgcgcgccggcggcagccagggcctcgccgccggactcgccgcgggcttactcggctgagagaactgcggagaccagggcgccgggcgccaagcagctaacgaaccacagcccgccggcgcccagacatgggccggttcccgcagaagccccggagctcaaagcccaggagcccctcaggaagcagagccgcctggaccccagctcggcggtcctcatgcggaaggccaagcgcgagaaggtggagaccatgctgcggaacgactctttgagctcagaccagtccgagtcggtgcggccgtccccgcccaagccgcaccggtccaagagaggcggcaagaagcggcagatgtcggtgagcagctctgaggaggagggcgtgtcgacgcccgagtacaccagctgcgaggacgtggagctggagagcgagagcgtcagcgagaaaggtgatttggattattactggttggatcctgccacgtggcacagccgggagacatcacctattagttcgcatcctgtaacgtggcaaccatctaaagagggggaccgattaattggacgtgttattcttaacaagagaacaaccatgcccaaagactcaggtgcattgctgggtctgaaagttgttggaggaaaaatgactgacttaggacgacttggtgctttcatcaccaaagtaaagaagggtagcctagcagatgtagttggacacctaagagcaggggatgaagttctagaatggaatggtaaacccctgccgggagctacaaatgaagaagtttacaacattattttagaatcaaaatcagaacctcaagttgaaattattgtttcaaggcctattggtgacattccccggattcctgagagctcccaccctccactggagtccagttcaagttcctttgaatctcagaagatggaaaggccttccatttctgttatttctccaacaagtcctggagctctaaaagatgccccacaagtcttaccagggcaactttctgtgaagttgtggtatgataaagtgggacaccagctgattgtaaatgttctgcaagcaacagatctacctgctagagtagatggacgtcctcgaaatccctatgtaaaaatgtattttcttccagatagaagtgataaaagtaaaaggaggaccaaaacagtaaagaaaatactagaaccaaaatggaatcaaacttttgtctattcacatgtacatcgtagagattttagagaacgaatgttagaaataactgtgtgggaccaaccaagagtgcaagaagaagaaagtgaatttcttggagagatcctcatagaattggagacagcgcttttagatgatgaaccgcattggtataaacttcagacacatgatgagtcttcactacctctgcctcagccatcacctttcatgccaaggcgacatattcatggagaaagctctagcaaaaagctacaaagatctcagcgaatcagtgatagtgacatctcagattatgaggttgatgatggtattggcgtagttcctccagtaggctataggtctagtgctagagaaagtaaatctacaacattaactgtgccagaacagcaaagaacaactcatcaccgctcacgttcagtatctcctcatcgcggcaatgatcagggaaagccgcgttcacgtttaccaaatgtgccattacagaggagtttagatgaaattcatccaacaagaaggtcacgttctccaaccagacaccatgatgcctcccgaagtccagttgatcatagaaccagagatgtggatagtcagtatttatcagaacaagacagtgagcttcttatgctgcccagagcaaaacgaggacgaagtgcagaatgcctacatactaccaggtaaatacagggatttggtaatggtgactgtgtgtgatgactctctttccattctattattcttccgtctctcccttagtggtattattacaagcaagtcaaataaatttcccaagtatttgaaatttgttttgttttatattgaggttatggaaaaggttccaaatatatttcagttccgattcaggctgactgctttgccatctgtagattcaaaaatccagagactagtgggcctctctgggactgtttgcgttcctaaaactgaggaaccagtttctgcaattaaaattctaaatgctcactgtgagtgcccccaactttcccacacatattcctgtctagtcacaagaggtctaatctgtgtatggcagtgtcattgtttcataattgtaagtttgctctgttttagccttttttaatttccttttagaatttattgttgtttatattctgtttgcttttgataaaatctttaacagttcacttttaatggctgagcttcagcttctttcttgatgaaaagtgaagatattcaacctgatcttaactatcctagcccaccagttgtcagaaatgctgcagtacaaactttcccacaaaggcatataacagtatgaatgcctctttagaagcgacaaaagatataatttttgcttctaaattggagcttagagcctgatgctttatgttaatctcattacatctttaatttcatatccaagtaaaacttcttacagattactcatggaacatattctataaatacttaatgtatatttgaaatgaatatagaagttaaggaagtagtaagtcagtgaaacaaactaacacaaaataatcgaactcaaatattttagccaataaaaagcaagaggaaagagaaagaaagaggtattaccgcagtacttgggatgcaaagacaaatgcatgatttattatgtctgtgtgtaatatgtagttctgcccaataatgcaaacaaaattgggctaataaaaattgtttgaactttttacagtctgaagttatactactcataactactgccatgtttgcttggagtgccacaggaaaaaatcgaggaaatattagttctgcttgctgagaaaaaaatgtaaaatcatgcatattgtaaaaacctactgaaggtcaaagcatgaactatccaggtttattattacttgttcttgacaaacagtttcttaaaataatggtttatttactaattctgaaagttttctcacactcctcttgatgtgactaaagcttcaaaagaaataaaaaacatgcacacaaaacaaacacaaaaaaaatccttatattttaagctacttagtgtgtgcctggcactcagtgtgtgaatatttctaggatactcacaccagtggtctaaatataataactaaaaatatttttctttcccttattttgtacttgtaaaatattatatacttatataatattatataatagttgcatcattttatataatcttatacttaagattggtgctttgctaataattctgagctccacaagtcctatttaatagtctctgtatgttgactttgcatttcctgatttaagcaaataatcatatttgtatgtatacaatttaaaaataaatgagtattcagcgaggcagataacatcctgtggacaggtactacgacaataagatagggagtggaaggaagctgagctagccaaatgtgtcagtgcgaaacatatgtcaccagtgtcttttctccttcctgtctttcattctctaatgtgtaatgctaaaagtatggagatagagacaacatgagttcaaaaatacgtgcatgtatgtatatataatctcttctgtgtttatattcatgtatttataaaaacattaatttatatctgtataaaaatgaatgtcaaaatgtgtacatataaataaccacaactttatatggatatatcaataatatagtttggtttcatataaactatggacacttattatttctataactatccatggctaaaatctaaagctttcaaaatacatcataccatgttcacttaggacttataaaaataaaatctgaggatttactagtctctagtaaacataaggaaaataacatttatttaataacaagcacagtgttaaatatttaatgtactttgtcaatttcctgacaataattatatgttatgaatattattatcctgattttagagatgaggaaaaaagctacgaaagtttattttacgactaatagagtaaggattcaaaatcagatctatttgatatcttctgtttaactagtttttccaaaaatatgaaaacttgtcctatgagatgtttcaccaataagagtttttgtgagtcaaatacattttggaaactttgcaactgaaagtgtctaccttgaaatttaatacacacagcatattaaagtcatgttctaaagaaatctgtatgtttagtttcttttctcccaaattgtttaatttcccaacctttttttagtaaaacgtgtctcgaggaagtggtagtatagagaaaatgctatagttgccttactgtatcctactgtgtcctaaatattgtgtacatgttaccacacacccctgttaagtggaagttatttcccacattttgtggatgtagaaacaggcttggagacttaatcgaattacccaggtcacagccaataagtggcaaagccaaggcaggaacttgaacattcagactataaattttgtgctattttctagctgtttcccattctatgttgatcccattcttgaaaaaaaaatcacttttgaagcaatgcttagaaaagttttatagcaacctattactaaagatatttgcctgaggttaggagttgaaaagaagagtcgactgtctagaaaggaggctaaatccttagtttcagtaaaatttgtcctcaacttgtacttaataaggaggaagctgaagcgggcagatcacttgaggtcaggagtttgagaccagtgtggccaacatggtgaaaccccgtctctactaaaacacacacacacacacacacacacacacacacacacaaattaggtgggcatggtggcaggtgcttgtaatcccagctacttgggaggctgagagaggagatttgcttgaacccaggaggcagaggttgcagtgagccaagatcacaccattgcactccagcctagataacaagagtgagactctgtctcaaaaaagaaaa

SEQ ID NO: 17850 - DNA, 7235 bp, Homo sapiens
  source 1..7235: mol_type = unassigned DNA
acggtggctgctgcggagccggcagcgcaggcgggcggagcggagctgcccccgtggtggcgggcgatgcccccgtgagcctccctcgccgcccctccccgccccgcgtgcctatccactcggagtccgcgccagcctggggccgggccgcgcctactgccgggttcgcggggcggggtcccggggcagcacctgccccgccttgcggagccgcctcggcctgtggaggccccctccctgtctggaccccggccccacctccggacccttttatcacatcgcctcctctgggagcctgccctgattgccttcacctcatttcttgaaaattggtgttttggcagaagtcaattgaagccttgtgcaaatgccctaggggtgtgctgttgggaggcagccccctgtgatgcggaacaccaggctcagattcatcagttcgagctgcctgaggccctgccaccccggggaccatgtttaacggggagccaggtcctgcctcatctggggcctccaggaatgtggtgcggagctccagcattagcggtgaaatctgcggatcccagcaagccgggggcggggctgggaccaccaccgccaagaagcggcggagcagcctgggtgccaagatggtggccatcgtgggcctgactcagtggagcaagagcacactccagcttccgcagcctgaaggggccaccaagaagctgcgcagcaacatccgccggagcacggagacaggcatcgcggtggagatgcggagccgggtcacacgccagggcagccgggagtccaccgatgggagcaccaacagcaacagctccgacggcacgttcatcttccccactacccggctaggggctgaaagccagttcagcgatttcctggatgggctgggaccagctcagattgtggggcgacagacactggcaacaccacccatgggagatgtgcacattgccatcatggaccggagtggccagctggaggtggaagtgattgaagctcggggcctgacccccaaaccaggctccaaatccctcccagccacctatatcaaggtttacctgctggagaatggggcctgcttggccaagaagaagacaaagatgaccaagaagacctgtgatcccctgtaccagcaggctctgctctttgacgagggaccccagggcaaggtgctgcaggtgatcgtctggggagactatggccgcatggaccacaagtgcttcatgggcatggcccagatcatgctggacgagctggacctcagcgccgcggtcaccggctggtacaaactcttccccacctcctcagtggcagactccacactcggatccctcaccaggcgcctgtcccagtcttccctggagagtgccaccagcccctcatgctcttaaggatgtcaggaagaggccaggatggtggtgtggggaggggtgcctgctggccccatgtcctcccctgtacatagtcttcgtgtctttctggaccccttgtcctgctgcatgcctgttggctactgggctcatcccagctggcagtggagactgtagtgtgtgcgtgtgtgcgtgcgtgtgtgtgtgtgtgtacgtgaccacgttctatctgttcatttgtctgggtatagtcactcctggtgatgatatgggctgaaatgtctccacgtctctttgtgtcttgttgaaaagaaacccaaaggagtgttgtgtggacatgactcaccctgaggagtctccagggatggaggtggggcatgcggccactggtcggtgctgcctggtcctggcctggggcagagcctgtgtgttcttcacctgtgcctgctcctggtggtctctgctttgttttctgtcttgtcttttgttccactcttgactctcccggctctgccactgttttctgagaaatgtagcatccgctgcagctggccacactgagggccctctgggaaccccaccccactggagccgctccggcagctcttcctgccactgaatgcgttctgcagcatgtagcatgcccacctagctccctggccagggccctggggaggcagagggtacccaggggactgagggcttagaaatgactttctctatgaggctggaacctcctccttcttccagtgaagcacgaggtcttggttccagggttcctggccaggtgcccccttagcatttgttcttcatctcctgtctcttcaagcctccccactccaccgtgccgaaggagctctgccagtgggcctgggcaggcagccacagagggcatgttatctgctaaagcaaacagtcctcctgaggccctgagggtggccctgaccccctcagggctcattcctggtgggcatgactcggtaaggaggttctgtgggtagggctgtttgctggaataaggagggctgaggctgagttgttccccgccactgttgaggatcccatctgacatttggggattcactgcatgaagttgttcatttggggctccagtttttgtgcatttccagaccagggtccctgtctgggagctcagacttagctgggctccagcagcctggctccggactctcgtctgccaccatcaccagctctgtctaagcaatacttacccctccgggcttccctgctttcctgtgccccactgctgccctctgcagagccatctgctccaggcacccacctgcctctgcttgctttctcacccatgtctggttggagcttctcacagccactcaaaccctgacttgatttgacaactgggccctgttggtggagaccagtgcctgaactggaccctgtgaaatctgtcccgtgggaatcctgaagtctgactcaggaatgcccagacctgtccctgtccctcctcagctctagggtgaaaggcgagaggttgcacaggacatggacagagcagcccttgggtttgtatctggtaggggagaaagcagcaggacagtggaggtgtgtggaaggcactctttccacctctctccaggcattatccccaggtgctgaaatggctgtggccccagcacctgaggcaggggtacgctacctggggtagcagtagaaaggtcttggggtctgaatgacttggggcctccattcataaccaaagttgtaggggcatggaggcagtggcgccttatggataggtcatctcagcccaaagggcctccttggctggcatggttctgtgttacgttgaagccagagtcttataacacctcccaagaaagataggggaagaagccagaaccccacctggcctgcccacaggacaagaagtgggtaagggcaggaaggaaatgaacggagttagctcccaggctcctatctctgcctgagcctctattcttatattatcagagaaagggaccattgggtgcatagagatggggaggaggccactgggctgaattttctctttaggcggaaatgctctccccaggcccattgcgttcgtcaagttcttggaaatggacaaagggctctgtcctcctcgaccctagtgggggatcaagaaggaaactccgttgcaaaagggtattttaatctcctgtttatgatatattcacctctagagcagtcactgtcagggtgttgcgaaaatactctacacctttgggatgatagggttgttagtgacccacaggacagtatagatgtttgtggatgtagcactgagtggtgatacccagaccagcagtcaccccaggaagtgggggctacccataccctcattcctctggtggggagctgcctgcagagaggcctgccactgggggttccaggccgtggtgacccttgcctctggggaagggttagcacaggggaggttctagctggaggaggggtctgatgtgctggtaacttgggctgacctacctacagtccctggctgccaaaactgctcagcagttgggccactccactattccacctctctaaaagaaggtaatttcctccccaaattgaccttggggaattattcttttaaccctttgcaccaaataagttactcatccccacctggattttaccccatgagggtaaagttgtgtgaggctgacacgtctgtgtgatgcagtgtggctgcacttaagggtctgtttctcagcatcatggatgcaggggcttgtctgaaaagccactctggacctagcctgtcccagaagaggagaatgcacaagtgtaactcctggttgtttgctggggtgggggagcatctgctgtttgaggacggggggtggggaaggaaggaacatgatccctccagaagtctcccaccctggggccaactcactgccatgttcagtgtcccggctccaaatgcccccttgcccagatgaaaccctgcagtggttacaggaatggagctctttgtcattccacctcctctggtcaggcgaggttcactgtgcatatggcagagacaggagtggccctgcagtgatgttgggttgtgggcagggacagtgatggatgactcagagcgtctgtctttgtatttctgctctgttcattctgtcccactttcttcatagactccttttccctgcaatgggtttttggtatgaaaaaggctccagtaaatggagccaagtcttggtttgacaaggggaacttgatccttcagggaagaatcatctccaaaatgactccccatctggtttcttctaccacccaattctactaggaaaggagcacttaggaggctcttgggatgcagcaagtcccaggcaatgccagcatttcatgggggctgaggcagaacccaggagctccaagaaaggccacccatagagctcatcctctgtggaatcactgccggttagaacactgaggtcaagccagtcctcccatggtcatgccacccaccagggaagcatgcctgatctcttctttactgccagccttgaggagagcagaagcctccatttttaaagacaataaagacctccaagggtacttctttggaaatgaaatgtagcacaatcttagcctacgttaccaggagccctgacatgcaaccagggtccctcttccatgccctgctgcccaggagttgctgagctcctcttcccctggggttccagccctcctaatacctcatattccccatcttcctcagcccagaaagcaatggggctttagtgatgctcctcttttgtgtctctctggttgcctctagcactgtgcaaactctgcaagaaattgctgcctttgcttgatgttgtagatgagttgccctccacctggctggagagatggcacatcattcagggccagaaggttgtccagcagtgtttctgcagtggctgcagggagatggaaaagaagagccctgcttccctgcctcctcctacctttctcttccactcctcagagttttcttctccagtatcctgacatgtaaagagattctttaaaatgctgcttcttctactggactgtctttcactgagtagtcagggaggagatgaaaatgtggacacatccccccgccttctccctcaaccttttcactcacgtcagaagaggttggggcaaaacaaaacaagcatgattgaagagcaggggaagcccacacaatcaggtgagccctgatgggggctggactggcctggtctggctgggaaaggattcttttaaaagcgtgcctgagcatctcagagcaatgtcagtgatgccaaagagagcaacttggcctccttgggcaccaactctgatggctgagttgcacaaacgtggctcagatgttggcatgcccgatggtgggaccttgttctctgataaagggcttaatctttccatgtagcaaagcaactttccctccctcccctccccccgaaccctgagcttgggcttgtgtgggcccagcatggctgtgcctgtgagggaagccacatcagtgagagaaagttgcattctctcaggggcctagattggcttggggcaggtgcttgttgaaaagcatgagtgtttctgctttgggaaacccttccagggctctggttggaaacttggccagtaaggacagggccttgggcctcccaaggagttcacaatgatgccaggaagggtccctgagcctgggttccagtcagcttggctaacagaatggggcttgggaattccaggggcaactgagcatccaccccattagccagtgatctggacagggacagctggctacagggaatcaaaggctgttctgtacagttttaccagaaactgtgaccttgggtaaggctcctcacttttctgggcctcaacttcctcatctgcaaaatcagagcattagctgctctccccatgattccctcccagttttaattaaaagtctctgatctggagcacatgagggttgcgagcctggtgcacctggttcctgtctccgtgggctggtttccttcagcccctgatgcccaggctgggtgcaggctctcatctggtccatgcccagatgctgcctcagacaagaactctgggaatcctaacagactctgctttcctctcttcgtggtttgtcctccctcttttattcttgtgtaatgatgagacataattaagggtcatctacaatggacaattttcaaggtgctgatgtgatgtcacaacctccgctacatcctgagtaagtcagtgtccccaacagcagatgaggctgggtctttcctcatttctgcttctgggatgacatcagtgggagagttgaagatctgagaattctaaaggaaatgttctctgatgggaggagagagggaacttatttcccttcaaagtagtttgcttcttaagaccactcctccctccagaatgtctttaaccagacatcatttcagaaggtggggcagctgcttccttaggaagagtgggcctgatagctcaaccaactcctttagcatgtaaactcacagaaggcaagaacccctttttttagactttccaaatgcatcctgcaaagagagagatagctgatagggactgacaagcacactgtttagataagaagcaattagccttttatatctgtgctctatacattttctatgtgcagcatctttcctaacttgttgtggttcccgggtggcaggtgcacagctgggagggactgccggctgtttcgtacaacattcttgccaattcccttgaggagaaaattcttcacatggcttctgcatgtacagtatttgggcagcaaaacatgattaaagtcagtttgaaaatggt

SEQ ID NO: 17851 - DNA, 1408 bp, Homo sapiens
  source 1..1408: mol_type = unassigned DNA
gcctcggcctgtggaggccccctccctgtctggaccccggccccacctccggaagtcaattgaagccttgtgcaaatgccctaggggtgtgctgttgggaggcagccccctgtgatgcggaacaccaggctcagattcatcagttcgagctgcctgaggccctgccaccccggggaccatgtttaacggggagccaggtcctgcctcatctggggcctccaggaatgtggtgcggagctccagcattagcggtgaaatctgcggatcccagcaagccgggggcggggctgggaccaccaccgccaagaagcggcggagcagcctgggtgccaagatggtggccatcgtgggcctgactcagtggagcaagagcacactccagcttccgcagcctgaaggggccaccaagaagctgcgcagcaacatccgccggagcacggagacaggcatcgcggtggagatgcggagccgggtcacacgccagggcagccgggagtccaccgatgggagcaccaacagcaacagctccgacggcacgttcatcttccccactacccggctaggggctgaaagccagttcagcgatttcctggatgggctgggaccagctcagattgtggggcgacagacactggcaacaccacccatgggagatgtgcacattgccatcatggaccggagtggccagctggaggtggaagtgattgaagctcggggcctgacccccaaaccaggctccaaatccctcccagccacctatatcaaggtttacctgctggagaatggggcctgcttggccaagaagaagacaaagatgaccaagaagacctgtgatcccctgtaccagcaggctctgctctttgacgagggaccccagggcaaggtgctgcaggtgatcgtctggggagactatggccgcatggaccacaagtgcttcatgggcatggcccagatcatgctggacgagctggacctcagcgccgcggtcaccggctggtacaaactcttccccacctcctcagtggcagactccacactcggatccctcaccaggcgcctgtcccagtcttccctggagagtgccaccagcccctcatgctcttaaggatgtcaggaagaggccaggatggtggtgtggggaggggtgcctgctggccccatgtcctcccctgtacatagtcttcgtgtctttctggaccccttgtcctgctgcatgcctgttggctactgggctcatcccagctggcagtggagactgtagtgtgtgcgtgtgtgcgtgcgtgtgtgtgtgtgtgtacgtgaccacgttctatctgttcatttgtctgggtatagtcactcctggtgatgatatgggctgaaatgtctccacgtctctttgtgtcttgttgaaaagaaacccaaagga

SEQ ID NO: 17852 - DNA, 5203 bp, Homo sapiens
  source 1..5203: mol_type = unassigned DNA
caagctgcccaagccgcccgccgccgccgccgccgccgcggccgaggcgcccggcgccggcgcgggcatggagcgctcgcagagccgcctcagtctgtccgcctccttcgaggcgctcgccatctacttcccgtgcatgaactccttcgacgacgaggacgcaggggacagccggaggctgaagggggccatccagaggagcacggagacgggcctggcagtggagatgcccagccggacactgcgccaggccagccacgagtccattgaggacagcatgaacagctatggctcagagggcaaccttaactatggaggagtttgcctggcgtcggacgcccagttcagtgacttcctgggaagcatggggccggcacagtttgtgggccgccagaccctggccaccacacccatgggggatgtggagatcggtctgcaggagcggaacggtcagttggaggtggacattatccaggctcggggactgacagccaagccaggctccaagacactgccagcggcctacatcaaggcctacctgctagagaatggcatctgcattgccaagaagaagaccaaagtcgctcgcaagtcgctggacccactgtataaccaggtgctgctgtttcctgagagtccccagggcaaagtcctccaggtgatcgtgtgggggaactacgggcggatggagcggaagcagttcatgggtgtggctcgcgtgctgctggaggagctggacttgaccaccctggccgtgggctggtacaagctcttccccacctcctccatggtggacccagccacaggccccctgctccggcaggcatcccagttgtccctcgagagcaccgtggggccctgcggagaacgatcttagtgctggaatggggaggggctccccaagatggcctggagaccacccagccctgacctgggaccccaggcccaggggcacattgaacaggaggacggggctctcccccacagtggggaagcagaacggggagacctgcccccccttgggcccctcctcaccccttctttgcctcctacccccgagacctcccctctcccaacgggattggctacacttttgacttggccggttcttgacctggtggatgtggctgcagtccagagaaaggaaagattgaggtggcagagcagaccactctcccttcccaaactgtccaacttctccccctttttgcctcctcggaagctcgctgcccagagccatgtccagaacccagccggccatctccatggtgccaattaccagcaagtgtctttcctgcggcaccgggttcaggcagctactcctgccccagagatgaaggggcagctttgcaaggatccggagccagctcccaggggcccagagccccccacttgaagaggagcttgagcttccctctgcctgcccgtggaaggagctttgccgcagcctgtccgagtccatccgtccgtcccctcctgcctgcccctcttctggtggctctaggaattggggttcagcagggaccaaaggaaaggaggaggtgccgggggcctggcacagacccctaggtgcctcgctccatgggattgcaacaagctagtttaggaaccgctggcggactagaaagaatgttgtcgtctgtgttccggtggaggagctgtggaacctgagtttccagaaccccaaccctagagagcatttgggggtgctgtattggagggggaggctaaggaaagttgggattgggactggtggtgccaagataagggtttctcaaattggagaacccctccttgttgcatgaggtcaatggtcatcctgtctacccaccctgcctccaggccagggggctggggaggcaaatagagcccccctattttagtctttttaaaaaaaacatcctatactaagggcagaacccactgccccggcctcaattaccttggctgaaggaaagatggcggtaggagagaaaagtgaagaggcgtgagtgtaagaactgggagattccttttccagcaggcctgggtagctgccttcccagcccagccctccctggggcctgcgggagcccttttgcatgcaagggaggatggaggctggcccctctttatagaagcacatttctgccacctcccctgggaggcacccagaagcctgccactctttacctagtccctgctgtgtagggcgtagtccaggttagctaggtagagttagtgctccaagccctggggcctgttcttagctcatgcatagtccttacagagtcccaggaccgggggtggagaggagcctcaagtacattccaggagaccactgtctcctcgctggcctgggcctagatggggcagcctggctcacaggaggccagcccctcctcctccgcccccttccttcccttgtccccgtagggttatagctggagctgcctgttatactcggctgttctgatttattattcttggtactgactttctttatgagggactcctaagggttgtaggaccttggcagagggggcctggtctccattagagggtgttgttttctcctgaggacacccaggctgcctttggtcccaccctgttcctggtcccggtcccggtcccagtcccaccaggcaactccttccacccggaaattcttcccttcccttagcctgtggaaaccctgggtattctttaaagttctggtcaatgtatatcacctccacagagctgcttaccctgcactgggaaggggagatggagacgccccctttacccaggaggtcttcagagtttcctgggaccgcggtgggtggaatcccaaggctgggggtggaaggagcagggctctggagggattcgcattcaaggcacagaattggccccttgcctgtttgtttttctaaccagtgtgatttctctgctgttcgtttattacttaccattggaatattttgagccaggagagcgccttctctctccagccatcaccgctgtggttgttcaggggtagcttttcaaaaacagggcagagcctggctgtcccaaccagggggagcaggggcttggccctgacagcctgagcccttcccctggtgtctgcacagcctttataaagagagagagagctccgaagcaataacaacacctgggggtggtcagtgagggccccctcaatgattttcttgtttgttctgtgaaatcccgctcacctcctggaggggtggagcagctgggggctggagccctgtttctttgtgtcatcgtgagcatgtgccccttcccaggggctgtgaccattgggtgtgggaactacggtctgtcctcaccaagggatgggggtttggggaggagagtgacattttcatcattagcttcggagaagcttcaagcccatcctgtccccgctactgcctggccccttgctgactcaggctgcactgtttgaagaggagcagagaggctggcactaggggccactggggggctggggtctccaggggatgactgttttcaatctctgggccaagatcacatgcaggataccatgggaaggagccatctccactctccttctccagaacccccttgaagggcctttgggaccattagtccatttccattttacagacaaggaaatcaagacccagcttgggggaaaagccacccctggagtcacctgtgtgttcagtggcacccccagcctgggtcccctcctcccaatagaggctgagccggagccagggcagtatgaggtggggctgccactgcccatacctcctcctcccttctttctttgaagcctaatggccccccaaaagatgggcaggacaagctgtagcccatctgagaggttgggaaactgaggcccagaaacaggaagtgactcacacaagacccctcagcaagggtgcaaagggggaagaactaggggctccattgttcttcaggcgacaggagaccgttgctccagtgcatgtctgctgggacaaggattcctggcctcgaagccctgggctgcacagccctactgggctccacctctataaaccagtgacttctctgggcctgggtctgggggagagggttgccagggagactcagctctccttgggggctggcccagctgactgagggtacacaggattgggtctagaccttgatgcctgggtggagggcccttgtaaggggccatagcctcttcaggaccaactggagggagagttaggaaacaccagctcctgcctggggcagtgagggaatgggagcagctgtgggcgcctcatttcaggcaagtcctccccaaaccttcagatgcagtgagacctggccttcctgttgtgcttttcagactttgttttcagaatgcttttatctcgagtgtgcccttcggccctcacaagagcccctggggagtaggtggtggcctgtgccgtcatccccatttcaaagcagggagctgaggtcctgggaggggaaagtgcttgcctgaggtcccactgtgttagtgggtgggcaggactggaactcggttctccaacagcccagagctcactcttttacacccagaggtggagcaggtggcttagggggtggttatgtacttcacaagccaattcccttcagccaggagctcctgggtgcatttccgtgtcagaaacagtaccgagtcccaccccctctggaggcacagctgttgcgtcaggcaaggtcacctgcatttatttattgagcagcagtgctgtgtcaggcccagggaccgagcccctctccctgttcccctatggtgtctccgaggccctctgggagggccccacatctggagcagcacctcagagtggacagaaagcattagcgtccacgagctcacccgacgccgagcctgtgaggtgggctgatggtgcccgtctaacccagcgcttcagggaggtcagaatggagccgaacccagggctgtgagcatcacctctggagccctttcactttatgactgcttcctggacgggtggtgggaaggcaggagcctgggtccttaggctgggggcctctctccatccacccacctttccctcattccctctcttggagcagcagccgcccaggcctttagggagggagggtttctggggcccttgggttggagtggggtcgcgttgcattgtgttcatgaccatgtagctcatgttgaaattaaagtttttggcttttctaa

SEQ ID NO: 17853 - DNA, 1036 bp, Homo sapiens
  source 1..1036: mol_type = unassigned DNA
atggagcgctcgcagagccgcctcagtctgtccgcctccttcgaggcgctcgccatctacttcccgtgcatgaactccttcgacgacgaggacgcagaaggggacagccggaggctgaagggggccatccagaggagcacggagacgggcctggcagtggagatgcccagccggacactgcgccaggccagccacgagtccattgaggacagcatgaacagctatggctcagagggcaaccttaactatggaggagtttgcctggcgtcggacgcccagttcagtgacttcctgggaagcatggggccggcacagtttgtgggccgccagaccctggccaccacacccatgggggatgtggagatcggtctgcaggagcggaacggtcagttggaggtggacattatccaggctcggggactgacagccaagccaggctccaagacactgccagcggcctacatcaaggcctacctgctagagaatggcatctgcattgccaagaagaagaccaaagtcgctcgcaagtcgctggacccactgtataaccaggtgctgctgtttcctgagagtccccagggcaaagtcctccaggtgatcgtgtgggggaactacgggcggatggagcggaagcagttcatgggtgtggctcgcgtgctgctggaggagctggacttgaccaccctggccgtgggctggtacaagctcttccccacctcctccatggtggacccagccacaggccccctgctccggcaggcatcccagttgtccctcgagagcaccgtggggccctgcggagaacgatcttagtgctggaatggggaggggctccccaagatggcctggagaccacccagccctgacctgggaccccaggcccaggggcacattgaacaggaggacggggctctcccccacagtggggaagcagaacggggagacctgcccccccttgggcccctcctcaccccttctttgcctcctacccccgagacctcccctctcccaacgggattggctacacttttgactt

SEQ ID NO: 17854 - DNA, 4505 bp, Homo sapiens
  source 1..4505: mol_type = unassigned DNA
ctttcagtggtgttgttgaaagggcttggcagctcccaaatgtttgcagtgtccttagtcctatgagggctgccttcttcttcttcttcttctttttttttttttttttttgctagcttttagctagtatctggaaacatctactggacatgttggactcattttctcaagaatccactttacccttcagggaagccaggaaaagaacaagcttccaaccggtacaagtctggaggaatttcacagcctctcaaactacggagtccccggcgtgcagtggagcctcgctgggggaaatgacagcttggaccatgggcgcccgcggtctggacaagcgaggaagtttctttaagctcattgacacaattgcctcggagatcggagaactgaaacaggagatggtgcggacagatgtcaacctggaaaatggcctggaacccgctgaaacccacagcatggtaagacacaaggatggtggctattccgaggaagaggacgtgaagacctgtgcccgggactcaggctatgacagcctctccaacaggctcagcatcttggaccggctcctccacacccaccccatatggctgcagctgagtctgagtgaggaggaggcagcagaggtcctgcaggcccagcctccggggatcttcctggttcataaatctaccaagatgcagaagaaagtcctctccctccgcctgccctgtgaatttggggccccactcaaggaatttgccataaaggaaagcacatacaccttttccctggaaggctcaggaatcagtttcgcagatttattccggctcattgctttctactgcatcagcagggatgttctaccatttaccttgaagttgccttatgccatttcaacagccaagtcggaggctcagcttgaagaactggcccagatgggactaaatttctggagctccccagctgacagcaaacccccgaaccttccacctccccataggcctctttcctccgacggtgtctgtcctgcctccctgcgtcagctctgccttataaatggagtgcattctatcaaaaccaggacgccttcagagctggagtgcagccagaccaacggggccctgtgctttattaatccccttttcttgaaagtgcacagccaggacctcagtggaggcctgaaacggccgagcacaaggactcccaacgcgaatggcacggagcggactcggtcccccccacccaggcccccgccacccgctattaatagtctccacacaagccctcggctggccaggactgaaacccagacgagcatgccagaaacagtcaaccataacaaacatgggaacgtagctctgcctggaacgaaaccaactcccatccctccaccccggctgaagaagcaggcttcttttctggaagcagagggcggtgcaaagaccttgagcggcggccggccgggcgcaggcccggagctggagctgggcacagctggcagcccaggtggggccccgcctgaggccgccccgggggattgcacaagggccccgccgcccagctctgaatcacggcccccgtgccatggaggccggcagcggctgagcgacatgagcatttctacttcctcctccgactcgctggagttcgaccggagcatgcctctgtttggctacgaggcggacaccaacagcagcctggaggactacgagggggaaagtgaccaagagaccatggcgccccccatcaagtccaaaaagaaaaggagcagctccttcgtgctgcccaagctcgtcaagtcccagctgcagaaggtgagcggggtgttcagctccttcatgaccccggagaagcggatggtccgcaggatcgccgagctttcccgggacaaatgcacctacttcgggtgcttagtgcaggactacgtgagcttcctgcaggagaacaaggagtgccacgtgtccagcaccgacatgctgcagaccatccggcagttcatgacccaggtcaagaactatttgtctcagagctcggagctggacccccccatcgagtcgctgatccctgaagaccaaatagatgtggtgctggaaaaagccatgcacaagtgcatcttgaagcccctcaaggggcacgtggaggccatgctgaaggactttcacatggccgatggctcatggaagcaactcaaggagaacctgcagcttgtgcggcagaggaatccgcaggagctgggggtcttcgccccgacccctgattttgtggatgtggagaaaatcaaagtcaagttcatgaccatgcagaagatgtattcgccggaaaagaaggtcatgctgctgctgcgggtctgcaagctcatttacacggtcatggagaacaactcagggaggatgtatggcgctgatgacttcttgccagtcctgacctatgtcatagcccagtgtgacatgcttgaattggacactgaaatcgagtacatgatggagctcctagacccatcgctgttacatggagaaggaggctattacttgacaagcgcatatggagcactttctctgataaagaatttccaagaagaacaagcagcgcgactgctcagctcagaaaccagagacaccctgaggcagtggcacaaacggagaaccaccaaccggaccatcccctctgtggacgacttccagaattacctccgagttgcatttcaggaggtcaacagtggttgcacaggaaagaccctccttgtgagaccttacatcaccactgaggatgtgtgtcagatctgcgctgagaagttcaaggtgggggaccctgaggagtacagcctctttctcttcgttgacgagacatggcagcagctggcagaggacacttaccctcaaaaaatcaaggcggagctgcacagccgaccacagccccacatcttccactttgtctacaaacgcatcaagaacgatccttatggcatcattttccagaacggggaagaagacctcaccacctcctagaagacaggcgggacttcccagtggtgcatccaaaggggagctggaagccttgccttcccgcttctacatgcttgagcttgaaaagcagtcacctcctcggggacccctcagtgtagtgactaagccatccacaggccaactcggccaagggcaactttagccacgcaaggtagctgaggtttgtgaaacagtaggattctcttttggcaatggagaattgcatctgatggttcaagtgtcctgagattgtttgctacctacccccagtcaggttctaggttggcttacaggtatgtatatgtgcagaagaaacacttaagatacaagttcttttgaattcaacagcagatgcttgcgatgcagtgcgtcaggtgattctcactcctgtggatggcttcatccctgccttccttcctttctttttccttttttttttttttttttttttttttacaaagagccttcatgtttttatatatttcatagaaatttttatagcagttgcaggtaaactgtcaggattggttttaaaatatttttgtaactttaaaatattctataattatgcatgtgattttaacatttaatattcaaaaataaatctcttgctggatttgagagtattgcatttttaaagtctctcttctgtaactggatgttttggcaactttgtggggagagactgctggatttcttaaagcaacgtattcctgacactggccacagaatgcctttggaaatcggatgtactgttctcttgttcacgtttagtggtgttttgctgttttgttttttaaacaaatgatgctgagaataaggagagaaatgaatgtagagagaggtagagagagaaatatgaactctaacaaaggactgaggagtgcagtctgctggttcaggctcttcaaaagatgtagaaaaagagatagaaggaaccacctatgcttaaaatactgtaaatatgcagtgaggtttggcaaaatctattccatgtgtgatttgcttgtagaaacaattttgaaagccccttgaggaaaataaaaatcaagaagaacacttttctcccttttccatacaaattaaaacttaacagcatcaaattattgggaccagaaaccaagtaatgtataatgtggcttttgttgagttaaataagatgctatataatggagaagaatttgaaaatgcacaaaaaaatcaatctacattatcagaacctgcagtgaaattaaacttatgttaaataaaaccagtttgcaggtgcacaaactatgagggtcttgtatccacgtaacacaggtagttacaaaaacatgttattgtactgtgtaaagatgcatagtcatctcatttggttggctttgtaccttgtaccttttttagccttggcttttgttgaactagaaccctcagcacatactgtgttgtacttttgtaaatgattttttaaatggaattttgcacataatacattgtaatactgtatgataatcatgtgtgaaaataatttttgaaatatcc

SEQ ID NO: 17855 - DNA, 437 bp, Homo sapiens
  source 1..437: mol_type = unassigned DNA
cagtctaggaactgcgctggtggggacaggaaattgggctgaagggagatgagtccccggcgtgcagtggagcctcgctgggggaaatgacagcttggaccatgggcgcccgcggtctggacaagcgaggaagtttctttaagctcattgacacaattgcctcggagatcggagaactgaaacaggagatggtgcggacagatgtcaacctggaaaatggcctggaacccgctgaaacccacagcatggtaagacacaaggatggtggctattccgaggaagaggacgtgaagacctgtgcccgggactcaggctatgacagcctctccaacaggctcagcatcttggaccggctcctccacacccaccccatatggctgcagctgagtctgagtgaggaggaggcagcagaggtcctgcaggcccagcctccgggg

SEQ ID NO: 17856 - DNA, 871 bp, Homo sapiens
  source 1..871: mol_type = unassigned DNA
tgcgctggtggggacaggaaattgggctgaagggagatgagtccccggcgtgcagtggagcctcgctgggggaaatgacagcttggaccatgggcgcccgcggtctggacaagcgaggaagtttctttaagctcattgacacaattgcctcggagatcggagaactgaaacaggagatggtgcggacagatgtcaacctggaaaatggcctggaacccgctgaaacccacagaacccggaaacctaaaattgtctgtgccatatccacctactcccaatgatggaaacagtaatgcagcaagatccagcgtgtgcaaagtagaattcagtgtagccgtgtgagtctccagaaggcttacaggggagcagctaaagaggatggactcattttgcattctcagcatggtaagacacaaggatggtggctattccgaggaagaggacgtgaagacctgtgcccgggactcaggctatgacagcctctccaacaggctcagcatcttggaccggctcctccacacccaccccatatggctgcagctgagtctgagtgaggaggaggcagcagaggtcctgcaggcccagcctccggggatcttcctggttcataaatctaccaagatgcagaagaaagtcctctccctccgcctgccctgtgaatttggggccccactcaaggaatttgccataaaggaaagcacatacaccttttccctggaaggctcaggaatcagtttcgcagatttattccggctcattgctttctactgcatcagcagggatgttctaccatttaccttgaagttgccttatgccatttcaacagccaagtcggaggctcagcttgaagaactggcccagatgggactaa

SEQ ID NO: 17857 - DNA, 462 bp, Homo sapiens
  source 1..462: mol_type = unassigned DNA
gggctgaagggagatgtaaggccttggtgggaaataaatggcactgtgttgttgacggaaaaagatcttggcaggactgttgttgtgagtgttctgtggcttagaaaggaatttcctacaggctggactaaccattaaaaatgtctctaccttcaggagtccccggcgtgcagtggagcctcgctgggggaaatgacagcttggaccatgggcgcccgcggtctggacaagcgaggaagtttctttaagctcattgacacaattgcctcggagatcggagaactgaaacaggagatggtgcggacagatgtcaacctggaaaatggcctggaacccgctgaaacccacagaacccggaaacctaaaattgtctgtgccatatccacctactcccaatgatggaaacagtaatgcagcaagatccagcgtgtgcaaagtagaattcagtgtagccgtgtgagt

SEQ ID NO: 17858 - DNA, 281 bp, Homo sapiens
  source 1..281: mol_type = unassigned DNA
gagtccccggcgtgcagtggagcctcgctgggggaaatgacagcttggaccatgggcgcccgcggtctggacaagcgaggaagtttctttaagagaataacagaagagctctctgacaccacaaagactagacctgcgactagctttgaagaaactacattgctgaaatctggctataccgaatagatgaaccagtgggtgatgattcacttgacctcagctgagttccctcaactattggtctcttcttggcatttgaaaaagtattcaattttcaaaaa

SEQ ID NO: 17859 - DNA, 4053 bp, Homo sapiens
  source 1..4053: mol_type = unassigned DNA
cggagaactgaaacaggagatggtgcggacagatgtcaacctggaaaatggcctggaacccgctgaaacccacagcatggtaagacacaaggatggtggctattccgaggaagaggacgtgaagacctgtgcccgggactcaggctatgacagcctctccaacaggctcagcatcttggaccggctcctccacacccaccccatatggctgcagctgagtctgagtgaggaggaggcagcagaggtcctgcaggcccagcctccggggatcttcctggttcataaatctaccaagatgcagaagaaagtcctctccctccgcctgccctgtgaatttggggccccactcaaggaatttgccataaaggaaagcacatacaggatgttctaccatttaccttgaagttgccttatgccatttcaacagccaagtcggaggctcagcttgaagaactggcccagatgggactaaatttctggagctccccagctgacagcaaacccccgaaccttccacctccccataggcctctttcctccgacggtgtctgtcctgcctccctgcgtcagctctgccttataaatggagtgcattctatcaaaaccaggacgccttcagagctggagtgcagccagaccaacggggccctgtgctttattaatccccttttcttgaaagtgcacagccaggacctcagtggaggcctgaaacggccgagcacaaggactcccaacgcgaatggcacggagcggactcggtcccccccacccaggcccccgccacccgctattaatagtctccacacaagccctcggctggccaggactgaaacccagacgagcatgccagaaacagtcaaccataacaaacatgggaacgtagctctgcctggaacgaaaccaactcccatccctccaccccggctgaagaagcaggcttcttttctggaagcagagggcggtgcaaagaccttgagcggcggccggccgggcgcaggcccggagctggagctgggcacagctggcagcccaggtggggccccgcctgaggccgccccgggggattgcacaagggccccgccgcccagctctgaatcacggcccccgtgccatggaggccggcagcggctgagcgacatgagcatttctacttcctcctccgactcgctggagttcgaccggagcatgcctctgtttggctacgaggcggacaccaacagcagcctggaggactacgagggggaaagtgaccaagagaccatggcgccccccatcaagtccaaaaagaaaaggagcagctccttcgtgctgcccaagctcgtcaagtcccagctgcagaaggtgagcggggtgttcagctccttcatgaccccggagaagcggatggtccgcaggatcgccgagctttcccgggacaaatgcacctacttcgggtgcttagtgcaggactacgtgagcttcctgcaggagaacaaggagtgccacgtgtccagcaccgacatgctgcagaccatccggcagttcatgacccaggtcaagaactatttgtctcagagctcggagctggacccccccatcgagtcgctgatccctgaagaccaaatagatgtggtgctggaaaaagccatgcacaagtgcatcttgaagcccctcaaggggcacgtggaggccatgctgaaggactttcacatggccgatggctcatggaagcaactcaaggagaacctgcagcttgtgcggcagaggaatccgcaggagctgggggtcttcgccccgacccctgattttgtggatgtggagaaaatcaaagtcaagttcatgaccatgcagaagatgtattcgccggaaaagaaggtcatgctgctgctgcgggtctgcaagctcatttacacggtcatggagaacaactcagggaggatgtatggcgctgatgacttcttgccagtcctgacctatgtcatagcccagtgtgacatgcttgaattggacactgaaatcgagtacatgatggagctcctagacccatcgctgttacatggagaaggaggctattacttgacaagcgcatatggagcactttctctgataaagaatttccaagaagaacaagcagcgcgactgctcagctcagaaaccagagacaccctgaggcagtggcacaaacggagaaccaccaaccggaccatcccctctgtggacgacttccagaattacctccgagttgcatttcaggaggtcaacagtggttgcacaggaaagaccctccttgtgagaccttacatcaccactgaggatgtgtgtcagatctgcgctgagaagttcaaggtgggggaccctgaggagtacagcctctttctcttcgttgacgagacatggcagcagctggcagaggacacttaccctcaaaaaatcaaggcggagctgcacagccgaccacagccccacatcttccactttgtctacaaacgcatcaagaacgatccttatggcatcattttccagaacggggaagaagacctcaccacctcctagaagacaggcgggacttcccagtggtgcatccaaaggggagctggaagccttgccttcccgcttctacatgcttgagcttgaaaagcagtcacctcctcggggacccctcagtgtagtgactaagccatccacaggccaactcggccaagggcaactttagccacgcaaggtagctgaggtttgtgaaacagtaggattctcttttggcaatggagaattgcatctgatggttcaagtgtcctgagattgtttgctacctacccccagtcaggttctaggttggcttacaggtatgtatatgtgcagaagaaacacttaagatacaagttcttttgaattcaacagcagatgcttgcgatgcagtgcgtcaggtgattctcactcctgtggatggcttcatccctgccttccttcctttctttttccttttttttttttttttttttttttttacaaagagccttcatgtttttatatatttcatagaaatttttatagcagttgcaggtaaactgtcaggattggttttaaaatatttttgtaactttaaaatattctataattatgcatgtgattttaacatttaatattcaaaaataaatctcttgctggatttgagagtattgcatttttaaagtctctcttctgtaactggatgttttggcaactttgtggggagagactgctggatttcttaaagcaacgtattcctgacactggccacagaatgcctttggaaatcggatgtactgttctcttgttcacgtttagtggtgttttgctgttttgttttttaaacaaatgatgctgagaataaggagagaaatgaatgtagagagaggtagagagagaaatatgaactctaacaaaggactgaggagtgcagtctgctggttcaggctcttcaaaagatgtagaaaaagagatagaaggaaccacctatgcttaaaatactgtaaatatgcagtgaggtttggcaaaatctattccatgtgtgatttgcttgtagaaacaattttgaaagccccttgaggaaaataaaaatcaagaagaacacttttctcccttttccatacaaattaaaacttaacagcatcaaattattgggaccagaaaccaagtaatgtataatgtggcttttgttgagttaaataagatgctatataatggagaagaatttgaaaatgcacaaaaaaatcaatctacattatcagaacctgcagtgaaattaaacttatgttaaataaaaccagtttgcaggtgcacaaactatgagggtcttgtatccacgtaacacaggtagttacaaaaacatgttattgtactgtgtaaagatgcatagtcatctcatttggttggctttgtaccttgtaccttttttagccttggcttttgttgaactagaaccctcagcacatactgtgttgtacttttgtaaatgattttttaaatggaattttgcacataatacattgtaatactgtatgataatcatgtgtgaaaataatttttgaaatatcc

SEQ ID NO: 17860 - DNA, 1837 bp, Homo sapiens
  source 1..1837: mol_type = unassigned DNA
gagtccccggcgtgcagtggagcctcgctgggggaaatgacagcttggaccatgggcgcccgcggtctggacaagcgaggaagtttctttaagctcattgacacaattgcctcggagatcggagaactgaaacaggagatggtgcggacagatgtcaacctggaaaatggcctggaacccgctgaaacccacagcatggtaagacacaaggatggtggctattccgaggaagaggacgtgaagacctgtgcccgggactcaggctatgacagcctctccaacaggctcagcatcttggaccggctcctccacacccaccccatatggctgcagctgagtctgagtgaggaggaggcagcagaggtcctgcaggcccagcctccggggatcttcctggttcataaatctaccaagatgcagaagaaagtcctctccctccgcctgccctgtgaatttggggccccactcaaggaatttgccataaaggaaagcacatacaatgtggtgctggaaaaagccatgcacaagtgcatcttgaagcccctcaaggggcacgtggaggccatgctgaaggactttcacatggccgatggctcatggaagcaactcaaggagaacctgcagcttgtgcggcagaggaatccgcaggagctgggggtcttcgccccgacccctgattttgtggatgtggagaaaatcaaagtcaagttcatgaccatgcagaagatgtattcgccggaaaagaaggtcatgctgctgctgcgggtctgcaagctcatttacacggtcatggagaacaactcagggaggatgtatggcgctgatgacttcttgccagtcctgacctatgtcatagcccagtgtgacatgcttgaattggacactgaaatcgagtacatgatggagctcctagacccatcgctgttacatggagaaggaggctattacttgacaagcgcatatggagcactttctctgataaagaatttccaagaagaacaagcagcgcgactgctcagctcagaaaccagagacaccctgaggcagtggcacaaacggagaaccaccaaccggaccatcccctctgtggacgacttccagaattacctccgagttgcatttcaggaggtcaacagtggttgcacaggaaagaccctccttgtgagaccttacatcaccactgaggatgtgtgtcagatctgcgctgagaagttcaaggtgggggaccctgaggagtacagcctctttctcttcgttgacgagacatggcagcagctggcagaggacacttaccctcaaaaaatcaaggcggagctgcacagccgaccacagccccacatcttccactttgtctacaaacgcatcaagaacgatccttatggcatcattttccagaacggggaagaagacctcaccacctcctagaagacaggcgggacttcccagtggtgcatccaaaggggagctggaagccttgccttcccgcttctacatgcttgagcttgaaaagcagtcacctcctcggggacccctcagtgtagtgactaagccatccacaggccaactcggccaagggcaactttagccacgcaaggtagctgaggtttgtgaaacagtaggattctcttttggcaatggagaattgcatctgatggttcaagtgtcctgagattgtttgctacctacccccagtcaggttctaggttggcttacaggtatgtatatgtgcagaagaaacacttaagatacaagttcttttgaattcaacagcagatgcttgcgatgcagtgcgtcaggtgattctcactcctgtggatggcttcatccctgccttcct

SEQ ID NO: 17861 - DNA, 1092 bp, Homo sapiens
  source 1..1092: mol_type = unassigned DNA
gttgctatgagacccgctcgagcggaggaccagcagccagcccgacgctgatggttcttacctcgtactaaaacctttgctttgacacagttttagagttgcttaatattcgagcaagcacctgacacgggtgactttctccttctttttttcctccggtccctcgggtaagatggaggtagaaaatgaagccagctgctccccgggcagcgcatcaggcgggtccagagagtacaaggtggtaatgctgggagcagggggagttggtaaaagcgcaatgacaatgcagtttattagtcatcagttccctgattatcatgaccctactatagaagatgcttataagacccaggtcaggattgacaatgagccagcttacttggacatcttggacactgctggccaggcagaattcacagccatgcgggagcagtacatgcgaggtggggaaggcttcatcatctgctactccgtcactgaccgtcaatcatttcaggaggctgccaagtttaaagagctcatttttcaggtccgccacacctatgaaattcccctggtgctggtgggtaacaaaattgatctggaacagttccgccaggtttctacagaagaaggcttgagtcttgcccaagaatataattgtggtttttttgagacctctgcagccctcagattctgtattgatgatgcttttcatggcttagtgagggaaattcgcaagaaggagtccatgccatccttgatggaaaagaaactgaagagaaaagacagcctgtggaagaagctcaaaggttctttgaagaagaagagagaaaatatgacatgatatctttgcttttgagttcctcacgctctctgaattttattagttggacaattccatatgtagcattctgcttcaatattatctctctatgtgtctctctctctttaaatatctgcctgtaggtaaaagcaagctctgcatatctgtacctcttgagatagttttgttttgcctttaacagttggatggattttgtcaatcagctggatatgctgtttagtttttacaacatagtactaaataaaattgacattccaattgcctca

SEQ ID NO: 17862 - DNA, 1156 bp, Homo sapiens
  source 1..1156: mol_type = unassigned DNA
gttgctatgagacccgctcgagcggaggaccagcagccagcccgacgctgatggttcttacctcgtactaaaacctttgctttgacacagttttagagttgcttaatattcgagcaagcacctgacacgggtgactttctccttctttttttcctccggtccctcgggtaagatggaggtagaaaatgaagccagctgctccccgggcagcgcatcaggcgggtccagagagtacaaggtggtaatgctgggagcagggggagttggtaaaagcgcaatgacaatgcagtttattagtcatcagttccctgattatcatgaccctactatagaagatgcttataagacccaggtcaggattgacaatgagccagcttacttggacatcttggacactgctggccaggcagaattcacagccatgcgggagcagtacatgcgaggtggggaaggcttcatcatctgctactccgtcactgaccgtcaatcatttcaggaggctgccaagtttaaagagctcatttttcaggtccgccacacctatgaaattcccctggtgctggtgggtaacaaaattgatctggaacagttccgccagcctacactgaaagagtttggaagggaagaattctgatggttgaagctgcttcttttcatatttggtttctacagaagaaggcttgagtcttgcccaagaatataattgtggtttttttgagacctctgcagccctcagattctgtattgatgatgcttttcatggcttagtgagggaaattcgcaagaaggagtccatgccatccttgatggaaaagaaactgaagagaaaagacagcctgtggaagaagctcaaaggttctttgaagaagaagagagaaaatatgacatgatatctttgcttttgagttcctcacgctctctgaattttattagttggacaattccatatgtagcattctgcttcaatattatctctctatgtgtctctctctctttaaatatctgcctgtaggtaaaagcaagctctgcatatctgtacctcttgagatagttttgttttgcctttaacagttggatggattttgtcaatcagctggatatgctgtttagtttttacaacatagtactaaataaaattgacattccaattgcctca

SEQ ID NO: 17863 - DNA, 870 bp, Homo sapiens
  source 1..870: mol_type = unassigned DNA
cgacgctgatggttcttacctcgtactaaaacctttgctttgacacagttttagagttgcttaatattcgagcaagcacctgacacgggtgactttctccttctttttttcctccggtccctcgggtaagatggaggtagaaaatgaagccagctgctccccgggcagcgcatcaggcgggtccagagagtacaaggtggtaatgctgggagcagggggagttggtaaaagcgcaatgacaatgcagtttattagtcatcagttccctgattatcatgaccctactatagaagatgcttataagacccaggtcaggattgacaatgagccagcttacttggacatcttggacactgctggccagctgtgtgactggctgaaacacagatgggaagtagagctgtgggaaatcagaagaactgaaaagcagaattcacagccatgcgggagcagtacatgcgaggtggggaaggcttcatcatctgctactccgtcactgaccgtcaatcatttcaggaggctgccaagtttaaagagctcatttttcaggtccgccacacctatgaaattcccctggtgctggtgggtaacaaaattgatctggaacagttccgccaggtttctacagaagaaggcttgagtcttgcccaagaatataattgtggtttttttgagacctctgcagccctcagattctgtattgatgatgcttttcatggcttagtgagggaaattcgcaagaaggagtccatgccatccttgatggaaaagaaactgaagagaaaagacagcctgtggaagaagctcaaaggttctttgaagaagaagagagaaaatatgacatgatatctttgcttttgagttcctcac

SEQ ID NO: 17864 - DNA, 421 bp, Homo sapiens
  source 1..421: mol_type = unassigned DNA
catcttggacactgctggccaggcagaattcacagccatgcgggagcagtacatgcgaggtggggaaggcttcatcatctgctactccgtcactgaccgtcaatcatttcaggaggctgccaagtttaaagagctcatttttcaggtccgccacacctatgaaattcccctggtgctggtgggtaacaaaattgatctggaacagttccgccaggtgagtgccgattttatctggtagcttctgtcttttgctctgaggatgcatagtacaaaatatggctgctttcccaggttcacactgaaaattatgagaaagaaattatgcacatgatttttctaataagtcatggtggtcccatggtaaattgtgttggcctccataatatattttaccacatatgctattttgcagagtgccctt

SEQ ID NO: 17865 - DNA, 1810 bp, Homo sapiens
  source 1..1810: mol_type = unassigned DNA
ggcctctcccctctcccctttctctctgggtcttcctttgccccactgagggcctcctgtgagcccgatttaacggaaactgtgggcggtgagaagttccttatgacacactaatcccaacctgctgaccggaccacgcctccagcggagggaacctctagagctccaggacattcaggtaccaggtagccccaaggaggagctgccgacctggcagggaacaaccaagactggggttaaatctcacagcctgcaagtggaagagaagaacttgaacccaggtccaacttttgcgccacagcaggctgcctcttggtcctgacaggaagtcacaacttggccctgacttcctatcctagggaaggggccggctggagaggccaggacagagaaagcagatcccttctttttccaaggactctgtgtcttccataggcaacatgtcagaaggggtgggcacgttccgcatggtacctgaagaggaacaggagctccgtgcccaactggagcagctcacaaccaaggaccatggacctgtctttggcccgtgcagccagctgccccgccacaccttgcagaaggccaaggatgagctgaacgagagagaggagacccgggaggaggcagtgcgagagctgcaggagatggtgcaggcgcaggcggcctcgggggaggagctggcggtggccgtggcggagagggtgcaagagaaggacagcggcttcttcctgcgcttcatccgcgcacggaagttcaacgtgggccgtgcctatgagctgctcagaggctatgtgaatttccggctgcagtaccctgagctctttgacagcctgtccccagaggctgtccgctgcaccattgaagctggctaccctggtgtcctctctagtcgggacaagtatggccgagtggtcatgctcttcaacattgagaactggcaaagtcaagaaatcacctttgatgagatcttgcaggcatattgcttcatcctggagaagctgctggagaatgaggaaactcaaatcaatggcttctgcatcattgagaacttcaagggctttaccatgcagcaggctgctagtctccggacttcagatctcaggaagatggtggacatgctccaggattccttcccagcccggttcaaagccatccacttcatccaccagccatggtacttcaccacgacctacaatgtggtcaagcccttcttgaagagcaagctgcttgagagggtctttgtccacggggatgacctttctggtttctaccaggagatcgatgagaacatcctgccctctgacttcgggggcacgctgcccaagtatgatggcaaggccgttgctgagcagctctttggcccccaggcccaagctgagaacacagccttctgaaaacatctcctgccagctgaactgtagttagaatctctgggcctctcctcaactgtcctggacccaaggctaggaaagggctgcttgagatgactgtggtccccccttagactccctaagcccgagtgagctcaggtgtcaccctgttctcaagttgggggatgggtaataaaggagggggaattcccttgaacaagaagaactggggatagttatatttccacctgcccttgaagctttaagacagtgatttttgtgtaaggttgtatttcaaagactcgaattcattttctcagtcatttcctttgtaacagagttttacgacttagagtctgtgaaaacaggcaaggagcccgggttaaaatatccccctattcgcccccaaaatgcaataaaagaagataaaagagagagga

SEQ ID NO: 17866 - DNA, 609 bp, Homo sapiens
  source 1..609: mol_type = unassigned DNA
tcaatggcttctgcatcattgagaacttcaagggctttaccatgcagcaggctgctagtctccggacttcagatctcaggaagatggtggacatgctccagccatggtacttcaccacgacctacaatgtggtcaagcccttcttgaagagcaagctgcttgagagggtctttgtccacggggatgacctttctggtttctaccaggagatcgatgagaacatcctgccctctgacttcgggggcacgctgcccaagtatgatggcaaggccgttgctgagcagctctttggcccccaggcccaagctgagaacacagccttctgaaaacatctcctgccagctgaactgtagttagaatctctgggcctctcctcaactgtcctggacccaaggctaggaaagggctgcttgagatgactgtggtccccccttagactccctaagcccgagtgagctcaggtgtcaccctgttctcaagttgggggatgggtaataaaggagggggaattcccttgaacaagaagaactggggatagttatatttccacctgcccttgaagctttaagacagtgatttttgtgtaaggttgtatttcaaagactcgaa

SEQ ID NO: 17867 - DNA, 782 bp, Homo sapiens
  source 1..782: mol_type = unassigned DNA
gcctccagcggagggaacctctagagctccaggacattcaggtaccaggtagccccaaggaggagctgccgacctggcagggaacaaccaagactggggttaaatctcacagcctgcaagtggaagagaagaacttgaacccagccctgacttcctatcctagggaaggggccggctggagaggccaggacagagaaagcagatcccttctttttccaaggactctgtgtcttccataggcaacatgtcagaaggggtgggcacgttccgcatggtacctgaagaggaacaggagctccgtgcccaactggagcagctcacaaccaaggaccatggacctgtctttggcccgtgcagccagctgccccgccacaccttgcagaaggccaaggatgagctgaacgagagagaggagacccgggaggagcctgtccccagaggctgtccgctgcaccattgaagctggctaccctggtgtcctctctagtcgggacaagtatggccgagtggtcatgctcttcaacattgagaactggcaaagtcaagaaatcacctttgatgagatcttgcaggcatattgcttcatcctggagaagctgctggagaatgaggaaactcaaatcaatggcttctgcatcattgagaacttcaagggctttaccatgcagcaggctgctagtctccggacttcagatctcaggaagatggtggacatgctccaggattccttcccagcccggttcaaagccatccacttcatccaccagccatggtacttcacc

SEQ ID NO: 17868 - DNA, 369 bp, Homo sapiens
  source 1..369: mol_type = unassigned DNA
ggagggaacctctagagctccaggacattcaggtaccaggtagccccaaggaggagctgccgacctggcagggaacaaccaagactggggttaaatctcacagcctgcaagtggaagagaagaacttgaacccaggtccaacttttgcgccacagcaggctgcctcttggtcctgacaggaagtcacaacttgggtctgagtactgatccctggctattttttggctgtgttaccttggacaagtcacttattcctcctcccgtttcctcctatgtaaaatggaaataataatgttgaccctgggtctgagagagtggatttgaaagtacttagtgcatcacaaagcacagaacacacttccagtctcg

SEQ ID NO: 17869 - DNA, 6246 bp, Homo sapiens
  source 1..6246: mol_type = unassigned DNA
gcctacgcgctggtgggccgtgggaagatggcggacggaaagggagacgccgccgctgtcgccggggctggggctgaggctccggcggtagcgggagccggagatggagtcgagactgagtccatggttcggggtcatcgccccgtatctccagcgccgggagcctcgggactgcggccgtgtctgtggcagctggagacagagctgagggagcaagaggtgtcggaggtctcatctttgaactactgccggagcttctgccagaccttattgcaatatgcaagcaacaagaatgcatcagaacatattgtgtatcttctggaggtatatcgacttgccatccaaagctttgccagtgcacgtccatacttaactactgaatgtgaagatgtcctcttagtgcttggcagattagtactgagttgtttcgaattactgctttcagtgtctgaaagtgaactgccatgtgaagtctggctaccattccttcagtctctacaggagtcacatgatgcattattggaatttgggaataataacctacaaatattggttcatgttaccaaggaaggggtgtggaaaaacccagttcttcttaaaattctgtctcaacagccagtagaaacggaggaagtcaataaattgattgcacaagaaggaccttcctttctgcaaatgcgaataaaacatttgttgaaatctaactgcatcccccaggctactgctttatcaaaactatgtgcagaatctaaagaaatttcaaatgtgtcatcttttcagcaagcctatatcacatgtttatgttctatgctccctaatgaagatgctattaaggagattgcaaaggtcgactgcaaggaagtactagacatcatttgtaatctggaatctgaggggcaggataacacagcatttgttctttgtacgacttaccttacccagcagctccaaactgcaagtgtatattgttcttgggaactgactcttttttggagtaaactgcaaagaagaattgacccttctttagatacttttttggagcgctgtcgtcagtttggtgtcatagctaaaacgcagcagcatttattttgcctcattagagttatacaaactgaagcacaagatgctggtcttggggtgtcaattttactgtgtgtcagagctcttcaactcagatcaagtgaagatgaggaaatgaaggcatcagtttgtaaaacaattgcctgtcttttaccagaagatttagaagttagacgagcctgtcagcttacagaattcttaattgaacccagtttggatggatttaatatgttagaagaactatatttgcaaccagatcaaaaatttgatgaagaaaatgcaccggttccaaattctcttcgatgtgagctcttactagctttaaaagcccactggccttttgatcctgagttttgggactggaaaactttaaaacgacactgccaccaacttttaggacaagaagcctcagattctgatgatgatttaagtggctatgaaatgtccattaatgacacagatgttttagagtcatttctcagtgactatgatgagggtaaagaagataaacaatatagaagaagagatttgacagatcagcataaggagaaaagagacaaaaaacctattggctcttctgaaagatatcagaggtggcttcagtacaagtttttctgtttgttatgtaagcgggaatgtatagaggctagaattcttcatcattctaagatgcatatggaagatggaatttacacctgtccagtttgtattaaaaaatttaagagaaaagaaatgtttgttcctcatgtgatggagcatgttaaaatgccaccaagcagaagggaccgctctaaaaagaaattactgttaaaaggctctcaaaagggtatttgtcctaagagcccctctgcaatcccagagcaaaaccattcattgaatgaccaagccaaaggagagtctcatgaatatgtcacattcagcaaattagaagattgccacctgcaagacagagatttgtatccatgtcccggtacagactgttcccgtgtgtttaagcaatttaaatacttaagtgtgcatcttaaagctgaacaccaaaataatgatgaaaatgccaagcactacttggatatgaaaaatagaagagagaagtgtacttactgtcgacgacattttatgtctgcttttcaccttcgagagcacgaacaagtgcattgtgggcctcagccttatatgtgtgtatctatagattgctatgctaggtttggatcagtaaatgaactacttaaccataaacaaaagcatgacgatctgcgttacaaatgtgaattaaatggctgtaatattgttttcagtgacttgggacagctttaccaccatgaagcacaacactttagggatgcatcttacacatgcaacttccttggctgtaaaaagttctattactccaaaattgaataccagaatcacctctcaatgcataatgttgaaaattcaaatggagacataaagaaatcagtgaaacttgaggagtctgcaacaggtgaaaagcaagattgtattaatcagccccatctacttaaccaaactgataaatcacatttacctgaagatcttttctgtgcagaatcagctaattctcaaatagatacagaaactgcagaaaacctgaaagaaaacagtgacagtaattctagtgatcagttaagtcatagctcttcagcttcaatgaatgaagagctaattgacacactagatcactctgaaactatgcaggatgtattgttatctaatgagaaagtctttgggccctccagtttaaaagaaaaatgttccagtatggcagtttgttttgacgggactaagtttacctgtggttttgatggctgtggttccacatacaaaaatgcaagaggaatgcagaaacatttacggaaggttcatccataccatttcaagcccaaaaagataaagacgaaagatctgtttccctctttgggtaatgaacataatcagacaactgaaaagttggatgcagaacctaaaccctgctcagatacaaacagtgactccccagatgaaggtctagatcacaatattcacattaaatgtaaacgagaacatcaaggttattcctcagaatcctccatttgtgcttctaaaaggccctgtacagaggataccatgttggaacttctgttacgcttgaaacatttaagcttgaaaaactcaataacacatggatctttctcagggtcattgcaggggtacccatccagtggtgctaagtctcttcagtcagtttcatctatctcagaccttaattttcagaatcaagatgaaaacatgccaagtcagtaccttgcacagttggcggctaagccgtttttctgtgagcttcaaggatgcaaatatgaatttgtgaccagagaggctctgttaatgcattatcttaaaaagcataattattcaaaagaaaaagtccttcagttaaccatgttccaacatcggtattccccatttcagtgtcatatttgccaaaggtcatttacaagaaaaacacaccttaggattcattataaaaataaacatcaaattggcagtgacagagcaactcacaaactattagataatgaaaagtgtgatcatgaaggcccatgttcagtagataggttgaaaggtgattgttctgcagaacttggaggtgatcccagtagtaactctgagaaaccacactgtcatcctaaaaaggatgaatgtagttctgaaacagatttggaatcatcttgtgaagaaacagaaagtaaaacatctgacatttcatcaccaataggcagccatagagaagaacaagaaggaagagagggcagaggtagcaggcgaactgttgctaaaggaaatctgtgttatattttgaataaataccacaaaccattccattgtattcataaaacttgcaactcctcattcaccaatctaaaaggcttaattcgccattacagaactgtacatcagtacaacaaagaacagttatgtttggagaaagacaaagcaagaaccaaaagggaacttgtcaaatgtaaaaagatatttgcttgcaaatataaggaatgtaataaacgcttcctgtgttccaaagctcttgctaagcactgtagtgattctcataacctagaccatattgaagagcctaaagtactttccgaagctggatctgcagcaaggttttcttgtaaccagcctcagtgccctgctgttttttatacattcaacaagttgaagcaccacttgatggaacagcataatattgaaggggaaatacattcagattatgaaattcattgtgatcttaatggctgtggccagattttcacccatcgcagtaattactcacaacatgtatattaccgacataaagactattatgatgatttgtttagaagccagaaagtagcaaatgagagactactaaggagtgaaaaggtatgtcaaacagctgatactcaggggcatgaacatcagaccaccaggagatcatttaatgctaagtctaaaaaatgtggcttaatcaaagaaaagaaagccccaataagttttaaaaccagagctgaggccctccatatgtgtgtggagcactctgagcacacacagtacccctgcatggttcaaggatgcttatctgtggtgaagttggagagcagcattgtgaggcattacaaacgcactcatcagatgagtagtgcctatttagagcaacagatggagaatcttgttgtttgcgttaagtacggtaccaaaattaaggaggaacccccttctgaagcagatccctgtataaagaaagaagaaaatagaagctgtgaatcagagcgcacagaacacagccattccccgggtgacagtagtgcacccatccagaacactgattgctgtcattcaagtgaaagggatggaggtcagaaagggtgcatagaaagcagctcagtatttgatgcagatactctgctctacaggggaactttgaaatgtaatcatagttccaaaaccacttccctagaacagtgtaatatagttcagcctcctcctccttgtaaaatagaaaattccatacctaatcccaatgggactgaaagtgggacttatttcacaagtttccagctgcctttaccaaggatcaaagaatcagaaactaggcagcatagttcagggcaagaaaacactgtaaaaaatccaacccatgtcccaaaagagaattttaggaaacattcacagccccggtcatttgatttgaagacttacaaacctatgggatttgaatcttcatttctgaaatttattcaggaaagtgaagagaaagaagatgattttgatgattgggagccttcagagcacttaacattaagtaattcttcacagtccagtaatgatttaacagggaatgttgtggcaaataatatggtgaatgacagtgaacctgaagttgacatacctcattcttccagtgactctacaattcatgagaacctgactgcaatcccacctttaatagtagctgaaacaacaacagttccttccttggaaaacctgagggttgtattggacaaagcattaacagactgtggagagcttgccttaaaacagcttcattatcttcggccagtggtggttcttgaaagatctaagttttccacaccaattttagacttatttccaacaaaaaagacagatgagctttgtgtaggaagttcataagtagcaattttgttttagtaacagactggctccaacactgcaacatggggacatttgccaactcgaacaaaggctgagaagcagccacaccgttgtttagggtagaataggctgtgtatttacatgaatgtataatatctatgtcagcagtattggctgagtccattagctctccagttggtttaatgattgggtttatttttgtttgtttgtttattaaaaaaatggaactgtacacttgtttggtgctaattaatacatcaaaatatactggggcttcctttttcaaattaagtgtgcatgattgtatatggaacaaatactaaggtcccagggtgggagggctagggaaagggatatggagttcttacttgacttgaatgtgcacctgagggtgctttgtgtaatatattgtacactacagcatcttatattttttgagttgagtttcaataaattacaatttttcaccca

SEQ ID NO: 17870 - DNA, 540 bp, Homo sapiens
  source 1..540: mol_type = unassigned DNA
gattctgagccgggctccatccctccctcctcggagccctgctacccgcagccgtgtctcctccccctgggcctgctagcctttccgggagaaaaggcatccttacctctggttgaaggtctcggggcctccccctctgcatccggaccctctccccatcccagcctcccatgccaaggcccgccttgtcagtcacttccttttgtcatcggcttggcaaacgggagagaaaacagagcttcatgggaaacagcggcaacagttggtcccatacacctttccccaagttggagctaggcctggggccccagcccatggcgccccgggagctccctacctgctccatctgcctggagaggttgcgcgaccccatctcgctggactgtggccacgacttctgcatacggtgcttcagcacacaccgtctcccgggctgtgagccgccctgctgtcctgagtgccggaagatatgcaagcagaagaggggcctccggagcctgggcgagaagatgaagctcctgccgcagcggccgctgcccc

SEQ ID NO: 17871 - DNA, 1083 bp, Homo sapiens
  source 1..1083: mol_type = unassigned DNA
gtgtctcctccccctggggtgagtccagcagcagcctcctctttcctgactgtcacatttcttttccagctctgaccgggagtcagctcctcggggataccatcccccgacctcaccttctacctaccgcagcctgctagcctttccgggagaaaaggcatccttacctctggttgaaggtctcggggcctccccctctgcatccggaccctctccccatcccagcctcccatgccaaggcccgccttgtcagtcacttccttttgtcatcggcttggcaaacgggagagaaaacagagcttcatgggaaacagcggcaacagttggtcccatacacctttccccaagttggagctaggcctggggccccagcccatggcgccccgggagctccctacctgctccatctgcctggagaggttgcgcgaccccatctcgctggactgtggccacgacttctgcatacggtgcttcagcacacaccgtctcccgggctgtgagccgccctgctgtcctgagtgccggaagatatgcaagcagaagaggggcctccggagcctgggcgagaagatgaagctcctgccgcagcggccgctgccccctgcactgcaggagacgtgtcctgtgagggcggagccgctgctgctggttcgcatcaatgcctctgggggcctcatccttaggatgggggccatcaaccgctgcctgaagcaccctctggccagggacaccccagtctgcctcctcgctgtcctgggggagcagcactcagggaagtccttcctcctcaaccatttgcttcagggcttgccgggcctggtgagggcggggcggggcaggagggaggcggggagcaaggatgggggttcctgcctgggggaagctgggtctggtattccggtctgtggggacaaggaaccgaccaactgatgctctcccttctctcccctgcaggagtctggtgagggcggccggccaagaggaggagaggcatccctgcagggctgcaggtggggcgccaatggcctcgccaggggcatatggatgtggagccaccccttcttgctggggaaagaagggaag

SEQ ID NO: 17872 - DNA, 3212 bp, Homo sapiens
  source 1..3212: mol_type = unassigned DNA
gggtgagtccagcagcagcctcctctttcctgactgtcacatttcttttccagctctgaccgggagtcagctcctcggggataccatcccccgacctcaccttctacctaccgcagcctgctagcctttccgggagaaaaggcatccttacctctggttgaaggtctcggggcctccccctctgcatccggaccctctccccatcccagcctcccatgccaaggcccgccttgtcagtcacttccttttgtcatcggcttggcaaacgggagagaaaacagagcttcatgggaaacagcggcaacagttggtcccatacacctttccccaagttggagctaggcctggggccccagcccatggcgccccgggagctccctacctgctccatctgcctggagaggttgcgcgaccccatctcgctggactgtggccacgacttctgcatacggtgcttcagcacacaccgtctcccgggctgtgagccgccctgctgtcctgagtgccggaagatatgcaagcagaagaggggcctccggagcctgggcgagaagatgaagctcctgccgcagcggccgctgccccctgcactgcaggagacgtgtcctgtgagggcggagccgctgctgctggttcgcatcaatgcctctgggggcctcatccttaggatgggggccatcaaccgctgcctgaagcaccctctggccagggacaccccagtctgcctcctcgctgtcctgggggagcagcactcagggaagtccttcctcctcaaccatttgcttcagggcttgccgggcctggagtctggtgagggcggccggccaagaggaggagaggcatccctgcagggctgcaggtggggcgccaatggcctcgccaggggcatatggatgtggagccaccccttcttgctggggaaagaagggaagaaggtggcggtgttcctggtggacacaggggatgccatgagccctgagctgagcagggaaacaaggatcaagctctgtgctctcaccacgatgctgagctcctaccagatcctcagcacctcccaggagctgaaggatacagacctggactatctggagatgtttgtccacgtggccgaggtgatgggcaagcattatgggatggtgccaatccagcatctggacctcttagttcgtgactcatcccaccccaacaaggcagggcaggggcatgtaggcaacatcttccagagattgtctggcagataccccaaggtgcaggagctgctgcaagggaagcgagcccgttgctgcctcttgcctgccccagggaggcggcggatgaaccaaggccatgcaagccctggtgacacagatgatgacttccgccaccttctgggggcctacgtctcagatgtgctgagtgcggccccccagcacgctaagagccgctgccaggggtactggaacgaggggcgcgccgtggccaggggggacagacgcctactcacggggcagcagctagctcaggaaatcaagaacctctcaggatggatggggaggacagggcccggtttcacctctccggatgagatggctgctcagctgcacgacctgaggaaggtggaagctgccaagagggagttcgaggagtatgtgaggcagcaggacgtagccaccaagcgcatattctctgcgctgcgggtcctgccagacaccatgcggaacctcctctccacccagaaagatgccattctggcccgccatggtgtggccttactctgcaaggggagagatcagaccttggaggcactggaagctgagctgcaggccacggccaaggccttcatggactcctacacgatgcgcttctgtggccacctagctgctgtggggggtgctgtgggggccgggctcatgggcctggcagggggcgtggtgggtgctggcatggcagcagctgcactggctgcagaggctgggatggtggctgctggagctgccgtgggggccacaggggccgctgtggttgggggtggcgtgggtgctgggttggctgccacagtgggctgcatggagaaggaggaggatgagaggcttctggaaggggaccgagagccccttctccaggaagagtaacagccccaggaggtattgaaggacaggagagatgtcaggtggggatgaagaagaggggcaggtcgggggagggtgatgccagggattccaaggcaccgccatgtactgcactgccctggtcgaatgctcggtgtctgggtggcagctgagctgggactcaaggtggctcttggaacctgggaggcagcatctgggggcagtggatagaacacccggcctgtttctggttgcagatggttgccgatctgcccttgtcacagataggctacatcccagggtttctggctgcaagtgagactccaccctccccacctggctcatttccccgatgaccctggattgtaggaaagttaagcaggcaccatcctggaagtctacccctaggtggtcgagagacctgttctttcacagatgtgagaagccccaggatgattgaccatggtgttcaggagcggggagcactgatgaggtgctggggatgacaggaaggaaggaacactgggcagaaccagagagatgggacatggtagactgtggcccagaccccagagcagagaaacttgttcccatgacccttcccaaatctgctccagcaggactaaggtggctttcccactcctggcccacagccccagagagcctgtctgtgcatcctgaaccactctttgctgggcctccgcaagggcctctcttgggtctgtgtcctttttcaagcctgtttagatgggggagtgcccatgccctctgtgaagtgcccaaatgcgaaagaataacaccttttcttgcattctgagctaagccagacagcctttatactagattctatcaaaatcttgcaaaggaaaacaaaatgaacaacttctacccttaaacacatcctttctcccctgggcttgtaagaagatgcagcttgatgcagctcctcaaacaccaggccccctgggaactgggggtgcgggagttctccctctgggggacagaaaatctgactactaggaagacttctaggctatgaaactgacttctaggctatgaaacttacagggtatgggtgggcacattatcctttattttatgaaaaataaaatgtgtgtatgtgaa

SEQ ID NO: 17873 - DNA, 547 bp, Homo sapiens
  source 1..547: mol_type = unassigned DNA
aggctgggatgggtgcagtgaggccaggcaggtcagttgaaatggccggtcctggaacacagagcccggcagcccagccgggagggctgtccgcctgaggctggatccgccaggctgtggagggagggacaggaagaagcaggtcccatacacctttccccaagttggagctaggcctggggccccagcccatggcgccccgggagctccctacctgctccatctgcctggagaggttgcgcgaccccatctcgctggactgtggccacgacttctgcatacggtgcttcagcacacaccgtctcccgggctgtgagccgccctgctgtcctgagtgccggaagatatgcaagcagaagaggggcctccggagcctgggcgagaagatgaagctcctgccgcagcggccgctgccccctgcactgcaggagtctggtgagggcggccggccaagaggaggagaggcatccctgcagggctgcaggtggggcgccaatggcctcgccaggggcatatggatgtggagccaccccttcttgctggggaa

SEQ ID NO: 17874 - DNA, 426 bp, Homo sapiens
  source 1..426: mol_type = unassigned DNA
gggtctgtgtgccctgggagtggagatgaggaaacaagcagcgcccctggctgagaaggaaggaaggaggcagcctgggttttcccgtggacagatggctgctcagctgcacgacctgaggaaggtggaagctgccaagagggagttcgaggagtatgtgaggcagcaggacgtagccaccaagcgcatattctctgcgctgcgggtcctgccagacaccatgcggaacctcctctccacccagaaagatgccattctggcccgccatggtgtggccttactctgcaaggggagagatcagaccttggaggcactggaagctgagctgcaggccacggccaaggccttcatggactcctacacgatgcgcttctgtggccacctagctgctgtggggggtgctgtgggggccgggctcatgggcct

SEQ ID NO: 17875 - DNA, 1868 bp, Homo sapiens
  source 1..1868: mol_type = unassigned DNA
agtttcggaaccccagccagctcacctctgcgccgctgaacccgatccgagcctccggcaaaggtttttccctcctcccccggccgagggcttctgcagcccgggcacccccgccccgcggcgccccacattcccccagcccggggcccttggcgcgtgcgctccgtgcggctgtgctccgcgggactttgtttgtttcctcctcgtccctctttgttgggctgaacaccagcctcgtcaaagccccccactccggagggagttcggcttctccagcagggcggctgcagcgcgctgccccgaccccgcctgcggcccctcacgccgctagtgctcccaccccgccctcctggcaccccgcctgcgtccgttcgcccgaggaagccaaccgcgacttcattgatgcacccattccagtggtgtaacgggtgtttctgtggcctgggactggttagcaccaacaagtcctgctcgatgccacccatcagtttccaggaccttccgctcaacatctatatggtcatcttcggcacaggcatctttgtcttcatgctcagccttatcttctgctgctattttatcagcaaactgcggaaccaggcacagagtgagcgatacggatataaggaggtggtgcttaaaggtgatgccaagaagttacaattatatgggcagacctgcgcagtctgtctggaagacttcaaggggaaggatgagttaggcgtgctcccgtgccaacacgcctttcaccgcaagtgtctggtgaaatggctggaagttcgctgtgtctgccccatgtgtaacaagcccattgctagtccctcagaggccacgcagaacattgggattctattggatgagctggtgtgagtgctgccgctacaccgagacctggagaagacctcttgcctcatggatgtctggtccctctgcacagctccaaccaacaggactgtagggtgatgacgatcactttcccagtgatgagaagggtggtctaggactgggcttctaccctcagtgcaagaccagtgccagatgtgcccccacttcctgcctcctgaagccttcttccctgctactccatgctggtggcctcacccatcaagaccactgtctcctggtactggactatctacctgccttgtccctgttctgggggaaggtgtccaccccgatcaagaacatggagaaagtcctctttcaaggctcccattaggaggatgagctgccttgacccagaagggatgagacgggctcttacctctctacaaccttccctccccttcccactccttccggagtaaggttagaagggaaggaaggaaagatcaaggaaccaagcgcctccacgggaggcgagggaggctctgtatgaaacagaagagcagggacataaaggaaaatgtcagtgtttacatgggacctatggaaacaaaggctggcgggcgccagctgactccagagtaagagagggcccttcccctgccaggacccacggtgctatccattcagtctcttcctcagttaatctcggagcttcctattccatgttgaggtttgtgggcccctctagaggagggctagttctatacttaaattgattcccaggggccttttttttttttttttttttttttttgatcaaaaggggtgtggggatgggggtgtctacggttaagcaacagatacctccttccctttgtaaatagtatttttatacttcatcctcgcctctcaggctttagatacgaaatctccagaatggaagggggtggggattttctgttcctccctggagtgggtgagggtgggagaaagttacatatttaaagaaaaataaatttaataacaagtttctctaacct

SEQ ID NO: 17876 - DNA, 2637 bp, Homo sapiens
  source 1..2637: mol_type = unassigned DNA
gactgacggcgcagcctccgggcctagccacagcagcaacggcagaggccagcgggcgaggtcaagatggtggctccgcgggcgggggaggcagtggagggaggaggagtcagaccttagccagccggaaacaccgaaacccagagacctcctggggagccgccgccgccgccctctcggccatcgctgcctccgccgcctgctccacctcgagggacgcgagcgggcggcggggctggccgtgagagagacaggagaggaaggagggcaggggcggagttgcccgccttagcccccgcccccggccgcggccccgggccctgccccgcgcggccctgcccggcccaccgagccctggtgtggcagcggctcatggcggccgtggggcccccgcagcagcaggtgcggatggcccatcagcaggtctgggcggcgctcgaagtggcgctccgggtgccctgcctttacatcatcgacgccatcttcaactcctacccggattccagccaaagccggttctgcatcgtgctccagatcttcctccggctctttggtgtatttgcatccagtattgttctgatcttgtcacaacgatcacttttcaagttttacacgtacagctcagcctttctgttagctgcaacttcagtgttggtgaattattatgcttctttgcacattgacttctatggtgcctacaacacgtcagcttttggaattgagctgcttcctcgaaaaggtccctcgctgtggatggcacttatcgttctacagctaacatttggaattggatacgttacactactccagattcattccatctattcacaattaattattttggatctcttggttcctgtaataggcttaatcacagagctaccattacacatcagagagactttactgtttacttcttccttgattctcacattaaatacagtgtttgtcctggcagtgaaactgaagtggttttattattccacacgatatgtttatcttttggtgaggcacatgtatcgaatttacggattacagttattgatggaggacacatggaagaggattcgtttcccagacatactacgagtcttttggctaacaagagttacagctcaggctacagtgttaatgtacatcttaaggatggcaaatgaaactgattccttctttatttcttgggatgatttttgggacctcatttgcaatcttataattagtgggtgcgattctacactaactgtactgggcatgagtgctgtaatttcctcagtagcccattatttggggcttggaatattggcctttattggatcaactgaggaagatgacaggcgtcttggctttgttgcacctgttttattttttattttggctcttcagactgggttaagtgggctaagaccagaagagagacttattcgcttaagtagaaacatgtgccttttattaactgcagtcctgcattttatccatggaatgacagaccctgtattaatgtctctcagtgcctctcatgtgtcatcttttcgtagacattttcctgtgctgtttgtctctgcttgcctgtttattcttcctgtcttactcagttatgttctttggcatcactatgcactaaatacatggttgtttgcagttacagcattttgtgtggaactgtgcttaaaagtaattgtttctctcactgtttatacgttattcatgattgatggctactataatgtcctctgggaaaagcttgacgattatgtctactacgttcgttcaacaggcagtattattgaatttatatttggagttgtaatgtttggaaatggggcttacactatgatgtttgagtcgggaagtaaaattcgggcttttatgatgtgcctacatgcatattttaacatctacttacaagccaaaaatggctggaagacatttatgaatcgtaggactgctgtgaagaaaattaattcacttcctgaaataaaagggagccgcttacaagaaataaatgatgtatgtgcaatctgctatcatgagtttacaacatctgctcgtattacaccgtgtaatcattatttccatgcactttgccttcggaaatggctgtacattcaagatacttgtccaatgtgccatcagaaagtatacatcgaagatgatatcaaggataattcaaatgtatctaacaacaatggatttattccacccaatgaaactccagaggaagctgtaagagaagctgctgctgaatctgacagggaattgaacgaagatgacagtacagattgtgatgatgatgttcaaagagaaagaaatggagtgattcagcacacaggcgcagcagctgaagaatttaatgatgatactgactgatgaaaatagcatttattaatgattgaggtatttgtttaaaattcagttcatccaaaatggagtaatatccttcaccttcagtgtgtaaccaagcacaaaaacagtatcaatgttgaatctgtgaatggttttccgtttactgtgatgtgctactgtaaatatacctctttaattacttctggtctctttggtgacctgtttaaatttgtgtacattattgtacatagaataaaatgttttcacatttttatgacaaaatttgaacaaata

SEQ ID NO: 17877 - DNA, 467 bp, Homo sapiens
  source 1..467: mol_type = unassigned DNA
agtggattgtgaaatgcgtctactgtaataatatgcaatgtcttgattacctgctgaaataaggtgtatttgcatccagtattgttctgatcttgtcacaacgatcacttttcaagttttacacgtacagctcagcctttctgttagctgcaacttcagtgttggtgaattattatgcttctttgcacattgacttctatggtgcctacaacacgtcagcttttggaattgagctgcttcctcgaaaaggtccctcgctgtggatggcacttatcgttctacagctaacatttggaattggatacgttacactactccagattcattccatctattcacaattaattattttggatctcttggttcctgtaataggcttaatcacagagctaccattacacatcagagagactttactgtttacttcttccttgattctcacattaaatacagtgtttgtcctggca

SEQ ID NO: 17878 - DNA, 9501 bp, Homo sapiens
  source 1..9501: mol_type = unassigned DNA
gtgcacgtgcgcgcgcgcccgccccagttgcgcccccggcccgcacacaccccggctcatcttctcccggtccccttgtctcgcgccttctccagccctagaagttgccccagggcccctcccgggattagagagcgctgtgaagggccagatgttgggggtcttttgtgcagacacacgcgcctggggcgcttgctcctggaaggacagcggcaggacaaagccagctggactcgtggggcgctgctcgggaagcggcggtccccaatcccgcctggggtcggggcatggcttggggagcgctgcctgggtctggagagagtagagaaatcgccaaagcagagtgacggtgacttgatgaggtgacggtgacttgatgaggtggcggtgacttgatgaggtggcggacaggggcaaacgaaagaaagatgctcgggattgccgcgctgtgtgcctgtctgcgcggctgactaggcgccccgcattcccatatgaccgggttacctggtagattttgccagtgtgtctttgccccaagatgttattccccacctgctccgatttctttctttcctagggcttactgttgctagtaggcgctctgccaccagaggggaactcgtgggcgggggagactgcggaggaggggggaggtggttatttatcctgtagagacaattaggagccgtgacgcccccttctcggccgccagccctccacacctcatctgccttgctccacctccctagtgcacccgctccagccccgtctgcccaggagggcgcttggatttccttctccgcggcgcgtatctaacccttcctgcatgtatttcactgcaggctgaagaaagctcagtctcaattgtgtttcctgcctgtcagcctcttgcctcctaaacgtgtaccatttccacttgatgtcatcacgcagaaggggtgaaagagactcggtgacagatacagaaatgaacacacctgtgagtactggatgcctgtgagcttgccattacctgcactgcaaagacacagggcggtggcctctgagaagcagctccttccccttcaccttggccttgcccttcctgctcacggtccaccatggagacgctgtcccaggactctctgctggaatgtcagatctgtttcaattactacagcccccggcgcaggcccaagttgctggactgcaagcacacctgctgttcagtgtgcctgcagcagatgaggaccagccagaaggatgtgcggtgcccctggtgccgcggtgtcaccaagctgcctcccggcttctccgtgtcgcagctcccggacgacccggaggtcctggctgtcatcgccattccacacacttccgaacacaccccggtcttcatcaaacttcccagcaatgggtgctacatgctgcccctgcccatctccaaggagcgtgcgctgctgcccggagacatgggctgccgcctgctgcccgggagccagcagaagtccgtcaccgtggtgaccatccctgctgaacagcagcctctgcaaggtggggctccccaggaggcggtggaggaggagcaggacaggcggggcgtggtgaaaagctccacctggtcgggggtgtgcactgtcatcttggtggcttgcgtcttggtcttcctcctcggcatcgtgcttcacaacatgtcttgcatttctaagcgcttcactgtgatatcctgtggctgaagagggctgcagggaagtctcttgtgggtgccaacttaggggttgagcaggttgatgatgagatcccagtgagaagatggggggcaacactgaccatttggtgctgagcgctggcctctgggttgcctcttgattaccccaagacagacacaaagggcagaaggtgcggtctcaacaagataccaggtgaattgttctgagtgttgatggcaacagcttggaagatgattgcatgcatcctcataatcatgtattcaatggactgtaatttatgatttttcaaaatcatgttacaagatagacatattctacttagacgttaaactgtacaagtgcgtacaatgtgaccttctctaaatgcggtagattcaaacaaagatgctctgtagacaagtagaattaaacctgcgaatccgtgtaaaaattcagtgaagacatgcactgctggcttctttattttttttttctttttattgaaacccagtcttcatttagttgctaaggcttttaatacattttgaatggcaccaaaacaaaataagtcaaaatggacagtcattttatttggaggaaatatttgaacaagtgtctccaatgtgttgtgttttgtcatgaaccttcattttcttcacttgtaattagagcttgctacgtgtttatggaactgaaagctcaacaggggagcaataaaccgagaaatcatgagaaatgtctaatcccatgggaaaacctgtatgccgattttcctcaagccatctcacaaaataagaatttcaaatgtaaatattgtgtatttgtgtgtgtatgtgtgtgtgtctaatttgatttacctcaggtgtttgagtctttgctgaagaatcctgggatgaagacttcattgggcatgaatgagtcaagtctctgaagcggtggccacttcttggacatcttgacccagcgagtggtctcctacacgtcacctgcaacactcgctcctcttctgtgtatttaagtcctgcattttgtaagaggcaaatggagagtaacagaagagtgtcttttctcctggttttggagtcttgcactggccatgagtgttgtgactgatggtcaacccaggcgggcattttaataaatggcctgtgattcttttttgaaagatgctcttccacaagagttaagccagttagaattcctgtttcctcttgttgatatgagagaagatctcctgtattttaacacgtttttaccaagaaaggtggcaaggtaaactaacagctcaaattcccaatataagtggaccagttcctcataaactgtcaaatgttcttaaatgtgtaatgatctatagatgctcatgaagaaagatctgctacaagtacgtgataaattcctatccctgggtgcatgtgcattcagaaatagctgtgagctttacagctctcatctaacttcttttatggaattcatgaagcaagtggtatgtgacaaggactccacttataaatataactgtttttatgttccactgaatccctgaaaatggtgaggagggtggggggaagtgaaggaaagacaagcagggctaattccaaaaagcaaggctagaaaatagccctgtgaggtcaagacaatttaatttatttacatgctgtctgttatcttcaagcagcacaaaatatgcatataaaagtgatggaattaatgtgaaataaaacaaaaatataatggctagaatacaaagctaatactgctaattggcatgagaattcaacataaaattgtgagctctgatttttcaaattgatcataaaacctttaggaaatgtatttgaaagctcaaaatagaaattaggttaaaatgccattttattgtgtaagctcttgggcattatacaacaaataatctaggatttatttggtattaataatttaggtgtcatattagctgaatactatcctctattacataacataatatactgttgggttagtgtcaatttctcaaactctcccaggctgccataatgcatgtctgacctaatttctatttctcttggaggaaaatacacacacacacacaccacagaagtgttgcattaagaatgctacatttcgaatagactttgcccttgcaattttaagctatgccatattcagattaattttgtgagtgatatctgcatatgtttctgtacagtgtgaaatgactgaccctgtagtatagtacgtgatagagttctacttgttaaagtaggttagatatagacactaatgtgtgtgatgatagtgtcctgtgtttcttagtgcaaatctgtagagtaaaaatgtccatagaacttttacttaaaaacaatcccatgctagagttgccattaagcagtgcaaaattaatcggctgtatggtagattcttgaccttaaatttaacaacaacaaccaaaatcagattttttttgtgagtcttactgacctaagaaacattgtttaaattgtttaaatggatctgcttgcagttatttgtgtacctgtttgttggggtgtgcattcttgtgtatgtgtgtgtgtgtgtgtgtgtgtgtgtgtgtgtgtgtgagagagagagagagagagagaatctcagtctcccagatagaattttataggcttaatgatgttttaatgttgcttggcatcccattgctctggcctcttctggcatttaccaatgacccttaacaaacacatctacccatgtgaccaaagtccactgacacaagaggccaggattcatacttgcacattaatgaaaagtcacaactggaaagcacagaaagagctgaaagcagcctccggtggcttcattttgtagatgagtccgttttgtaattctgcagaaagggggggatatgaacttcgcactgcagtgtcttcttgctccatcctaggtctgtctatatctctatctggctatgatcctttctagggttgatgaataccctttactgagtcaactattgctttaaagaattttttttgtaggtttatgtactcattttagttagcatctacctctctgggaaaatgaaaggagggttgacttagggatgagtatagatgttgaaagacaactatcaaaccatgtggtttgaatttttaaaattgtaaaacattggtgtccaaacctcccaccccacttgtatgtaaaggacagtgagtgttgtataaatagtaaactataagaagcatgaattttcatctttattaatgatcttgaaataaggaagagaatgcttaatatgttaagtagagccaagaatgctactaagaagcattgtctttggaaaaattttgtataatgacttggggcataagttgtgatgaaaaggcaacttggtttttggttccagtcatacttaatgatcagaaagctctaagatgttttctttaaaaatagaattaagtttaattttttgcatggcttacagattgggtcccttgaaggttaaaccatgtgatggtataacctgtgagatcttctagattggcactgttcaatagggctttctgtgatgatggaaatgctcgaaaacctgtgccgtctggtacggtagccaccaggcacattgacttttaggcagttaaaatggggttactacaagggaagaactggatttcaaattttatttaattttaattagcttaaatttaaatagccctatgtgtctagtggctgccatattgaacgatgcagttctgggtgatagcgcttggggatccagcatcaaggtattaatggagtaacagtgaggctaaggtgagagtttgtgggctagtgacatgcagttggcaaaaggcaaaacattcctttctgggcttaaaaagtatgtgatctcaagtatgacagtaaaaattcattgttgccctttggaactgttgcttatagattttaggccaaggaatgatcagtgaagcttaaagaatgctttattaagccccttttctgggatcattagctgcatgttaacctattgtccaaaaatagtagttagacagtacctgtaaaacgtttgacttgcaagctatgcatgatctgtactgtgaaattgtgtctagggtcttgtggccaaaaagtaaatgttacaggaaaaaaaaagcctaatgaaatccctgttcacttccagtatcctatccaaacttcattgctgtattagtaaggtgcaaatataagagcaagcatgttttgcagtgttcagactggttttgtttgcccttgaagttggccagcttgtcgttgtatttggtgtgggcatatgtgggcatcatttttcagatgccaaactaaaatgtaggtagtatttttagaatgagatttgacattgttttagtgtctttcttttttaagcaaaaatttcagttatccctgaaagagttgaagatttgaagctttgcacaaaagcactttttttaacagtaaaaaatactgcccatgaaatttaaagacttgaagtttactaaagctacaataattactttttagctaaataaaaggaagcagaaaattcagtttgagatatatttcctataaagaccagattcttactgataatctggtatttattccagtctagattttgattttaagagttcccatccctttatttgaaaacttatgttgtttcaaaattggttagtctgcttttcattgttttccaaatggaatatatacaaaatacatttacttcattttagcagaaatgggttgattttttttttctagaactcatcaatgtgcaagactttccttcttagcttgcctttaaaaatcatttaatttttttttttttgccaagatactaatctttctttagccttaataggaagatagaagttcaaaagttatcggtgcaaaaggagtgatacacaaaagacttcaatttctatcttttctcagaaaagtgatgctgcccaccagtcagcattttgtttccacataagaagtgtcaggtagtcagtctgtcatccctgacttagatagagaagctgttccttgacatttccatcattctcagtaaattgtcacctacaaggtaattcttaccaaaacagaaactattgagaataataagatagtcgagataattcagtagctgttttgaaagtagtagtctatttaaaaagcaacgatgttcagttgctggattttgttcaacatgagacacttatttatttatttatttatttatgagatggagttttgctcttggtgcccaggccagagtgcaatggcatgatctcagctcactgcaacctccgcctcccaggttcaagctattctcctgcctcagcctcctgagtagctgggattataggcatgcgcctccatgcccagctaattttgtattttttaaagtagagacggggtttctccatgttggtcaggctggtctccaacttctgacttcaggcgatccacccgcctcggcctcccaaagtgctgggattacaggcatgggccactgcacccagccaacatgaaacacttctaaaagataagtggaaattcaagccattgatttttctgacacaactgacttactacacacacacacacacacacaccacgatttagctgtaattggagttaaaattcagtaaaaaactgttattagtcatgttttccaatttgtgagttatacaatattggattagatgctaatttcttaactgttgctatgggctgcatacattatgtcaaactaactacctttgggagtgtctatataaacacttgaaacttttcaaatatatgaagaggtaggttctactgtatacattttattggaaagccattaatcattgaagaacttaagcaggtggggcatttaatttcttccaaataccttattttttggatctgctcaagtggttagggcgagtgcaccattattcccgaatccctgcaatttggttcccatttttctgcacaaattttcttgctcagtcgagccaatgactttttttttttttttttttttcaggattcactgcctggggtatcccactatatatatctcacctatgatgtagtggtgcttgaaatactcatctcattagctcgattttattattctaatctaaggttttttatattattcatactatgatatttttagggacaatcagtaatatttggggcagagtactgagggacctcttgaagtctgcaacagcatgcattttctttgtttttgtgggagtgcttccctgtagctgtctttgttctagaacactgctccaaatttatttccatgggatgtagggctagtagcccatgtgaaagtcttctgtaatctccttggggtgtgagttattgggttattctaacaggagttttccaaagggatggcccatttttaattcaacatttgctttttgaaaatccagaagtagacagttggatataatagtggtggaagagcatgggctgtaagcagaaggaaatagagatgacaaatgcctcttaaaggggatctagttgatacctctgttaaatagtgggagaacacagtagctggtaccttacactgtgctttaggaaaatcctatgaggatttcatttacaaatcctcataggattttctgggttgagggacaatgcaactattaagtagagggagagggagagggaaagggagacatgaagcactgggtctatgtgaagggacaggcagatatacccaaagagggagaaaatacttaataaaggaagagtatagctgcaaaacaagacatataggagctgaaggccagatatggcagaaaccagctggagaaagaagcacaggacaactaggacaacttagtcaagcacaatctgtcattccagtacggactaccaagttcaattcaggatgcttcagttgaagacatgtggggtaatgtgctcagctcatgagggtccaaggagtccccattttccctatcaccctatcctatgctcgtggtttggattgttagcacactaggcaatttcagagtccgctctagagttggttgccacgtcagtgcagacagactctagaatcctcttaaccatggaatgcaaggcctgttcctgtggatctatcctgacttgagtatgtcagtactgttgggaaaatgagttcaagaatatttcagtttatatatcctggttgccgtcatatattttttcatttcaccacttgtttgtgtttgcctcactcaacagtcatgggtgtagaagctggtttcagcttggggctgttacaaactccctacataagccatgtagctgcaatccagggttcctcccaccctacggctttagcggtgggttctctggccctcttgataacaaatactccagtctaatggctatattaatgctgctcagaggctattaactcaaatccttgatgtgtttcatttacaattatgtggattatttattttaggagctttttttttttttttttttttttttaagggccaaatagccctacagataaatgagctgctgggctgtgtagaaaatattgtccaaatgttgccaaatattgacttcgtaaaggggatatcaagctgctgtttataaatctgaatgtcttaaaagcattcttgcttgctctctctgttatagatggtgtcttagccagtcctgagttttccaatgaacccaattttaatatatggtatttttgtatgccaaactggtgtcttgtcctttgtatatgtggtaatgttgattttatgactaccgtaaaaacacatttgctatgattaaagttcataaaatgatttcaaataga

SEQ ID NO: 17879 - DNA, 682 bp, Homo sapiens
  source 1..682: mol_type = unassigned DNA
cgggcgcgccgggaccacccggcgatgctgtcgccgccgccgccgcctctgtagcgagcacccgagcccgccgcggagaaaggctgaagaaagctcagtctcaattgtgtttcctgcctgtcagcctcttgcctcctaaacgtgtaccatttccacttgatgtcatcacgcagaaggggtgaaagagactcggtgacagatacagaaatgaacacacctgtgagtactggatgcctgtgagcttgccattacctgcactgcaaagacacagggcggtggcctctgagaagcagctccttccccttcaccttggccttgcccttcctgctcacggtccaccatggagacgctgtcccaggactctctgctggaatgtcagatctgtttcaattactacagcccccggcgcaggcccaagttgctggactgcaagcacacctgctgttcagtgtgcctgcagcagatgaggaccagccagaaggatgtgcggtgcccctggtgccgcggtgtcaccaagctgcctcccggcttctccgtgtcgcagctcccggacgacccggaggtcctggctgtcatcgccattccacacacttccgaacacaccccggtcttcatcaaacttcccagcaatgggtgctacatgctgcccctgcccatctccaaggagcgtgcgctgctgccc

SEQ ID NO: 17880 - DNA, 549 bp, Homo sapiens
  source 1..549: mol_type = unassigned DNA
agttgcgcccccggcccgcacacaccccggctcatcttctcccggtccccttgtctcgcgccttctccagccctagaagttgccccagggcccctcccgggattagagagcgctgtgaagggccagatgttgggggtcttttgtgcagacacacgcgcctggggcgcttgctcctggaaggacagcggcaggacaaagccagctggactcgtggggcgctgctcgggaagcggcggtccccaatcccgcctggggtcggggcatggcttggggagcgctgcctgggtctggagagagtagagaaatcgccaaagcagagtgacggtgacttgatgaggctgaagaaagctcagtctcaattgtgtttcctgcctgtcagcctcttgcctcctaaacgtgtaccatttccacttgatgtcatcacgcagaaggggtgaaagagactcggtgacagatacagatcccatctctgaatccctgattccaactggaaatggcctttgctgcctccaacatcttgcagaccatggcatatcccaggggatggcc

SEQ ID NO: 17881 - DNA, 792 bp, Homo sapiens
  source 1..792: mol_type = unassigned DNA
cccattgtgacgtcatggaaaccggaaaggaagaaggtgttggttttcctgcttcttttcccatggcttcgagagttacactgtgtgatccagcagtctgactccatgattgaaatcacaattgggataaagttggtagagatgcttcttaatttacagtggggttatatcctcataaacccctcataagttaaaaatattgtaagtggaaaatgcatttaatacacctactgacatcatagctcagccttgtctgccttaactgtgcccagaaatgcgcattagcctacaatgggggcaaaatcatgtaacaagaagcctattttgtattaaagcatcaaatatctcatgtagtttattgaatactgtattgaaagtgaaaaacagattggtcgtataggcactcaaagtacggtttctactgaatgtgtattgttttcacaccattgtaaagtcaaaaaatcaaaggtcataggtcaaacagttgtaagtagggaaccgtctgtgcttgttacatgcttagggattttcaatttctaattgactcactgtcattgtaggatttaaagagggagacctcaaatagtgtatctgtgacctgcatctcctttgggtggttcttgatgtccatgatttcttggcctagatcacgtttggctgctaaggcctggactacgttcttcgtggagttgtgagggggctgcttgtgatcgcctaggagtggagaggatgccttatttaccccttgatatactaatgcctgcataaataaaactcattgcaaacatcctg

SEQ ID NO: 17882 - DNA, 457 bp, Homo sapiens
  source 1..457: mol_type = unassigned DNA
gtctggctgaaaggagcgggcgcgccgggaccacccggcgatgctgtcgccgccgccgccgcctctgtagcgagcacccgagcccgccgcggagaaaggctgaagaaagctcagtctcaattgtgtttcctgcctgtcagcctcttgcctcctaaacgtgtaccatttccacttgatgtcatcacgcagaaggggtgaaagagactcggtgacagatacagtgtggttggcaggtggaccctgctcatcgtagtcactcaaggactcaaactgatggagtcttggtcttgatgtgagcttgcaagatcattgcagcatcgggaaggaaatgctgcagggtcttgctctagcaattatgtgatcctacccagagatcacgtttggctgctaaggcctggactacgttcttcgtggagttgtgagggggctgcttgtgatcgcctaggagtggagagga

SEQ ID NO: 17883 - DNA, 5119 bp, Homo sapiens
  source 1..5119: mol_type = unassigned DNA
gagggccgccgggactcgcactcggcggttgttccagaagaaagagacagcgatggcggcagaggcttcgaagactgggccttctaggtcttcctaccagcgaatggggaggaagagtcagccctggggtgccgctgaaatccagtgcaccaggtgtggaaggagggtatccagatcatccggtcaccattgtgaacttcaatgtggacatgctttttgtgaactatgcttgttaatgactgaagaatgcaccacaattatatgccctgattgtgaggttgctacagctgtaaatactagacaacgctactacccaatggctggatatattaaggaagactccataatggaaaaactgcagcctaagacgataaagaattgttctcaggactttaagaagactgctgatcagctaactactggtttagaacgttcagcctccacagacaagactcttttgaactcatcagctgtaatgttggacactaatactgcagaagaaattgatgaagcattgaatacagcacaccatagtttcgaacagttaagcattgctggaaaagcacttgaacacatgcagaagcaaacgatagaggaaagagaaagagttatagaagttgtggagaaacagtttgaccaacttttggctttttttgattccaggaaaaagaacctgtgtgaagaatttgcaagaactactgatgattatctatcaaatttaataaaggctaaaagctacattgaagagaaaaaaaataatttgaatgcagctatgaacatagcaagagcattacaattatcgccttctctaagaacatactgtgacctgaatcagattatccggactttgcagttaacttcagatagtgaattagcacaagttagttctccacaactaaggaaccctcccaggttgagtgtgaattgcagtgagatcatctgtatgttcaacaatatgggaaagattgaatttagggactcaacaaaatgttatccccaagaaaatgaaattagacagaatgttcaaaagaaatataataacaaaaaggaactttcttgttacgatacatacccaccgctagaaaagaaaaaggttgacatgtctgtcctaaccagtgaagcaccaccacctcctttgcaacctgagacaaatgatgtacatttagaagcaaaaaacttccagccacagaaagacgttgcaacagcatcccctaaaaccattgctgtgttacctcagatgggatctagccctgatgtgataattgaagaaattattgaagacaacgtggaaagttctgcagagctagtttttgtaagccatgtaatagatccttgccatttctacattcggaagtattcacaaataaaagacgccaaagtactggagaagaaggtgaatgaattttgcaataggagttcacaccttgatccttcagacattttggaactaggtgcaagaatatttgtcagcagtattaaaaatggaatgtggtgtcgaggaactatcacagaattaattccaatagagggtagaaataccagaaaaccttgtagtccaaccagattatttgtccatgaagttgcactaatacaaatattcatggtagattttggaaattctgaagtcctgattgtcactggagttgttgatacccatgtgagaccagaacactctgctaagcaacatattgcactaaatgatttatgtctggttctaaggaaatctgaaccatatactgaagggctgctaaaagacatccagccattagcacaaccatgctcattgaaagacattgttccacagaattcaaatgaaggctgggaagaggaagctaaagtggaatttttgaaaatggtaaataacaaggctgtttcaatgaaagtttttagagaagaagatggtgtgcttattgtagatctgcaaaaaccaccaccgaataaaataagcagtgatatgcctgtgtctcttagagatgcgctagtttttatggaactagcaaagtttaagtcacaatcactaagaagtcactttgaaaaaaatactactttacactatcatccacctattttgcctaaagaaatgacagatgtttcagtaacggtttgtcatataaatagtcctggagatttctatcttcagttgatagagggcctggatattttatttctattaaagacaatcgaggaattctataaaagtgaagatggagaaaatctggaaatcctctgtccagttcaagatcaagcctgtgtagctaaatttgaagatggaatttggtaccgagcaaaagttatcggattgcctggacatcaggaagttgaagttaaatatgtggactttggtaatactgcaaaaataacaatcaaagacgtgcgtaaaataaaggatgagtttctgaatgccccagagaaggcaattaaatgtaagttggcctatattgaaccatataaaaggacaatgcagtggtccaaagaagctaaagaaaaatttgaagaaaaggctcaagataaatttatgacatgttcagttatcaaaattctggaagataatgtgctcttagttgagcttttcgattctcttggtgctcctgaaatgactactactagtattaatgaccagctagttaaagagggcctagcatcttatgaaataggatacatcctcaaagataattctcaaaagcatattgaagtttgggatccttctccagaagaaattatttcaaatgaagtacacaacttaaatcctgtgtctgcaaaatctctacctaatgagaattttcagtcactttataataaggaattgcctgtgcatatctgtaatgtaatatctcctgagaagatttatgttcagtggttgttaactgaaaacttacttaatagtttagaagaaaagatgatagctgcttatgaaaactcaaaatgggaacctgttaaatgggaaaatgatatgcactgtgctgttaagatccaagataaaaatcagtggcgaagaggccagatcatcagaatggttacagacacattggtagaggtcttgctgtatgatgtgggtgttgaactagtagtgaatgttgactgtttaagaaaacttgaagaaaatctaaagacaatgggaagactctctttggaatgttctctggttgacataagaccagctggtgggagtgacaagtggacagcaacagcttgtgactgtctttcattgtacctgactggagctgtagcaactataatcttacaggtggatagtgaggaaaacaacacaacatggccattacctgtgaaaattttctgcagagatgaaaaaggagagcgtgttgatgtttctaaatatttgattaaaaagggtttggctttgagagaaaggagaattaataacttagataacagccattcattatctgagaagtctctggaagtccccctggaacaggaagattcagtagttactaactgtattaaaactaactttgaccctgacaagaaaactgctgacataatcagtgaacagaaagtgtctgaatttcaggagaaaattctagaaccaagaaccactagagggtataagccaccagctattcctaacatgaacgtatttgaggcaacagtcagctgtgttggtgatgatggaactatatttgtagtacctaaactatcagaatttgagctaataaaaatgacaaatgaaattcaaagtaatttaaaatgccttggtcttttggagccttatttctggaaaaaaggagaagcatgtgcagtaagaggatccgatactctgtggtatcgtggcaaggtgatggaggttgtaggtggcgctgtcagagtacaatatttagatcatggattcactgaaaagattccgcagtgccatctttaccctattttgctgtatcctgatataccccagttttgtattccttgtcagctccataataccacacctgttgggaatgtctggcaaccagatgcaatagaagttcttcaacaactgctttcaaagagacaggtggacattcacattatggagttacctaaaaatccatgggagaaattgtctattcacctctattttgatggaatgtcactttcttattttatggcatactataaatactgtacttctgaacatactgaggagatgttgaaagaaaaaccaagatcagatcatgataaaaagtatgaagaggaacaatgggaaataaggtttgaggaattgctttcggctgaaacagacactcctcttttaccaccatatttgtcttcatctctgccttccccaggagaactctatgctgttcaagttaagcacgttgtctcacctaatgaagtgtatatttgccttgattctatagaaacttctaaccagtctaaccagcatagtgacacagatgatagtggagtcagcggggaatcagaatccgagagccttgatgaagcactgcagagggttaataagaaggtagaggcgcttcctcctctgacggattttagaacagaaatgccttgccttgcagaatatgatgatggcttatggtatagagcgaagattgttgccattaaagaatttaatcctttatctatcttagtacaatttgttgattatggatcaactgcaaagctgacattaaacagactgtgccaaattccttctcatcttatgcggtatccagctcgagccataaaggttctcttggcagggtttaaacctcccttaagggatctaggggagacaagaataccatattgtcccaaatggagcatggaggcactgtgggctatgatagactgtcttcaaggaaaacaactctatgctgtgtccatggctccagcaccagaacagatagtgacattatatgacgatgaacagcatccagttcatatgccgttggtagaaatggggcttgcagataaagatgaataagtgcctaagtgtatacagtgagagcatctatagaagcctagaagaattctgttatgtttagactatgtcttatctttagactatttcaggcttaattttcctaacttgttcagcactagtgctttacctctcatttttaattgaactgttaggaattgtgtggggaaaaaaagtaaataaatgttcgcttccaaa

SEQ ID NO: 17884 - DNA, 1490 bp, Homo sapiens
  source 1..1490: mol_type = unassigned DNA
gcgatggcggcagaggcttcgaagactgggccttctaggtcttcctaccagcgaatggggaggaagagtcagccctggggtgccgctgaaatccagtgcaccaggtgtggaaggagggtatccagatcatccggtcaccattgtgaacttcaatgtggacatgctttttgtgaactatgcttgttaatgactgaagaatgcaccacaattatatgccctgattgtgaggttgctacagctgtaaatactagacaacgctactacccaatggctggatatattaaggaagactccataatggaaaaactgcagcctaagacgataaagaattgttctcaggactttaagaagactgctgatcagctaactactggtttagaacgttcagcctccacagacaagactcttttgaactcatcagctgtaatgttggacactaatactgcagaagaaattgatgaagcattgaatacagcacaccatagtttcgaacagttaagcattgctggaaaagcacttgaacacatgcagaagcaaacgatagaggaaagagaaagagttatagaagttgtggagaaacagtttgaccaacttttggctttttttgattccaggaaaaagaacctgtgtgaagaatttgcaagaactactgatgattatctatcaaatttaataaaggctaaaagctacattgaagagaaaaaaaataatttgaatgcagctatgaacatagcaagagcattacaattatcgccttctctaagaacatactgtgacctgaatcagattatccggactttgcagttaacttcagatagtgaattagcacaagttagttctccacaactaaggaaccctcccaggttgagtgtgaattgcagtgagatcatctgtatgttcaacaatatgggaaagattgaatttagggactcaacaaaatgttatccccaagaaaatgaaattagacagaatgttcaaaagaaatataataacaaaaaggaactttcttgttacgatacatacccaccgctagaaaagaaaaaggttgacatgtctgtcctaaccagtgaagcaccaccacctcctttgcaacctgagacaaatgatgtacatttagaagcaaaaaacttccagccacagaaagacgttgcaacagcatcccctaaaaccattgctgtgttacctcagatgggatctagccctgatgtgataattgaagaaattattgaagacaacgtggaaacatgcggcacagatgatcttggggagacacctagatatccaaaaaagcctcttcagaaaaactcatctgttccttttggatcaaaagcagatactgtaacaactgtctgagcttgatgtagtggagtttactgtatgtgtagttctgcagagctagtttttgtaagccatgtaatagatccttgccatttctacattcggaagtattcacaaataaaagacgccaaagtactggagaagaaggtgaa

SEQ ID NO: 17885 - DNA, 2134 bp, Homo sapiens
  source 1..2134: mol_type = unassigned DNA
gcgatggcggcagaggcttcgaagactgggccttctaggtcttcctaccagcgaatggggaggaagagtcagccctggggtgccgctgaaatccagtgcaccaggtgtggaaggagggtatccagatcatccggtcaccattgtgaacttcaatgtggacatgctttttgtgaactatgcttgttaatgactgaagaatgcaccacaattatatgccctgattgtgaggttgctacagctgtaaatactagacaacgctactacccaatggctggatatattaaggaagactccataatggaaaaactgcagcctaagacgataaagaattgttctcaggactttaagaagactgctgatcagctaactactggtttagaacgttcagcctccacagacaagactcttttgaactcatcagctgtaatgttggacactaatactgcagaagaaattgatgaagcattgaatacagcacaccatagtttcgaacagttaagcattgctggaaaagcacttgaacacatgcagaagcaaacgatagaggaaagagaaagagttatagaagttgtggagaaacagtttgaccaacttttggctttttttgattccaggaaaaagaacctgtgtgaagaatttgcaagaactactgatgattatctatcaaatttaataaaggctaaaagctacattgaagagaaaaaaaataatttgaatgcagctatgaacatagcaagagcattacaattatcgccttctctaagaacatactgtgacctgaatcagattatccggactttgcagttaacttcagatagtgaattagcacaagttagttctccacaactaaggaaccctcccaggttgagtgtgaattgcagtgagatcatctgtatgttcaacaatatgggaaagattgaatttagggactcaacaaaatgttatccccaagaaaatgaaattagacagaatgttcaaaagaaatataataacaaaaaggaactttcttgttacgatacatacccaccgctagaaaagaaaaaggttgacatgtctgtcctaaccagtgaagcaccaccacctcctttgcaacctgagacaaatgatgtacatttagaagcaaaaaacttccagccacagaaagacgttgcaacagcatcccctaaaaccattgctgtgttacctcagatgggatctagccctgatgtgataattgaagaaattattgaagacaacgtggaaagttctgcagagctagtttttgtaagccatgtaatagatccttgccatttctacattcggaagtattcacaaataaaagacgccaaagtactggagaagaaggtgaatgaattttgcaataggagttcacaccttgatccttcagacattttggaactaggtgcaagaatatttgtcagcagtattaaaaatggaatgtggtgtcgaggaactatcacagaattaattccaatagagggtagaaataccagaaaaccttgtagtccaaccagattatttgtccatgaagttgcactaatacaaatattcatggtagattttggaaattctgaagtcctgattgtcactggagttgttgatacccatgtgagaccagaacactctgctaagcaacatattgcactaaatgatttatgtctggttctaaggaaatctgaaccatatactgaagggctgctaaaagacatccagccattagcacaaccatgctcattgaaagacattgttccacagaattcaaatgaaggctgggaagaggaagctaaagtggaatttttgaaaatggtaaataacaaggctgtttcaatgaaagtttttagagaagaagatggtgtgcttattgtagatctgcaaaaaccaccaccgaataaaataagcagtgatatgcctgtgtctcttagagatgcgctagtttttatggaactagcaaaagatctgatctaataaagttggttgagacactttctcattttttcaatgtttctgtattggaagaagaacttaaagcttcctaatctattttgttggcgtcattcctctgctgaatttttaaatgttcactctggcttacctgttaatggaagaatttgcataatatctacttagaaaggta

SEQ ID NO: 17886 - DNA, 2826 bp, Homo sapiens
  source 1..2826: mol_type = unassigned DNA
gctgacacagaccacagatatcaatgtaacacaaaaaatagaagcagctttgaatctaagtacgacatgaaagcctagctctaaagttttgagacttgatatcttatttaacctggtttgataattgaagacaataccaagaaatgttagaagaaagaaattggaagatgagcgcttttggtttaagtcacaatcactaagaagtcactttgaaaaaaatactactttacactatcatccacctattttgcctaaagaaatgacagatgtttcagtaacggtttgtcatataaatagtcctggagatttctatcttcagttgatagagggcctggatattttatttctattaaagacaatcgaggaattctataaaagtgaagatggagaaaatctggaaatcctctgtccagttcaagatcaagcctgtgtagctaaatttgaagatggaatttggtaccgagcaaaagttatcggattgcctggacatcaggaagttgaagttaaatatgtggactttggtaatactgcaaaaataacaatcaaagacgtgcgtaaaataaaggatgagtttctgaatgccccagagaaggcaattaaatgtaagttggcctatattgaaccatataaaaggacaatgcagtggtccaaagaagctaaagaaaaatttgaagaaaaggctcaagataaatttatgacatgttcagttatcaaaattctggaagataatgtgctcttagttgagcttttcgattctcttggtgctcctgaaatgactactactagtattaatgaccagctagttaaagagggcctagcatcttatgaaataggatacatcctcaaagataattctcaaaagcatattgaagtttgggatccttctccagaagaaattatttcaaatgaagtacacaacttaaatcctgtgtctgcaaaatctctacctaatgagaattttcagtcactttataataaggaattgcctgtgcatatctgtaatgtaatatctcctgagaagatttatgttcagtggttgttaactgaaaacttacttaatagtttagaagaaaagatgatagctgcttatgaaaactcaaaatgggaacctgttaaatgggaaaatgatatgcactgtgctgttaagatccaagataaaaatcagtggcgaagaggccagatcatcagaatggttacagacacattggtagaggtcttgctgtatgatgtgggtgttgaactagtagtgaatgttgactgtttaagaaaacttgaagaaaatctaaagacaatgggaagactctctttggaatgttctctggttgacataagaccagctggtgggagtgacaagtggacagcaacagcttgtgactgtctttcattgtacctgactggagctgtagcaactataatcttacaggtggatagtgaggaaaacaacacaacatggccattacctgtgaaaattttctgcagagatgaaaaaggagagcgtgttgatgtttctaaatatttgattaaaaagggtttggctttgagagaaaggagaattaataacttagataacagccattcattatctgagaagtctctggaagtccccctggaacaggaagattcagtagttactaactgtattaaaactaactttgaccctgacaagaaaactgctgacataatcagtgaacagaaagtgtctgaatttcaggagaaaattctagaaccaagaaccactagagggtataagccaccagctattcctaacatgaacgtatttgaggcaacagtcagctgtgttggtgatgatggaactatatttgtagtacctaaactatcagaatttgagctaataaaaatgacaaatgaaattcaaagtaatttaaaatgccttggtcttttggagccttatttctggaaaaaaggagaagcatgtgcagtaagaggatccgatactctgtggtatcgtggcaaggtgatggaggttgtaggtggcgctgtcagagtacaatatttagatcatggattcactgaaaagattccgcagtgccatctttaccctattttgctgtatcctgatataccccagttttgtattccttgtcagctccataataccacacctgttgggaatgtctggcaaccagatgcaatagaagttcttcaacaactgctttcaaagagacaggtggacattcacattatggagttacctaaaaatccatgggagaaattgtctattcacctctattttgatggaatgtcactttcttattttatggcatactataaatactgtacttctgaacatactgaggagatgttgaaagaaaaaccaagatcagatcatgataaaaagtatgaagaggaacaatgggaaataaggtttgaggaattgctttcggctgaaacagacactcctcttttaccaccatatttgtcttcatctctgccttccccaggagaactctatgctgttcaagttaagcacgttgtctcacctaatgaagtgtatatttgccttgattctatagaaacttctaaccagtctaaccagcatagtgacacagatgatagtggagtcagcggggaatcagaatccgagagccttgatgaagcactgcagagggttaataagaaggtagaggcgcttcctcctctgacggattttagaacagaaatgccttgccttgcagaatatgatgatggcttatggtatagagcgaagattgttgccattaaagaatttaatcctttatctatcttagtacaatttgttgattatggatcaactgcaaagctgacattaaacaggttaaaaataaa

SEQ ID NO: 17887 - DNA, 2203 bp, Homo sapiens
  source 1..2203: mol_type = unassigned DNA
ttataataaggaattgcctgtgcatatctgtaatgtaatatctcctgagaagatttatgttcagtggttgttaactgaaaacttacttaatagtttagaagaaaagatgatagctgcttatgaaaactcaaaatgggaacctgttaaatgggaaaatgatatgcactgtgctgttaagatccaagataaaaatcagtggcgaagaggccagatcatcagaatggttacagacacattggtagaggtcttgctgtatgatgtgggtgttgaactagtagtgaatgttgactgtttaagaaaacttgaagaaaatctaaagacaatgggaagactctctttggaatgttctctggttgacataagaccagctggtgggagtgacaagtggacagcaacagcttgtgactgtctttcattgtacctgactggagctgtagcaactataatcttacaggtggatagtgaggaaaacaacacaacatggccattacctgtgaaaattttctgcagagatgaaaaaggagagcgtgttgatgtttctaaatatttgattaaaaagggtttggctttgagagaaaggagaattaataacttagataacagccattcattatctgagaagtctctggaagtccccctggaacaggaagattcagtagttactaactgtattaaaactaactttgaccctgacaagaaaactgctgacataatcagtgaacagaaagtgtctgaatttcaggagaaaattctagaaccaagaaccactagagggtataagccaccagctattcctaacatgaacgtatttgaggcaacagtcagctgtgttggtgatgatggaactatatttgtagtacctaaactatcagaatttgagctaataaaaatgacaaatgaaattcaaagtaatttaaaatgccttggtcttttggagccttatttctggaaaaaaggagaagcatgtgcagtaagaggatccgatactctgtggtatcgtggcaaggtgatggaggttgtaggtggcgctgtcagagtacaatatttagatcatggattcactgaaaagattccgcagtgccatctttaccctattttgctgtatcctgatataccccagttttgtattccttgtcagctccataataccacacctgttgggaatgtctggcaaccagatgcaatagaagttcttcaacaactgctttcaaagagacaggtggacattcacattatgaaaccaagatcagatcatgataaaaagtatgaagaggaacaatgggaaataaggtttgaggaattgctttcggctgaaacagacactcctcttttaccaccatatttgtcttcatctctgccttccccaggagaactctatgctgttcaagttaagcacgttgtctcacctaatgaagtgtatatttgccttgattctatagaaacttctaaccagtctaaccagcatagtgacacagatgatagtggagtcagcggggaatcagaatccgagagccttgatgaagcactgcagagggttaataagaaggtagaggcgcttcctcctctgacggattttagaacagaaatgccttgccttgcagaatatgatgatggcttatggtatagagcgaagattgttgccattaaagaatttaatcctttatctatcttagtacaatttgttgattatggatcaactgcaaagctgacattaaacagactgtgccaaattccttctcatcttatgcggtatccagctcgagccataaaggttctcttggcagggtttaaacctcccttaagggatctaggggagacaagaataccatattgtcccaaatggagcatggaggcactgtgggctatgatagactgtcttcaaggaaaacaactctatgctgtgtccatggctccagcaccagaacagatagtgacattatatgacgatgaacagcatccagttcatatgccgttggtagaaatggggcttgcagataaagatgaataagtgcctaagtgtatacagtgagagcatctatagaagcctagaagaattctgttatgtttagactatgtcttatctttagactatttcaggcttaattttcctaacttgttcagcactagtgctttacctctcatttttaattgaactgttaggaattgtgtggggaaaaaaagtaaataaatgttcgcttccaaa

SEQ ID NO: 17888 - DNA, 646 bp, Homo sapiens
  source 1..646: mol_type = unassigned DNA
gtgcatgctgcggcagttgcaacaggagaaccgagtaccagttgctcaacactttatcactttgcattgctctttctcctcccttaagtgaatttccattttgagggtacagctccacaggagaaaggaagaaatacttgtgttggctgcatttccagggatgctaccagagctcaaggctgtcacctggtcttgcccagaagagccgttcttagaggcaggacttgatgaaggctttcctgctgatggaataggtttgctagagctggccttggaattagaacccttcatgtggcctttataaatatgcgtttgagacagagttatatgcagaagttgaaaatgcctggaagatttctggtttctttcactacttatcctgcctttttgcatcgctgccagatttggatgatatgatattcagaggggcaccttaatcaaagccattcttcaacaagacccacctggcataagattgcacacataattcaagatggccagtcaacctcctgaagacactgcggagtctcaggcctctgatgagctggagtgcaaaatctgttacaatcgatacaatctgaaacagaggaaacccaaagtgctggagtgttgtcatagggtttgtgccaaatgcctctacaagatc

SEQ ID NO: 17889 - DNA, 3706 bp, Homo sapiens
  source 1..3706: mol_type = unassigned DNA
gacgcagggtcggcggctcagcgccgtagagacaaagccgcccgcccgccagcccgctagctcctcgcgcgagctcctcctccacgggaacctccctcccctcccaggcgccgccgcagccggagcggctcccgggccctgggccgccgccggccaggaagaaatacttgtgttggctgcatttccagggatgctaccagagctcaaggctgtcacctggtcttgcccagaagagccgttcttagaggcaggacttgatgaaggctttcctgctgatggaataggtttgctagagctggccttggaattagaacccttcatgtggcctttataaatatgcgtttgagacagagttatatgcagaagttgaaaatgcctggaagatttctggtttctttcactacttatcctgcctttttgcatcgctgccagatttggatgatatgatattcagaggggcaccttaatcaaagccattcttcaacaagacccacctggcataagattgcacacataattcaagatggccagtcaacctcctgaagacactgcggagtctcaggcctctgatgagctggagtgcaaaatctgttacaatcgatacaatctgaaacagaggaaacccaaagtgctggagtgttgtcatagggtttgtgccaaatgcctctacaagatcatagactttggggactccccacaaggtgtcattgtctgtcctttctgcaggtttgagacgtgcctgccagatgatgaagttagtagcctgcccgatgacaacaacatccttgtaaacttgacttgtggaggcaaagggaagaagtgcctgccagagaaccctactgagctgctgctcacccccaagaggctggcctctctggtcagtccttctcacacgtcctccaactgcctggtcataaccatcatggaggtgcagagagagagctccccgtccctgagctccactcctgtggtagaattttataggcctgcgagtttcgactctgtcaccactgtgtcacacaactggactgtgtggaactgcacgtccctgctgtttcagacatccatccgggtgttagtgtggttgctaggtttgctctacttcagctccttacccttaggaatctacttactggtgtctaagaaagtcacccttggggtcgtctttgtcagcctggtcccttcgagcctcgttattcttatggtgtatggtttttgccagtgtgtttgtcatgaatttctagactgtatggcacctccttcttaactgatatgcaaaataagaaattggacacacattgccctgtttgagtgtgaagttagataatttataatttattttcttttatgttctttatgattagtatccatgacattaacaaaacccttggccacatgttgacttgattggttttcctgtaggctggaagtaaaaatgttcatttctacttaggggttagcaaaattgtataagctcacacttcatggagcactgacagcagtgagtcttcccagagaaaggacagggtttctctcagcactgccagacagacggcaggggtgtggtgtgttatactatagggagagcatggatccctcctttcgtattcatggatgttctatgatggcagttggacacaagaggaaagttgctctgagacacaaagtgtgtactcctttcccaccccatacccctggtattggaacaccctagaattgtcttcaggtgttttctctcttaagtcactctctgtggtcggcgatcccattgagatacttgtttcctctgcccattctcccttgccaagaggaaactcggttccattcccttgggtagtttcaactgaataccagttttgccacattactaaggagaatgaaaagcactgaggaatttgcatcacagtcagcttcatggcagaatgtggccatttgtccttgagacacactctttcctccatgtctgttttcctctctcctcagtcttatctgagaagaatggaggagaaggaacttctcatacagcggttattattgatgaaaaccttcatttgagtctttccttataacatcttagttttggtttttttaaaccacattgcccaatcagcctcaccccttgtcctgaaaaggttccatttaaattagttgctataaattcatcaatactttttttccctattatatttttggttctattaggatttacttaactgaatcttataacaattcgaggtgaactgtggcaatgaaaaccagaaacagttaatgagatgcttcagctcacagtttgaagtgctgagaacctaagtattttgctgtacggtactgagctgtaccaaaatatgatggtttaggtttatgtgcaagactttgtgttgtagtctagacaaaggggtgggcaagagacatgcaaagctgaagccctgcttgaaaagacccttcaaggaagtaaaatggcaggggcagagtgcagcttaacatgttgctatccctgttgtttttgagttggttttggaatggattcaagttcttacacaatttattttgaatacaagcataatctaggtgatttgagttaatgaacttcttttcatgatgtagggaaagttgaatgtatatatttctaagaagaatttgtttagcagattacaagttggcaaaatagactgttcacagaaactaggcaaaaatttaaaaaaacattctagtctctaaaacccattactaatgattaacattaaaatatttgtaactcttagaaagggggcattactaagacgactttaacttgttatgaaatctttgttgtgtgatgcaggtacagtgcgcccattccaactggaatagcagtttgattttaattgtaaaactaaacttcgggaatatgtatgcccaaagtaagtaggatgagaatagtatacatgggatatggtccaatgaatttaagccccaagatacagctaaatacatttatgatttcataaaatctagtttagatagcattgtgatgcaatttccagaaatccatttgtgtttagagtaaataccatgtttagaagatgttttgtggtttggatttatatatttgtaaggtttttttaaaaaaatgttcgttttgtttgaaatgtaacattgagtaaattggtgagttatataatgagatttctagaaagctctggacatgggtacgatgtgttttgcttctctgtataatgtctacagtgataaacttgtgtctccgtgtattgtggcagtctttttttctagttaatttggctttagagagcaatctttgtatgacaccagaaaactcttcatgctattgaatgataaaaagataatgctttaatattttattcactgtgatactattttgtttgtctattaaattgttattatttccaaatttagaagtttgatttctctgacttatggttaaaattcagttatgactttgcacctctgttagctttagataacggcaaacatgaacattcagaaacgttggttcagctaatgcctttatcatgcccgtgaagacttcagaactttccaacaaaggggacctaacccatcacacttttaaaaggccttcatagtttttttattttattttattttattttattttattttattttatttatttattttaaagcaggggagaaaaattaggggagatgaaataaaaatatcgtcttta

SEQ ID NO: 17890 - DNA, 826 bp, Homo sapiens
  source 1..826: mol_type = unassigned DNA
agacaaagccgcccgcccgccagcccgctagctcctcgcgcgagctcctcctccacgggaacctccctcccctcccaggcgccgccgcagccggagcggctcccgggccctgggccgccgccggccagacccttcatgtggcctttataaatatgcgtttgagacagagttatatgcagaagttgaaaatgcctggaagatttctggtttctttcactacttatcctgcctttttgcatcgctgccagatttggatgatatgatattcagaggggcaccttaatcaaagccattcttcaacaagacccacctggcataagattgcacacataattcaagatggccagtcaacctcctgaagacactgcggagtctcaggcctctgatgagctggagtgcaaaatctgttacaatcgatacaatctgaaacagaggaaacccaaagtgctggagtgttgtcatagggtttgtgccaaatgcctctacaagatcatagactttggggactccccacaaggtgtcattgtctgtcctttctgcaggtttgagacgtgcctgccagatgatgaagttagtagcctgcccgatgacaacaacatccttgtaaacttgacttgtggaggcaaagggaagaagtgcctgccagagaaccctactgagctgctgctcacccccaagaggctggcctctctggtcagtccttctcacacgtcctccaactgcctggtcataaccatcatggaggtgcagagagagagctccccgtccctgagctccactcctgtggtagaattttataggcctgcgagtttcgactctgtcacca

SEQ ID NO: 17891 - DNA, 557 bp, Homo sapiens
  source 1..557: mol_type = unassigned DNA
aacctccctcccctcccaggcgccgccgcagccggagcggctcccgggccctgggccgccgccggccagactgcctgcaagggatggtcatactcctggctgcacttccagagtcttgaagaagaaagcagatgtggatacctaaatatagggaagaaatacttgtgttggctgcatttccagggatgctaccagagctcaaggctgtcacctggtcttgcccagaagagccgttcttagaggcaggacttgatgaaggctttcctgctgatggaataggtttgctagagctggccttggaattagaacccttcatgtggcctttataaatatgcgtttgagacagagttatatgcagaagttgaaaatgcctggaagatttctggtttctttcactacttatcctgcctttttgcatcgctgccagatttggatgatatgatattcagaggggcaccttaatcaaagccattcttcaacaagacccacctggcataagattgcacacataattcaagatggccagtcaacctcctgaagacactgcggagtctcag

SEQ ID NO: 17892 - DNA, 633 bp, Homo sapiens
  source 1..633: mol_type = unassigned DNA
gtctccctccgggcaccacgggggccgccgtcctggcaccaacttgaggggctgtgcggcggagggcggctgcggagcgcccgcgcgggctgcacctgctcagggagctgcccctctgttgttgttgttattttccttcttggcgtgccatcgaggcttttgggggaaaaaaagacccttcatgtggcctttataaatatgcgtttgagacagagttatatgcagaagttgaaaatgcctggaagatttctggtttctttcactacttatcctgcctttttgcatcgctgccagatttggatgatatgatattcagaggggcaccttaatcaaagccattcttcaacaagacccacctggcataagattgcacacataattcaagatggccagtcaacctcctgaagacactgcggagtctcaggcctctgatgagctggagtgcaaaatctgttacaatcgatacaatctgaaacagaggaaacccaaagtgctggagtgttgtcatagggtttgtgccaaatgcctctacaagatcatagactttggggactccccacaaggtgtcattgtctgtcctttctgcaggtttgagacgtgcctgccagatgatgaagttagtagcctgcccga

SEQ ID NO: 17893 - DNA, 3382 bp, Homo sapiens
  source 1..3382: mol_type = unassigned DNA
gtgcatgctgcggcagttgcaacaggagaaccgagtaccagttgctcaacactttatcactttgcattgctctttctcctcccttaagtgaatttccattttgagggtacagctccacaggagaaaggaagaaatacttgtgttggctgcatttccagggatgctaccagagctcaaggctgtcacctggtcttgcccagaagagccgttcttagaggcaggacttgatgaaggctttcctgctgatggaataggtttgctagagctggccttggaattagaacccttcatgtggcctttataaatatgcgtttgagacagagttatatgcagaagttgaaaatgcctggaagatttctggtttctttcactacttatcctgcctttttgcatcgctgccagatttggatgatatgatattcagaggggcaccttaatcaaagccattcttcaacaagacccacctggcataagattgcacacataattcaagatggccagtcaacctcctgaagacactgcggagtctcaggcctctgatgagctggagtgcaaaatctgttacaatcgatacaatctgaaacagaggaaacccaaagtgctggagtgttgtcatagggtttgtgccaaatgcctctacaagatcatagactttggggactccccacaaggtgtcattgtctgtcctttctgcaggtttgagacgtgcctgccagatgatgaagttagtagcctgcccgatgacaacaacatccttgtaaacttgacttgtggaggcaaagggaagaagtgcctgccagagaaccctactgagctgctgctcacccccaagaggctggcctctctggtcagtccttctcacacgtcctccaactgcctggtcataaccatcatggaggtgcagagagagagctccccgtccctgagctccactcctgtggtagaattttataggcctgcgagtttcgactctgtcaccactgtgtcacacaactggactgtgtggaactgcacgtccctgctgtttcagacatccatccgggtgttagtgtggttgctaggtttgctctacttcagctccttacccttaggaatctacttactggtgtctaagaaagtcacccttggggtcgtctttgtcagcctggtcccttcgagcctcgttattcttatggtgtatggtttttgccagtgtgtttgtcatgaatttctagactgtatggcacctccttcttaactgatatgcaaaataagaaattggacacacattgccctgtttgagtgtgaagttagataatttataatttattttcttttatgttctttatgattagtatccatgacattaacaaaacccttggccacatgttgacttgattggttttcctgtaggctggaagtaaaaatgttcatttctacttaggggttagcaaaattgtataagctcacacttcatggagcactgacagcagtgagtcttcccagagaaaggacagggtttctctcagcactgccagacagacggcaggggtgtggtgtgttatactatagggagagcatggatccctcctttcgtattcatggatgttctatgatggcagttggacacaagaggaaagttgctctgagacacaaagtgtgtactcctttcccaccccatacccctggtattggaacaccctagaattgtcttcaggtgttttctctcttaagtcactctctgtggtcggcgatcccattgagatacttgtttcctctgcccattctcccttgccaagaggaaactcggttccattcccttgggtagtttcaactgaataccagttttgccacattactaaggagaatgaaaagcactgaggaatttgcatcacagtcagcttcatggcagaatgtggccatttgtccttgagacacactctttcctccatgtctgttttcctctctcctcagtcttatctgagaagaatggaggagaaggaacttctcatacagcggttattattgatgaaaaccttcatttgagtctttccttataacatcttagttttggtttttttaaaccacattgcccaatcagcctcaccccttgtcctgaaaaggttccatttaaattagttgctataaattcatcaatactttttttccctattatatttttggttctattaggatttacttaactgaatcttataacaattcgaggtgaactgtggcaatgaaaaccagaaacagttaatgagatgcttcagctcacagtttgaagtgctgagaacctaagtattttgctgtacggtactgagctgtaccaaaatatgatggtttaggtttatgtgcaagactttgtgttgtagtctagacaaaggggtgggcaagagacatgcaaagctgaagccctgcttgaaaagacccttcaaggaagtaaaatggcaggggcagagtgcagcttaacatgttgctatccctgttgtttttgagttggttttggaatggattcaagttcttacacaatttattttgaatacaagcataatctaggtgatttgagttaatgaacttcttttcatgatgtagggaaagttgaatgtatatatttctaagaagaatttgtttagcagattacaagttggcaaaatagactgttcacagaaactaggcaaaaatttaaaaaaacattctagtctctaaaacccattactaatgattaacattaaaatatttgtaactcttagaaagggggcattactaagacgactttaacttgttatgaaatctttgttgtgtgatgcaggtacagtgcgcccattccaactggaatagcagtttgattttaattgtaaaactaaacttcgggaatatgtatgcccaaagtaagtaggatgagaatagtatacatgggatatggtccaatgaatttaagccccaagatacagctaaatacatttatgatttcataaaatctagtttagatagcattgtgatgcaatttccagaaatccatttgtgtttagagtaaataccatgtttagaagatgttttgtggtttggatttatatatttgtaaggtttttttaaaaaaatgttcgttttgtttgaaatgtaacattgagtaaattggtgagttatataatgagatttctagaaagctctggacatgggtacgatgtgttttgcttctctgtataatgtctacagtgataaacttgtgtctccgtgtattgtggcagtctttttttctagttaatttggctttagagagcaatctttgtatgacaccagaaaactcttcatgctattgaatgataaaaagataatgctttaatattttattcactgtgatactattttgtttgtctattaaattgttattatttccaaattt

SEQ ID NO: 17894 - DNA, 3495 bp, Homo sapiens
  source 1..3495: mol_type = unassigned DNA
gacgcagggtcggcggctcagcgccgtagagacaaagccgcccgcccgccagcccgctagctcctcgcgcgagctcctcctccacgggaacctccctcccctcccaggcgccgccgcagccggagcggctcccgggccctgggccgccgccggccagactgcctgcaagggatggtcatactcctggctgcacttccagagtcttgaagaagaaagcagatgtggatacctaaatatagggaagaaatacttgtgttggctgcatttccagggatgctaccagagctcaaggctgtcacctggtcttgcccagaagagccgttcttagaggcaggacttgatgaaggctttcctgctgatggaataggtttgctagagctggccttggaattagaacccttcatgtggcctttataaatatgcgtttgagacagagttatatgcagaagttgaaaatgcctggaagatttctggtttctttcactacttatcctgcctttttgcatcgctgccagatttggatgatatgatattcagaggggcaccttaatcaaagccattcttcaacaagacccacctggcataagattgcacacataattcaagatggccagtcaacctcctgaagacactgcggagtctcaggcctctgatgagctggagtgcaaaatctgttacaatcgatacaatctgaaacagaggaaacccaaagtgctggagtgttgtcatagggtttgtgccaaatgcctctacaagatcatagactttggggactccccacaaggtgtcattgtctgtcctttctgcaggtttgagacgtgcctgccagatgatgaagttagtagcctgcccgatgacaacaacatccttgtaaacttgacttgtggaggcaaagggaagaagtgcctgccagagaaccctactgagctgctgctcacccccaagaggctggcctctctggtcagtccttctcacacgtcctccaactgcctggtcataaccatcatggaggtgcagagagagagctccccgtccctgagctccactcctgtggtagaattttataggcctgcgagtttcgactctgtcaccactgtgtcacacaactggactgtgtggaactgcacgtccctgctgtttcagacatccatccgggtgttagtgtggttgctaggtttgctctacttcagctccttacccttaggaatctacttactggtgtctaagaaagtcacccttggggtcgtctttgtcagcctggtcccttcgagcctcgttattcttatggtgtatggtttttgccagtgtgtttgtcatgaatttctagactgtatggcacctccttcttaactgatatgcaaaataagaaattggacacacattgccctgtttgagtgtgaagttagataatttataatttattttcttttatgttctttatgattagtatccatgacattaacaaaacccttggccacatgttgacttgattggttttcctgtaggctggaagtaaaaatgttcatttctacttaggggttagcaaaattgtataagctcacacttcatggagcactgacagcagtgagtcttcccagagaaaggacagggtttctctcagcactgccagacagacggcaggggtgtggtgtgttatactatagggagagcatggatccctcctttcgtattcatggatgttctatgatggcagttggacacaagaggaaagttgctctgagacacaaagtgtgtactcctttcccaccccatacccctggtattggaacaccctagaattgtcttcaggtgttttctctcttaagtcactctctgtggtcggcgatcccattgagatacttgtttcctctgcccattctcccttgccaagaggaaactcggttccattcccttgggtagtttcaactgaataccagttttgccacattactaaggagaatgaaaagcactgaggaatttgcatcacagtcagcttcatggcagaatgtggccatttgtccttgagacacactctttcctccatgtctgttttcctctctcctcagtcttatctgagaagaatggaggagaaggaacttctcatacagcggttattattgatgaaaaccttcatttgagtctttccttataacatcttagttttggtttttttaaaccacattgcccaatcagcctcaccccttgtcctgaaaaggttccatttaaattagttgctataaattcatcaatactttttttccctattatatttttggttctattaggatttacttaactgaatcttataacaattcgaggtgaactgtggcaatgaaaaccagaaacagttaatgagatgcttcagctcacagtttgaagtgctgagaacctaagtattttgctgtacggtactgagctgtaccaaaatatgatggtttaggtttatgtgcaagactttgtgttgtagtctagacaaaggggtgggcaagagacatgcaaagctgaagccctgcttgaaaagacccttcaaggaagtaaaatggcaggggcagagtgcagcttaacatgttgctatccctgttgtttttgagttggttttggaatggattcaagttcttacacaatttattttgaatacaagcataatctaggtgatttgagttaatgaacttcttttcatgatgtagggaaagttgaatgtatatatttctaagaagaatttgtttagcagattacaagttggcaaaatagactgttcacagaaactaggcaaaaatttaaaaaaacattctagtctctaaaacccattactaatgattaacattaaaatatttgtaactcttagaaagggggcattactaagacgactttaacttgttatgaaatctttgttgtgtgatgcaggtacagtgcgcccattccaactggaatagcagtttgattttaattgtaaaactaaacttcgggaatatgtatgcccaaagtaagtaggatgagaatagtatacatgggatatggtccaatgaatttaagccccaagatacagctaaatacatttatgatttcataaaatctagtttagatagcattgtgatgcaatttccagaaatccatttgtgtttagagtaaataccatgtttagaagatgttttgtggtttggatttatatatttgtaaggtttttttaaaaaaatgttcgttttgtttgaaatgtaacattgagtaaattggtgagttatataatgagatttctagaaagctctggacatgggtacgatgtgttttgcttctctgtataatgtctacagtgataaacttgtgtctccgtgtattgtggcagtctttttttctagttaatttggctttagagagcaatctttgtatgacaccagaaaactcttcatgctattgaatgataaaaagataatgctttaatattttattcactgtgatactattttgtttgtctattaaattgttattatttccaaattt

SEQ ID NO: 17895 - DNA, 3274 bp, Homo sapiens
  source 1..3274: mol_type = unassigned DNA
gtctccctccgggcaccacgggggccgccgtcctggcaccaacttgaggggctgtgcggcggagggcggctgcggagcgcccgcgcgggctgcacctgctcagggagctgcccctctgttgttgttgttattttccttcttggcgtgccatcgaggcttttgggggaaaaaaagacccttcatgtggcctttataaatatgcgtttgagacagagttatatgcagaagttgaaaatgcctggaagatttctggtttctttcactacttatcctgcctttttgcatcgctgccagatttggatgatatgatattcagaggggcaccttaatcaaagccattcttcaacaagacccacctggcataagattgcacacataattcaagatggccagtcaacctcctgaagacactgcggagtctcaggcctctgatgagctggagtgcaaaatctgttacaatcgatacaatctgaaacagaggaaacccaaagtgctggagtgttgtcatagggtttgtgccaaatgcctctacaagatcatagactttggggactccccacaaggtgtcattgtctgtcctttctgcaggtttgagacgtgcctgccagatgatgaagttagtagcctgcccgatgacaacaacatccttgtaaacttgacttgtggaggcaaagggaagaagtgcctgccagagaaccctactgagctgctgctcacccccaagaggctggcctctctggtcagtccttctcacacgtcctccaactgcctggtcataaccatcatggaggtgcagagagagagctccccgtccctgagctccactcctgtggtagaattttataggcctgcgagtttcgactctgtcaccactgtgtcacacaactggactgtgtggaactgcacgtccctgctgtttcagacatccatccgggtgttagtgtggttgctaggtttgctctacttcagctccttacccttaggaatctacttactggtgtctaagaaagtcacccttggggtcgtctttgtcagcctggtcccttcgagcctcgttattcttatggtgtatggtttttgccagtgtgtttgtcatgaatttctagactgtatggcacctccttcttaactgatatgcaaaataagaaattggacacacattgccctgtttgagtgtgaagttagataatttataatttattttcttttatgttctttatgattagtatccatgacattaacaaaacccttggccacatgttgacttgattggttttcctgtaggctggaagtaaaaatgttcatttctacttaggggttagcaaaattgtataagctcacacttcatggagcactgacagcagtgagtcttcccagagaaaggacagggtttctctcagcactgccagacagacggcaggggtgtggtgtgttatactatagggagagcatggatccctcctttcgtattcatggatgttctatgatggcagttggacacaagaggaaagttgctctgagacacaaagtgtgtactcctttcccaccccatacccctggtattggaacaccctagaattgtcttcaggtgttttctctcttaagtcactctctgtggtcggcgatcccattgagatacttgtttcctctgcccattctcccttgccaagaggaaactcggttccattcccttgggtagtttcaactgaataccagttttgccacattactaaggagaatgaaaagcactgaggaatttgcatcacagtcagcttcatggcagaatgtggccatttgtccttgagacacactctttcctccatgtctgttttcctctctcctcagtcttatctgagaagaatggaggagaaggaacttctcatacagcggttattattgatgaaaaccttcatttgagtctttccttataacatcttagttttggtttttttaaaccacattgcccaatcagcctcaccccttgtcctgaaaaggttccatttaaattagttgctataaattcatcaatactttttttccctattatatttttggttctattaggatttacttaactgaatcttataacaattcgaggtgaactgtggcaatgaaaaccagaaacagttaatgagatgcttcagctcacagtttgaagtgctgagaacctaagtattttgctgtacggtactgagctgtaccaaaatatgatggtttaggtttatgtgcaagactttgtgttgtagtctagacaaaggggtgggcaagagacatgcaaagctgaagccctgcttgaaaagacccttcaaggaagtaaaatggcaggggcagagtgcagcttaacatgttgctatccctgttgtttttgagttggttttggaatggattcaagttcttacacaatttattttgaatacaagcataatctaggtgatttgagttaatgaacttcttttcatgatgtagggaaagttgaatgtatatatttctaagaagaatttgtttagcagattacaagttggcaaaatagactgttcacagaaactaggcaaaaatttaaaaaaacattctagtctctaaaacccattactaatgattaacattaaaatatttgtaactcttagaaagggggcattactaagacgactttaacttgttatgaaatctttgttgtgtgatgcaggtacagtgcgcccattccaactggaatagcagtttgattttaattgtaaaactaaacttcgggaatatgtatgcccaaagtaagtaggatgagaatagtatacatgggatatggtccaatgaatttaagccccaagatacagctaaatacatttatgatttcataaaatctagtttagatagcattgtgatgcaatttccagaaatccatttgtgtttagagtaaataccatgtttagaagatgttttgtggtttggatttatatatttgtaaggtttttttaaaaaaatgttcgttttgtttgaaatgtaacattgagtaaattggtgagttatataatgagatttctagaaagctctggacatgggtacgatgtgttttgcttctctgtataatgtctacagtgataaacttgtgtctccgtgtattgtggcagtctttttttctagttaatttggctttagagagcaatctttgtatgacaccagaaaactcttcatgctattgaatgataaaaagataatgctttaatattttattcactgtgatactattttgtttgtctattaaattgttattatttccaaattt

SEQ ID NO: 17896 - DNA, 1854 bp, Homo sapiens
  source 1..1854: mol_type = unassigned DNA
actcttttttttttttaagacagtctggctctgtagcccaggctggagtgcagtggcgcgatctcggctcactgcaacctccgcctcccgggttcaagcagttctgcctcagcctcccgaagggcgccaccatgcctggctaatttttgcatttttagtagagacagggtttcgccatgttggccaggctggtctcgaactcctgacctcaagctatctgcccgcctcggcctcccagagtgccgagattacaggcgtgagccaccgcgcccggcctacccttgaagaccccgcagccaaggtcctccggccccgctctgcgcggcgctctggtcttggggctccggactctgtcatgccgggcaggggccagtccgatccttgcacccttgcctggcaccgtccctggagccttggcgtcctggcctctcctccccgcgggctggaggtggagtggccgggccggaaccagtgcgcaaagcagatggcgagcgcggaggtcggttcggccccgccgcgcctcaaggcagcagccaccctggggaaggtggatgccggaagaggcgtcgcctgcgggtcacccagaggacacccggcggggaattccgagggtgggagtgaggagagagcgaccgcgcggtgtctcagagcgcggcccggagccgcactaagagcgctggacggcgggagagaggctcggaggaccggtagctcccagcaaagcggcccagcggatgtcgggagctatcttcgggcccctggagggcccgagctccctggatgccccgagcatccacccgctggtgtgcccgctgtgccacgtgcagtacgagcgcccgtgtcttctggactgtttccacgacttctgtgccggctgcctgcgtggccgcgcgaccgacggccgcctcacctgcccgctgtgccaacaccagacggtgctgaagggtcccagcgggctcccgccggtggaccggctgctgcagttcctggtggacagctcaggggatggcgtggaggcggtgcgctgtgccaactgtgacctggagtgcagcgagcaggcaggggcggcagggcgggtgggtgaggagcagagggtacccggttgcacagtccccaatgcttgcacatgcactcagcatgtcttcagaggacgacctggcagtggattctccagcacctccctagggcaccttggccccaaatgtgaaccccattataccggtggggagactgaggtccagaacaagggacttgagccagtgtccagacagtggcagaggctaaggccattcgatctggggagagctcactggtccccaattcagggtggagttgtggacctgcacaggaggggcagtccagtttgcaggcctgggccgaccctgaagggcctctgctacccaagtggcatagaagcagctacagcccaggggaggtggggacagcatgctgttccctctgggctgtaaaaggcacaggggactctggcctgcggaggccagaaaatgtatcgggaatcccaggaggacggcccgactggggcaaaagctccagcgttctggacaagtgctgagcaatgtgtgacccagacgtacagagaggattagcaggaggtagggactgcaggtagggcctgttatgtccatcattgcatgcgtccataccagggctgcaggccaagccctggaatcccagccctgggtctggcttggggaggagaaccttaaagccctcactgctcttcccctccccccgcccccaagtgtgactccagatggccagggtgtacaccacctttcggccactattgagtgtgccaagggggccgtgagaggccctcacacccttttgttg

SEQ ID NO: 17897 - DNA, 551 bp, Homo sapiens
  source 1..551: mol_type = unassigned DNA
cccgcgcagagtgggaaccatcgcccggtgcgggcctgaacttccagggccggctactcctcggcagagcgaccgcgcggtgtctcagagcgcggcccggagccgcactaagagcgctggacggcgggagagaggctcggaggaccggtagctcccagcaaagcggcccagcggatgtcgggagctatcttcgggcccctggagggcccgagctccctggatgccccgagcatccacccgctggtgtgcccgctgtgccacgtgcagtacgagcgcccgtgtcttctggactgtttccacgacttctgtgccggctgcctgcgtggccgcgcgaccgacggccgcctcacctgcccgctgtgccaacaccagacggtgctgaagggtcccagcgggctcccgccggtggaccggctgctgcagttcctggtggacagctcaggggatggcgtggaggcggtgcgctgtgccaactgtgacctggagtgcagcgagcaggcaggggcggcagggcgggtgggtgaggagcagagggtacccggttgcacagt

SEQ ID NO: 17898 - DNA, 3924 bp, Homo sapiens
  source 1..3924: mol_type = unassigned DNA
ggccggctactcctcggcagagcgaccgcgcggtgtctcagagcgcggcccggagccgcactaagagcgctggacggcgggagagaggctcggaggaccggtagctcccagcaaagcggcccagcggatgtcgggagctatcttcgggcccctggagggcccgagctccctggatgccccgagcatccacccgctggtgtgcccgctgtgccacgtgcagtacgagcgcccgtgtcttctggactgtttccacgacttctgtgccggctgcctgcgtggccgcgcgaccgacggccgcctcacctgcccgctgtgccaacaccagacggtgctgaagggtcccagcgggctcccgccggtggaccggctgctgcagttcctggtggacagctcaggggatggcgtggaggcggtgcgctgtgccaactgtgacctggagtgcagcgagcaggacgtggagaccacgtacttctgcaacacgtgcggacagcccctatgcgcgcgctgccgcgacgagacgcaccgagcacgcatgttcgcgcgccacgacatcgtggccctgggtcagcgaagccgcgacgtgccccagaagtgcacgctgcacgcagagccctacctcttgttctccaccgacaagaagttgctgttgtgcatccgctgcttccgcgacatgcagaaggagagccgggcacactgcgtggacctggaatcggcttacgtgcagggctgcgagcggctggagcaggcggtgctggccgtgaaggccctgcagacggccacgcgggaggccatcgcgctgctgcaggccatggtggaggaggtgcggcacagcgccgccgaggaggaggacgctatccacgccctcttcggcagcatgcaggacaggctggcagagaggaaagcgctgctgctgcaggctgtgcagagccaatacgaagagaaggacaaggccttcaaggagcagctctctcacttggccaccttgctgcccaccctgcaggtccacctggtcatctgctcctccttcctcagcttggccaacaaggctgagttcctggacctgggctatgagctgatggagaggctgcagggcatcgtcacgcggccgcaccacctaaggcctattcagagcagcaagattgccagtgaccaccgagctgaattcgcgcgctgtctggagccactgctgctgctggggccacgtcgggtggcagctgctgcaagtggtgctaacacgctggcagggggcttaggccccaaggcgctgacggggccccactgcccctccccagtaggaaagatgtcggggtcacccgtccaaaagcccacgctgcaccggtccatcagcaccaaggtgctgctggcggagggcgagaacacgcccttcgcagagcactgccgccactatgaggactcctaccggcacctgcaggcagagatgcagagcctaaaggaccaggtacaggagctgcaccgagacctcaccaagcaccactcgctcatcaaggcggagatcatgggagacgtcctgcacaagtccctgcaactggacgtgcagatcgcctcggagcacgcctccttagagggcatgagggtcgtcttccaggagatttgggaggaagcctatcagcgagtggctaatgagcaggagatttatgaagcccagctccatgaccttctccagctgaggcaggagaatgcctacctgaccaccatcaccaagcagatcacgccctacgtccgctccattgccaaggtgaaggagcggctggagcccaggtttcaggcacccgtggatgagcagtcagagagtctacagaacacgcacgacgacagcaggaacaacgcggcctcagccaggaataatccaggaagtgtcccggaaaagagagagaagacatcagagcctaaaggaaacagctgggctccgaacggcctctcagaagagcctctactgaaaaatatggatcatcacagatccaaacagaaaaatgggggcgatgtccccacatggagggaacacccgacttagcaaatgggaccggtccccagggtcaggctcttagagcaggcacaagactgggacactggacagaaggttgttcccatgatggttttttttattttttatttttgagatggagtttcgctctgttgcccaggctggagtgtaatggtgcaatctcggctcactgcaacctctgcctcctgggttcaagcgattctcctgcctcagcctcccgagtagctgggattacaggcgcctgacaccacgccccgctaattttttgtatttttagtagagatggggtttcaccatgttggccaggctggtctcaaacgccagacctcaggtgatccacctgcctcagcctcccaaagtgctgagattacaggggtgagtcaccgcgcctggccaatgttgttgttgtttttaagacagaatttcactctttgttgcccaggctggagtgcaatggcgcaatctctggctcaccgcaacctccgcctcccaggttcaagcgattctcctacctcagcccccagagtagctgggattacaggcatgtaccatcacacccggctaattttttgtattttaagtagagagggggtttctccatgttggtcaggctggcctcgaactcccaacctcaggtgatccgcccacctcggcctcccaaaatgctgggattacaggggtaagccactgtgcccggccggttatttctttaaaaggtaatcatttgtcaagagtaaaacccagaagctctgacaggccataatttcagatcctttggcttgggcagttttgattttccccgtgtttgcatggcatgaagtcttcgtccttgtcacagtagcttgggatgactcccagtccacatggaaaacatcagggagtgacaatccagcaagaaatccctcgctagttccacacctacgcaccgagcgtcggtgtgccaggccctgtgctgggcagagtgtggtatgtcagggtgtgccggttttaggtaacaagactccaccactgagtggcacctgccctattgcaaaggaatccagttcctccggaataacagtcccactgttaacctggtgctactgggaagttccacacagtaatctgagcagtgactcatggaaggatgaggaacgtttgctccagcttctctccctttccagcaagggcagagctcctaaagccaggggttagcacctggccagcttatgtggcagatggtctcagttacaacttcgctgctttcccaaactcctgcagccctcctgagtccgacttccgttgatagcaaggcactgggtggcagcaaccttttttctagtagttttttcccagcagttttccatttctccacagtatccttttcatttagaggagcttaataaatgctttttaaaaagtaacccacgtgacgtaaaattttacaagtttttgtggcaaaatgatgcccagatagtcacatttaagcaaatattcagcttgattcagtgattaacagcaaatgggtctacgtgctaacatggcagcacattcaacacataacacatcactcacattgacgtccactgtccctgcacctgctacttcaggggcactgaggctcctgttccaaggccttacaaacctatgtggtggcctgcagggcaaaaggaattatcattacaactggttagaggtaggaattcagaaagaaattgaggaggccaaacacacgtcgtttgaggctaaaggcttaagacgcttcttacccaagagtgacctcagagtttcacatcccagacaatcacactgtggttgagtgaaatcaagtgcagttttatttaagaactggaaagaataatcagtatctgtgaaagaaaatccaatttagaatatttaaataaacatttatgtaaaaagaa

SEQ ID NO: 17899 - DNA, 1413 bp, Homo sapiens
  source 1..1413: mol_type = unassigned DNA
ttttataaaggcagtttctgccctctccccgcgtcccccacccccctccacggacctacttacccagcctctgagccgcagtgccctcctctgtaaagtgggtatatcagagcgccaagtgcctggattacaggaaagggctgcgtttagctgcgcacccggccacggctgggacaaacacgcgcagtgacacgcggcggctgcggttcccgcgctggccgcggtcgggctctggcgctcctgagcccgcgctcggcccgcaggacgtggagaccacgtacttctgcaacacgtgcggacagcccctatgcgcgcgctgccgcgacgagacgcaccgagcacgcatgttcgcgcgccacgacatcgtggccctgggtcagcgaagccgcgacgtgccccagaagtgcacgctgcacgcagagccctacctcttgttctccaccgacaagaagttgctgttgtgcatccgctgcttccgcgacatgcagaaggagagccgggcacactgcgtggacctggaatcggcttacgtgcagggctgcgagcggctggagcaggcggtgctggtgagcgcaggggcctggcgcgcggggccgcgcggcggcgatcgcgagcctgaccacgccctgtccccaggccgtgaaggccctgcagacggccacgcgggaggccatcgcgctgctgcaggccatggtggaggaggtgcggcacagcgccgccgaggaggaggacgctatccacgccctcttcggcagcatgcaggacaggctggcagagaggaaagcgctgctgctgcaggctgtgcagagccaatacgaagagaaggacaaggccttcaaggagcagctctctcacttggccaccttgctgcccaccctgcaggtccacctggtcatctgctcctccttcctcagcttggccaacaaggctgagttcctggacctgggctatgtgagtctcctctgctcctgcagatgccccctccccaccaggagcccaccctgcagaccaaagccaccaactcaggggtgggcagcctgtcacctggagcctggaccagggatctcggggctgaccccctcccaactccatcatctgcaaacctgttagggtcactgttacaaggacagtgaagccaggaagggggcatgagcctacagtcccccgtggggcggagtgaccactggagtccagccgccccctctcctgtggatttggggatgggatgggggtttgtccgggtgagtcccagaagagggctggcgctgctaagggacaccaagtcaagtgccaaagacagacgtgctccgcctccatctcccctcttcctgccccctggctgccacacctccaccggcctgaggccctcctcactgccacaggagctgatggagaggctgcagggcatcgtca

SEQ ID NO: 17900 - DNA, 3020 bp, Homo sapiens
  source 1..3020: mol_type = unassigned DNA
gagcccgcgctcggcccgcaggacgtggagaccacgtacttctgcaacacgtgcggacagcccctatgcgcgcgctgccgcgacgagacgcaccgagcacgcatgttcgcgcgccacgacatcgtggccctgggtcagcgaagccgcgacgtgccccagaagtgcagccgtgaaggccctgcagacggccacgcgggaggccatcgcgctgctgcaggccatggtggaggaggtgcggcacagcgccgccgaggaggaggacgctatccacgccctcttcggcagcatgcaggacaggctggcagagaggaaagcgctgctgctgcaggctgtgcagagccaatacgaagagaaggacaaggccttcaaggagcagctctctcacttggccaccttgctgcccaccctgcaggtccacctggtcatctgctcctccttcctcagcttggccaacaaggctgagttcctggacctgggctatgctggcagggggcttaggccccaaggcgctgacggggccccactgcccctccccagtaggaaagatgtcggggtcacccgtccaaaagcccacgctgcaccggtccatcagcaccaaggtgctgctggcggagggcgagaacacgcccttcgcagagcactgccgccactatgaggactcctaccggcctctctgtgcagcacctgcaggcagagatgcagagcctaaaggaccaggtacaggagctgcaccgagacctcaccaagcaccactcgctcatcaaggcggagatcatgggagacgtcctgcacaagtccctgcaactggacgtgcagatcgcctcggagcacgcctccttagagggcatgagggtcgtcttccaggagatttgggaggaagcctatcagcgagtggctaatgagcaggagatttatgaaggttccagacagttggctgccgagtgaaccctctgtccctgagctaacccacatactagcagaggaggaagtcagagtcggccactaaccagatgcaaatccccacactcttccccttagcgcttgaccgtgcctcccagctgctaactggcctcaaatgatgcatgtgaggtcaggattcattgagtagaatgcccccaccaagtgcctccctctttaattagaggtcatcatggaaatggtcgggatatttacgtggtgcctggcttgagtaaaaatctgaagccagatgcttcaggattaagaccccatgctctggccttggccccacagcccagctccatgaccttctccagctgaggcaggagaatgcctacctgaccaccatcaccaagcagatcacgccctacgtccgctccattgccaaggtgaaggagcggctggagcccaggtttcaggcacccgtggatgagcagtcagagagtctacagaacacgcacgacgacagcaggaacaacgcggcctcagccaggaataatccaggaagtgtcccggaaaagagagagaagacatcagagcctaaaggaaacagctgggctccgaacggcctctcagaagagcctctactgaaaaatatggatcatcacagatccaaacagaaaaatgggggcgatgtccccacatggagggaacacccgacttagcaaatgggaccggtccccagggtcaggctcttagagcaggcacaagactgggacactggacagaaggttgttcccatgatggttttttttattttttatttttgagatggagtttcgctctgttgcccaggctggagtgtaatggtgcaatctcggctcactgcaacctctgcctcctgggttcaagcgattctcctgcctcagcctcccgagtagctgggattacaggcgcctgacaccacgccccgctaattttttgtatttttagtagagatggggtttcaccatgttggccaggctggtctcaaacgccagacctcaggtgatccacctgcctcagcctcccaaagtgctgagattacaggggtgagtcaccgcgcctggccaatgttgttgttgtttttaagacagaatttcactctttgttgcccaggctggagtgcaatggcgcaatctctggctcaccgcaacctccgcctcccaggttcaagcgattctcctacctcagcccccagagtagctgggattacaggcatgtaccatcacacccggctaattttttgtattttaagtagagagggggtttctccatgttggtcaggctggcctcgaactcccaacctcaggtgatccgcccacctcggcctcccaaaatgctgggattacaggggtaagccactgtgcccggccggttatttctttaaaaggtaatcatttgtcaagagtaaaacccagaagctctgacaggccataatttcagatcctttggcttgggcagttttgattttccccgtgtttgcatggcatgaagtcttcgtccttgtcacagtagcttgggatgactcccagtccacatggaaaacatcagggagtgacaatccagcaagaaatccctcgctagttccacacctacgcaccgagcgtcggtgtgccaggccctgtgctgggcagagtgtggtatgtcagggtgtgccggttttaggtaacaagactccaccactgagtggcacctgccctattgcaaaggaatccagttcctccggaataacagtcccactgttaacctggtgctactgggaagttccacacagtaatctgagcagtgactcatggaaggatgaggaacgtttgctccagcttctctccctttccagcaagggcagagctcctaaagccaggggttagcacctggccagcttatgtggcagatggtctcagttacaacttcgctgctttcccaaactcctgcagccctcctgagtccgacttccgttgatagcaaggcactgggtggcagcaaccttttttctagtagttttttcccagcagttttccatttctccacagtatccttttcatttagaggagcttaataaatgctttttaaaaagtaaccca

SEQ ID NO: 17901 - DNA, 266 bp, Homo sapiens
  source 1..266: mol_type = unassigned DNA
gcggccgcaccacctaaggcctattcagagcagcaagattgccagtgaccaccgagctgaattcgcgcgctgtctggagccactgctgctgctggggccacgtcgggtggcagctgctgcaagtggtgctaacactaggaaagatgtcggggtcacccgtccaaaagcccacgctgcaccggtccatcagcaccaaggtgctgctggcggagggcgagaacacgcccttcgcagagcactgccgccactatgaggactcctaccgg

SEQ ID NO: 17902 - DNA, 231 bp, Homo sapiens
  source 1..231: mol_type = unassigned DNA
ggtgtgcagtggcctgggtgggccagggtcgggggccctgcagggcagtggaggccacctcatgaccccatcccgctgcccagattgccagtgaccaccgagctgaattcgcgcgctgtctggagccactgctgctgctggggccacgtcgggtggcagctgctgcaagtggtgctaacacgctggcagggggcttaggccccaaggcgctgacggggccccactgcccct

SEQ ID NO: 17903 - DNA, 612 bp, Homo sapiens
  source 1..612: mol_type = unassigned DNA
ccgagctgaattcgcgcgctgtctggagccactgctgctgctggggccacgtcgggtggcagctgctgcaagtggtgctaacacgctggcagggggcttaggccccaaggcgctgacggggccccactgcccctccccagtaggaaagatgtcggggtcacccgtccaaaagcccacgctgcaccggtccatcagcaccaaggtgctgctggcggagggcgagaacacgcccttcgcagagcactgccgccactatgaggactcctaccggcacctgcaggcagagatgcagagcctaaaggaccaggtacaggagctgcaccgagacctcaccaagcaccactcgctcatcaaggcggagatcatgggagacgtcctgcacaagtccctgcaactggacgtgcagatcgcctcggagcacgcctccttagagggcatgagggtcgtcttccaggagatttgggaggaagcctatcagcgagtggctaatgagcaggagatttatgaaggttccagacagttggctgccgagtgaaccctctgtccctgagctaacccacatactagcagaggaggaagtcagagtcggccactaaccagatgcaaatcccc

SEQ ID NO: 17904 - DNA, 473 bp, Homo sapiens
  source 1..473: mol_type = unassigned DNA
cagacagttggctgccgagtgaaccctctgtccctgagctaacccacatactagcagaggaggaagtcagagtcggccactaaccagatgcaaatccccacactcttccccttagcgcttgaccgtgcctcccagctgctaactggcctcaaatgatgcatgtgagcccagctccatgaccttctccagctgaggcaggagaatgcctacctgaccaccatcaccaagcagatcacgccctacgtccgctccattgccaaggtgaaggagcggctggagcccaggtttcaggcacccgtggatgagcagtcagagagtctacagaacacgcacgacgacagcaggaacaacgcggcctcagccaggaataatccaggaagtgtcccggaaaagagagagaagacatcagagcctaaaggaaacagctgggctccgaacggcctctcagaagagcctctactgaaaaatatgga

SEQ ID NO: 17905 - DNA, 528 bp, Homo sapiens
  source 1..528: mol_type = unassigned DNA
gaacgactcatgttttattcttgttccaccacaggcagcgtctcctccctgggccccgagcatcccggcctgacaacgagtcagaggagcatgggaaagcctctcaggattccacctctgcaaattccctacaagggacccccactaacgccaacaccacagttaccagggagagcaggaagaggggactctccaagcttcgggggctcccaggccaggctgcccccccggccgcccatcagcatccccagcctgctgcagaggcagtgtttagtgtgaagttttgaagtcatttcaaagacaaagttgtgtttttaccgcgacttccatgcctcctgcgggacctgctcaccttggggcagtgacacctgaaagatgagcacccagccacccgctctgcccccttccagtcctccagccttcgtgcccaccagcatgtgtacgttagacagccagtgcgactgtactttccctcttgttgaaataattaagtaatgtagtggaataaagtatttttctgattatcag

SEQ ID NO: 17906 - DNA, 470 bp, Homo sapiens
  source 1..470: mol_type = unassigned DNA
caaacagctttcagcacaataaaaagttcagtttcaaactggagtcgatggaagttgatctctctccttctccgattagaaaatctgagatagcagccggccctgcgagaatctccatgattagtccacctcaagatggacgaatgggcagcgtctcctccctgggccccgagcatcccggcctgacaacgagtcagaggagcatgggaaagcctctcagtgtgaagttttgaagtcatttcaaagacaaagttgtgtttttaccgcgacttccatgcctcctgcgggacctgctcaccttggggcagtgacacctgaaagatgagcacccagccacccgctctgcccccttccagtcctccagccttcgtgcccaccagcatgtgtacgttagacagccagtgcgactgtactttccctcttgttgaaataattaagtaatgtagtggaataaagtatttttctgatta

SEQ ID NO: 17907 - DNA, 991 bp, Homo sapiens
  source 1..991: mol_type = unassigned DNA
tttcaaagctggtgcgttagtggctcctgttgtcaggtcttaatttcacacctttaacacccgcagtggccatgtgctgagtgacagttgcagttgtaagagccagtgatgtaaatggcagtggggtgttgagttcacttggcttcagcgctagggaggagcagggccgtgcgactcacaggacgctatgggaactgctgaattcatgtgaaatgccgtttgcaaacccagtaagaacatttcactgattcagagccttcttacactttcagttgggatgacctggggggaagtcagtttttatgatttaattcaataccttttctccatctatttagtatgagatcatcacaacaaacagctttcagcacaataaaaagttcagtttcaaactggagtcgatggaagttgatctctctccttctccgattagaaaatctgagatagcagccggccctgcgagaatctccatgattagtccacctcaagatggacgaatgggcagcgtctcctccctgggccccgagcatcccggcctgacaacgagtcagaggagcatgggaaagcctctcaggattccacctctgcaaattccctacaagggacccccactaacgccaacaccacagttaccagggagagcaggaagaggggactctccaagcttcgggggctcccaggccaggctgcccccccggccgcccatcagcatccccagcctgctgcagaggcagtgtttagtgtgaagttttgaagtcatttcaaagacaaagttgtgtttttaccgcgacttccatgcctcctgcgggacctgctcaccttggggcagtgacacctgaaagatgagcacccagccacccgctctgcccccttccagtcctccagccttcgtgcccaccagcatgtgtacgttagacagccagtgcgactgtactttccctcttgttgaaataattaagtaatgtagtggaataaagtatttttctgatta

SEQ ID NO: 17908 - DNA, 978 bp, Homo sapiens
  source 1..978: mol_type = unassigned DNA
tttcaaagctggtgcgttagtggctcctgttgtcaggtcttaatttcacacctttaacacccgcagtggccatgtgctgagtgacagttgcagttgtaagagccagtgatgtaaatggcagtggggtgttgagttcacttggcttcagcgctagggaggagcagggccgtgcgactcacaggacgctatgggaactgctgaattcatgtgaaatgccgtttgcaaacccagtaagaacatttcactgattcagagccttcttacactttcagttgggatgacctggggggaagtcagtttttatgatttaattcaataccttttctccatctatttagtatgagatcatcacaacaaacagctttcagcacaataaaaagttcagtttcaaactggagtcgatggaagttgatctctctccttctccgattagaaaatctgagatagcagccggccctgcgagaatctccatgattagtccacctcaagatggacgaatgggcagcgtctcctccctgggccccgagcatcccggcctgacaacgagtcagaggagcatgggaaagcctctcaggattccacctctgcaaattccctacaagggacccccactaacgccaacaccacagttaccagggagagcaggaagaggggactctccaagcttcgggggctcccaggccaggctgcccccccggccgcccatcagcatccccagcctgctgcagaggcagtttttgaagtcatttcaaagacaaagttgtgtttttaccgcgacttccatgcctcctgcgggacctgctcaccttggggcagtgacacctgaaagatgagcacccagccacccgctctgcccccttccagtcctccagccttcgtgcccaccagcatgtgtacgttagacagccagtgcgactgtactttccctcttgttgaaataattaagtaatgtagtggaataaagtatttttctgatta

SEQ ID NO: 17909 - DNA, 368 bp, Homo sapiens
  source 1..368: mol_type = unassigned DNA
tgggaaatgtgttcctaacagacagtgggagtccgaatctcgtaagccgcaatattggaattttacccattgttttcttgttgcattcttagtctgagatagcagccggccctgcgagaatctccatgattagtccacctcaagatggacgaatgggcagcgtctcctccctgggccccgagcatcccggcctgacaacgagtcagaggagcatgggaaagcctctcaggattccacctctgcaaattccctacaagggacccccactaacgccaacaccacagttaccagggagagcaggaagaggggactctccaagcttcgggggctcccaggccaggctgcccccccggccgcccatcagcatc

SEQ ID NO: 17910 - DNA, 753 bp, Homo sapiens
  source 1..753: mol_type = unassigned DNA
tgcgcggggaggctggtcccaaccttgcgtgggcttcgcgtgggcccggcctcgccgctgcggtcgcccgcctggcatggccaactgggtgttctgtaatcgctgcttccagccgccccacaggacgtcgtgcttcagcctcaccaactgcgggcacgtgtactgcgacgcctgcctcggcaaagaccgacgcagatatccaggcattcttcatgagcatagacagtctgtgtaagaagtactccagggaaacctcccagattttagaatttcaagaaaaacacaggaagagattgttagccttctatagagaaaagatttctaggttggaagaatcccttaggaagtcagtgctgcagatagaacaactacaaagtatgagatcatcacaacaaacagctttcagcacaataaaaagttcagtttcaacaaaaccacacggatgcctgctgccacctcactcatcagcccccgacagactggagtcgatggaagttgatctctctccttctccgattagaaaatctgagatagcagccggccctgcgagaatctccatgattagtccacctcaagatggacgaatgggcagcgtctcctccctgggccccgagcatcccggcctgacaacgagtcagaggagcatgggaaagcctctcaggattccacctctgcaaattccctacaagggacccccactaacgccaacaccacagttaccagggagagcaggaagaggggactctccaagct

SEQ ID NO: 17911 - DNA, 2335 bp, Homo sapiens
  source 1..2335: mol_type = unassigned DNA
agagctgcccgccttcgggccctgcgcggggaggctggtcccaaccttgcgtgggcttcgcgtgggcccggcctcgccgctgcggtcgcccgcctggcatggccaactgggtgttctgtaatcgctgcttccagccgccccacaggacgtcgtgcttcagcctcaccaactgcgggcacgtgtactgcgacgcctgcctcggcaaaggtaaaaagaatgaatgcttgatttgtaaagctccttgtcgtacagttttgctttcaaagcataccgacgcagatatccaggcattcttcatgagcatagacagtctgtgtaagaagtactccagggaaacctcccagattttagaatttcaagaaaaacacaggaagagattgttagccttctatagagaaaagatttctaggttggaagaatcccttaggaagtcagtgctgcagatagaacaactacaaagtatgagatcatcacaacaaacagctttcagcacaataaaaagttcagtttcaacaaaaccacacggatgcctgctgccacctcactcatcagcccccgacagactggagtcgatggaagttgatctctctccttctccgattagaaaatctgagatagcagccggccctgcgagaatctccatgattagtccacctcaagatggacgaatggccccctgtgcccggagagtgtgtcatttccagaggttcaccatgtttctgcatagacgtctgtcctcactggctgctcctcctagcgttcagttctggaaggcacggggaactcaccaactctaaaacacttccaatatatgctgaggtacaaagggccgtcttgtttccgttccagcaggctgagggcaccctggacacgttcagaacacccgctgtgtctgttgtgtttcctctttgccaatttgaaaggaaaaagtcattttgatttgcatttatgtgactattaatgattctgagtgttttcaatttattcctctgtgttttttctacaaattatctgctttattcctttgtcatttatgtggaagccctcagtgtgcaggatattaaccttttacccaatttgctttgtaattttatatttgacctttgaattttagagacaatatttttatgtactcatatatattgttattatcccttttattttataggttctcatgcttagggagtttttttttcacatacttaaatcatttttttctaactgggtggtttttaaaactttttcttagagcagttttaggttcacagaaaaattgaaaggaaggtacagatttcccatatacaccatgactccacacacgcacagctcccccatcatcctcatcctccaccagagcagtccatgtgttaaaactgatgatcctacttgaatacatcattatcacccaacgtccatggtttacattagggttcactctaggtgtcgaatgttctatgggtttgaacaaatatctagtgacatgtgtccccatcgtagcagcatatggaatagtgccacaccctaaaaatcctctgtgcgccacctgttcatccttcccccacctcccaccaacccttgacagccactgatctttttacggtccctttttcagactctcctggagttggaattgtacagtatgtggcttctcagattgactcctttcacttagcaatacacacttatggttcccccatctcttctcatggtttgctagctcattttttcagtcactgaataatattccattatctggatgtatcatagttcatccattcacctactgaagggcatcttggttgcttccaagttttggcaattatgaattaagctgctatagatgtccatgtgccagggttttgtgtagacatgttttcagctcctttgggtaaatactaaggagtgtgaatgctggatcagatggtgagagggtgtttagttttgaaagaaattgccaaactaccttccaaagtggcagcagcttttcgcattcccactagcaacgaatgagagttcctgttgctccacgtcctcacatttgatgatgtcagtgttctggattttggccagctgataggtatgtagtggtatcttgctgttttattttgcatttcattgataacatatgactaggagcatcttatgctgatttttcatctgcatatcttctttgctgaagtgtctgttaaggtatttggcccattttttaattggattgttttcttattgttgagttttaagagtcctgtgtatattttggatgacatttcttttttgtgtgtcttttttttggatgacatttccttatcagataaatatgtatcttgaaaatata

SEQ ID NO: 17912 - DNA, 1074 bp, Homo sapiens
  source 1..1074: mol_type = unassigned DNA
ggtcccaaccttgcgtgggcttcgcgtgggcccggcctcgccgctgcggtcgcccgcctggcatggccaactgggtgttctgtaatcgctgcttccagccgccccacaggacgtcgtgcttcagcctcaccaactgcgggcacgtgtactgcgacgcctgcctcggcaaaggtaaaaagaatgaatgcttgatttgtaaagctccttgtcgtacagttttgctttcaaagcataccgacgcagatatccaggcattcttcatgagcatagacagtctgtgtaagaagtactccagggaaacctcccagattttagaatttcaagaaaaacacaggaagagattgttagccttctatagagaaaagatttctaggttggaagaatcccttaggaagtcagtgctgcagatagaacaactacaaagtatgagatcatcacaacaaacagctttcagcacaataaaaagttcagtttcaacaaaaccacacggatgcctgctgccacctcactcatcagcccccgacagactggagtcgatggaagttgatctctctccttctccgattagaaaatctgagatagcagccggccctgcgagaatctccatgattagtccacctcaagatggacgaatggggccacatctaacagcttctttctgtttcatcccatggttgaccttgtctaagccccctgtgcccggagagtgtgtcatttccagaggttcaccatgtttctgcatagacgtctgtcctcactggctgctcctcctagcgttcagttctggaaggcacggggaactcaccaactctaaaacacttccaatatatgctgaggtacaaagggccgtcttgtttccgttccagcaggctgagggcaccctggacacgttcagaacacccgctgtgtctgttgtgtttcctctttgccaatttgaaaggaaaaagtcattttgatttgcatttatgtgactattaatgattctgagtgttttcaatttattcctctgtgttttttctacaaattatctgctttattcctttgtcatttatgtggaagccctcagtgtgcagg

SEQ ID NO: 17913 - DNA, 926 bp, Homo sapiens
  source 1..926: mol_type = unassigned DNA
ggtcccaaccttgcgtgggcttcgcgtgggcccggcctcgccgctgcggtcgcccgcctggcatggccaactgggtgttctgtaatcgctgcttccagccgccccacaggacgtcgtgcttcagcctcaccaactgcgggcacgtgtactgcgacgcctgcctcggcaaaggtaaaaagaatgaatgcttgatttgtaaagctccttgtcgtacagttttgctttcaaagcataccgacgcagatatccaggcattcttcatgagcatagacagtctgtgtaagaagtactccagggaaacctcccagattttagaatttcaagaaaaacacaggaagagattgttagccttctatagagaaaagatttctaggttggaagaatcccttaggaagtcagtgctgcagatagaacaactacaaagtctgagatagcagccggccctgcgagaatctccatgattagtccacctcaagatggacgaatggggccacatctaacagcttctttctgtttcatcccatggttgaccttgtctaagccccctgtgcccggagagtgtgtcatttccagaggttcaccatgtttctgcatagacgtctgtcctcactggctgctcctcctagcgttcagttctggaaggcacggggaactcaccaactctaaaacacttccaatatatgctgaggtacaaagggccgtcttgtttccgttccagcaggctgagggcaccctggacacgttcagaacacccgctgtgtctgttgtgtttcctctttgccaatttgaaaggaaaaagtcattttgatttgcatttatgtgactattaatgattctgagtgttttcaatttattcctctgtgttttttctacaaattatctgctttattcctttgtcatttatgtggaagccctcagtgtgcagg

SEQ ID NO: 17914 - DNA, 804 bp, Homo sapiens
  source 1..804: mol_type = unassigned DNA
tgcgtgggcttcgcgtgggcccggcctcgccgctgcggtcgcccgcctggcatggccaactgggtgttctgtaatcgctgcttccagccgccccacaggacgtcgtgcttcagcctcaccaactgcgggcacgtgtactgcgacgcctgcctcggcaaagaccgacgcagatatccaggcattcttcatgagcatagacagtctgtgtaagaagtactccagggaaacctcccagattttagaatttcaagaaaaacacaggaagagattgttagccttctatagagaaaagatttctaggttggaagaatcccttaggaagtcagtgctgcagatagaacaactacaaagtatgagatcatcacaacaaacagctttcagcacaataaaaagttcagtttcaaactggagtcgatggaagttgatctctctccttctccgattagaaaatctgagatagcagccggccctgcgagaatctccatgattagtccacctcaagatggacgaatggccccctgtgcccggagagtgtgtcatttccagaggttcaccatgtttctgcatagacgtctgtcctcactggctgctcctcctagcgttcagttctggaaggcacggggaactcaccaactctaaaacacttccaatatatgctgaggtacaaagggccgtcttgtttccgttccagcaggctgagggcaccctggacacgttcagaacacccgctgtgtctgttgtgtttcctctttgccaatttgaaaggaaaaagtcattttgatttgcatttatgtgactattaat

SEQ ID NO: 17915 - DNA, 934 bp, Homo sapiens
  source 1..934: mol_type = unassigned DNA
ctgcgcggggaggctggtcccaaccttgcgtgggcttcgcgtgggcccggcctcgccgctgcggtcgcccgcctggcatggccaactgggtgttctgtaatcgctgcttccagccgccccacaggacgtcgtgcttcagcctcaccaactgcgggcacgtgtactgcgacgcctgcctcggcaaaggtaaaaagaatgaatgcttgatttgtaaagctccttgtcgtacagttttgctttcaaagcatcgcccctttcctgtgtctgacagcgagtcaccaacagcacgcctttacagctgcgtgaggagagccccgtggatcccgcacaggggtacccgtgtccgcttgcgccgtcggaccttgtggactcgattgctctgcaccagggttgatttcctccattccttacgccctctgccatgatgacgtcagacgcagcaaaggccttcagtcacgctaccgacgcagatatccaggcattcttcatgagcatagacagtctgtgtaagaagtactccagggaaacctcccagattttagaatttcaagaaaaacacaggaagagattgttagccttctatagagaaaagatttctaggttggaagaatcccttaggaagtcagtgctgcagatagaacaactacaaagtctgagatagcagccggccctgcgagaatctccatgattagtccacctcaagatggacgaatggccccctgtgcccggagagtgtgtcatttccagaggttcaccatgtttctgcatagacgtctgtcctcactggctgctcctcctagcgttcagttctggaaggcacggggaactcaccaactctaaaacacttccaatatatgctgaggtacaaagggccgtcttgtttccgttccagcaggctgagggcaccctggacacgttcagaacacccgctgtg

SEQ ID NO: 17916 - DNA, 522 bp, Homo sapiens
  source 1..522: mol_type = unassigned DNA
cgtggatcccgcacaggggtacccgtgtccgcttgcgccgtcggaccttgtggactcgattgctctgcaccagggttgatttcctccattccttacgccctctgccatgatgacgtcagacgcagcaaaggccttcagtcacgctaccgacgcagatatccaggcattcttcatgagcatagacagtctgtgtaagaagtactccagggaaacctcccagattttagaatttcaagaaaaacacaggaagagattgttagccttctatagagaaaagatttctaggttggaagaatcccttaggaagtcagtgctgcagatagaacaactacaaaggtaaggcgccccaccccccgtgagtgcgcagtcgaggcacccactgccatgtgcattggtcgtctggctctccaagatcaagaatgaaagatgactgcagatgcagagggaagagctcgttcatttaccagaaactttcatcagagcaaaaatgctgtgggaaaaccgaagggaagaagggagaca

SEQ ID NO: 17917 - DNA, 1019 bp, Homo sapiens
  source 1..1019: mol_type = unassigned DNA
ggctggtcccaaccttgcgtgggcttcgcgtgggcccggcctcgccgctgcggtcgcccgcctggcatggccaactgggtgttctgtaatcgctgcttccagccgccccacaggacgtcgtgcttcagcctcaccaactgcgggcacgtgtactgcgacgcctgcctcggcaaaggtaaaaagaatgaatgcttgatttgtaaagctccttgtcgtacagttttgctttcaaagcataccgacgcagatatccaggcattcttcatgagcatagacagtctgtgtaagaagtactccagggaaacctcccagtatctcaggctttcccgaggctgttgccgtctcaagttatgcccagccacatcctccaaggaggtgcccagaggctcgacccatggaagccaagcagcagccagagatccccaagaacactgggtcagcacaacacgggcacccagaccaggatgccggcggtcccagagccagccagaggcccagggaaacaccatccaggacgcacctcaccccctcaccctgctccatcccagcaggaccctcattcacaccaagtccccttggggccagaagttgcttgagttcataaaacatgtctgttatcacagacatcagagccacaggccgtgcgctccagggtggttttgccaagtgctgcagaggccaggtgctgtctcaggagagaagacccagcagacccggccagcccctccagccacctgtctgctctgcctctcgtgcctctcaggcttccggcatgggccgtggaggtcacaggctctgcccagtgacctcgtggccccactgtttgtcagttacactgtggaggtgagcatcacaaacgcagggtggagttttcccgcagctgtgtgacgtgaggtggtattgtaacatttatgctctaatatcaacgtaacataaatattggcatttgttacaatatgttaacacatcatggatttattgttatttttaaatgaattaataaatacttttagatttgt

SEQ ID NO: 17918 - DNA, 631 bp, Homo sapiens
  source 1..631: mol_type = unassigned DNA
cgggccctgcgcggggaggctggtcccaaccttgcgtgggcttcgcgtgggcccggcctcgccgctgcggtcgcccgcctggcatggccaactgggtgttctgtaatcgctgcttccagccgccccacaggacgtcgtgcttcagcctcaccaactgcgggcacgtgtactgcgacgcctgcctcggcaaaggtaaaaagaatgaatgcttgatttgtaaagctccttgtcgtacagttttgctttcaaagcataccgacgcagatatccaggcattcttcatgagcatagacagtctgtgtaagaagtactccagggaaacctcccaggtgagctgtgaggggtgtggcttggttccgtgatgagccaggtgcactatcccgagaccatggagctatgaggggtgtgcttggttctgtgatgagccaggtgcactatcccgagaccatggagctgtgaggggtgtgcttggttctgtgatgagccaggtgcactatcccgagaccatggagctgtgggagttgtgcttggttctgtgatgagccaggtgcactatcctgagaccgtggagctgtggggggtgtgcttggttccgtgatgagccaggtgcgctatcccgagaccgtggagc

SEQ ID NO: 17919 - DNA, 488 bp, Homo sapiens
  source 1..488: mol_type = unassigned DNA
aggctggtcccaaccttgcgtgggcttcgcgtgggcccggcctcgccgctgcggtcgcccgcctggcatggccaactgggtgttctgtaatcgctgcttccagccgccccacaggacgtcgtgcttcagcctcaccaactgcgggcacgtgtactgcgacgcctgcctcggcaaaggtaaaaagaatgaatgcttgatttgtaaagctccttgtcgtacagttttgctttcaaagcatgcgcagtggctcacacctgtaatcccagcactttgggaggctgaggcaggcggatcatgaggtcaggagatcgagaccatcctggctaacatggtgatttgcagatcaaaatcaagtctttggcatctggaaattatagacaggagttttaatattgtggatatcaagcctgacaatatggaagagctaacaggtgatttcagccgcagaattccatctgaacagctataacacatctgtatctagcagc

SEQ ID NO: 17920 - DNA, 8141 bp, Homo sapiens
  source 1..8141: mol_type = unassigned DNA
caccgagactgtgtggacccctggctgatgctccagcagacctgcccactgtgcaaattcaacgtcctgggtgagcaccaggggtggggtccctcggcctactctgcctgctcctcacctgatgcctctctccctgttcttcttcccctcccctgcagggaaccgctactccgatgattagctgcccagctggactctgcacatggggatggacccttcctgcctgcaccccggtcctcagcctgggctcccaggacaggacaggatgggacagcaggatagacaggacagcaagcccaatggagggagccccatggcaaggaaggtggacggcctctaggagccgtgagaggacctggcttacagccagccagcgaggacatggggacctcagtcccacagccgcaaggatcggaattctgccaacaagtggagcttggaagccaattcttccccagaaccggcagaaaggaacgcaacctggtagatgcctcaatttcagccctctgggacccggagcaaaaaaacccagccacacagaacctggacttctgactgccagaactgggagctaatgaatacatggcacggagttggtgggcgcctgagagagctactcagctgtgaggtccttcccctggacttgagcacaggccttctggctcagggtgctgagggatggtgctcccctgtgaggggggtgcccggggcaccccagcctccctcaggaactcccaggcccctcagaagcaggaagttgggctgaccaaagctgtggtagctcagctatatacatggcccctcttgacccttctctgtgaactgaggtgctctacctgacggcctcttcaccaagggaaaatgcttcaggcatttgggagcgtgcgccctgagaaggcctcagcaagtttttggagattgtccttcacagaaacggggtcccattatattgtccaggctggtctcaaactcctgggctcgagtgatctgcccgcctcagcctctcaaattgttgggattacaggcatgagccgccgcacccggcctgacgaggcttcttgctgcacttaaaggaatgacagctatagagggcatatgggactggaaggcatcggatccataacatcctcacgccttctggaaatgtgaaaaatgtttcacaaaagcacagcctaaggcctcatgtgatgaggtgggctctccacaagttcccggggcagagtctgaagacctgctgctggataggggcttcctcctggtccccaagggcccgccctctcaggcccaccttgaggccaccctgctgggccacttcccggattttggacagcattgattggagccgcccgttctcctcctgtaggacccggatgcggatgtcgttggactgcacttgcctctccatgtgatctgtgacgttgccagagtctgtgggacatgttatctgggattccacgctgctggatctgcctcctgtgcccaatgggacaggaccttagaagggaggcacaccagcttgggcaggtggcctggaggcacaaaggagctgtgtagtgcaccaggcctcctagctcatcttccttctcccgaggccttattcccccttccctgtcccccaacctgcagggaagatgaccatagtattataaaatctgagagctgggtgggacctagagctctcaaaagacttagcaaggccgggcgcggtggctcacgcctgtaatcccagcactttgggaggcccaggtcaggggatcattaagtcaagagatcaagaccatcctggccaacatggtgaaaccccgtctctactaaaaatagaaaaatgagctgggtgtggtggcgggcccccgtagtcccagctactcaggaggctgaggcaggagaatcacttgaacccaggaggtggaggttgcagtgagcagagattgtgccactgcactccagcctggcaacagagtgagactctgtctcaaaaaaaaaaaaaaaaaaaaaaagacttagcaaataagcatgagaggagagtgaatctctgacaaggcccccccgttttggacaggctacagccaaagtgagctgtccaaggtcacacggccagctcaagcttgggaacggcaggaattccgccaggctgctcttcccctgcttttgtgatggatgcttccttctggctccaggagcccgggagaattgctgccccttctggttcagtttcctgctatgggaaatagctatggggctatgacctgcctcacaaggtggttgagaaggggacagaagggcctggatgatgtctcacgagcagctaactgcacatcttcctgccagctctgcaaaaggatttgccctagtgctttaggggtctggaggggctgggagaacccaggtcacctgatatccaatcctgtgccaagatgggtacctagcactcctatgccatggggtccaggacagtgggcagctggaggctgtgtccttgggactagtcccatggtgtggtttggggacccattccaagaaccaagaagggggacacacagaagtcgagcaagaattagcatgtgacgtagtgaagagcacaggctgtggggacaaccagacctgtgtctgcgtttggctgttgtgactagaggcagtcacatcactgttgggctttcacgtccctgtctatgcagagtggatgacgcatgaagcacttgcgtgctgtggtgggtccacaggggctgcgctgctggccgcctggctttaacacccttgctgcaggctagggagctgcagtccccagtgtcctgcccacacgagccctcagctgctggccctgagccccagcatgcccttggcaccatccccagtcccctaccatggatctgggtctcggtgggcctgtgcaggtctgggaaggccaccagcagccgctcccgctccttcagctcctccagctcccgttctagctccaggatggttagccgcaggtccgtagtcgcctgctccaggccttgcttctccctctgcaggctctgcagcagctcctgggacagacggaggctcaggcctggctcctgagtgagctacatggtactcagcgccctggggcaccgtccctacccaagaaaagacatgggacaggcctgcaggcactcagttggccggagacttctctggcaaaaaggaagacccccaccctcacctgctgggccctgagctggcattgcccctgctcccgctcgctctgcagctgctcctccacgcgggcccgctgggcctcagcctcgtccaggctgccccgcagctcctcacgttcctggtccaggctgtccagctgctttagcagggctcgctgcttggcctgcagagactaagcaggaacggacaagcagggaggctgtgagacccacagggctaggcccagccatgtggaactaaggaggctacagcatctactacccctcggctgctacccccctggggtgtgtgtctgtgtctagggaatgctggtcacatgcgtggaagggtaggggtcgggggaagctggcagcaggcagatgcacaccggacctggtcaaggccaggatcccagcttgaagaccccggcccttggaacgcagatggctggctctgggggtctcacccccacttccttccagtcatacacagaccccacttggagaggaattctgggaactaagtttttcttctcctcgggtctccagtgtcacatcatcccatgttgctgaagcccacatttcctaacacccactgaatggaaagcaggaagaactaacgctggactgctcggagtcctggctccacctctcactagctgtgtggccttgggcaacttccttaacctcactcaataaggctgtttcctcattcgtaaaatgggggtgacaagagtatctacctcctgttgctgtagcgaggagtaagcatcagaggctgcggcgcctgaagcctgggtcacagcagacacctgatacatggcggctgtgacagtttgcaaggcacagagaacagcacccacttggggtagaaaggcttcccctaccctgggcccatgtctgaccctggggactctcaactgaactcctggctccttgctgagcttttgagggttagacccagccaagacagcccccagacctgcccctttcactaggcaacaggtcacctactccctcaaccacacttctgaggactcctgtgaggccccattgcccagagcacagctatgccccgggccctggctcaccctctgcctgccctgtccttcccctggctgatggactaattgcctgtcatgggcgtccagctcaaaggccacctcctcctagaagccattctggattcccatggcagatgtggccatccctccctgcaccccttagccatctggcaggagagtgtggcacacctgctcatctttgcctgtggggcgctcttccagagtgaggcctcactgggcagtatcagtccctgggtcactgttcccccagtgcctggttcagggtagactctctgtaaaggtgagtcaacccccacacctggaggcatctcagggagcagatgcccaatatagatgatcccccattccctgacagtggagccctctttccctgcagcctacattgcagatgcccaggctagcgagggccctggcctcacctcctggtggcggaccatgctgtcgacacgggccttctccttatccagctccgtgctggcccagcagacctgctggccagcgccctccagccgacccaccaacagctgcacctgcgcctccaactgctgcacctgctcctccagctgctgcacctgcctctccgctgccgccctgcgctcaccttcctcctgcagctgctgggcctttgcctctgcagcattaagtggacatgggatggggtagggcaggggagcgctgtactacctcagacctaggacgggagctcacatcccatctctgggcctcagagtcctcagccacaaaatggggctctagaccccacctgaggtgggtttggaaaatagaaggcgctttctcggtaggaggtggcaacccagtttggtcatcgccaatagtgtggttggtcaggcccaccctcctgtggctggttcccttcaactttgccctggatgctcaggggacagagatggacgatgctcatccagccacacccctggcttgagatgtggcatgggggcctatgatggggctccttacccacagcctgtgtggactcccgctgctgtttcagttctctctccagggtggccatctttgtctttaggtcacttgtttctatggcagccaagagagaggcccttcagagggtcccatggacctggccggcggccttcatgcccagtgtgccccgtggagtggaggcagcccatcgcctgcagaggggccgcctgcggccatgggaggagctctagggaggctggtggaagcggctgggcccttacccaccctgcttctcatgggctggctgccatgtgtctacacctctctgggccttggtgtcgtccatggaggcaactgtgatgaggctcagaaagggcaaatccctcaggcctcccatcagtgggcactggccatcttctggtgccaggaactttgtctctaatggcttttgccacaaccagagaggctgctctgcttggctggaagtgccaggggaataactctctggaagtagccctcaatgactgacagtgcaagtggatacatacctcggttccctcactgaccgatggacgagtctgggcaagcgtcctagcccagctcctggtggccccagtgggactgagatcacagtgtcaccaccggatgaacacccccttccttgctgccctcccttccctgcctcttgcctgtgtcccagcctgggttcttccacacaaaccacttgccctggaagccctgtctcacaaacatccatgcaaaggctgtggcagagcccctgggcaccaggcgtctggcctctggggcacagacctgtgagcagctgctgtttgtcgtgctcccactcagacaggcactgctcatcctcctccgcctgtcgccgccgtgccccctgctcctgtttcagcgcctgctccagcttgcccgcctgcttcctcaggccatccttctgcccttcagcctcctccagctgggccctgagggcctccacatgcttactgaggcgcgtcaggtctttcctctgctctgctgcccagcggcccacggtggcagccggcagtggcctgagccccatgctgtcctgcaccagttgctggaactggcctaaggacgagggcaggttctggctctgacacaggctgatgaccaccttgcccaccttctgcaggcttccctggacgctggcgcatgcgtcacagggcaccagggccgtctcaatggtctgggagtggacactcctggtgttcttgaaggtcgtggctgggaactgcagggaggctctgacagggatgctctctggctcttggcaggtctggggcaagcctagcactggggaggagggcttgattaacttggtagtcagatattcagggctcctggctggctcgcccttggtggtgggcttggaggtgggagtctccctttggtttgcccctttctgtgttcagaaaaagacaagggaaagcaggtgagggagagagtagagagggaggtgactggttccctgggggatgttctgtgacagtgtgacagccttgcctgacactcagaccctcaaatgttctctgacaccgacgtgaataagagagaactttctccctctgttactctgactcagcttactacagccaggtctcctctctgcggcccgcaccccaagctccaggcttgatctgattgtatgcatggtgttgggaaggtgatggtgacggtcacagctgctggttactgggctcttgcttactggacctgcctgctcttgtgtcaccataaccactctcagttttagtttccttcccatcatgggaacagtggttcttccccagtgggtggttgtgtggattacgggatagcccataacaaacaggggtcacatgacctccgttgtatagatgaagaaactgcggttcaaagtaggcaagatttttccaaagtcccacagggatgtcagagccagggagcaaggcatgatccccaaggcctgcgttcttaaccgccacactgtgtggggcttgattgggagggcggtgggagccagtaaaggctgtggtgcacatagtggtaggctaggaagccagagctggggcgaggtgtgaaggccaccacagtggggagatagaggctgaggctgacccacctgagacagaggctgggacccacctgggggagtggctgctggtggagcgtgcccagcctcagcaggctgtcccagaagcgccgcaccgtgagccccacggacatgcagggccccgcagcctgtgcagggggcatcatctgctctgagccaaggttctccaagtagctcatacagctttgaagcagcagcaggagcctgcgggcagagatgctaggttgctggggcccaggctggtgctaacataccctcagaccatacaaccgcagctctggctctggggaactggcccaggcatcaagagcttggagagtctcagaatatgctctgctgggccagcttcaaacctaacccaggggctacttcctcagggaagccctccctggccacagcctcagcttgggagcctcttctgtgtctcctgggtggcacttctgcctggctcttctccactggaccagggagctctgtgaagccaggcctggccttgcctcagttgtatcctgagtccttgaaaagttctgggtgaatggctgccttatatccagtggcccggagcctccacttgatagatgacagagctgagacccagagaggggaagagcttgcccacagacacacattgatagggcagagcagggagtgtgcacagtctcctgaggctagtcaggggcttctgcagggtgagctgcttctgtgacagtggagacctgtgtcaagacagctaggtctctgtcctaacctccaagtttaaaactacagtcaggcatgaattgtaagaaaaaggagtattataataaaaagctaagtttgcatttg

SEQ ID NO: 17921 - DNA, 468 bp, Homo sapiens
  source 1..468: mol_type = unassigned DNA
caccgagactgtgtggacccctggctgatgctccagcagacctgcccactgtgcaaattcaacgtcctggggaaccgctactccgatgattagctgcccagctggactctgcacatggggatggacccttcctgcctgcaccccgatggagggagccccatggcaaggaaggtggacggcctctaggagccgtgagaggacctggcttacagccagccagcgaggacatggggacctcagtcccacagccgcaaggatcggaattctgccaacaagtggagcttggaagccaattcttccccagaaccggcagaaaggaacgcaacctggtagatgcctcaatttcagccctctgggacccggagcaaaaaaacccagccacacagaacctggacttctgactgccagaactgggagctaatgaatacatggcacggagttggtgggcgcctgagagagctactcagc

SEQ ID NO: 17922 - DNA, 534 bp, Homo sapiens
  source 1..534: mol_type = unassigned DNA
caccgagactgtgtggacccctggctgatgctccagcagacctgcccactgtgcaaattcaacgtcctggggaaccgctactccgatgattagctgcccagctggactctgcacatggggatggacccttcctgcctgcaccccggtcctcagcctgggctcccaggacaggacaggatgggacagcaggatagacaggacagcaagcccaatggagggagccccatggcaaggaaggtggacggcctctaggagccgtgagaggacctggcttacagccagccagcgaggacatggggacctcagtcccacagccgcaaggatcggaattctgccaacaagtggagcttggaagccaattcttccccagaaccggcagaaaggaacgcaacctggtagatgcctcaatttcagccctctgggacccggagcaaaaaaacccagccacacagaacctggacttctgactgccagaactgggagctaatgaatacatggcacggagttggtgggcgcctgagagagctactcagc

SEQ ID NO: 17923 - DNA, 361 bp, Homo sapiens
  source 1..361: mol_type = unassigned DNA
gactgtgtggacccctggctgatgctccagcagacctgcccactgtgcaaattcaacgtcctggatggagggagccccatggcaaggaaggtggacggcctctaggagccgtgagaggacctggcttacagccagccagcgaggacatggggacctcagtcccacagccgcaaggatcggaattctgccaacaagtggagcttggaagccaattcttccccagaaccggcagaaaggaacgcaacctggtagatgcctcaatttcagccctctgggacccggagcaaaaaaacccagccacacagaacctggacttctgactgccagaactgggagctaatgaatacatggcacggagttg

SEQ ID NO: 17924 - DNA, 1992 bp, Homo sapiens
  source 1..1992: mol_type = unassigned DNA
ggcctcgctccctccgatcccccccgcgcccgggacccctggccccactgttgggccagctcgccgggtccggccatgggccccgccgctcgccccgcgctgagatcgccgccgccgcctccgccgccgcctccgtctccgctgctgctgctgctgcccctgctgccgctgtggctgggcctggcggggcccggggccgcggcggacggcagcgagccggcggccggggcggggcggggcggagcccgcgccgtgcgggtggacgtgagactgccgcgccaggacgctctggtcctggagggcgtcaggatcggctccgaagccgacccggcgcccctgctgggcggtcgtctgctgctgatggacatcgtggatgccgagcaggaggcaccagtggaaggctggattgcagtggcatacgtgggcaaggagcaggcggcccagttccaccaggagaataagggcagtggcccgcaggcctatcccaaggccctggtccagcagatgcggcgggccctcttcctgggtgcctctgccctgcttcttctcatcctgaaccacaacgtggtccgagagctggacatatcccagcttctgctcaggccagtgatcgtcctccattattcctccaatgtcaccaagctgttggatgcattgctgcagaggacccaggccacggctgagatcaccagcggagagtccctgtctgccaatatcgagtggaagttgaccttgtggaccacctgtggcctctccaaggatggctatggaggatggcaggacttggtctgccttggaggcagtcgtgcccaggagcagaaacccctgcagcagctgtggaacgccatcctgctggtggccatgctcctgtgcacaggcctcgtggtccaggcccagcggcaggcgtcgcggcagagccagcgggagctcggaggccaggtggacctgtttaagcgccgcgtggtgcggagactggcatccctcaagacacggcgctgccggctgagcagggcagcgcagggcctcccagatccgggtgctgagacctgtgcggtgtgcctggactacttctgcaacaaacagtggctccgggtgctgccctgtaagcacgagtttcaccgagactgtgtggacccctggctgatgctccagcagacctgcccactgtgcaaattcaacgtcctggggaaccgctactccgatgattagctgcccagctggactctgcacatggggatggacccttcctgcctgcaccccggtcctcagcctgggctcccaggacaggacaggatgggacagcaggatagacaggacagcaagcccagtgggtgggaggaaggatgagggccccaccatgtccacactgggaaggagggccccacagcttcagactgaggatctagggctgggacctgtcagtcaaggaagagaggtcactttgggaccttctctgcaatcctgtgacgtgagtctgccctccttacaggcagctcccaggtcaataaggaaagagaatatggggccagtgtagctgtcgccagggttctgggagctccctgtggcctgtctgggaattcctgggggctgagactacagtggccaggttttgtgcttatttattggggggtgggttgagggaagagctatctggccttggggtaccctggcctgaccgtctttcaggatacttcttgtcaaggctgtctgcctgttgcctttggtcctcaagcactgggagccatgggtcccactgcctgtccagcctggctcccttcctgggcctggctaggaccagaggtcttagaaaccgtcctgttctggaatccttggctgcggctttgtgttgctgaccgggatactcgaagccacaggatcaatgtggtgcctcatccaggggcatccttttttttttttttttttttttttaaagagttggagtagggaaggtttaatagtaaaataaacgtggctatattttaacataagatg

SEQ ID NO: 17925 - DNA, 1651 bp, Homo sapiens
  source 1..1651: mol_type = unassigned DNA
cgtgagactgccgcgccaggacgctctggtcctggagggcgtcaggatcggctccgaagccgacccggcgcccctgctgggcggtcgtctgctgctgatggacatcgtggatgccgagcaggaggcaccagtggaaggctggattgcagtggcatacgtgggcaaggagcaggcggcccagttccaccaggagaataagggcagtggcccgcaggcctatcccaaggccctggtccagcagatgcggcgggccctcttcctgggtgcctctgccctgcttcttctcatcctgaaccacaacgtggtccgagagctggacatatcccagcttctgctcaggccagtgatcgtcctccattattcctccaatgtcaccaagctgttggatgcattgctgcagaggacccaggccacggctgagatcaccagcggagagtccctgtctgccaatatcgagtggaagttgaccttgtggaccacctgtggcctctccaaggatggctatggaggatggcaggacttggtctgccttggaggcagtcgtgcccaggagcagaaacccctgcagcagctgtggaacgccatcctgctggtggccatgctcctgtgcacaggcctcgtggtccaggcccagcggcaggcgtcgcggcagagccagcgggagctcggaggccaggtggacctgtttaagcgccgcgtggtgcggagactggcatccctcaagacacggcgctgccggctgagcagggcagcgcagggcctcccagatccgggtgctgagacctgtgcggtgtgcctggactacttctgcaacaaacagtggctccgggtgctgccctgtaagcacgagtttcaccgagactgtgtggacccctggctgatgctccagcagacctgcccactgtgcaaattcaacgtcctgggtgagcaccaggggtggggtccctcggcctactctgcctgctcctcacctgatgcctctctccctgttcttcttcccctcccctgcagggaaccgctactccgatgattagctgcccagctggactctgcacatggggatggacccttcctgcctgcaccccggtcctcagcctgggctcccaggacaggacaggatgggacagcaggatagacaggacagcaagcccagtgggtgggaggaaggatgagggccccaccatgtccacactgggaaggagggccccacagcttcagactgaggatctagggctgggacctgtcagtcaaggaagagaggtcactttgggaccttctctgcaatcctgtgacgtgagtctgccctccttacaggcagctcccaggtcaataaggaaagagaatatggggccagtgtagctgtcgccagggttctgggagctccctgtggcctgtctgggaattcctgggggctgagactacagtggccaggttttgtgcttatttattggggggtgggttgagggaagagctatctggccttggggtaccctggcctgaccgtctttcaggatacttcttgtcaaggctgtctgcctgttgcctttggtcctcaagcactgggagccatgggtcccactgcctgtccagcctggctcccttcctgggcctggctaggaccagaggtcttagaaaccgtcctgttctggaa

SEQ ID NO: 17926 - DNA, 896 bp, Homo sapiens
  source 1..896: mol_type = unassigned DNA
gtctcaaaaaaaaaaaaaagaaagactgtcctgtcccaggctgaaaaatgggtgaggggatgggaaggaggtgccagagcctggagcttggagcaaggaagtggctctgtgggcagagaggactggccccagcaaggaggaagatggacttgcaggcttccctggcctggctggtgtgaaaattggaaaaaccaatagagggaaaaggcctggggcaaagtgtaaggccagcaggggcgacagtcgtaggtatccttttcctgcagagctggggtgggtgggtctgggcctcccttcccaagagtccttccatctggccccggtgacttcccctcccaggaggacccaggccacggctgagatcaccagcggagagtccctgtctgccaatatcgagtggaagttgaccttgtggaccacctgtggcctctccaaggatggctatggaggatggcaggacttggtctgccttggaggcagtcgtgcccaggagcagaaacccctgcagcagctgtggaacgccatcctgctggtggccatgctcctgtgcacaggcctcgtggtccaggcccagcggcaggcgtcgcggcagagccagcgggagctcggaggccaggtggacctgtttaagcgccgcgtggtgcggagactggcatccctcaagacacggcgctgccggctgagcagggcagcgcagggcctcccagatccgggtgctgagacctgtgcggtgtgcctggactacttctgcaacaaacagtggctccgggtgctgccctgtaagcacgagtttcaccgagactgtgtggacccctggctgatgctccagcagacctgcccactgtgcaaattcaacgtcctggggaaccgctactccgatgattagctgcccagct

SEQ ID NO: 17927 - DNA, 555 bp, Homo sapiens
  source 1..555: mol_type = unassigned DNA
attccggcttcccaaaccagagagccagatgctctgggaactctggccttggcatccactgtgatgaccccggctccctcccccaccacaccctacctccctctgctcatggccccttgccacacagatggacatcgtggatgccgagcaggaggcaccagtggaaggctggattgcagtggcatacgtgggcaaggagcaggcggcccagttccaccaggagaataagggcagtggcccgcaggcctatcccaaggccctggtccagcagatgcggcgggccctcttcctgggtgcctctgccctgcttcttctcatcctgaaccacaacgtggtccgagagctggacatatcccagcttctgctcaggccagtgatcgtcctccattattcctccaatgtcaccaagctgttggatgcattgctgcagaggacccaggccacggctgagatcaccagcggagagtccctgtctgccaatatcgagtggaagttgaccttgtggaccacctgtggcctctccaaggatggctatggaggatggcaggacttggt

SEQ ID NO: 17928 - DNA, 535 bp, Homo sapiens
  source 1..535: mol_type = unassigned DNA
acacagtgaggaaatgacagagctggagtttccgtctgttccacattgctgcatttgttctgcctgacttggaccctggaaaacctggccctcttcaatttctgacaaaagagacggagtttcactcttgtcgcccaggctggattccaatggcgcgatctcggctcgccgcaacctccgcctcccgggttcaagcgattctcctgcctcagcctcctgagtagctggaattacagatggacatcgtggatgccgagcaggaggcaccagtggaaggctggattgcagtggcatacgtgggcaaggagcaggcggcccagttccaccaggagaataagggcagtggcccgcaggcctatcccaaggccctggtccagcagatgcggcgggccctcttcctgggtgcctctgccctgcttcttctcatcctgaaccacaacgtggtccgagagctggacatatcccagcttctgctcaggccagtgatcgtcctccattattcctccaatgtcaccaagctgttggatgcattgct

SEQ ID NO: 17929 - DNA, 555 bp, Homo sapiens
  source 1..555: mol_type = unassigned DNA
gagctgtccaaggtcacacggccagctcaagcttgggaacggcaggaattccgccaggctgctcttcccctgcttttgtgatggatgcttccttctggctccaggagcccgggagaattgctgccccttctggttcagtttcctgctatgggaaatagctatggggctatgacctgcctcacaaggtggttgagaaggggacagaagggcctggatgatgtctcacgagcagctaactgcacatcttcctgccagctctgcaaaaggatttgccctagtgctttaggggtctggaggggctgggagaacccaggtcacctgatatccaatcctgtgccaagatgggtacctagcactcctatgccatggggtccaggacagtgggcagctggaggctgtgtccttgggactagtcccatggtgtggtttggggacccattccaagaaccaagaagggggacacacagaagtcgagcaagaattagcatgtgacgtagtgaagagcacaggctgtggggacaaccagacctgtgtctgcgtttggctgttgtgact

SEQ ID NO: 17930 - DNA, 11325 bp, Homo sapiens
  source 1..11325: mol_type = unassigned DNA
atgggcgaggagcagagcacggtgagcggcggcggcgggccccaggagtcgcagaccctggccagtggcactgcgggccaccctgagcccccgaggcctcagggggacagcgcccgggcgcccccgctgcgcgccgcctccgcggagccgagcggcggtggctgcggaagcgactggggctgcgcggacaccagcgccccagagcccgcgaggagcctggggcccccgggctggagtaagagccgagcaccggcgcagcctgcgggactggcactcaccgggcctctcaatccccagaccttgccactgcagttggagctggaggaggaagaggaggaagctggggatcgaaaagagggaggggatgaacagcaggaggcgccccccggcgaagagctggagcccaggacccgcgtgggggccgccgacggactggtcctggacgtgctgggtcagcggcgcccgtccctcgccaagagacaagtcttctgctccgtgtactgcgtggagagcgacctgcccgaggcccccgcctcggagcagctctcgccgcccgcgtcgccacctggggctccgccagtgttgaaccctcccagcacccgctcttccttccccagcccccgactgtccctcccaacggattccctctcccccgacggcggcagcatcgagctggagttctacctggcgcccgagccgttctccatgcccagcctgttgggagctccaccctactctggcctgggcggtgtaggggatccctatgtgcccctcatggtgctgatgtgccgggtgtgcctggaagacaagcccatcaagcccctgccttgctgcaagaaggccgtgtgcgaggagtgcctcaaagtctacctgagcgcccaggtacaacttggccaagtagaaatcaaatgccccatcacagagtgttttgaattcttggaagaaacaactgttgtctataacttaacgcatgaagactccatcaagtataagtacttcttggaacttggccgtattgattccagcaccaagccatgtcctcagtgcaagcactttacaaccttcaagaaaaaaggacatattcccaccccttccagatcagaaagcaaatacaaaatccagtgccctacctgccaattcgtctggtgttttaagtgccactctccttggcatgaaggtgttaactgcaaggagtacaaaaaaggagacaaattgttgcgtcactgggccagcgaaattgagcatgggcagaggaatgcccagaagtgtccaaagtgcaagatccacatccagcgaactgaaggatgtgaccatatgacctgctcacaatgtaacactaatttttgttaccgatgtggtgagagataccgccagctccgattttttggagaccacacatcaaacctcagtatatttggatgcaaatatcgctacctcccagagagacctcatttaaggagattagtgcgagggtcagtctgtgctggaaaattattcattgcacctctaattatggttttgggattggcactaggggccatagcggttgtaatcggtttatttgtatttcctatctattgcctttgtaaaaaacagagaaaacgatcacggacaggtatgcactggtaacatgcagatgatttcatccagctaagctggttggagtaggagcgataccaaagggtacacccatctgtgagtcacatcttgaaaaacactgagaggaaccttctaccatctcatctcccagtgattctccgtgggccacaatgcctctagctatggtgcactcccaacatggtatcctgtcctttccctaaacaaattgctgctgcttttaaaaaatggtcactttcataaactataaacatctatatcataactctgacctttgtggttcttggaagaagatattttaagaaccagttatcctaagaattctgagcacgcctcttctgagaattgcttggactgtctttgaactctgcacctccttccaggccatcttgtgagacttggtgttaatagctgaagtcctatctgtaccaacaagcaaggccacttttcagaagataagagttcactgaatgcacctattataatctgtggccccagcagtataattcttttatctttcaaatgttataattgcaaaaaatctcaatgtccaaaagggaatgagtgaaactaaattaatgagaagaatattaagttactgaagtgtatatgcgtaggggcgtgaatgtgtgtgtatataaatatgtattaaaactaggcccagtaaccttgtacttacccagttccatgccgctacactatttttccacattttcatagacctattgaaagatgatggctcctttgtggacataatttagcaatgtattaaattaaagtcaatgtagacaacaggccatttcgatactgaacttttctatttcttgctctttctttttgtcacacaaacacagaaatttgtgcaacgtcaccccaaggagtattaagctttgtaaactgacaaaactggctgcttttaggaaattctcaagacacaaatattcagtctttttaaaattcttacattttggaaaacatgcttcactctatagatagatccttcacattgggattatttaatcccaaaaacaagtttgctgtagacaactgcttaagcctttaaaaaattcctattctgctaattttttaaccaacttgtaattatagataattctgctttaggtcaaggtcttacatcatttaatatcctaaccttgttatctcttgcctcctcctctctgtttttatttgttttcaaggtttttcataaaaacaaatactagttttgaaggattttttcttacatttaactgctcaaacataatatttttggggacaccttcttatggaggagtttgaaaactttttatgttcttgagtttgtccaatatcagctgcttttgggaaaggaaacaaaaaagtgaaggaaatattttcaggaagtttttctcaacctacaaaagctttaaaaataagaaattgacaagtaactagactatgatatgcctttgctttcatcacaaaagttcatcagcaaacaggaaaaaaaaagacccctaaaaagcctaaagctttaaattgtctccaaattcttaaaattagtcatctgtcttagatgtacatttatttgtcagcaaccttgtctgatttgaaatagatgatatgataaaacatgcattaacatgagtagtttatttttgttgggctccagagtgtaagaatattttattttttgtttgacataaaaagtgaagttgacttgcgtgaataacaatccagcatgctttcattctttctgaataacacagaataactgtgctacagcttctggattagttgtctatttccagttagaggagtgtgtgacatttatggtttgggaatagcatatttctaaagcataatataatacaagaaatagtgatgctctgttttcacaaatttatcttttcattcacccatccatccatttaacagatatttattgagtgcctatcttaggtgtaatagtatttaagactgaaagaaggagaatttctaacctgtcataagagtaaggtttcgtaaattcatctttcctgaacttaggcattagtttggcaatatgtgaatatgatgaactctaaacctagctgatctgtatatgtatgatgtatatatgtcatatgtatgatatatatgaaatattcccataactgcatatgaacacatatgccatatacatatataccaacgggctgaataacatactcttttgtcttggataatctgttttctgggttatgtatctgttgtctttggcctactcagggatttttatttctttaaataacttatcttttggacatatttttatattatttggaaaactttccaatattcctgttacaaagtggtgtctgttttcagtgatggctatttcatcagtgcttgaaatagtgtgcactgtgttgcacaggtttttcatttttctattgagtagatatttttaaattaacatacacatttttctctttaaagggtcatatctattaggcctttccctgctggtaacttaaaatgattatttgtgaattttttactaagtttcatcaagatcttaaaaagagagaagaaaataaaaagtattatttatatgtcagtgccaactttgaaggtaaaacagtagtagtaacttttgggagaaattctaaaaactactttaaaaagaagcgtgcacataaaataaatatctttctatccaaggcttgtcattttatatgcttttattgtaaatttaatatatactactttaaaaaattgaactatacagaatttataaaatacaactttctctacttaccccacctcttattttctaggggtaaccactgttaatggtttggtatgtgtccttccagacactttctacaaatatacaaataagtgtgtttgtgtatgtgtctgtgtgtgtattcattttatacaaatagaaaaatattcttactgtgctgtgactctttgtcattttattatatattaatagatacctttccataagcgtttaaatagatttacctcattcttttataaattactgcataatccattgtaggagtatactttaacttattgaattagtcccctgttgaatggactacaagattattttcacttctctattacaaagaaagcaagagtgaagacccttttgcatatatttttgtcaccttgcatgaacatatccataaggttgtacatttgttttttacaagatctttgtaataaacattttaatgtaatttcaggagatgaggtcatagagataatatgagacccttttttggataaaaagaaagattgtacaggagtgcataatttttaaagaaaatcgtcttttgaagggtaatttcctttctgcctgattagccaaataaataccttgccaaaacttacaataggaaattttttttcaataaaaataaaatttgaggagatgtgtgtcagataatgtgagagagatgaattgacttttggattgcctcattttaaaacttgagggatttaaatcaaatacccaagccaaattggtgatacttttcgcatttttagtaacactatccacttttgtgtatgttgcttgacagaggaacttaattatgccattgtgaaaagtaggaaagaatatgttggcaattataaatgcccacagcaattcccagaaaaatacattagattatgtacgatttagtgatttggtgggataattataaatcgtggaataatttatatatgtggagtaagaagagaggggtcaaaccttttggtacaagcaacatcttgttgccaccaccttgattttctcataggtgctattgtgtcctaagagtagaacagacaagaaaacaaagataattaaacacaagtcaggttacaacatgatatctttaattgtactttctctgctgtggtatcaagattcagtggtgcttgtcagaaaataccttgttctgtgactctgactatctcttgagtcccaaggctccaattgagcctttatctttcaaccttaccacccaagtatatgaccaactgttctcctaaaatacctatgaaccactgtaatcatttccagtccctgatgcccctcttcaacctcatttttctccatacctctgctattctaactattcctcttcactgaaggagaagaggagagacaggaggggcctaaaaactcactctggtatgtgggaaacattagaattccttcctgacctttgtcaaatgagggcacatctgccaagacatcagtccagcttctcccttgttaaatgaaattgtttttaacattacacttttatactggctgttacattagaattacaaaaaagttagtggcctctataaccttaattggcatactttactacaaaaataagaaaatgtatgccaaaaaacgtttttagattttaattttataagcaacctgcacataagccttaatgtgagtcttcacattggattatatttttattctcccatatttgtggctgaaatctctcccaactattgagagtgatctttcccatggtctgctttattgttttgtgttaatatctattataaatatagccttaaaattttgtaatgcactttaaaatatttgtgccatttaaataatgacaaagcaatcaatgcatacatttcaatggagacagtatacaaagttaaagcaactgatacatatatttcagtggagacagtaggataacagtgttagcaaatatgtgtcatctctttaaatttgggaggaatcagaagctaaagatttaaaacaaataaaacatacctgaagaaaagtagcaatttctgaaattgtagtaatcttggaatggttatcaaacctagcaaataatacttaataagtgttacctaatatacctaattggaatgtttgtttaaaatattaaattaatttatactgaaagttttaactgcaatttcataattcatgaattctataaaagaaatctccctcactaaaaatatgatcaatcaaaactaccagttttgcacaccaatcccaagtttaagcatattttgtatttaaagttataatttaattatgatactgtccccctaatatggaaaataagttacaaaattcttttttttttttttttttttttgagacagaggttctctcaatgttgcccaggctggtctcaaactcttgggctcaagcgatcctccctcctctgcctctggagtagctgggattacaagcacgtgcctactatgcctgtcttcaaaatcacattgttaatttttatagccacaattattaatttgataaaacaaataattttatagaagcattaaagtattatcagaacaaaatcagagttccaaaatttggggagtattttaagattgtgaaatgttaccttttggatgcaaaccaatgatacaaatctttaagaaagaattacagtgggactcctttgaaactctgattttgaaaatagaacaaatacacatttcatagccaaactttgtgtgggacttctattgttactaattgtaaggctgtaactttggttgacttcatccaaatccaagaaacagagtcacagtagtgagactattctcattgcttctttggagcattagctgaagctttaccatatcacataccttacaaaatccctatacatattgccagttttaaaagaatgtaattatgcatgttacaaactatatatatctttttggctagagaagtgactattttagaataacagtatgaatgtaaaaggcaataattttttttaaatacacaaaacattgccattgcccttttttgtcacttccttttttcttctaaaaattttcatttggtgtatctaactttgtatcacttaaattattcagacttactaagataaaaaatactttttttcagttctgtgctatattctgtcactctattccattattaatactaaatgactttccttgtgaaatgatacccacatactacaacatcaagctcctttttctcttaaatttcctaattatcttgatttttgcctctgcagtcttcttcccatcttggccaagtgtgggataaattctgtctcgcccgtaactcctttcactgtaatgaaatgaattcaacactgaacgcactccagaatttagctctggtagtgagcataatttaccttggcttattttatttgtaaatggaaatgtatcaggagtgcctggaacacttttccctcttgataggagttggagaacactgcctagccctctgccaagaagtaagtcaagcaaatgaagataccagttggatcagagggcctaataatagtctaaaaccaagcttcagaaattgcttcgtgactgttgtaagatcaatattgtgtttgcgtattagttggacagaaagcatgtgtggacattcatccaacctgaccccaggtcattcattctccatccaaaaagggttataggtatggtttatggtctttgtttcagcaaaacgtcctacagcttggacttggggtggatttatatagtgtagcatttgtatataagattcaattatggattcatgctctgtgaacattgttagatttttaataatctaaagtaggtcacattgaatgtaactgatattaaccctattctagagaaaacatttgtcatttgcaagtgtttgacttttttattgatatgatttagatatgccacactcaatatatttagtatagattcagtacataacaggaaagaaaaagggagagacagacttgagtgttaaaggaccccagaaattgctgaaatgtccttttagattcttgtggctggcaagctatgctgtcattggttctctgcgaatctgtgatgtgttcacttcgccatgccccagcttgggaaatattcttagtaatccaatcaaatccttaaaaacagcatttttgtgaatgtattacttcttcaatatccccatatatttgtattgtttcaagccactagtatctaaatttttgatataaatatctaaattctttcattttatagaaaattagcatgctttatgtttctttataatgaaaagtctagataaagtatcataatttcattatcagctgacaagaaacccttctaagacccatttttttaagtgtcatatggcaactcctcaatagcttacttttattatttgatcattttcatcacaattgcaatcctctagagggtattttaaaaagtagaccaaccttatgtttcacgtgaaacatagaataataattagtttgtatatatataaaaccatttaccttgacaaggacaatctgttacagatttttaatatgaaaattgacaattttgttgcttttagaagcaattaacatagtaattagtaaattctgagagatgacagaaatgattttctgtagaaggaacacaacagtgatgttaaaatgttaacaaagaaccagttgttttgattctattttaaacaaaattgtaaggcaattttatgaaacaaacatttatatcaatgtatatctatttcaaaactgtgggacaattattcattcttttcccaaatagagtaaaatattaaagagaaaaaaattcgagtgtttatctgttattactgtatattcagaaattacagttctaaggaattattgtcatcctctaagtatcagaatgtattccattttaattatattctccttaacaatagaaaattagaagaaatttcttgatcataagatgaatagtaatttgtaccagatcttgtccatcatttcattagattgcatatttttagttttctataaaatttgcagccattttccaaataaagtaagttataatatttttcaagtttaaaatggaccgggttgaaaagagatttcattgattctttttaatgatattggaaaatatttatgcaattttattttttaaccttttctccatttcattagttatactattaactttgataatcacaaaactatgtggaagaaatcattctgattatattttatgaaagagaggggtagagtaaattttttaattagacaatgttgatatgcagaaatctctcaaaagaaattgcaaaggaaaaattacgttgagatgaaatgttgagaaataaggagtatcttaaaaacctaatttcttacactttttagagcaatcaacttatttccaaattattatttcatgctgttgtttccatgaattgtgtttttagcatagtatatacttttctaccacgttagcatttacactctaattactgaaaataaaggaagaagttggtgaataaaagccagggaaactgggtttattctcattttccaatagcactaatgtataatccctttaaccttccatatggtgctttgtgtgatgagtatataacattcatatacgttattagtgccttatttttttcacttgactttatttcttatctaaagagccatatattttttgtgagtgttctttggtccctctatttaaagtgctaaggagaaagcatatctttagggatgtatataggctgcgtttgctaccttaatctactgtattatctctaaaacaggttagccaatgtatttttcttaaattcattgttcatttttaagctaacctatacaaatggatattaaacaccagaaattaaagccattaaaattgaattgtactttaaaaccataaaaaatgctaattaagtttagaacaggagttgaaatgactctcagttttatctatagctccaattaggacaaaattactttacaaaaagcattaaaaataaaagtaactgtatggtacttcaggaatttgaccagttccttacaacttattcttggcaatattttgtcagtaatatactttcatacagatgctagagaaccatggtgtctgctatttacatgttatttgttcccagtgagctttatcaacatcaaccctgtttatataatatgttattttgctcttcttgatctgtgccttttgttttagctttatacaaaatgctaggtttgttatattctttatgtatcataatatataattcaacttttcctgatgaatgtatgctgaataattaaactaaaccatgtgcttagaaaagacaaagacaggttgtatatgcagttatgtgtaaatatttgacaaagaaaaaaaaaggaaaagaatcttcctgccaacaggtaggtcctgctggacaggacctgaaaattaagagatttttttttttaagcagtgaaatttaaaaatctattacctcaagaattttcagtcgatatgtcaatgtactgttccttctcagtaagtacagtgtcacatgctgctggcggtaaaagcaacccaagtgtcagatcacacaaattttagggacaagtctttcaaaagacggacaccttgtgatattttggagtctaatttccgacttttcgtaatgtcccaatgaccttttgttgtggttgggcttttataaaaaattattttcggttggttgttgtagaatggaagagtaatcttaattatgaaatcagattgcatggaagaatataaagacactcactcggatgaaaactataacggttttcaaactattttgatggtcattgtacgagctattgtatggattactgtggagtgctgtttaccacatgatgtgtgcaatacatcatgcaatgttatttagcaatgcgtaataaaagtttttaaaagagaaaa

SEQ ID NO: 17931 - DNA, 274 bp, Homo sapiens
  source 1..274: mol_type = unassigned DNA
catgcccagcctgttgggagctccaccctactctggcctgggcggtgtaggggatccctatgtgcccctcatggtgctgatgtgccgggtgtgcctggaagacaagcccatcaagcccctgccttgctgcaagaaggccgtgtgcgaggagtgcctcaaagtctacctgagcgcccagacggagtctcactctgtcaccaggctggagtgcagtggcatgatctcggctcacggaaacctccacatcccaggttcaagcgattctcctgcctca

SEQ ID NO: 17932 - DNA, 10660 bp, Homo sapiens
  source 1..10660: mol_type = unassigned DNA
atgtgcccctcatggtgctgatgtgccgggtgtgcctggaagacaagcccatcaagcccctgccttgctgcaagaaggccgtgtgcgaggagtgcctcaaagtctacctgagcgcccaggctggagtgcagtggcatgatctcggctcacggaaacctccacatcccaggttcaagcgattctcctgcctcagccttccgagtagttgggactacaggtacaacttggccaagtagaaatcaaatgccccatcacagagtgttttgaattcttggaagaaacaactgttgtctataacttaacgcatgaagactccatcaagtataagtacttcttggaacttggccgtattgattccagcaccaagccatgtcctcagtgcaagcactttacaaccttcaagaaaaaaggacatattcccaccccttccagatcagaaagcaaatacaaaatccagtgccctacctgccaattcgtctggtgttttaagtgccactctccttggcatgaaggtgttaactgcaaggagtacaaaaaaggagacaaattgttgcgtcactgggccagcgaaattgagcatgggcagaggaatgcccagaagtgtccaaagtgcaagatccacatccagcgaactgaaggatgtgaccatatgacctgctcacaatgtaacactaatttttgttaccgatgtggtgagagataccgccagctccgattttttggagaccacacatcaaacctcagtatatttggatgcaaatatcgctacctcccagagagacctcatttaaggagattagtgcgagggtcagtctgtgctggaaaattattcattgcacctctaattatggttttgggattggcactaggggccatagcggttgtaatcggtttatttgtatttcctatctattgcctttgtaaaaaacagagaaaacgatcacggacaggtatgcactggtaacatgcagatgatttcatccagctaagctggttggagtaggagcgataccaaagggtacacccatctgtgagtcacatcttgaaaaacactgagaggaaccttctaccatctcatctcccagtgattctccgtgggccacaatgcctctagctatggtgcactcccaacatggtatcctgtcctttccctaaacaaattgctgctgcttttaaaaaatggtcactttcataaactataaacatctatatcataactctgacctttgtggttcttggaagaagatattttaagaaccagttatcctaagaattctgagcacgcctcttctgagaattgcttggactgtctttgaactctgcacctccttccaggccatcttgtgagacttggtgttaatagctgaagtcctatctgtaccaacaagcaaggccacttttcagaagataagagttcactgaatgcacctattataatctgtggccccagcagtataattcttttatctttcaaatgttataattgcaaaaaatctcaatgtccaaaagggaatgagtgaaactaaattaatgagaagaatattaagttactgaagtgtatatgcgtaggggcgtgaatgtgtgtgtatataaatatgtattaaaactaggcccagtaaccttgtacttacccagttccatgccgctacactatttttccacattttcatagacctattgaaagatgatggctcctttgtggacataatttagcaatgtattaaattaaagtcaatgtagacaacaggccatttcgatactgaacttttctatttcttgctctttctttttgtcacacaaacacagaaatttgtgcaacgtcaccccaaggagtattaagctttgtaaactgacaaaactggctgcttttaggaaattctcaagacacaaatattcagtctttttaaaattcttacattttggaaaacatgcttcactctatagatagatccttcacattgggattatttaatcccaaaaacaagtttgctgtagacaactgcttaagcctttaaaaaattcctattctgctaattttttaaccaacttgtaattatagataattctgctttaggtcaaggtcttacatcatttaatatcctaaccttgttatctcttgcctcctcctctctgtttttatttgttttcaaggtttttcataaaaacaaatactagttttgaaggattttttcttacatttaactgctcaaacataatatttttggggacaccttcttatggaggagtttgaaaactttttatgttcttgagtttgtccaatatcagctgcttttgggaaaggaaacaaaaaagtgaaggaaatattttcaggaagtttttctcaacctacaaaagctttaaaaataagaaattgacaagtaactagactatgatatgcctttgctttcatcacaaaagttcatcagcaaacaggaaaaaaaaagacccctaaaaagcctaaagctttaaattgtctccaaattcttaaaattagtcatctgtcttagatgtacatttatttgtcagcaaccttgtctgatttgaaatagatgatatgataaaacatgcattaacatgagtagtttatttttgttgggctccagagtgtaagaatattttattttttgtttgacataaaaagtgaagttgacttgcgtgaataacaatccagcatgctttcattctttctgaataacacagaataactgtgctacagcttctggattagttgtctatttccagttagaggagtgtgtgacatttatggtttgggaatagcatatttctaaagcataatataatacaagaaatagtgatgctctgttttcacaaatttatcttttcattcacccatccatccatttaacagatatttattgagtgcctatcttaggtgtaatagtatttaagactgaaagaaggagaatttctaacctgtcataagagtaaggtttcgtaaattcatctttcctgaacttaggcattagtttggcaatatgtgaatatgatgaactctaaacctagctgatctgtatatgtatgatgtatatatgtcatatgtatgatatatatgaaatattcccataactgcatatgaacacatatgccatatacatatataccaacgggctgaataacatactcttttgtcttggataatctgttttctgggttatgtatctgttgtctttggcctactcagggatttttatttctttaaataacttatcttttggacatatttttatattatttggaaaactttccaatattcctgttacaaagtggtgtctgttttcagtgatggctatttcatcagtgcttgaaatagtgtgcactgtgttgcacaggtttttcatttttctattgagtagatatttttaaattaacatacacatttttctctttaaagggtcatatctattaggcctttccctgctggtaacttaaaatgattatttgtgaattttttactaagtttcatcaagatcttaaaaagagagaagaaaataaaaagtattatttatatgtcagtgccaactttgaaggtaaaacagtagtagtaacttttgggagaaattctaaaaactactttaaaaagaagcgtgcacataaaataaatatctttctatccaaggcttgtcattttatatgcttttattgtaaatttaatatatactactttaaaaaattgaactatacagaatttataaaatacaactttctctacttaccccacctcttattttctaggggtaaccactgttaatggtttggtatgtgtccttccagacactttctacaaatatacaaataagtgtgtttgtgtatgtgtctgtgtgtgtattcattttatacaaatagaaaaatattcttactgtgctgtgactctttgtcattttattatatattaatagatacctttccataagcgtttaaatagatttacctcattcttttataaattactgcataatccattgtaggagtatactttaacttattgaattagtcccctgttgaatggactacaagattattttcacttctctattacaaagaaagcaagagtgaagacccttttgcatatatttttgtcaccttgcatgaacatatccataaggttgtacatttgttttttacaagatctttgtaataaacattttaatgtaatttcaggagatgaggtcatagagataatatgagacccttttttggataaaaagaaagattgtacaggagtgcataatttttaaagaaaatcgtcttttgaagggtaatttcctttctgcctgattagccaaataaataccttgccaaaacttacaataggaaattttttttcaataaaaataaaatttgaggagatgtgtgtcagataatgtgagagagatgaattgacttttggattgcctcattttaaaacttgagggatttaaatcaaatacccaagccaaattggtgatacttttcgcatttttagtaacactatccacttttgtgtatgttgcttgacagaggaacttaattatgccattgtgaaaagtaggaaagaatatgttggcaattataaatgcccacagcaattcccagaaaaatacattagattatgtacgatttagtgatttggtgggataattataaatcgtggaataatttatatatgtggagtaagaagagaggggtcaaaccttttggtacaagcaacatcttgttgccaccaccttgattttctcataggtgctattgtgtcctaagagtagaacagacaagaaaacaaagataattaaacacaagtcaggttacaacatgatatctttaattgtactttctctgctgtggtatcaagattcagtggtgcttgtcagaaaataccttgttctgtgactctgactatctcttgagtcccaaggctccaattgagcctttatctttcaaccttaccacccaagtatatgaccaactgttctcctaaaatacctatgaaccactgtaatcatttccagtccctgatgcccctcttcaacctcatttttctccatacctctgctattctaactattcctcttcactgaaggagaagaggagagacaggaggggcctaaaaactcactctggtatgtgggaaacattagaattccttcctgacctttgtcaaatgagggcacatctgccaagacatcagtccagcttctcccttgttaaatgaaattgtttttaacattacacttttatactggctgttacattagaattacaaaaaagttagtggcctctataaccttaattggcatactttactacaaaaataagaaaatgtatgccaaaaaacgtttttagattttaattttataagcaacctgcacataagccttaatgtgagtcttcacattggattatatttttattctcccatatttgtggctgaaatctctcccaactattgagagtgatctttcccatggtctgctttattgttttgtgttaatatctattataaatatagccttaaaattttgtaatgcactttaaaatatttgtgccatttaaataatgacaaagcaatcaatgcatacatttcaatggagacagtatacaaagttaaagcaactgatacatatatttcagtggagacagtaggataacagtgttagcaaatatgtgtcatctctttaaatttgggaggaatcagaagctaaagatttaaaacaaataaaacatacctgaagaaaagtagcaatttctgaaattgtagtaatcttggaatggttatcaaacctagcaaataatacttaataagtgttacctaatatacctaattggaatgtttgtttaaaatattaaattaatttatactgaaagttttaactgcaatttcataattcatgaattctataaaagaaatctccctcactaaaaatatgatcaatcaaaactaccagttttgcacaccaatcccaagtttaagcatattttgtatttaaagttataatttaattatgatactgtccccctaatatggaaaataagttacaaaattcttttttttttttttttttttttgagacagaggttctctcaatgttgcccaggctggtctcaaactcttgggctcaagcgatcctccctcctctgcctctggagtagctgggattacaagcacgtgcctactatgcctgtcttcaaaatcacattgttaatttttatagccacaattattaatttgataaaacaaataattttatagaagcattaaagtattatcagaacaaaatcagagttccaaaatttggggagtattttaagattgtgaaatgttaccttttggatgcaaaccaatgatacaaatctttaagaaagaattacagtgggactcctttgaaactctgattttgaaaatagaacaaatacacatttcatagccaaactttgtgtgggacttctattgttactaattgtaaggctgtaactttggttgacttcatccaaatccaagaaacagagtcacagtagtgagactattctcattgcttctttggagcattagctgaagctttaccatatcacataccttacaaaatccctatacatattgccagttttaaaagaatgtaattatgcatgttacaaactatatatatctttttggctagagaagtgactattttagaataacagtatgaatgtaaaaggcaataattttttttaaatacacaaaacattgccattgcccttttttgtcacttccttttttcttctaaaaattttcatttggtgtatctaactttgtatcacttaaattattcagacttactaagataaaaaatactttttttcagttctgtgctatattctgtcactctattccattattaatactaaatgactttccttgtgaaatgatacccacatactacaacatcaagctcctttttctcttaaatttcctaattatcttgatttttgcctctgcagtcttcttcccatcttggccaagtgtgggataaattctgtctcgcccgtaactcctttcactgtaatgaaatgaattcaacactgaacgcactccagaatttagctctggtagtgagcataatttaccttggcttattttatttgtaaatggaaatgtatcaggagtgcctggaacacttttccctcttgataggagttggagaacactgcctagccctctgccaagaagtaagtcaagcaaatgaagataccagttggatcagagggcctaataatagtctaaaaccaagcttcagaaattgcttcgtgactgttgtaagatcaatattgtgtttgcgtattagttggacagaaagcatgtgtggacattcatccaacctgaccccaggtcattcattctccatccaaaaagggttataggtatggtttatggtctttgtttcagcaaaacgtcctacagcttggacttggggtggatttatatagtgtagcatttgtatataagattcaattatggattcatgctctgtgaacattgttagatttttaataatctaaagtaggtcacattgaatgtaactgatattaaccctattctagagaaaacatttgtcatttgcaagtgtttgacttttttattgatatgatttagatatgccacactcaatatatttagtatagattcagtacataacaggaaagaaaaagggagagacagacttgagtgttaaaggaccccagaaattgctgaaatgtccttttagattcttgtggctggcaagctatgctgtcattggttctctgcgaatctgtgatgtgttcacttcgccatgccccagcttgggaaatattcttagtaatccaatcaaatccttaaaaacagcatttttgtgaatgtattacttcttcaatatccccatatatttgtattgtttcaagccactagtatctaaatttttgatataaatatctaaattctttcattttatagaaaattagcatgctttatgtttctttataatgaaaagtctagataaagtatcataatttcattatcagctgacaagaaacccttctaagacccatttttttaagtgtcatatggcaactcctcaatagcttacttttattatttgatcattttcatcacaattgcaatcctctagagggtattttaaaaagtagaccaaccttatgtttcacgtgaaacatagaataataattagtttgtatatatataaaaccatttaccttgacaaggacaatctgttacagatttttaatatgaaaattgacaattttgttgcttttagaagcaattaacatagtaattagtaaattctgagagatgacagaaatgattttctgtagaaggaacacaacagtgatgttaaaatgttaacaaagaaccagttgttttgattctattttaaacaaaattgtaaggcaattttatgaaacaaacatttatatcaatgtatatctatttcaaaactgtgggacaattattcattcttttcccaaatagagtaaaatattaaagagaaaaaaattcgagtgtttatctgttattactgtatattcagaaattacagttctaaggaattattgtcatcctctaagtatcagaatgtattccattttaattatattctccttaacaatagaaaattagaagaaatttcttgatcataagatgaatagtaatttgtaccagatcttgtccatcatttcattagattgcatatttttagttttctataaaatttgcagccattttccaaataaagtaagttataatatttttcaagtttaaaatggaccgggttgaaaagagatttcattgattctttttaatgatattggaaaatatttatgcaattttattttttaaccttttctccatttcattagttatactattaactttgataatcacaaaactatgtggaagaaatcattctgattatattttatgaaagagaggggtagagtaaattttttaattagacaatgttgatatgcagaaatctctcaaaagaaattgcaaaggaaaaattacgttgagatgaaatgttgagaaataaggagtatcttaaaaacctaatttcttacactttttagagcaatcaacttatttccaaattattatttcatgctgttgtttccatgaattgtgtttttagcatagtatatacttttctaccacgttagcatttacactctaattactgaaaataaaggaagaagttggtgaataaaagccagggaaactgggtttattctcattttccaatagcactaatgtataatccctttaaccttccatatggtgctttgtgtgatgagtatataacattcatatacgttattagtgccttatttttttcacttgactttatttcttatctaaagagccatatattttttgtgagtgttctttggtccctctatttaaagtgctaaggagaaagcatatctttagggatgtatataggctgcgtttgctaccttaatctactgtattatctctaaaacaggttagccaatgtatttttcttaaattcattgttcatttttaagctaacctatacaaatggatattaaacaccagaaattaaagccattaaaattgaattgtactttaaaaccataaaaaatgctaattaagtttagaacaggagttgaaatgactctcagttttatctatagctccaattaggacaaaattactttacaaaaagcattaaaaataaaagtaactgtatggtacttcaggaatttgaccagttccttacaacttattcttggcaatattttgtcagtaatatactttcatacagatgctagagaaccatggtgtctgctatttacatgttatttgttcccagtgagctttatcaacatcaaccctgtttatataatatgttattttgctcttcttgatctgtgccttttgttttagctttatacaaaatgctaggtttgttatattctttatgtatcataatatataattcaacttttcctgatgaatgtatgctgaataattaaactaaaccatgtgcttagaaaagacaaagacaggttgtatatgcagttatgtgtaaatatttgacaaagaaaaaaaaaggaaaagaatcttcctgccaacaggtaggtcctgctggacaggacctgaaaattaagagatttttttttttaagcagtgaaatttaaaaatctattacctcaagaattttcagtcgatatgtcaatgtactgttccttctcagtaagtacagtgtcacatgctgctggcggtaaaagcaacccaagtgtcagatcacacaaattttagggacaagtctttcaaaagacggacaccttgtgatattttggagtctaatttccgacttttcgtaatgtcccaatgaccttttgttgtggttgggcttttataaaaaattattttcggttggttgttgtagaatggaagagtaatcttaattatgaaatcagattgcatggaagaatataaagacactcactcggatgaaaactataacggttttcaaactattttgatggtcattgtacgagctattgtatggattactgtggagtgctgtttaccacatgatgtgtgcaatacatcatgcaatgttatttagcaatgcgtaataaaagtttttaaaagagaaaa

SEQ ID NO: 17933 - DNA, 545 bp, Homo sapiens
  source 1..545: mol_type = unassigned DNA
tatattgtacaaaaagcacaagtcttccaatccaagaaggagaagacacttaattacatgttttgaggaagcgaaaggctgccactcaaacttaggtctagagattacagccaaactcagcctcatctacttgtaaggaaatcaagaggaatttggcttaggaaagctatgatttgatttgatttactgttaagtttttttttgtttgtttgtttgttttgagacggagtctcactctgtcaccaggctggagtgcagtggcatgatctcggctcacggaaacctccacatcccaggttcaagcgattctcctgcctcagccttccgagtagttgggactacaggtacaacttggccaagtagaaatcaaatgccccatcacagagtgttttgaattcttggaagaaacaactgttgtctataacttaacgcatgaagactccatcaagtataagtacttcttggaacttggccgtattgattccagcaccaagccatgtcctcagtgcaagcactttacaaccttcaagaaaaaaggacatatt

SEQ ID NO: 17934 - DNA, 450 bp, Homo sapiens
  source 1..450: mol_type = unassigned DNA
atttagtatacagaggaggacacaaacatgagaagattaaggtagagagtgaaatatggtcaggacaaatgtgaatttagagcctgagtgatggtttagtggatttatgtcctcacttgtcactaatgaaaaggaccttacaggttatataattaaagctctgttgacattggctcttgaaggcaaacttcataatgaggggaagagtcaagttttgtgtaacctgaagcatatacagtctcctgcaaatgataagaggcttgaggatacttcccaggaactcctgcctttttggaggtgactctgtcagttaaagtgtgaatgaagagtggagcataaaagtccattgccagcacttgagtaaagataaagagtaggagaatcaaagctgttgtataattagttctcttctcatccacacccataaaccagttcaagaaagggatgaag

SEQ ID NO: 17935 - DNA, 1771 bp, Homo sapiens
  source 1..1771: mol_type = unassigned DNA
atttagtatacagaggaggacacaaacatgagaagattaaggtagagagtgaaatatggtcaggacaaatgtgaatttagagcctgagtgatggtttagtggatttatgtcctcacttgtcactaatgaaaaggaccttacaggttatataattaaagctctgttgacattggctcttgaaggcaaacttcataatgaggggaagagtcaagttttgtgtaacctgaagcatatacagtgtacaacttggccaagtagaaatcaaatgccccatcacagagtgttttgaattcttggaagaaacaactgttgtctataacttaacgcatgaagactccatcaagtataagtacttcttggaacttggccgtattgattccagcaccaagccatgtcctcagtgcaagcactttacaaccttcaagaaaaaaggacatattcccaccccttccagatcagaaagcaaatacaaaatccagtgccctacctgccaattcgtctggtgttttaagtgccactctccttggcatgaaggtgttaactgcaaggagtacaaaaaaggagacaaattgttgcgtcactgggccagcgaaattgagcatgggcagaggaatgcccagaagtgtccaaagtgcaagatccacatccagcgaactgaaggatgtgaccatatgacctgctcacaatgtaacactaatttttgttaccgatgtggtgagagataccgccagctccgattttttggagaccacacatcaaacctcagtatatttggatgcaaatatcgctacctcccagagagacctcatttaaggagattagtgcgagggtcagtctgtgctggaaaattattcattgcacctctaattatggttttgggattggcactaggggccatagcggttgtaatcggtttatttgtatttcctatctattgcctttgtaaaaaacagagaaaacgatcacggacaggtatgcactggtaacatgcagatgatttcatccagctaagctggttggagtaggagcgataccaaagggtacacccatctgtgagtcacatcttgaaaaacactgagaggaaccttctaccatctcatctcccagtgattctccgtgggccacaatgcctctagctatggtgcactcccaacatggtatcctgtcctttccctaaacaaattgctgctgcttttaaaaaatggtcactttcataaactataaacatctatatcataactctgacctttgtggttcttggaagaagatattttaagaaccagttatcctaagaattctgagcacgcctcttctgagaattgcttggactgtctttgaactctgcacctccttccaggccatcttgtgagacttggtgttaatagctgaagtcctatctgtaccaacaagcaaggccacttttcagaagataagagttcactgaatgcacctattataatctgtggccccagcagtataattcttttatctttcaaatgttataattgcaaaaaatctcaatgtccaaaagggaatgagtgaaactaaattaatgagaagaatattaagttactgaagtgtatatgcgtaggggcgtgaatgtgtgtgtatataaatatgtattaaaactaggcccagtaaccttgtacttacccagttccatgccgctacactatttttccacattttcatagacctattgaaagatgatggctcctttgtggacataatttagcaatgtattaaattaaagtcaatgtagacaacaggc

SEQ ID NO: 17936 - DNA, 1784 bp, Homo sapiens
  source 1..1784: mol_type = unassigned DNA
agtatacagaggaggacacaaacatgagaagattaaggtagagagtgaaatatggtcaggacaaatgtgaatttagagcctgagtgatggtttagtggatttatgtcctcacttgtcactaatgaaaaggaccttacaggttatataattaaagctctgttgacattggctcttgaaggcaaacttcataatgaggggaagagtcaagttttgtgtaacctgaagcatatacagtgtccattgccagcacttgagtaaagataaagagtaggagaatcaaagctgttgtataattagttctcttctcatccacacccataaaccagttcaagaaagggatgaaggtacaacttggccaagtagaaatcaaatgccccatcacagagtgttttgaattcttggaagaaacaactgttgtctataacttaacgcatgaagactccatcaagtataagtacttcttggaacttggccgtattgattccagcaccaagccatgtcctcagtgcaagcactttacaaccttcaagaaaaaaggacatattcccaccccttccagatcagaaagcaaatacaaaatccagtgccctacctgccaattcgtctggtgttttaagtgccactctccttggcatgaaggtgttaactgcaaggagtacaaaaaaggagacaaattgttgcgtcactgggccagcgaaattgagcatgggcagaggaatgcccagaagtgtccaaagtgcaagatccacatccagcgaactgaaggatgtgaccatatgacctgctcacaatgtaacactaatttttgttaccgatgtggtgagagataccgccagctccgattttttggagaccacacatcaaacctcagtatatttggatgcaaatatcgctacctcccagagagacctcatttaaggagattagtgcgagggtcagtctgtgctggaaaattattcattgcacctctaattatggttttgggattggcactaggggccatagcggttgtaatcgttgaggaaattaagacttactggaacctcataagtggtagaaccaggaatcaaacccaacatttggctccacagcctgtgttgttaagtgatatgctatactgcctgaaacaagtgtttatttgtatttcctatctattgcctttgtaaaaaacagagaaaacgatcacggacaggtatgcactggtaacatgcagatgatttcatccagctaagctggttggagtaggagcgataccaaagggtacacccatctgtgagtcacatcttgaaaaacactgagaggaaccttctaccatctcatctcccagtgattctccgtgggccacaatgcctctagctatggtgcactcccaacatggtatcctgtcctttccctaaacaaattgctgctgcttttaaaaaatggtcactttcataaactataaacatctatatcataactctgacctttgtggttcttggaagaagatattttaagaaccagttatcctaagaattctgagcacgcctcttctgagaattgcttggactgtctttgaactctgcacctccttccaggccatcttgtgagacttggtgttaatagctgaagtcctatctgtaccaacaagcaaggccacttttcagaagataagagttcactgaatgcacctattataatctgtggccccagcagtataattcttttatctttcaaatgttataattgcaaaaaatctcaatgtccaaaagggaatgagtgaaactaaattaatgagaagaata

SEQ ID NO: 17937 - DNA, 484 bp, Homo sapiens
  source 1..484: mol_type = unassigned DNA
ttaaccctgtaggtttccttctctttgtttcaagcttaattaggtagtaaaaatgttgtgtttaatacttttatgtgtgtgtagctggtggagagattttccttatcagctcaattccccatattgaactgaaatcaccaaattactttcctatgccaccagcaacgtgtccattgccagcacttgagtaaagataaagagtaggagaatcaaagctgttgtataattagttctcttctcatccacacccataaaccagttcaagaaagggatgaaggtaaagtacatagatgaagaagccacatttatttgtgctgcaggagcccttgtaatctcttcaaaacacctcctgtgaagccctctcacagacatagagcctggaagagtagattttttcactttccttgagtataagtgattttctttcagatggtgccatctctttctagaaagaatgtaagaaggcagaaaaaaaaaagaaaaa

SEQ ID NO: 17938 - DNA, 672 bp, Homo sapiens
  source 1..672: mol_type = unassigned DNA
agactccatcaagtataagtacttcttggaacttggccgtattgattccagcaccaagccatgtcctcagtgcaagcactttacaaccttcaagaaaaaaggacatattcccaccccttccagatcagaaagcaaatacaaacaaaatggcaggatgaagtggtttcaaaggctgtttggagtcatctccatttaaggtaaggagagcactgacatggataccccagccaaccaatcgtgagattcatggccacagtatggcaccctgtactgagactaagatctttgttctttgtgatgaacagatccagtgccctacctgccaattcgtctggtgttttaagtgccactctccttggcatgaaggtgttaactgcaaggagtacaaaaaaggagacaaattgttgcgtcactgggccagcgaaattgagcatgggcagaggaatgcccagaagtgtccaaagtgcaagatccacatccagcgaactgaaggatgtgaccatatgacctgctcacaatgtaacactaatttttgttaccgatgtggtgagagataccgccagctccgattttttggagaccacacatcaaacctcagtatatttggatgcaaatatcgctacctcccagagagacctcatttaaggagattagtgcgagggtcagtctgtg

SEQ ID NO: 17939 - DNA, 592 bp, Homo sapiens
  source 1..592: mol_type = unassigned DNA
attacagcaaaatggcaggatgaagtggtttcaaaggctgtttggagtcatctccatttaagatccagtgccctacctgccaattcgtctggtgttttaagtgccactctccttggcatgaaggtgttaactgcaaggagtacaaaaaaggagacaaattgttgcgtcactgggccagcgaaattgagcatgggcagaggaatgcccagaagtgtccaaagtgcaagatccacatccagcgaactgaaggatgtgaccatatgacctgctcacaatgtaacactaatttttgttaccgatgtggtgagagataccgccagctccgattttttggagaccacacatcaaacctcagtatatttggatgcaaatatcgctacctcccagagagacctcatttaaggagattagtgcgagggtcagtctgtgctggaaaattattcattgcacctctaattatggttttgggattggcactaggggccatagcggttgtaatcggtttatttgtatttcctatctattgcctttgtaaaaaacagagaaaacgatcacggacaggtatgcactggtaacatgcagatgatttcat

SEQ ID NO: 17940 - DNA, 5145 bp, Homo sapiens
  source 1..5145: mol_type = unassigned DNA
atgggcgaggagcagagcacggtgagcggcggcggcgggccccaggagtcgcagaccctggccagtggcactgcgggccaccctgagcccccgaggcctcagggggacagcgcccgggcgcccccgctgcgcgccgcctccgcggagccgagcggcggtggctgcggaagcgactggggctgcgcggacaccagcgccccagagcccgcgaggagcctggggcccccgggctggagtaagagccgagcaccggcgcagcctgcgggactggcactcaccgggcctctcaatccccagaccttgccactgcagttggagctggaggaggaagaggaggaagctggggatcgaaaagagggaggggatgaacagcaggaggcgccccccggcgaagagctggagcccaggacccgcgtgggggccgccgacggactggtcctggacgtgctgggtcagcggcgcccgtccctcgccaagagacaagtcttctgctccgtgtactgcgtggagagcgacctgcccgaggcccccgcctcggagcagctctcgccgcccgcgtcgccacctggggctccgccagtgttgaaccctcccagcacccgctcttccttccccagcccccgactgtccctcccaacggattccctctcccccgacggcggcagcatcgagctggagttctacctggcgcccgagccgttctccatgcccagcctgttgggagctccaccctactctggcctgggcggtgtaggggatccctatgtgcccctcatggtgctgatgtgccgggtgtgcctggaagacaagcccatcaagcccctgccttgctgcaagaaggccgtgtgcgaggagtgcctcaaagtctacctgagcgcccaggtacaacttggccaagtagaaatcaaatgccccatcacagagtgttttgaattcttggaagaaacaactgttgtctataacttaacgcatgaagactccatcaagtataagtacttcttggaacttggccgtattgattccagcaccaagccatgtcctcagtgcaagcactttacaaccttcaagaaaaaaggacatattcccaccccttccagatcagaaagcaaatacaaaatccagtgccctacctgccaattcgtctggtgttttaagtgccactctccttggcatgaaggtgttaactgcaaggagtacaaaaaaggagacaaattgttgcgtcactgggccagcgaaattgagcatgggcagaggaatgcccagaagtgtccaaagtgcaagatccacatccagcgaactgaaggatgtgaccatatgacctgctcacaatgtaacactaatttttgttaccgatgtggtgagagataccgccagctccgattttttggagaccacacatcaaacctcagtatatttggatgcaaatatcgctacctcccagagagacctcatttaaggagattagtgcgagggtcagtctgtgctggaaaattattcattgcacctctaattatggttttgggattggcactaggggccatagcggttgtaatcgttgaggaaattaagacttactggaacctcataagtggtagaaccaggaatcaaacccaacatttggctccacagcctgtgttgttaagtgatatgctatactgcctgaaacaagtgtttatttgtatttcctatctattgcctttgtaaaaaacagagaaaacgatcacggacaggtatgcactggtaacatgcagatgatttcatccagctaagctggttggagtaggagcgataccaaagggtacacccatctgtgagtcacatcttgaaaaacactgagaggaaccttctaccatctcatctcccagtgattctccgtgggccacaatgcctctagctatggtgcactcccaacatggtatcctgtcctttccctaaacaaattgctgctgcttttaaaaaatggtcactttcataaactataaacatctatatcataactctgacctttgtggttcttggaagaagatattttaagaaccagttatcctaagaattctgagcacgcctcttctgagaattgcttggactgtctttgaactctgcacctccttccaggccatcttgtgagacttggtgttaatagctgaagtcctatctgtaccaacaagcaaggccacttttcagaagataagagttcactgaatgcacctattataatctgtggccccagcagtataattcttttatctttcaaatgttataattgcaaaaaatctcaatgtccaaaagggaatgagtgaaactaaattaatgagaagaatattaagttactgaagtgtatatgcgtaggggcgtgaatgtgtgtgtatataaatatgtattaaaactaggcccagtaaccttgtacttacccagttccatgccgctacactatttttccacattttcatagacctattgaaagatgatggctcctttgtggacataatttagcaatgtattaaattaaagtcaatgtagacaacaggccatttcgatactgaacttttctatttcttgctctttctttttgtcacacaaacacagaaatttgtgcaacgtcaccccaaggagtattaagctttgtaaactgacaaaactggctgcttttaggaaattctcaagacacaaatattcagtctttttaaaattcttacattttggaaaacatgcttcactctatagatagatccttcacattgggattatttaatcccaaaaacaagtttgctgtagacaactgcttaagcctttaaaaaattcctattctgctaattttttaaccaacttgtaattatagataattctgctttaggtcaaggtcttacatcatttaatatcctaaccttgttatctcttgcctcctcctctctgtttttatttgttttcaaggtttttcataaaaacaaatactagttttgaaggattttttcttacatttaactgctcaaacataatatttttggggacaccttcttatggaggagtttgaaaactttttatgttcttgagtttgtccaatatcagctgcttttgggaaaggaaacaaaaaagtgaaggaaatattttcaggaagtttttctcaacctacaaaagctttaaaaataagaaattgacaagtaactagactatgatatgcctttgctttcatcacaaaagttcatcagcaaacaggaaaaaaaaagacccctaaaaagcctaaagctttaaattgtctccaaattcttaaaattagtcatctgtcttagatgtacatttatttgtcagcaaccttgtctgatttgaaatagatgatatgataaaacatgcattaacatgagtagtttatttttgttgggctccagagtgtaagaatattttattttttgtttgacataaaaagtgaagttgacttgcgtgaataacaatccagcatgctttcattctttctgaataacacagaataactgtgctacagcttctggattagttgtctatttccagttagaggagtgtgtgacatttatggtttgggaatagcatatttctaaagcataatataatacaagaaatagtgatgctctgttttcacaaatttatcttttcattcacccatccatccatttaacagatatttattgagtgcctatcttaggtgtaatagtatttaagactgaaagaaggagaatttctaacctgtcataagagtaaggtttcgtaaattcatctttcctgaacttaggcattagtttggcaatatgtgaatatgatgaactctaaacctagctgatctgtatatgtatgatgtatatatgtcatatgtatgatatatatgaaatattcccataactgcatatgaacacatatgccatatacatatataccaacgggctgaataacatactcttttgtcttggataatctgttttctgggttatgtatctgttgtctttggcctactcagggatttttatttctttaaataacttatcttttggacatatttttatattatttggaaaactttccaatattcctgttacaaagtggtgtctgttttcagtgatggctatttcatcagtgcttgaaatagtgtgcactgtgttgcacaggtttttcatttttctattgagtagatatttttaaattaacatacacatttttctctttaaagggtcatatctattaggcctttccctgctggtaacttaaaatgattatttgtgaattttttactaagtttcatcaagatcttaaaaagagagaagaaaataaaaagtattatttatatgtcagtgccaactttgaaggtaaaacagtagtagtaacttttgggagaaattctaaaaactactttaaaaagaagcgtgcacataaaataaatatctttctatccaaggcttgtcattttatatgcttttattgtaaatttaatatatactactttaaaaaattgaactatacagaatttataaaatacaactttctctacttaccccacctcttattttctaggggtaaccactgttaatggtttggtatgtgtccttccagacactttctacaaatatacaaataagtgtgtttgtgtatgtgtctgtgtgtgtattcattttatacaaatagaaaaatattcttactgtgctgtgactctttgtcattttattatatattaatagatacctttccataagcgtttaaatagatttacctcattcttttataaattactgcataatccattgtaggagtatactttaacttattgaattagtcccctgttgaatggactacaagattattttcacttctctattacaaagaaagcaagagtgaagacccttttgcatatatttttgtcaccttgcatgaacatatccataaggttgtacatttgttttttacaagatctttgtaataaacattttaatgtaatttcaggagatgaggtcatagagataatatgagacccttttttggataaaaagaaagattgtacaggagtgcataatttttaaagaaaatcgtcttttgaagggtaatttcctttctgcctgattagccaaataaataccttgccaaaacttacaataggaaattttttttcaataaaaataaaatttgagg

SEQ ID NO: 17941 - DNA, 3099 bp, Homo sapiens
  source 1..3099: mol_type = unassigned DNA
tgcgtgcgtgtgtgtgtgcgcgcgtgtgtgtgtctccgagtccctgggagagtggaggctcattcactgattagatccagcgctgagaggcagcactgctccttctctcacgccaactgagtctcttgatctgtacatgcaatcccaggcagctcgcgaacacaaacccggggccagccgcctactgctgctgctgctgctgccgctgccgccgccgccgccgccgctgcctccgccggctctgcgaacccgggacttttcatgcaccacactctccgcctgcttccctccgtgtcctgaaaagtgcgaccgttctcccaaggaatttccacggtcttaggagggaatgattccccagtaatattccctgccctgacccaaagtgctggttggcctccctcccagggaagactgcttcttgcgtaacgccggccacagaaagagactccgatggacttacaccgggcagccttcaagatggagaactcatcctaccttcccaaccctctggcatccccagcactgatggtcctggcatccacggctgaggccagccgtgatgcttccatcccttgtcagcagccacgaccctttggtgtacctgtctcagttgacaaggacgtgcatattcctttcaccaacggttcctatacctttgcctctatgtaccatcggcaaggtggggtgccaggcacttttgccaatcgtgatttccccccttctctactacacctccaccctcaatttgctcccccaaatctagattgcaccccaatcagtatgctgaatcatagtggtgtgggggctttccggccctttgcctccaccgaggaccgggagagctatcagtcagcctttacgccggccaagcgacttaagaactgccatgacacagagtctccccacttgcgcttctcagatgcagatggcaaggaatatgactttgggacacagctgccatctagctcccccggttcactaaaggttgatgacactgggaagaagatttttgctgtctctggcctcatttctgatcgggaagcctcatctagcccagaggatcggaatgacagatgtaagaagaaagcagcggcattgttcgacagccaggccccaatttgccccatctgccaggtcctgctgaggcccagtgagctgcaggagcatatggagcaggaactggagcagctagcccaactgccctcgagcaagaattcccttctgaaggatgccatggctccaggcaccccaaagtccctcctgttgtctgcttccatcaagagggaaggagagtctccaacggcatcaccccactcatctgccaccgatgacctccaccattcagacagataccagacctttctgcgagtacgagccaaccggcagacccgactgaatgctcggattgggaaaatgaaacggaggaagcaagatgaagggcagagggaaggctcctgcatggctgaggatgatgctgtggacatcgagcatgagaacaacaaccgctttgaggagtatgagtggtgtggacagaagcggatacgggccaccactctcctggaaggtggcttccgaggctctggcttcatcatgtgcagcggcaaagagaacccggacagtgatgctgacttggatgtggatggggatgacactctggagtatgggaagccacaatacacagaggctgatgtcatcccctgcacaggcgaggagcctggtgaagccaaggagagagaggcacttcggggcgcagtcctaaatggcggccctcccagcacgcgcatcacacctgagttctctaaatgggccagtgatgagatgccatccaccagcaatggtgaaagcagcaagcaggaggccatgcagaagacctgcaagaacagcgacatcgagaaaatcaccgaagattcagctgtgaccacgtttgaggctctgaaggctcgggtcagagaacttgaacggcagctatctcgtggggaccgttacaaatgcctcatctgcatggactcgtactcgatgcccctaacgtccatccagtgttggcacgtgcactgcgaggagtgctggctgcggaccctgggtgccaagaagctctgccctcagtgcaacacgatcacagcgcccggagacctgcggaggatctacttgtgagctatctgccccaggcaggcctcgcctccagcagccccacctgcccccagcctctgtgacagtgaccgtctccctttgtacatacttgcacacaggttccccatgtacatacatgcacatactcaaacatgcgtacacacacacacatttacacacgcaggactctggagccagagtagaggctgtggcccaggcactacctgctggctcccacctatggtttgggggccatacctgttccagctctgttcccagggtggggcagggaggtgggggttgggggagtagtggggcacggctcctaagatccagcccccatactgacagacggacagacagacatgcaaacaccagactgaagcacatgtaatatagaccgtgtatgtttacaatgttgtgtataaatgggacaactcctcgccctctacctgtcccctccccctttggttgtatgattttcttcttttttaagaacccctggaagcagcgcctccttcagggttggctgggagctcggcccatccacctcttggggtacctgcctctctctctcctgtggtgtcccttccctctcccatgtgctcggtgttcagtggtgtatatttcttctcccagacatggggcacacgccccaagggacatgatcctctccttagtcttagctcatggggctctttataaggagttggggggtagaggcaggaaatgggaaccgagctgaagcagaggctgagttagggggctagaggacagtgctcctggccacccagcctctgctgagaaccattcctgggattagagctgcctttcccagggaaaaagtgtcgtctccccgaccctcccgtgggccctgtggtgtgatgctgtgtctgtatattctatacaaaggtacttgtcctttccctttgtaaactacatttgacatggattaaaccagtataaacagtt

SEQ ID NO: 17942 - DNA, 3009 bp, Homo sapiens
  source 1..3009: mol_type = unassigned DNA
actgctccttctctcacgccaactgagtctcttgatctgtacatgcaatcccaggcagctcgcgaacacaaacccggggccagccgcctactgctgctgctgctgctgccgctgccgccgccgccgccgccgctgcctccgccggctctgcgaacccgggacttttcatgcaccacactctccgcctgcttccctccgtgtcctgaaaagtgcgaccgttctcccaaggaatttccacggcaagtcttaggagggaatgattccccagtaatattccctgccctgacccaaagtgctggttggcctccctcccagggaagactgcttcttgcgtaacgccggccacagaaagagactccgatggacttacaccgggcagccttcaagatggagaactcatcctaccttcccaaccctctggcatccccagcactgatggtcctggcatccacggctgaggccagccgtgatgcttccatcccttgtcagcagccacgaccctttggtgtacctgtctcagttgacaaggacgtgcatattcctttcaccaacggttcctatacctttgcctctatgtaccatcggcaaggtggggtgccaggcacttttgccaatcgtgatttccccccttctctactacacctccaccctcaatttgctcccccaaatctagattgcaccccaatcagtatgctgaatcatagtggtgtgggggctttccggccctttgcctccaccgaggaccgggagagctatcagtcagcctttacgccggccaagcgacttaagaactgccatgacacagagtctccccacttgcgcttctcagatgcagatggcaaggaatatgactttgggacacagctgccatctagctcccccggttcactaaaggttgatgacactgggaagaagatttttgctgtctctggcctcatttctgatcgggaagcctcatctagcccagaggatcggaatgacagatgtaagaagaaagcagcggcattgttcgacagccaggccccaatttgccccatctgccaggtcctgctgaggcccagtgagctgcaggagcatatggagcaggaactggagcagctagcccaactgccctcgagcaagaattcccttctgaaggatgccatggctccaggcaccccaaagtccctcctgttgtctgcttccatcaagagggaaggagagtctccaacggcatcaccccactcatctgccaccgatgacctccaccattcagacagataccagacctttctgcgagtacgagccaaccggcagacccgactgaatgctcggattgggaaaatgaaacggaggaagcaagatgaagggcagagggaaggctcctgcatggctgaggatgatgctgtggacatcgagcatgagaacaacaaccgctttgaggagtatgagtggtgtggacagaagcggatacgggccaccactctcctggaaggtggcttccgaggctctggcttcatcatgtgcagcggcaaagagaacccggacagtgatgctgacttggatgtggatggggatgacactctggagtatgggaagccacaatacacagaggctgatgtcatcccctgcacaggcgaggagcctggtgaagccaaggagagagaggcacttcggggcgcagtcctaaatggcggccctcccagcacgcgcatcacacctgagttctctaaatgggccagtgatgagatgccatccaccagcaatggtgaaagcagcaagcaggaggccatgcagaagacctgcaagaacagcgacatcgagaaaatcaccgaagattcagctgtgaccacgtttgaggctctgaaggctcgggtcagagaacttgaacggcagctatctcgtggggaccgttacaaatgcctcatctgcatggactcgtactcgatgcccctaacgtccatccagtgttggcacgtgcactgcgaggagtgctggctgcggaccctgggtgccaagaagctctgccctcagtgcaacacgatcacagcgcccggagacctgcggaggatctacttgtgagctatctgccccaggcaggcctcgcctccagcagccccacctgcccccagcctctgtgacagtgaccgtctccctttgtacatacttgcacacaggttccccatgtacatacatgcacatactcaaacatgcgtacacacacacacatttacacacgcaggactctggagccagagtagaggctgtggcccaggcactacctgctggctcccacctatggtttgggggccatacctgttccagctctgttcccagggtggggcagggaggtgggggttgggggagtagtggggcacggctcctaagatccagcccccatactgacagacggacagacagacatgcaaacaccagactgaagcacatgtaatatagaccgtgtatgtttacaatgttgtgtataaatgggacaactcctcgccctctacctgtcccctccccctttggttgtatgattttcttcttttttaagaacccctggaagcagcgcctccttcagggttggctgggagctcggcccatccacctcttggggtacctgcctctctctctcctgtggtgtcccttccctctcccatgtgctcggtgttcagtggtgtatatttcttctcccagacatggggcacacgccccaagggacatgatcctctccttagtcttagctcatggggctctttataaggagttggggggtagaggcaggaaatgggaaccgagctgaagcagaggctgagttagggggctagaggacagtgctcctggccacccagcctctgctgagaaccattcctgggattagagctgcctttcccagggaaaaagtgtcgtctccccgaccctcccgtgggccctgtggtgtgatgctgtgtctgtatattctatacaaaggtacttgtcctttccctttgtaaactacatttgacatggattaaaccagtataaacagtt

SEQ ID NO: 17943 - DNA, 452 bp, Homo sapiens
  source 1..452: mol_type = unassigned DNA
cctgttgtaataagcagaggagtgttgtgtgtgcattttaattgccagcagagccgtagtttggtgggcgccctgagctcggctccgggaaagagccctttgcagctttctttgtggcagtcatttgcaaaggggtttggctctcagctacggcggaggcagagggggcagcagcaccgcttccttctatgccgatcccgggcgcaggatgggagaaggaaatactctctttgcactgcattaagccaggaggattcatctaccgtttaactgatgtttctctgtttgagggaataccaaagatactccaggtcttaggagggaatgattccccagtaatattccctgccctgacccaaagtgctggttggcctccctcccagggaagactgcttcttgcgtaacgccggccacagaaagagactccgatggacttacaccgggcagccttc

SEQ ID NO: 17944 - DNA, 594 bp, Homo sapiens
  source 1..594: mol_type = unassigned DNA
agcccagaggatcggaatgacagatcaagaagaattttctgcgaaagaaccttcttacaccttttccaagaaaagatcctggattgggactacatgttgagcctggagaaatgataggctgtagtatgaatcagaacacctggtagatgctaagtaaacagaaggaatttatcatcttccagccttacccaatggattggacttttctgttatcttaatcacactactttagttttagtgtttaaaaaaattattattttttgtctggtaccaatcatctaaaagggtttagtgttcattgcatattgaataccttagtggtggcgattataatctagtttttactttaagttttcatcatcttaccactcttcagcattgcacagaacagcatctgtaagactatgtatgctatcccaaaggcgtagaggtttgaggaaagaaaggaagaacttatttatgccttgaggtttcatgatgatgaaggtagggagggagttttccaagaatttgtgaaatcacctttctcaaatatagacttattttattacttggggtactattaataaaaaatcgtttataacttaacaaaaa

SEQ ID NO: 17945 - DNA, 840 bp, Homo sapiens
  source 1..840: mol_type = unassigned DNA
ggaactggagcagctagcccaactgccctcgagcaagaattcccttctgaaggatgccatggctccaggcaccccaaagtccctcctgttgtctgcttccatcaagagggaaggagagtctccaacggcatcaccccactcatctgccaccgatgacctccaccattcagacagataccaggtgaggaggggtggtgagtggccatgagaagcaagctcacctgggggagggcttcaagagcctgcccggtgctaactcctcctctcctctgtaggccacaggagaggcctgaactgggtttggttccccctgtgtcccgtgcccctaagtgaactcaggaggcatacgtgtcagggaataggccttaaatagatggattttagggagagatgccaaggtcacatgggctccatgggctctgagcacctctgaatcattctatccatcaggaagtatcctatggggtttggtttcataagagacccagatacatagcccagaatcacctgaagatttcagacttcaaaagcatgataccggccgggtgcagtggctcatgcctgtaatctcagcactttgggaggccgaggcaggcagatcacgaggtcaagagatcaagaccatcctggccaacatggtgagaccccatctctgctgaaaatacaaaaattagctgggcatggtagcgtgtgcctgtagtcccagctacttgggaggctgaggcaggagaatcgcttgaacccagaagatggaggttgcagtgagccaagattgcaccacggcactccagcctggcgacagagtgagactccatctcaaaaaaaaaaaaaaaaaaaaaa

SEQ ID NO: 17946 - DNA, 361 bp, Homo sapiens
  source 1..361: mol_type = unassigned DNA
ggaaggagagtctccaacggcatcaccccactcatctgccaccgatgacctccaccattcagacagataccagacctttctgcgagtacgagccaaccggcagacccgactgaatgctcggattgggaaaatgaaacggaggaagcaagatgaagggcaggtatgtcccctgtgcaaccgccccctggcaggatcggagcaggagatgagtaggcatgtggagcattgcctttctaagagggaaggctcctgcatggctgaggatgatgctgtggacatcgagcatgagaacaacaaccgctttgaggagtatgagtggtgtggacagaagcggatacgggccaccactctcctggaaggt

SEQ ID NO: 17947 - DNA, 1203 bp, Homo sapiens
  source 1..1203: mol_type = unassigned DNA
cgggcgatggggcggaaggagccccgcagcgggaggggtcgtggagtggggtggaaggacttcgcagccgctaaagattgggtgggtaggcttcacgggcggtgggagggaccccggggaggcttctgccggttgctacccgagtacaaacggcagcttcctggtctctgtccggccgcccccgccgcattgtgaactttcacccccagcgcgcgacggcggcagatcacgtgattagggccaacatggccgccgccgccgcttggagctgaagtgccgccgccgccgggcagccacggggaatccgcccgcatcgccgccctcgccggccgggcggccgtggggcccagagcgccggaggccagggctggggcggcaccgcgcagcggccacggggtcccgttagagcagcgcccggcggctatgccgagagcccggagcggccggaggagcagaggggccggcgggagggaggaaacctttctgcgagtacgagccaaccggcagacccgactgaatgctcggattgggaaaatgaaacggaggaagcaagatgaagggcaggtatgtcccctgtgcaaccgccccctggcaggatcggagcaggagatgagtaggcatgtggagcattgcctttctaagagggaaggctcctgcatggctgaggatgatgctgtggacatcgagcatgagaacaacaaccgctttgaggagtatgagtggtgtggacagaagcggatacgggccaccactctcctggaaggtggcttccgaggctctggcttcatcatgtgcagcggcaaagagaacccggacagtgatgctgacttggatgtggatggggatgacactctggagtatgggaagccacaatacacagaggctgatgtcatcccctgcacaggcgaggagcctggtgaagccaaggagagagaggcacttcggggcgcagtcctaaatggcggccctcccagcacgcgcatcacacctgagttctctaaatgggccagtgatgagatgccatccaccagcaatggtgaaagcagcaagcaggaggccatgcagaagacctgcaagaacagcgacatcgagaaaatcaccgaagattcagctgtgaccacgtttgaggctctgaaggctcgggtcagagaacttgaacggcagctatctcgtggggaccgttacaaatgcctcatctgcatg

SEQ ID NO: 17948 - DNA, 1200 bp, Homo sapiens
  source 1..1200: mol_type = unassigned DNA
cgggcgatggggcggaaggagccccgcagcgggaggggtcgtggagtggggtggaaggacttcgcagccgctaaagattgggtgggtaggcttcacgggcggtgggagggaccccggggaggcttctgccggttgctacccgagtacaaacggcagcttcctggtctctgtccggccgcccccgccgcattgtgaactttcacccccagcgcgcgacggcggcagatcacgtgattagggccaacatggccgccgccgccgcttggagctgaagtgccgccgccgccgggcagccacggggaatccgcccgcatcgccgccctcgccggccgggcggccgtggggcccagagcgccggaggccagggctggggcggcaccgcgcagcggccacggggtcccgttagagcagcgcccggcggctatgccgagagcccggagcggccggaggagcagaggggccggcgggagggaggaaacctttctgcgagtacgagccaaccggcagacccgactgaatgctcggattgggaaaatgaaacggaggaagcaagatgaagggcagagggaaggctcctgcatggctgaggatgatgctgtggacatcgagcatgagaacaacaaccgctttgaggagtatgagtggtgtggacagaagcggatacgggccaccactctcctggaaggtggcttccgaggctctggcttcatcatgtgcagcggcaaagagaacccggacagtgatgctgacttggatgtggatggggatgacactctggagtatgggaagccacaatacacagaggctgatgtcatcccctgcacaggcgaggagcctggtgaagccaaggagagagaggcacttcggggcgcagtcctaaatggcggccctcccagcacgcgcatcacacctgagttctctaaatgggccagtgatgagatgccatccaccagcaatggtgaaagcagcaagcaggaggccatgcagaagacctgcaagaacagcgacatcgagaaaatcaccgaagattcagctgtgaccacgtttgaggctctgaaggctcgggtcagagaacttgaacggcagctatctcgtggggaccgttacaaatgcctcatctgcatggactcgtactcgatgcccctaacgtccatccagtgttggcacgtgcactgcgaggagtgctggctgcggaccctg

SEQ ID NO: 17949 - DNA, 2734 bp, Homo sapiens
  source 1..2734: mol_type = unassigned DNA
agggccaacatggccgccgccgccgcttggagctgaagtgccgccgccgccgggcagccacggggaatccgcccgcatcgccgccctcgccggccgggcggccgtggggcccagagcgccggaggccagggctggggcggcaccgcgcagcggccacggggtcccgttagagcagcgcccggcggctatgccgagagcccggagcggccggaggagcagaggggccggcgggagggaggaagtagacctttctgcgagtacgagccaaccggcagacccgactgaatgctcggattgggaaaatgaaacggaggaagcaagatgaagggcagagggaaggctcctgcatggctgaggatgatgctgtggacatcgagcatgagaacaacaaccgctttgaggagtatgagtggtgtggacagaagcggatacgggccaccactctcctggaaggtggcttccgaggctctggcttcatcatgtgcagcggcaaagagaacccggacagtgatgctgacttggatgtggatggggatgacactctggagtatgggaagccacaatacacagaggctgatgtcatcccctgcacaggcgaggagcctggtgaagccaaggagagagaggcacttcggggcgcagtcctaaatggcggccctcccagcacgcgcatcacacctgagttctctaaatgggccagtgatgagatgccatccaccagcaatggtgaaagcagcaagcaggaggccatgcagaagacctgcaagaacagcgacatcgagaaaatcaccgaagattcagctgtgaccacgtttgaggctctgaaggctcgggtcagagaacttgaacggcagctatctcgtggggaccgttacaaatgcctcatctgcatggactcgtactcgatgcccctaacgtccatccagtgttggcacgtgcactgcgaggagtgctggctgcggaccctggtgaggtggcatgggggtcggggaatgggaggccgctccgggcactgcccagatgtctgtgcttatgcctgagcctgcctgggggaagtggggagcatggcgcaaaggagaacagagccaggagccaggatatttacccgcaggatatttacccccaggctcgctgcctctcctccccaactgcaggtttaggaacttctccccctccatgagttcactgcattctcccttccccgccccggtccccgaaggcccactgcatcacacagactggtgaggcctggggtcaggaggaggctggctgtaggtaaacaggaccagggccttggcccctccccctcccattactaagctccttctgctcctgcccctgttcttcgctcaggagcagccattaaaatgtcgcccggagacagtaataaaaggctcggacgtgggctctgtgtcctgatcaaaggccgcgtgtaatctcgttagggctgcggctgccacagctggacccagccttgttctcattactggggctcctgctgcggggctggccaggcggtttgatcctggcgtccccccaacacaggagcgtgcctgcctgctcacagaagctgcctatgcgtccccagcctgggctgacaggaccaaggtctcagcacacactggtgcagagagacatggctgcaggcccaggtgctcacatgcgcacacatggctcattgtgtagaccagagccctccctgttctccctgcagggtgccaagaagctctgccctcagtgcaacacgatcacagcgcccggagacctgcggaggatctacttgtgagctatctgccccaggcaggcctcgcctccagcagccccacctgcccccagcctctgtgacagtgaccgtctccctttgtacatacttgcacacaggttccccatgtacatacatgcacatactcaaacatgcgtacacacacacacatttacacacgcaggactctggagccagagtagaggctgtggcccaggcactacctgctggctcccacctatggtttgggggccatacctgttccagctctgttcccagggtggggcagggaggtgggggttgggggagtagtggggcacggctcctaagatccagcccccatactgacagacggacagacagacatgcaaacaccagactgaagcacatgtaatatagaccgtgtatgtttacaatgttgtgtataaatgggacaactcctcgccctctacctgtcccctccccctttggttgtatgattttcttcttttttaagaacccctggaagcagcgcctccttcagggttggctgggagctcggcccatccacctcttggggtacctgcctctctctctcctgtggtgtcccttccctctcccatgtgctcggtgttcagtggtgtatatttcttctcccagacatggggcacacgccccaagggacatgatcctctccttagtcttagctcatggggctctttataaggagttggggggtagaggcaggaaatgggaaccgagctgaagcagaggctgagttagggggctagaggacagtgctcctggccacccagcctctgctgagaaccattcctgggattagagctgcctttcccagggaaaaagtgtcgtctccccgaccctcccgtgggccctgtggtgtgatgctgtgtctgtatattctatacaaaggtacttgtcctttccctttgtaaactacatttgacatggattaaaccagtataaacagtt

SEQ ID NO: 17950 - DNA, 720 bp, Homo sapiens
  source 1..720: mol_type = unassigned DNA
acatggccgccgccgccgcttggagctgaagtgccgccgccgccgggcagccacggggaatccgcccgcatcgccgccctcgccggccgggcggccgtggggcccagagcgccggaggccagggctggggcggcaccgcgcagcggccacggggtcccgttagagcagcgcccggcggctatgccgagagcccggagcggccggaggagcagaggggccggcgggagggaggaagtagacctttctgcgagtacgagccaaccggcagacccgactgaatgctcggattgggaaaatgaaacggaggaagcaagatgaagggcaggtatgtcccctgtgcaaccgccccctggcaggatcggagcaggagatgagtaggcatgtggagcattgcctttctaagagggaaggctcctgcatggctgaggatgatgctgtggacatcgagcatgagaacaacaaccgctttgaggagtatgagtggtgtggacagaagcggatacgggccaccactctcctggaaggtggcttccgaggctctggcttcatcatgtgcagcggcaaagagaacccggacagtgatgctgacttggatgtggatggggatgacactctggagtatgggaagccacaatacacagaggctgatgtcatcccctgcacaggcgaggagcctggtgaagccaaggagagagaggcacttcggggcgcagtcctaaa

SEQ ID NO: 17951 - DNA, 860 bp, Homo sapiens
  source 1..860: mol_type = unassigned DNA
ccgccgccgcttggagctgaagtgccgccgccgccgggcagccacggggaatccgcccgcatcgccgccctcgccggccgggcggccgtggggcccagagcgccggaggccagggctggggcggcaccgcgcagcggccacggggtcccgttagagcagcgcccggcggctatgccgagagcccggagcggccggaggagcagaggggccggcgggagggaggaagtagacctttctgcgagtacgagccaaccggcagacccgactgaatgctcggattgggaaaatgaaacggaggaagcaagatgaagggcaggtatgtcccctgtgcaaccgccccctggcaggatcggagcaggagatgagtaggcatgtggagcattgcctttctaagagggaaggctcctgcatggctgaggatgatgctgtggacatcgagcatgagaacaacaaccgctttgaggagtatgagtggtgtggacagaagcggatacgggccaccactctcctggaaggtggcttccgaggtacaagcagctgacacgtagacattggcactctggtgccaggcctctgctgggtatccatctgctggaagccaagaggccgaggctggtggctggtcatccatccgttccaccacgtggggactgctgctggtggggctcctttgtgaccgtgctgcctgcctgtgatgtgcatattaaaatggatgtatttgggtggggaaatggaattgtgaggctgcaagctaggagtgacgaaggggggctctcagcttcgggtgatgcattgaaggtgacagccaagccgcgttagcacctgcataaaatattaaagggacggttatgcatttatca

SEQ ID NO: 17952 - DNA, 590 bp, Homo sapiens
  source 1..590: mol_type = unassigned DNA
gcggagcagctttggtcgggggtccggtgctggggcgggggccaggactgcaggccgcgcctgacgctctcttttcttttcttgcatctgcccgcgatcttctcccagacctttctgcgagtacgagccaaccggcagacccgactgaatgctcggattgggaaaatgaaacggaggaagcaagatgaagggcaggtatgtcccctgtgcaaccgccccctggcaggatcggagcaggagatgagtaggcatgtggagcattgcctttctaagagggaaggctcctgcatggctgaggatgatgctgtggacatcgagcatgagaacaacaaccgctttgaggagtatgagtggtgtggacagaagcggatacgggccaccactctcctggaaggtggcttccgaggctctggcttcatcatgtgcagcggcaaagagaacccggacagtgatgctgacttggatgtggatggggatgacactctggagtatgggaagccacaatacacagaggctgatgtcatcccctgcacaggcgaggagcctggtgaagccaaggagagagaggcacttcggggcgcagtcctaaa

SEQ ID NO: 17953 - DNA, 916 bp, Homo sapiens
  source 1..916: mol_type = unassigned DNA
ggtccggtgctggggcgggggccaggactgcaggccgcgcctgacgctctcttttcttttcttgcatctgcccgcgatcttctcccagacctttctgcgagtacgagccaaccggcagacccgactgaatgctcggattgggaaaatgaaacggaggaagcaagatgaagggcagagggaaggctcctgcatggctgaggatgatgctgtggacatcgagcatgagaacaacaaccgctttgaggagtatgagtggtgtggacagaagcggatacgggccaccactctcctggaaggtggcttccgaggctctggcttcatcatgtgcagcggcaaagagaacccggacagtgatgctgacttggatgtggatggggatgacactctggagtatgggaagccacaatacacagaggctgatgtcatcccctgcacaggcgaggagcctggtgaagccaaggagagagaggcacttcggggcgcagtcctaaatggcggccctcccagcacgcgcatcacacctgagttctctaaatgggccagtgatgagatgccatccaccagcaatggtgaaagcagcaagcaggaggccatgcagaagacctgcaagaacagcgacatcgagaaaatcaccgaagattcagctgtgaccacgtttgaggctctgaaggctcgggtcagagaacttgaacggcagctatctcgtggggaccgttacaaatgcctcatctgcatggactcgtactcgatgcccctaacgtccatccagtgttggcacgtgcactgcgaggagtgctggctgcggaccctgggtgccaagaagctctgccctcagtgcaacacgatcacagcgcccggagacctgcggaggatctacttgtgagctatctgccccaggcaggcctcgcctccagca

SEQ ID NO: 17954 - DNA, 1951 bp, Homo sapiens
  source 1..1951: mol_type = unassigned DNA
gaatgaggaacgagctacacaattctactcgggagctcagctttgaatttgcaaactgctgggacctcactatacaaacctgcagggcgctgagaatgtttttcttccagtttttaatcagtgcccagtagtgtgaatacagcccctctgctgagacttgacaatacagtgagatctggagttcccacggcaacaggaactaactcatcccagggctctttgagttatcagtcggcccacatttcacaaagctcggattgggaaaatgaaacggaggaagcaagatgaagggcagagggaaggctcctgcatggctgaggatgatgctgtggacatcgagcatgagaacaacaaccgctttgaggagtatgagtggtgtggacagaagcggatacgggccaccactctcctggaaggtggcttccgaggctctggcttcatcatgtgcagcggcaaagagaacccggacagtgatgctgacttggatgtggatggggatgacactctggagtatgggaagccacaatacacagaggctgatgtcatcccctgcacaggcgaggagcctggtgaagccaaggagagagaggcacttcggggcgcagtcctaaatggcggccctcccagcacgcgcatcacacctgagttctctaaatgggccagtgatgagatgccatccaccagcaatggtgaaagcagcaagcaggaggccatgcagaagacctgcaagaacagcgacatcgagaaaatcaccgaagattcagctgtgaccacgtttgaggctctgaaggctcgggtcagagaacttgaacggcagctatctcgtggggaccgttacaaatgcctcatctgcatggactcgtactcgatgcccctaacgtccatccagtgttggcacgtgcactgcgaggagtgctggctgcggaccctgggtgccaagaagctctgccctcagtgcaacacgatcacagcgcccggagacctgcggaggatctacttgtgagctatctgccccaggcaggcctcgcctccagcagccccacctgcccccagcctctgtgacagtgaccgtctccctttgtacatacttgcacacaggttccccatgtacatacatgcacatactcaaacatgcgtacacacacacacatttacacacgcaggactctggagccagagtagaggctgtggcccaggcactacctgctggctcccacctatggtttgggggccatacctgttccagctctgttcccagggtggggcagggaggtgggggttgggggagtagtggggcacggctcctaagatccagcccccatactgacagacggacagacagacatgcaaacaccagactgaagcacatgtaatatagaccgtgtatgtttacaatgttgtgtataaatgggacaactcctcgccctctacctgtcccctccccctttggttgtatgattttcttcttttttaagaacccctggaagcagcgcctccttcagggttggctgggagctcggcccatccacctcttggggtacctgcctctctctctcctgtggtgtcccttccctctcccatgtgctcggtgttcagtggtgtatatttcttctcccagacatggggcacacgccccaagggacatgatcctctccttagtcttagctcatggggctctttataaggagttggggggtagaggcaggaaatgggaaccgagctgaagcagaggctgagttagggggctagaggacagtgctcctggccacccagcctctgctgagaaccattcctgggattagagctgcctttcccagggaaaaagtgtcgtctccccgaccctcccgtgggccctgtggtgtgatgctgtgtctgtatattctatacaaaggtacttgtcctttccctttgtaaactacatttgacatggattaaaccagtataaacagtt

SEQ ID NO: 17955 - DNA, 810 bp, Homo sapiens
  source 1..810: mol_type = unassigned DNA
ggtgaccttttcaggaggaattagattgcctgccaagaccggttagagggagtgataacgccagctgaagaagctgcccagcagacttcagagagaaggaggcagaggcaggatgagcaggctctggcttcatcatgtgcagcggcaaagagaacccggacagtgatgctgacttggatgtggatggggatgacactctggagtatgggaagccacaatacacagaggctgatgtcatcccctgcacaggcgaggagcctggtgaagccaaggagagagaggcacttcggggcgcagtcctaaatggcggccctcccagcacgcgcatcacacctgagttctctaaatgggccagtgatgagatgccatccaccagcaatggtgaaagcagcaagcaggaggccatgcagaagacctgcaagaacagcgacatcgagaaaatcaccgaagattcagctgtgaccacgtttgaggctctgaaggctcgggtcagagaacttgaacggcagctatctcgtggggaccgttacaaatgcctcatctgcatggactcgtactcgatgcccctaacgtccatccagtgttggcacgtgcactgcgaggagtgctggctgcggaccctgggtgccaagaagctctgccctcagtgcaacacgatcacagcgcccggagacctgcggaggatctacttgtgagctatctgccccaggcaggcctcgcctccagcagccccacctgcccccagcctctgtgacagtgaccgtctccctttgtacatacttgcacacaggttccccatgtacatacatg

SEQ ID NO: 17956 - DNA, 3835 bp, Homo sapiens
  source 1..3835: mol_type = unassigned DNA
cagggagaggtggattgcaggctgtgcctggcatctttccttcccgatgctgcttgcctttgggattggtggtgtctttgtgagaccagagactggtggggtagaagggagaaggatcaagactcagtgtttttcagggcttgaaaaatggagaacattccagatggagtgaatagcatgagcaggggtcttaagagcagcatatacaggctatgtttgtggtttggtgagcagcctgtgtgtgcacatgcttggggtttacagagtgaattagtagagagcaagagtaaagacataaatggacccagatcttcatggatctggctgaggagcctgggcttggttgtgcatgcagtggggagccatcaatggttttggagcaggaggaaaggtggtcagaactcagtggtaagcagaatgaaggaacagataagaggcctgaggactccctacaagacataccctaatgagagtataaggacctgagaggaaagagtggacaagcagaaatgtctgaaatcatcaggcagatactaagctgcttcctcacttctttaaggatttccttgctgatcccagtagccacagagtctcacattcttttgtccctggcagggctgtgctggctagtgaggtgtggtctgagacccactaggaggaagtggggagctggggggaacagctctatagcacttgaccctaggctatcaggaagggtggtcctggatgtcagagagatcgcctggcaggtgagcaggcctggtgtagccccagcagctcgcccctccctctgagctgagagtccgtctgtggctgtgccagatgcacctcaggggtcagccacttgcgtggcccatggcctggcctccgctcagcctggttgccttcatggactgctttgagaagtaggtgtgcatgcctgtcctccctcgtctgtcccttcttaatccctttataactgcacttgtccaggaatctgggctgagtgaggtggagatgaataattaatgtcaggcgcttcagacaccaaatatttgaacagctgcctggtgtttttgctggcaaggacctagcggccaaaatcaggatgttggccgggggtcccactctgtggctctgattggccttagccagcctgttctctcctctgatggacttgtcaggctggataatggggcataggggaggccccactcttttcctgtgaaattcctagacctgaatttttctgtcctcttactgttcttcctagacctggaagataggtggacagcaggcctgggctgagtgtccccgaggacgtgacataatatatgaatgggctagtttatgagcagagaccacttggagcagcatgcagtagcagagaaagatgaggtttgcagagtgaagggcctgaaatgtcagggtcaggggcactgaagtatctggctctatacatcccaggcccaggtttccctctgggccttatcaggtccaaagcctaacccctacctggaggcaacaggaggggcacccttggcctcgtcttgtccccaggccctcctcacaccctgcttcccacaggctctggcttcatcatgtgcagcggcaaagagaacccggacagtgatgctgacttggatgtggatggggatgacactctggagtatgggaagccacaatacacagaggctgatgtcatcccctgcacaggcgaggagcctggtgaagccaaggagagagaggcacttcggggcgcagtcctaaatggcggccctcccagcacgcgcatcacacctgagttctctaaatgggccagtgatgagatgccatccaccagcaatggtgaaagcagcaagcaggaggccatgcagaagacctgcaagaacagcgacatcgagaaaatcaccgaagattcagctgtgaccacgtttgaggctctgaaggctcgggtcagagaacttgaacggcagctatctcgtggggaccgttacaaatgcctcatctgcatggactcgtactcgatgcccctaacgtccatccagtgttggcacgtgcactgcgaggagtgctggctgcggaccctggtgaggtggcatgggggtcggggaatgggaggccgctccgggcactgcccagatgtctgtgcttatgcctgagcctgcctgggggaagtggggagcatggcgcaaaggagaacagagccaggagccaggatatttacccgcaggatatttacccccaggctcgctgcctctcctccccaactgcaggtttaggaacttctccccctccatgagttcactgcattctcccttccccgccccggtccccgaaggcccactgcatcacacagactggtgaggcctggggtcaggaggaggctggctgtaggtaaacaggaccagggccttggcccctccccctcccattactaagctccttctgctcctgcccctgttcttcgctcaggagcagccattaaaatgtcgcccggagacagtaataaaaggctcggacgtgggctctgtgtcctgatcaaaggccgcgtgtaatctcgttagggctgcggctgccacagctggacccagccttgttctcattactggggctcctgctgcggggctggccaggcggtttgatcctggcgtccccccaacacaggagcgtgcctgcctgctcacagaagctgcctatgcgtccccagcctgggctgacaggaccaaggtctcagcacacactggtgcagagagacatggctgcaggcccaggtgctcacatgcgcacacatggctcattgtgtagaccagagccctccctgttctccctgcagggtgccaagaagctctgccctcagtgcaacacgatcacagcgcccggagacctgcggaggatctacttgtgagctatctgccccaggcaggcctcgcctccagcagccccacctgcccccagcctctgtgacagtgaccgtctccctttgtacatacttgcacacaggttccccatgtacatacatgcacatactcaaacatgcgtacacacacacacatttacacacgcaggactctggagccagagtagaggctgtggcccaggcactacctgctggctcccacctatggtttgggggccatacctgttccagctctgttcccagggtggggcagggaggtgggggttgggggagtagtggggcacggctcctaagatccagcccccatactgacagacggacagacagacatgcaaacaccagactgaagcacatgtaatatagaccgtgtatgtttacaatgttgtgtataaatgggacaactcctcgccctctacctgtcccctccccctttggttgtatgattttcttcttttttaagaacccctggaagcagcgcctccttcagggttggctgggagctcggcccatccacctcttggggtacctgcctctctctctcctgtggtgtcccttccctctcccatgtgctcggtgttcagtggtgtatatttcttctcccagacatggggcacacgccccaagggacatgatcctctccttagtcttagctcatggggctctttataaggagttggggggtagaggcaggaaatgggaaccgagctgaagcagaggctgagttagggggctagaggacagtgctcctggccacccagcctctgctgagaaccattcctgggattagagctgcctttcccagggaaaaagtgtcgtctccccgaccctcccgtgggccctgtggtgtgatgctgtgtctgtatattctatacaaaggtacttgtcctttccctttgtaaactacatttgacatggattaaaccagtataaacagtt

SEQ ID NO: 17957 - DNA, 3303 bp, Homo sapiens
  source 1..3303: mol_type = unassigned DNA
ttgtaaggtgtaaataagataattatcaatccctcagtacaatctctggcatttagtaagtgcttaataaattttagctattttatttgtattatcattattattccctaaggccagtctcctataccatcttttctacttttccaggaagcattcttctccatctgtgagctcccctggatcctgttcatttgttttaggagggtgggaaggttccttgagagagtcctagctattccctgttcagcagtgcagcccaaggagtcctggaaatgcaggagggaccttcaggtgcagggcttggcccacacacaggactaccagggcatctgatatatctaggaagtaacaaggagccctggaggcaggccagggctgtggcaaagagacctagatcatgtgggacacgcctagtccctgcatctgtccccctctccctggagtttggacgggccctttcttcagcaggtgtttgctcacgtcccatgcctgaggtggggctcttggccatagtcagtattggtggagtgagcagcccgccctcagggaacccatactcaggaactttacactgctgtggtggagttcacacggggggctgtgagagccactgtgcagtgctggctcaggggtctggaaaaggcttctgggagggcatgggaacaaaactagatctgaatgatgaggcagagctagtgagtcaggcgagggggtgcagagggatcacagtgcagaggccaaggcagtgaaaaaggtggcgtggatggtgacacataggagtcgagcataaaatgcgtggcaaggtcctcaggggtacggcgggctggggctggaccaaggagtgtagtggagctctctactccaagggggacattggaatgttggaagtcacaccacgagagatttgctttgagaacataaattcctctaggcgctgggagagtggaatagagatgaggggcctggaggcagaaaggctgtctggaaaaagttagtggtggaattggtggaagacatctgagagcctggactcatggtggtgaggagagatgccggagatactaggagagatgacagatttgggtggttgggaagactgcgaaggagtggttgaaaatggttccctggtatctggtgtagaaattcatccgaatgggaatggaggaatagagagggtgaggagtttagttctggaatgtggaatttgcagattcaggttatcagagaaagggggcaggcagggatgcctaggggacatttatgtatttggttctggaattcaagggaggcgtaggctggaggtacagatgagagatgccagcctgctacccaaccatgccttcctttttacagaatcaccgaagattcagctgtgaccacgtttgaggctctgaaggctcgggtcagagaacttgaacggcagctatctcgtggggaccgttacaaatgcctcatctgcatggactcgtactcgatgcccctaacgtccatccagtgttggcacgtgcactgcgaggagtgctggctgcggaccctggtgaggtggcatgggggtcggggaatgggaggccgctccgggcactgcccagatgtctgtgcttatgcctgagcctgcctgggggaagtggggagcatggcgcaaaggagaacagagccaggagccaggatatttacccgcaggatatttacccccaggctcgctgcctctcctccccaactgcaggtttaggaacttctccccctccatgagttcactgcattctcccttccccgccccggtccccgaaggcccactgcatcacacagactggtgaggcctggggtcaggaggaggctggctgtaggtaaacaggaccagggccttggcccctccccctcccattactaagctccttctgctcctgcccctgttcttcgctcaggagcagccattaaaatgtcgcccggagacagtaataaaaggctcggacgtgggctctgtgtcctgatcaaaggccgcgtgtaatctcgttagggctgcggctgccacagctggacccagccttgttctcattactggggctcctgctgcggggctggccaggcggtttgatcctggcgtccccccaacacaggagcgtgcctgcctgctcacagaagctgcctatgcgtccccagcctgggctgacaggaccaaggtctcagcacacactggtgcagagagacatggctgcaggcccaggtgctcacatgcgcacacatggctcattgtgtagaccagagccctccctgttctccctgcagggtgccaagaagctctgccctcagtgcaacacgatcacagcgcccggagacctgcggaggatctacttgtgagctatctgccccaggcaggcctcgcctccagcagccccacctgcccccagcctctgtgacagtgaccgtctccctttgtacatacttgcacacaggttccccatgtacatacatgcacatactcaaacatgcgtacacacacacacatttacacacgcaggactctggagccagagtagaggctgtggcccaggcactacctgctggctcccacctatggtttgggggccatacctgttccagctctgttcccagggtggggcagggaggtgggggttgggggagtagtggggcacggctcctaagatccagcccccatactgacagacggacagacagacatgcaaacaccagactgaagcacatgtaatatagaccgtgtatgtttacaatgttgtgtataaatgggacaactcctcgccctctacctgtcccctccccctttggttgtatgattttcttcttttttaagaacccctggaagcagcgcctccttcagggttggctgggagctcggcccatccacctcttggggtacctgcctctctctctcctgtggtgtcccttccctctcccatgtgctcggtgttcagtggtgtatatttcttctcccagacatggggcacacgccccaagggacatgatcctctccttagtcttagctcatggggctctttataaggagttggggggtagaggcaggaaatgggaaccgagctgaagcagaggctgagttagggggctagaggacagtgctcctggccacccagcctctgctgagaaccattcctgggattagagctgcctttcccagggaaaaagtgtcgtctccccgaccctcccgtgggccctgtggtgtgatgctgtgtctgtatattctatacaaaggtacttgtcctttccctttgtaaactacatttgacatggattaaaccagtataaacagtt

SEQ ID NO: 17958 - DNA, 3010 bp, Homo sapiens
  source 1..3010: mol_type = unassigned DNA
actgctccttctctcacgccaactgagtctcttgatctgtacatgcaatcccaggcagctcgcgaacacaaacccggggccagccgcctactgctgctgctgctgctgccgctgccgccgccgccgccgccgctgcctccgccggctctgcgaacccgggacttttcatgcaccacactctccgcctgcttccctccgtgtcctgaaaagtgcgaccgttctcccaaggaatttccacggcaagtcttaggagggaatgattccccagtaatattccctgccctgacccaaagtgctggttggcctccctcccagggaagactgcttcttgcgtaacgccggccacagaaagagactccgatggacttacaccgggcagccttcaagatggagaactcatcctaccttcccaaccctctggcatccccagcactgatggtcctggcatccacggctgaggccagccgtgatgcttccatcccttgtcagcagccacgaccctttggtgtacctgtctcagttgacaaggacgtgcatattcctttcaccaacggttcctatacctttgcctctatgtaccatcggcaaggtggggtgccaggcacttttgccaatcgtgatttccccccttctctactacacctccaccctcaatttgctcccccaaatctagattgcaccccaatcagtatgctgaatcatagtggtgtgggggctttccggccctttgcctccaccgaggaccgggagagctatcagtcagcctttacgccggccaagcgacttaagaactgccatgacacagagtctccccacttgcgcttctcagatgcagatggcaaggaatatgactttgggacacagctgccatctagctcccccggttcactaaaggttgatgacactgggaagaagatttttgctgtctctggcctcatttctgatcgggaagcctcatctagcccagaggatcggaatgacagatgtaagaagaaagcagcggcattgttcgacagccaggccccaatttgccccatctgccaggtcctgctgaggcccagtgagctgcaggagcatatggagcaggaactggagcagctagcccaactgccctcgagcaagaattcccttctgaaggatgccatggctccaggcaccccaaagtccctcctgttgtctgcttccatcaagagggaaggagagtctccaacggcatcaccccactcatctgccaccgatgacctccaccattcagacagataccagacctttctgcgagtacgagccaaccggcagacccgactgaatgctcggattgggaaaatgaaacggaggaagcaagatgaagggcagagggaaggctcctgcatggctgaggatgatgctgtggacatcgagcatgagaacaacaaccgctttgaggagtatgagtggtgtggacagaagcggatacgggccaccactctcctggaaggtggcttccgaggctctggcttcatcatgtgcagcggcaaagagaacccggacagtgatgctgacttggatgtggatggggatgacactctggagtatgggaagccacaatacacagaggctgatgtcatcccctgcacaggcgaggagcctggtgaagccaaggagagagaggcacttcggggcgcagtcctaaatggcggccctcccagcacgcgcatcacacctgagttctctaaatgggccagtgatgagatgccatccaccagcaatggtgaaagcagcaagcaggaggccatgcagaagacctgcaagaacagcgacatcgagaaaatcaccgaagattcagctgtgaccacgtttgaggctctgaaggctcgggtcagagaacttgaacggcagctatctcgtggggaccgttacaaatgcctcatctgcatggactcgtactcgatgcccctaacgtccatccagtgttggcacgtgcactgcgaggagtgctggctgcggaccctgggtgccaagaagctctgccctcagtgcaacacgatcacagcgcccggagacctgcggaggatctacttgtgagctatctgccccaggcaggcctcgcctccagcagccccacctgcccccagcctctgtgacagtgaccgtctccctttgtacatacttgcacacaggttccccatgtacatacatgcacatactcaaacatgcgtacacacacacacatttacacacgcaggactctggagccagagtagaggctgtggcccaggcactacctgctggctcccacctatggtttgggggccatacctgttccagctctgttcccagggtggggcagggaggtgggggttgggggagtagtggggcacggctcctaagatccagcccccatactgacagacggacagacagacatgcaaacaccagactgaagcacatgtaatatagaccgtgtatgtttacaatgttgtgtataaatgggacaactcctcgccctctacctgtcccctccccctttggttgtatgattttcttcttttttaagaacccctggaagcagcgcctccttcagggttggctgggagctcggcccatccacctcttggggtacctgcctctctctctcctgtggtgtcccttccctctcccatgtgctcggtgttcagtggtgtatatttcttctcccagacatggggcacacgccccaagggacatgatcctctccttagtcttagctcatggggctctttataaggagttggggggtagaggcaggaaatgggaaccgagctgaagcagaggctgagttagggggctagaggacagtgctcctggccacccagcctctgctgagaaccattcctgggattagagctgcctttcccagggaaaaagtgtcgtctccccgaccctcccgtgggccctgtggtgtgatgctgtgtctgtatattctatacaaaggtacttgtcctttccctttgtaaactacatttgacatggattaaaccagtataaacagttg

SEQ ID NO: 17959 - DNA, 1970 bp, Homo sapiens
  source 1..1970: mol_type = unassigned DNA
cgttacgcaaggcctggtgtttacctcccgtgggagcctcctccctccctataaagcctgatgtggtggagagatttgacgagactgagactctggttgaagagagaggcaatcccaggagaggggcggaaagcggcaaaagttaatgcgggagtcggagagaagggcatctacacagcaagcagcaggggcggcccgccatctgcgcgctcgaaggcggtcacggtggtcgcggaaggggcggcgtccagatcctggctttccatggatgcgcccgagctgggcccggggctggtggagcgtctggagcagctggcgacgtgtcctctgtgcgggggctccttcgaggacccggtgcttctggcgtgcgagcacagcttctgccgcgcgtgtctggcccgccgctgggggactccgccggcgaccggcaccgaggcttcccccaccgcctgtccctgctgcggcctgccgtgtccccgccgcagcctgaggtctaatgtgcggctggcggtggaggtgcgaatcagccgcgagctgcgagagaagctggctgagcctggggcccgtgcggggagacgccgaggggggcgcatccccaccatgggctgcctggacctgcccggagaggatatgaggaagacatggagacgatttgaagtcccaacatccaagtcatctaattcagaggatgatctccctgaagattatccagtggtcaaaaaaatgcttcatagactgacagccgacctgaccctggaccctgggaccgcacaccgccgcctgctcatctccgccgaccgccgcagcgtacaactggccccaccagggacgcccgcgccccctgacggccccaagcgcttcgatcagctcccagctgtgctgggtgcgcagggcttcggggccggccgccactgctgggaggtggagactgcggacgccgcctcctgcagagactcttctggggaggatgcggacgacgaggagagccactatgcagtgggcgcggccggggaatcagtgcaacgcaagggctgcgcgcctggccccctgggggagcgcatcttcccgctgttctgcacctgcgaccctcgtgctccgctccgcattgtaccagcggaaagctgagtctcgtctccaactagaagtttggcccggccactggccctgcagctgctttttgggggtggaattccccactcatttctgggaacacattcacacgcccattgcaggagtattaatagcaacccacattttcgccccaaaataatgagacctcacctggtctccacgtttccacgtccctgctcaaaaccaaatccattcctgccttctggctctcagaatcttctctcccctacagctactacagtacttcctgacttctcccattcaaaccattctaggcctgcaatggggaacaggccctccccatcagtattggtaaagtgaccatgattcctacatagaggctctgctggtcaaatacttgactcccactcttgccactcctagctccagaagggctcagggccttccccacagatctaaggactgggctaccctgcctgtccactgaggtttctcctaaaacaagaggcttgactctggtctgggccctgtggccctctgggaagctttgtacctcttttgcaggatctgggggtggggagggacaagctagttccccaacctcctatgactgctttctatgctcacagccttttttccataagaaccttcttgaaacttctccccgcacatactcacggaaaggaaccaatggtgctatttcccctctctcctcctcaacctgggaatacttcagacatctccaaactcatccttgtgtatagtctcacacccttccccataagtataaatgggcccatatttaacacattttgtgattttgggttatttattttgtgcatctgtggcaataaatgagatctcagtggtggtatgga

SEQ ID NO: 17960 - DNA, 2206 bp, Homo sapiens
  source 1..2206: mol_type = unassigned DNA
cccaaaccttacccgggaagcaggagaaccagatgaggcgttacgcaaggcctggtgtttacctcccgtgggagcctcctccctccctataaagcctgatgtggtggagagatttgacgagactgagactctggttgaagagagaggcaatcccaggagaggggcggaaagcggcaaaagttaatgcgggagtcggagagaagggcatctacacagcaagcagcaggggcggcccgccatctgcgcgctcgaaggcggtcacggtggtcgcggaaggggcggcgtccagatcctggctttccatggatgcgcccgagctgggcccggggctggtggagcgtctggagcagctggcgacgtgtcctctgtgcgggggctccttcgaggacccggtgcttctggcgtgcgagcacagcttctgccgcgcgtgtctggcccgccgctgggggactccgccggcgaccggcaccgaggcttcccccaccgcctgtccctgctgcggcctgccgtgtccccgccgcagcctgaggtctaatgtgcggctggcggtggaggtgcgaatcagccgcgagctgcgagagaagctggctgagcctggggcccgtgcggggagacgccgaggggggcgcatccccaccatgggctgcctggacctgcccggagaggatatgaggaagacatggagacgatttgaagtcccaacatccaagtcatctaattcagaggatgatctccctgaagattatccagtggtcaaaaaaatgcttcatagactgacagccgacctgaccctggaccctgggaccgcacaccgccgcctgctcatctccgccgaccgccgcagcgtacaactggccccaccagggacgcccgcgccccctgacggccccaagcgcttcgatcagctcccagctgtgctgggtgcgcagggcttcggggccggccgccactgctgggaggtggagactgcggacgccgcctcctgcagagactcttctggggaggatgcggacgacgaggagagccactatgcagtgggcgcggccggggaatcagtgcaacgcaagggctgcgtaaggctgtgccctgcgggggccgtgtgggccgtggagggccgcggcggccgcctgtgggccctcacggcacccgaacccaccctgctgggcggtgttgagcccccgccgcggcgcattcgcgtggacctggactgggagcggggccgcgtggccttctacgacggccgctcactcgacctgctttacgccttccaggcgcctggccccctgggggagcgcatcttcccgctgttctgcacctgcgaccctcgtgctccgctccgcattgtaccagcggaaagctgagtctcgtctccaactagaagtttggcccggccactggccctgcagctgctttttgggggtggaattccccactcatttctgggaacacattcacacgcccattgcaggagtattaatagcaacccacattttcgccccaaaataatgagacctcacctggtctccacgtttccacgtccctgctcaaaaccaaatccattcctgccttctggctctcagaatcttctctcccctacagctactacagtacttcctgacttctcccattcaaaccattctaggcctgcaatggggaacaggccctccccatcagtattggtaaagtgaccatgattcctacatagaggctctgctggtcaaatacttgactcccactcttgccactcctagctccagaagggctcagggccttccccacagatctaaggactgggctaccctgcctgtccactgaggtttctcctaaaacaagaggcttgactctggtctgggccctgtggccctctgggaagctttgtacctcttttgcaggatctgggggtggggagggacaagctagttccccaacctcctatgactgctttctatgctcacagccttttttccataagaaccttcttgaaacttctccccgcacatactcacggaaaggaaccaatggtgctatttcccctctctcctcctcaacctgggaatacttcagacatctccaaactcatccttgtgtatagtctcacacccttccccataagtataaatgggcccatatttaacacattttgtgattttgggttatttattttgtgcatctgtggcaataaatgagatctcagtggtggtatgga

SEQ ID NO: 17961 - DNA, 2206 bp, Homo sapiens
  source 1..2206: mol_type = unassigned DNA
cccaaaccttacccgggaagcaggagaaccagatgaggcgttacgcaaggcctggtgtttacctcccgtgggagcctcctccctccctataaagcctgatgtggtggagagatttgacgagactgagactctggttgaagagagaggcaatcccaggagaggggcggaaagcggcaaaagttaatgcgggagtcggagagaagggcatctacacagcaagcagcaggggcggcccgccatctgcgcgctcgaaggcggtcacggtggtcgcggaaggggcggcgtccagatcctggctttccatggatgcgcccgagctgggcccggggctggtggagcgtctggagcagctggcgacgtgtcctctgtgcgggggctccttcgaggacccggtgcttctggcgtgcgagcacagcttctgccgcgcgtgtctggcccgccgctgggggactccgccggcgaccggcaccgaggcttcccccaccgcctgtccctgctgcggcctgccgtgtccccgccgcagcctgaggtctaatgtgcggctggcggtggaggtgcgaatcagccgcgagctgcgagagaagctggctgagcctggggcccgtgcggggagacgccgaggggggcgcatccccaccatgggctgcctggacctgcccggagaggatatgaggaagacatggagacgatttgaagtcccaacatccaagtcatctaattcagaggatgatctccctgaagattatccagtggtcaaaaaaatgcttcatagactgacagccgacctgaccctggaccctgggaccgcacaccgccgcctgctcatctccgccgaccgccgcagcgtacaactggccccaccagggacgcccgcgccccctgacggccccaagcgcttcgatcagctcccagctgtgctgggtgcgcagggcttcggggccggccgccactgctgggaggtggagactgcggacgccgcctcctgcagagactcttctggggaggatgcggacgacgaggagagccactatgcagtgggcgcggccggggaatcagtgcaacgcaagggctgcgtaaggctgtgccctgcgggggccgtgtgggccgtggagggccgcggcggccgcctgtgggccctcacggcacccgaacccaccctgctgggcggtgttgagcccccgccgcggcgcattcgcgtggacctggactgggagcggggccgcgtggccttctacgacggccgctcactcgacctgctttacgccttccaggcgcctggccccctgggggagcgcatcttcccgctgttctgcacctgcgaccctcgtgctccgctccgcattgtaccagcggaaagctgagtctcgtctccaactagaagtttggcccggccactggccctgcagctgctttttgggggtggaattccccactcatttctgggaacacattcacacgcccattgcaggagtattaatagcaacccacattttcgccccaaaataatgagacctcacctggtctccacgtttccacgtccctgctcaaaaccaaatccattcctgccttctggctctcagaatcttctctcccctacagctgctacagtacttcctgacttctcccattcaaaccattctaggcctgcaatggggaacaggccctccccatcagtattggtaaagtgaccatgattcctacatagaggctctgctggtcaaatacttgactcccactcttgccactcctagctccagaagggctcagggccttccccacagatctaaggactgggctaccctgcctgtccactgaggtttctcctaaaacaagaggcttgactctggtctgggccctgtggccctctgggaagctttgtacctcttttgcaggatccgggggtggggagggacaagctagttccccaacctcctatgactgctttctatgctcacagccttttttccataagaaccttcttgaaacttctccccgcacatactcacggaaaggaaccaatggtgctatttcccctctctcctcctcaacctgggaatacttcagacatctccaaactcatccttgtgtatagtctcacacccttccccataagtataaatgggcccatatttaacacattttgtgattttgggttatttattttgtgcatctgtggcaataaatgagatctcagtggtggtatgga

SEQ ID NO: 17962 - DNA, 1970 bp, Homo sapiens
  source 1..1970: mol_type = unassigned DNA
cgttacgcaaggcctggtgtttacctcccgtgggagcctcctccctccctataaagcctgatgtggtggagagatttgacgagactgagactctggttgaagagagaggcaatcccaggagaggggcggaaagcggcaaaagttaatgcgggagtcggagagaagggcatctacacagcaagcagcaggggcggcccgccatctgcgcgctcgaaggcggtcacggtggtcgcggaaggggcggcgtccagatcctggctttccatggatgcgcccgagctgggcccggggctggtggagcgtctggagcagctggcgacgtgtcctctgtgcgggggctccttcgaggacccggtgcttctggcgtgcgagcacagcttctgccgcgcgtgtctggcccgccgctgggggactccgccggcgaccggcaccgaggcttcccccaccgcctgtccctgctgcggcctgccgtgtccccgccgcagcctgaggtctaatgtgcggctggcggtggaggtgcgaatcagccgcgagctgcgagagaagctggctgagcctggggcccgtgcggggagacgccgaggggggcgcatccccaccatgggctgcctggacctgcccggagaggatatgaggaagacatggagacgatttgaagtcccaacatccaagtcatctaattcagaggatgatctccctgaagattatccagtggtcaaaaaaatgcttcatagactgacagccgacctgaccctggaccctgggaccgcacaccgccgcctgctcatctccgccgaccgccgcagcgtacaactggccccaccagggacgcccgcgccccctgacggccccaagcgcttcgatcagctcccagctgtgctgggtgcgcagggcttcggggccggccgccactgctgggaggtggagactgcggacgccgcctcctgcagagactcttctggggaggatgcggacgacgaggagagccactatgcagtgggcgcggccggggaatcagtgcaacgcaagggctgcgcgcctggccccctgggggagcgcatcttcccgctgttctgcacctgcgaccctcgtgctccgctccgcattgtaccagcggaaagctgagtctcgtctccaactagaagtttggcccggccactggccctgcagctgctttttgggggtggaattccccactcatttctgggaacacattcacacgcccattgcaggagtattaatagcaacccacattttcgccccaaaataatgagacctcacctggtctccacgtttccacgtccctgctcaaaaccaaatccattcctgccttctggctctcagaatcttctctcccctacagctgctacagtacttcctgacttctcccattcaaaccattctaggcctgcaatggggaacaggccctccccatcagtattggtaaagtgaccatgattcctacatagaggctctgctggtcaaatacttgactcccactcttgccactcctagctccagaagggctcagggccttccccacagatctaaggactgggctaccctgcctgtccactgaggtttctcctaaaacaagaggcttgactctggtctgggccctgtggccctctgggaagctttgtacctcttttgcaggatccgggggtggggagggacaagctagttccccaacctcctatgactgctttctatgctcacagccttttttccataagaaccttcttgaaacttctccccgcacatactcacggaaaggaaccaatggtgctatttcccctctctcctcctcaacctgggaatacttcagacatctccaaactcatccttgtgtatagtctcacacccttccccataagtataaatgggcccatatttaacacattttgtgattttgggttatttattttgtgcatctgtggcaataaatgagatctcagtggtggtatgga

SEQ ID NO: 17963 - DNA, 1970 bp, Homo sapiens
  source 1..1970: mol_type = unassigned DNA
cgttacgcaaggcctggtgtttacctcccgtgggagcctcctccctccctataaagcctgatgtggtggagagatttgacgagactgagactctggttgaagagagaggcaatcccaggagaggggcggaaagcggcaaaagttaatgcgggagtcggagagaagggcatctacacagcaagcagcaggggcggcccgccatctgcgcgctcgaaggcggtcacggtggtcgcggaaggggcggcgtccagatcctggctttccatggatgcgcccgagctgggcccggggctggtggagcgtctggagcagctggcgacgtgtcctctgtgcgggggctccttcgaggacccggtgcttctggcgtgcgagcacagcttctgccgcgcgtgtctggcccgccgctgggggactccgccggcgaccggcaccgaggcttcccccaccgcctgtccctgctgcggcctgccgtgtccccgccgcagcctgaggtctaatgtgcggctggcggtggaggtgcgaatcagccgcgagctgcgagagaagctggctgagcctggggcccgtgcggggagacgccgaggggggcgcatccccaccatgggctgcctggacctgcccggagaggatatgaggaagacatggagacgatttgaagtcccaacatccaagtcatctaattcagaggatgatctccctgaagattatccagtggtcaaaaaaatgcttcatagactgacagccgacctgaccctggaccctgggaccgcacaccgccgcctgctcatctccgccgaccgccgcagcgtacaactggccccaccagggacgcccgcgccccctgacggccccaagcgcttcgatcagctcccagctgtgctgggtgcgcagggcttcggggccggccgccactgctgggaggtggagactgcggacgccgcctcctgcagagactcttctggggaggatgcggacgacgaggagagccactatgcagtgggcgcggccggggaatcagtgcaacgcaagggctgcgcgcctggccccctgggggagcgcatcttcccgctgttctgcacctgcgaccctcgtgctccgctccgcattgtaccagcggaaagctgagtctcgtctccaactagaagtttggcccggccactggccctgcagctgctttttgggggtggaattccccactcatttctgggaacacattcacacgcccattgcaggagtattaatagcaacccacattttcgccccaaaataatgagacctcacctggtctccacgtttccacgtccctgctcaaaaccaaatccattcctgccttctggctctcagaatcttctctcccctacagctactacagtacttcctgacttctcccattcaaaccattctaggcctgcaatggggaacaggccctccccatcagtattggtaaagtgaccatgattcctacatagaggctctgctggtcaaatacttgactcccactcttgccactcctagctccagaagggctcagggccttccccacagatctaaggactgggctaccctgcctgtccactgaggtttctcctaaaacaagaggcttgactctggtctgggccctgtggccctctgggaagctttgtacctcttttgcaggatccgggggtggggagggacaagctagttccccaacctcctatgactgctttctatgctcacagccttttttccataagaaccttcttgaaacttctccccgcacatactcacggaaaggaaccaatggtgctatttcccctctctcctcctcaacctgggaatacttcagacatctccaaactcatccttgtgtatagtctcacacccttccccataagtataaatgggcccatatttaacacattttgtgattttgggttatttattttgtgcatctgtggcaataaatgagatctcagtggtggtatgga

SEQ ID NO: 17964 - DNA, 2206 bp, Homo sapiens
  source 1..2206: mol_type = unassigned DNA
cccaaaccttacccgggaagcaggagaaccagatgaggcgttacgcaaggcctggtgtttacctcccgtgggagcctcctccctccctataaagcctgatgtggtggagagatttgacgagactgagactctggttgaagagagaggcaatcccaggagaggggcggaaagcggcaaaagttaatgcgggagtcggagagaagggcatctacacagcaagcagcaggggcggcccgccatctgcgcgctcgaaggcggtcacggtggtcgcggaaggggcggcgtccagatcctggctttccatggatgcgcccgagctgggcccggggctggtggagcgtctggagcagctggcgacgtgtcctctgtgcgggggctccttcgaggacccggtgcttctggcgtgcgagcacagcttctgccgcgcgtgtctggcccgccgctgggggactccgccggcgaccggcaccgaggcttcccccaccgcctgtccctgctgcggcctgccgtgtccccgccgcagcctgaggtctaatgtgcggctggcggtggaggtgcgaatcagccgcgagctgcgagagaagctggctgagcctggggcccgtgcggggagacgccgaggggggcgcatccccaccatgggctgcctggacctgcccggagaggatatgaggaagacatggagacgatttgaagtcccaacatccaagtcatctaattcagaggatgatctccctgaagattatccagtggtcaaaaaaatgcttcatagactgacagccgacctgaccctggaccctgggaccgcacaccgccgcctgctcatctccgccgaccgccgcagcgtacaactggccccaccagggacgcccgcgccccctgacggccccaagcgcttcgatcagctcccagctgtgctgggtgcgcagggcttcggggccggccgccactgctgggaggtggagactgcggacgccgcctcctgcagagactcttctggggaggatgcggacgacgaggagagccactatgcagtgggcgcggccggggaatcagtgcaacgcaagggctgcgtaaggctgtgccctgcgggggccgtgtgggccgtggagggccgcggcggccgcctgtgggccctcacggcacccgaacccaccctgctgggcggtgttgagcccccgccgcggcgcattcgcgtggacctggactgggagcggggccgcgtggccttctacgacggccgctcactcgacctgctttacgccttccaggcgcctggccccctgggggagcgcatcttcccgctgttctgcacctgcgaccctcgtgctccgctccgcattgtaccagcggaaagctgagtctcgtctccaactagaagtttggcccggccactggccctgcagctgctttttgggggtggaattccccactcatttctgggaacacattcacacgcccattgcaggagtattaatagcaacccacattttcgccccaaaataatgagacctcacctggtctccacgtttccacgtccctgctcaaaaccaaatccattcctgccttctggctctcagaatcttctctcccctacagctactacagtacttcctgacttctcccattcaaaccattctaggcctgcaatggggaacaggccctccccatcagtattggtaaagtgaccatgattcctacatagaggctctgctggtcaaatacttgactcccactcttgccactcctagctccagaagggctcagggccttccccacagatctaaggactgggctaccctgcctgtccactgaggtttctcctaaaacaagaggcttgactctggtctgggccctgtggccctctgggaagctttgtacctcttttgcaggatccgggggtggggagggacaagctagttccccaacctcctatgactgctttctatgctcacagccttttttccataagaaccttcttgaaacttctccccgcacatactcacggaaaggaaccaatggtgctatttcccctctctcctcctcaacctgggaatacttcagacatctccaaactcatccttgtgtatagtctcacacccttccccataagtataaatgggcccatatttaacacattttgtgattttgggttatttattttgtgcatctgtggcaataaatgagatctcagtggtggtatgga

SEQ ID NO: 17965 - DNA, 1970 bp, Homo sapiens
  source 1..1970: mol_type = unassigned DNA
cgttacgcaaggcctggtgtttacctcccgtgggagcctcctccctccctataaagcctgatgtggtggagagatttgacgagactgagactctggttgaagagagaggcaatcccaggagaggggcggaaagcggcaaaagttaatgcgggagtcggagagaagggcatctacacagcaagcagcaggggcggcccgccatctgcgcgctcgaaggcggtcacggtggtcgcggaaggggcggcgtccagatcctggctttccatggatgcgcccgagctgggcccggggctggtggagcgtctggagcagctggcgacgtgtcctctgtgcgggggctccttcgaggacccggtgcttctggcgtgcgagcacagcttctgccgcgcgtgtctggcccgccgctgggggactccgccggcgaccggcaccgaggcttcccccaccgcctgtccctgctgcggcctgccgtgtccccgccgcagcctgaggtctaatgtgcggctggcggtggaggtgcgaatcagccgcgagctgcgagagaagctggctgagcctggggcccgtgcggggagacgccgaggggggcgcatccccaccatgggctgcctggacctgcccggagaggatatgaggaagacatggagacgatttgaagtcccaacatccaagtcatctaattcagaggatgatctccctgaagattatccagtggtcaaaaaaatgcttcatagactgacagccgacctgaccctggaccctgggaccgcacaccgccgcctgctcatctccgccgaccgccgcagcgtacaactggccccaccagggacgcccgcgccccctgacggccccaagcgcttcaatcagctcccagctgtgctgggtgcgcagggcttcggggccggccgccactgctgggaggtggagactgcggacgccgcctcctgcagagactcttctggggaggatgcggacgacgaggagagccactatgcagtgggcgcggccggggaatcagtgcaacgcaagggctgcgcgcctggccccctgggggagcgcatcttcccgctgttctgcacctgcgaccctcgtgctccgctccgcattgtaccagcggaaagctgagtctcgtctccaactagaagtttggcccggccactggccctgcagctgctttttgggggtggaattccccactcatttctgggaacacattcacacgcccattgcaggagtattaatagcaacccacattttcgccccaaaataatgagacctcacctggtctccacgtttccacgtccctgctcaaaaccaaatccattcctgccttctggctctcagaatcttctctcccctacagctactacagtacttcctgacttctcccattcaaaccattctaggcctgcaatggggaacaggccctccccatcagtattggtaaagtgaccatgattcctacatagaggctctgctggtcaaatacttgactcccactcttgccactcctagctccagaagggctcagggccttccccacagatctaaggactgggctaccctgcctgtccactgaggtttctcctaaaacaagaggcttgactctggtctgggccctgtggccctctgggaagctttgtacctcttttgcaggatctgggggtggggagggacaagctagttccccaacctcctatgactgctttctatgctcacagccttttttccataagaaccttcttgaaacttctccccgcacatactcacggaaaggaaccaatggtgctatttcccctctctcctcctcaacctgggaatacttcagacatctccaaactcatccttgtgtatagtctcacacccttccccataagtataaatgggcccatatttaacacattttgtgattttgggttatttattttgtgcatctgtggcaataaatgagatctcagtggtggtatgga

SEQ ID NO: 17966 - DNA, 2206 bp, Homo sapiens
  source 1..2206: mol_type = unassigned DNA
cccaaaccttacccgggaagcaggagaaccagatgaggcgttacgcaaggcctggtgtttacctcccgtgggagcctcctccctccctataaagcctgatgtggtggagagatttgacgagactgagactctggttgaagagagaggcaatcccaggagaggggcggaaagcggcaaaagttaatgcgggagtcggagagaagggcatctacacagcaagcagcaggggcggcccgccatctgcgcgctcgaaggcggtcacggtggtcgcggaaggggcggcgtccagatcctggctttccatggatgcgcccgagctgggcccggggctggtggagcgtctggagcagctggcgacgtgtcctctgtgcgggggctccttcgaggacccggtgcttctggcgtgcgagcacagcttctgccgcgcgtgtctggcccgccgctgggggactccgccggcgaccggcaccgaggcttcccccaccgcctgtccctgctgcggcctgccgtgtccccgccgcagcctgaggtctaatgtgcggctggcggtggaggtgcgaatcagccgcgagctgcgagagaagctggctgagcctggggcccgtgcggggagacgccgaggggggcgcatccccaccatgggctgcctggacctgcccggagaggatatgaggaagacatggagacgatttgaagtcccaacatccaagtcatctaattcagaggatgatctccctgaagattatccagtggtcaaaaaaatgcttcatagactgacagccgacctgaccctggaccctgggaccgcacaccgccgcctgctcatctccgccgaccgccgcagcgtacaactggccccaccagggacgcccgcgccccctgacggccccaagcgcttcaatcagctcccagctgtgctgggtgcgcagggcttcggggccggccgccactgctgggaggtggagactgcggacgccgcctcctgcagagactcttctggggaggatgcggacgacgaggagagccactatgcagtgggcgcggccggggaatcagtgcaacgcaagggctgcgtaaggctgtgccctgcgggggccgtgtgggccgtggagggccgcggcggccgcctgtgggccctcacggcacccgaacccaccctgctgggcggtgttgagcccccgccgcggcgcattcgcgtggacctggactgggagcggggccgcgtggccttctacgacggccgctcactcgacctgctttacgccttccaggcgcctggccccctgggggagcgcatcttcccgctgttctgcacctgcgaccctcgtgctccgctccgcattgtaccagcggaaagctgagtctcgtctccaactagaagtttggcccggccactggccctgcagctgctttttgggggtggaattccccactcatttctgggaacacattcacacgcccattgcaggagtattaatagcaacccacattttcgccccaaaataatgagacctcacctggtctccacgtttccacgtccctgctcaaaaccaaatccattcctgccttctggctctcagaatcttctctcccctacagctactacagtacttcctgacttctcccattcaaaccattctaggcctgcaatggggaacaggccctccccatcagtattggtaaagtgaccatgattcctacatagaggctctgctggtcaaatacttgactcccactcttgccactcctagctccagaagggctcagggccttccccacagatctaaggactgggctaccctgcctgtccactgaggtttctcctaaaacaagaggcttgactctggtctgggccctgtggccctctgggaagctttgtacctcttttgcaggatctgggggtggggagggacaagctagttccccaacctcctatgactgctttctatgctcacagccttttttccataagaaccttcttgaaacttctccccgcacatactcacggaaaggaaccaatggtgctatttcccctctctcctcctcaacctgggaatacttcagacatctccaaactcatccttgtgtatagtctcacacccttccccataagtataaatgggcccatatttaacacattttgtgattttgggttatttattttgtgcatctgtggcaataaatgagatctcagtggtggtatgga

SEQ ID NO: 17967 - DNA, 1961 bp, Homo sapiens
  source 1..1961: mol_type = unassigned DNA
cgttacgcaaggcctggtgtttacctcccgtgggagcctcctccctccctataaagcctgatgtggtggagagatttgacgagactgagactctggttgaagagagaggcaatcccaggagaggggcggaaagcggcaaaagttaatgcgggagtcggagagaagggcatctacacagcaagcagcaggggcggcccgccatctgcgcgctcgaaggcggtcacggtggtcgcggaaggggcggcgtccagatcctggctttccatggatgcgcccgagctgggcccggggctggtggagcgtctggagcagctggcgacgtgtcctctgtgcgggggctccttcgaggacccggtgcttctggcgtgcgagcacagcttctgccgcgcgtgtctggcccgccgctgggggactccgccggcgaccggcaccgaggcttcccccaccgcctgtccgtgctgcggcctgccgtgtccccgccgcagcctgaggtctaatgtgcggctggcggtggaggtgcgaatcagccgcgagctgcgagagaagctggctgagcctggggcccgtgcggggagacgccgaggggggcgcatccccaccatgggctgcctggacctgcccggagaggatatgaggaagacatggagacgatttgaagtcccaacacccaagtcatctaattcagaggatgatctccctgaagattatccagtggtcaaaaaaatgcttcatagactgacagccgacctgaccctggaccctgggaccgcacaccgccgcctgctcatctccaccgaccgccgcagcgtacaactggccccaccagggacgcccgcgccccctgacggccccaagcgcttcgatcagctcccagctgtgctgggtgcgcagggcttcggggccggccgccactgctgggaggtggagactgcggacgccgcctcctgcagagactcttctggggaggatgaggacgacgaggagagccactatgcagtgggcgcggccggggaatcagtgcaacgcaagggctgcgcgcctggccccctgggggagcgcatcttcccgctgttctgcacctgcgaccctcgtgctccgctccgcattgtaccagcggaaagctgagtctcgtctccaactagaagtttggcccggccactggccctgcagctgctttttgggcgtggaattccccactcatttctgggaacacattcacacgcccattgcaggagtattaatagcaacccacattttcgccccaaaataatgagacctcacctggtctccacgtttccacatccctgctcaaaaccaaatccattcctgccttctggctctcagaatcttctctcccctacagctactacagtacttcctgacttctcccattcaaaccattctaggcctgcaatggggaacaggccctccccatcagtattggtaaagtgaccatgattcctacatagaggctctgctggtcaaatacttgactcccactcttgccactcctagctccagaagggctcagggccttccccacagatctaaggactgggctaccctgcctgtccactgaggtttctcctaaaacaagaggcttgactctggtctgggccctgtggccctctgggaagctttgtactcttttgcaggatctgggggtggggagggacaagctagttccccaacctcctatgactgctttctatgctcacagccttttttccataagaaccttcttgaaacttctccccgcacatacggaaaggaaccaatggtgctatttcccctctctcctcctcaacctgggaatacttcagacatctccaaactcatccttgtgtatagtctcacacccttccccataagtataaatgggcccatatttaacacattttgtgattttgggttatttattttgtgcatctgtggcaataaatgagatctcagtggtggta

SEQ ID NO: 17968 - DNA, 2161 bp, Homo sapiens
  source 1..2161: mol_type = unassigned DNA
ggcgttacgcaaggcctggtgtttacctcccgtgggagcctcctccctccctataaagcctgatgtggtggagagatttgacgagactgagactctggttgaagagagaggcaatcccaggagaggggcggaaagcggcaaaagttaatgcgggagtcggagagaagggcatctacacagcaagcagcaggggcggcccgccatctgcgcgctcgaaggcggtcacggtggtcgcggaaggggcggcgtccagatcctggctttccatggatgcgcccgagctgggcccggggctggtggagcgtctggagcagctggcgacgtgtcctctgtgcgggggctccttcgaggacccggtgcttctggcgtgcgagcacagcttctgccgcgcgtgtctggcccgccgctgggggactccgccggcgaccggcaccgaggcttcccccaccgcctgtccgtgctgcggcctgccgtgtccccgccgcagcctgaggtctaatgtgcggctggcggtggaggtgcgaatcagccgcgagctgcgagagaagctggctgagcctggggcccgtgcggggagacgccgaggggggcgcatccccaccatgggctgcctggacctgcccggagaggatatgaggaagacatggagacgatttgaagtcccaacacccaagtcatctaattcagaggatgatctccctgaagattatccagtggtcaaaaaaatgcttcatagactgacagccgacctgaccctggaccctgggaccgcacaccgccgcctgctcatctccaccgaccgccgcagcgtacaactggccccaccagggacgcccgcgccccctgacggccccaagcgcttcgatcagctcccagctgtgctgggtgcgcagggcttcggggccggccgccactgctgggaggtggagactgcggacgccgcctcctgcagagactcttctggggaggatgaggacgacgaggagagccactatgcagtgggcgcggccggggaatcagtgcaacgcaagggctgcgtaaggctgtgccctgcgggggccgtgtgggccgtggagggccgcggcggccgcctgtgggccctcacggcacccgagcccaccctgctgggcggtgttgagcccccgccgcggcgcattcgcgtggacctggactgggagcggggccgcgtggccttctacgacggccgctcactcgacctgctttacgccttccaggcgcctggccccctgggggagcgcatcttcccgctgttctgcacctgcgaccctcgtgctccgctccgcattgtaccagcggaaagctgagtctcgtctccaactagaagtttggcccggccactggccctgcagctgctttttgggcgtggaattccccactcatttctgggaacacattcacacgcccattgcaggagtattaatagcaacccacattttcgccccaaaataatgagacctcacctggtctccacgtttccacatccctgctcaaaaccaaatccattcctgccttctggctctcagaatcttctctcccctacagctactacagtacttcctgacttctcccattcaaaccattctaggcctgcaatggggaacaggccctccccatcagtattggtaaagtgaccatgattcctacatagaggctctgctggtcaaatacttgactcccactcttgccactcctagctccagaagggctcagggccttccccacagatctaaggactgggctaccctgcctgtccactgaggtttctcctaaaacaagaggcttgactctggtctgggccctgtggccctctgggaagctttgtactcttttgcaggatctgggggtggggagggacaagctagttccccaacctcctatgactgctttctatgctcacagccttttttccataagaaccttcttgaaacttctccccgcacatacggaaaggaaccaatggtgctatttcccctctctcctcctcaacctgggaatacttcagacatctccaaactcatccttgtgtatagtctcacacccttccccataagtataaatgggcccatatttaacacattttgtgattttgggttatttattttgtgcatctgtggcaataaatgagatctcagtggtggta

SEQ ID NO: 17969 - DNA, 1970 bp, Homo sapiens; identical to SEQ ID NO: 17959
  source 1..1970: mol_type = unassigned DNA

SEQ ID NO: 17970 - DNA, 2206 bp, Homo sapiens; identical to SEQ ID NO: 17960
  source 1..2206: mol_type = unassigned DNA

SEQ ID NO: 17971 - DNA, 2206 bp, Homo sapiens; identical to SEQ ID NO: 17964
  source 1..2206: mol_type = unassigned DNA

SEQ ID NO: 17972 - DNA, 1970 bp, Homo sapiens; identical to SEQ ID NO: 17963
  source 1..1970: mol_type = unassigned DNA

SEQ ID NO: 17973 - DNA, 1970 bp, Homo sapiens; identical to SEQ ID NO: 17959
  source 1..1970: mol_type = unassigned DNA

SEQ ID NO: 17974 - DNA, 2206 bp, Homo sapiens
  source 1..2206: mol_type = unassigned DNA
cccaaaccttacccgggaagcaggagaaccagatgaggcgttacgcaaggcctggtgtttacctcccgtgggagcctcctccctccctataaagcctgatgtggtggagagatttgacgagactgagactctggttgaagagagaggcaatcccaggagaggggcggaaagcggcaaaagttaatgcgggagtcggagagaagggcatctacacagcaagcagcaggggcggcccgccatctgcgcgctcgaaggcggtcacggtggtcgcggaaggggcggcgtccagatcctggctttccatggatgcgcccgagctgggcccggggctggtggagcgtctggagcagctggcgacgtgtcctctgtgcgggggctccttcgaggacccggtgcttctggcgtgcgagcacagcttctgccgcgcgtgtctggcccgccgctgggggactccgccggcgaccggcaccgaggcttcccccaccgcctgtccctgctgcggcctgccgtgtccccgccgcagcctgaggtctaatgtgcggctggcggtggaggtgcgaatcagccgcgagctgcgagagaagctggctgagcctggggcccgtgcggggagacgccgaggggggcgcatccccaccatgggctgcctggacctgcccggagaggatatgaggaagacatggagacgatttgaagtcccaacatccaagtcatctaattcagaggatgatctccctgaagattatccagtggtcaaaaaaatgcttcatagactgacagccgacctgaccctggaccctgggaccgcacaccgccgcctgctcatctccgccgaccgccgcagcgtacaactggccccaccagggacgcccgcgccccctgacggccccaagcgcttcgatcagctcccagctgtgctgggtgcgcagggcttcggggccggccgccactgctgggaggtggagactgcggacgccgcctcctgcagagactcttctggggaggatgcggacgacgaggagagccactatgcagtgggcgcggccggggaatcagtgcaacgcaagggctgcgtaaggctgtgccctgcgggggccgtgtgggccgtggggggccgcggcggccgcctgtgggccctcacggcacccgaacccaccctgctgggcggtgttgagcccccgccgcggcgcattcgcgtggacctggactgggagcggggccgcgtggccttctacgacggccgctcactcgacctgctttacgccttccaggcgcctggccccctgggggagcgcatcttcccgctgttctgcacctgcgaccctcgtgctccgctccgcattgtaccagcggaaagctgagtctcgtctccaactagaagtttggcccggccactggccctgcagctgctttttgggggtggaattccccactcatttctgggaacacattcacacgcccattgcaggagtattaatagcaacccacattttcgccccaaaataatgagacctcacctggtctccacgtttccacgtccctgctcaaaaccaaatccattcctgccttctggctctcagaatcttctctcccctacagctactacagtacttcctgacttctcccattcaaaccattctaggcctgcaatggggaacaggccctccccatcagtattggtaaagtgaccatgattcctacatagaggctctgctggtcaaatacttgactcccactcttgccactcctagctccagaagggctcagggccttccccacagatctaaggactgggctaccctgcctgtccactgaggtttctcctaaaacaagaggcttgactctggtctgggccctgtggccctctgggaagctttgtacctcttttgcaggatctgggggtggggagggacaagctagttccccaacctcctatgactgctttctatgctcacagccttttttccataagaaccttcttgaaacttctccccgcacatactcacggaaaggaaccaatggtgctatttcccctctctcctcctcaacctgggaatacttcagacatctccaaactcatccttgtgtatagtctcacacccttccccataagtataaatgggcccatatttaacacattttgtgattttgggttatttattttgtgcatctgtggcaataaatgagatctcagtggtggtatgga

SEQ ID NO: 17975 - DNA, 5516 bp, Homo sapiens
  source 1..5516: mol_type = unassigned DNA
atatgctgtttggagaaaaaaagaacttttgttagcaaggaggtttcagaaatgattttggattttctgtaagtgtttaatttagttctaggggacagcatctctcatcccggagtaaatttctgcctttgacctgcatggattattttttcaggctgcggaatttctcggcacctacctgtagtatggggcacttggtttggttgcagagtaagaaggtggaagaatgagctgtacttggttaagcagttgaaaccttttttgagcaggatctgtaaaagcataattgaatttgtttcacccccgtggattccagtgggcccgacagcgcaacagtgcctggcaacttgatgcatatggaagagcaatgccaagtgatctgacataatacaaattcacgaagtgacattcaatcacaagcaaagttggaaattccaaagagaagtggtgagatctttactagtcacagtgaagatgggagaaaatgacatacctgcagcagatgtgggctgaaaatatcctcttctctgcccaatcaggaatgctacctgtttttgggaataaactttagagaaaggaagggccaaaactacgacttggctttctgaaacggaagcataaatgttcttttcctccatttgtctggatctgagaacctgcatttggtattagctagtggaagcagtatgtatggttgaagtgcattgctgcagctggtagcatgagtggtggccaccagctgcagctggctgccctctggccctggctgctgatggctaccctgcaggcaggctttggacgcacaggactggtactggcagcagcggtggagtctgaaagatcagcagaacagaaagctattatcagagtgatccccttgaaaatggaccccacaggaaaactgaatctcactttggaaggtgtgtttgctggtgttgctgaaataactccagcagaaggaaaattaatgcagtcccacccgctgtacctgtgcaatgccagtgatgacgacaatctggagcctggattcatcagcatcgtcaagctggagagtcctcgacgggccccccgcccctgcctgtcactggctagcaaggctcggatggcgggtgagcgaggagccagtgctgtcctctttgacatcactgaggatcgagctgctgctgagcagctgcagcagccgctggggctgacctggccagtggtgttgatctggggtaatgacgctgagaagctgatggagtttgtgtacaagaaccaaaaggcccatgtgaggattgagctgaaggagcccccggcctggccagattatgatgtgtggatcctaatgacagtggtgggcaccatctttgtgatcatcctggcttcggtgctgcgcatccggtgccgcccccgccacagcaggccggatccgcttcagcagagaacagcctgggccatcagccagctggccaccaggaggtaccaggccagctgcaggcaggcccggggtgagtggccagactcagggagcagctgcagctcagcccctgtgtgtgccatctgtctggaggagttctctgaggggcaggagctacgggtcatttcctgcctccatgagttccatcgtaactgtgtggacccctggttacatcagcatcggacttgccccctctgcatgttcaacatcacagagggagattcattttcccagtccctgggaccctctcgatcttaccaagaaccaggtcgaagactccacctcattcgccagcatcccggccatgcccactaccacctccctgctgcctacctgttgggcccttcccggagtgcagtggctcggcccccacgacctggtcccttcctgccatcccaggagccaggcatgggccctcggcatcaccgcttccccagagctgcacatccccgggctccaggagagcagcagcgcctggcaggagcccagcacccctatgcacaaggctggggactgagccacctccaatccacctcacagcaccctgctgcttgcccagtgcccctacgccgggccaggccccctgacagcagtggatctggagaaagctattgcacagaacgcagtgggtacctggcagatgggccagccagtgactccagctcagggccctgtcatggctcttccagtgactctgtggtcaactgcacggacatcagcctacagggggtccatggcagcagttctactttctgcagctccctaagcagtgactttgaccccctagtgtactgcagccctaaaggggatccccagcgagtggacatgcagcctagtgtgacctctcggcctcgttccttggactcggtggtgcccacaggggaaacccaggtttccagccatgtccactaccaccgccaccggcaccaccactacaaaaagcggttccagtggcatggcaggaagcctggcccagaaaccggagtcccccagtccaggcctcctattcctcggacacagccccagccagagccaccttctcctgatcagcaagtcaccagatccaactcagcagccccttcggggcggctctctaacccacagtgccccagggccctccctgagccagcccctggcccagttgacgcctccagcatctgccccagtaccagcagtctgttcaacttgcaaaaatccagcctctctgcccgacacccacagaggaaaaggcgggggggtccctccgagcccacccctggctctcggccccaggatgcaactgtgcacccagcttgccagatttttccccattacacccccagtgtggcatatccttggtccccagaggcacaccccttgatctgtggacctccaggcctggacaagaggctgctaccagaaaccccaggcccctgttactcaaattcacagccagtgtggttgtgcctgactcctcgccagcccctggaaccacatccacctggggaggggccttctgaatggagttctgacaccgcagagggcaggccatgcccttatccgcactgccaggtgctgtcggcccagcctggctcagaggaggaactcgaggagctgtgtgaacaggctgtgtgagatgttcaggcctagctccaaccaagagtgtgctccagatgtgtttgggccctacctggcacagagtcctgctcctgggaaaggaaaggaccacagcaaacaccattctttttgccgtacttcctagaagcactggaagaggactggtgatggtggagggtgagagggtgccgtttcctgctccagctccagaccttgtctgcagaaaacatctgcagtgcagcaaatccatgtccagccaggcaaccagctgctgcctgtggcgtgtgtgggctggatcccttgaaggctgagtttttgagggcagaaagctagctatgggtagccaggtgttacaaaggtgctgctccttctccaacccctacttggtttccctcaccccaagcctcatgttcataccagccagtgggttcagcagaacgcatgacaccttatcacctccctccttgggtgagctctgaacaccagctttggcccctccacagtaaggctgctacatcaggggcaaccctggctctatcattttccttttttgccaaaaggaccagtagcataggtgagccctgagcactaaaaggaggggtccctgaagctttcccactatagtgtggagttctgtccctgaggtgggtacagcagccttggttcctctgggggttgagaataagaatagtggggagggaaaaactcctccttgaagatttcctgtctcagagtcccagagaggtagaaaggaggaatttctgctggactttatctgggcagaggaaggatggaatgaaggtagaaaaggcagaattacagctgagcggggacaacaaagagttcttctctgggaaaagttttgtcttagagcaaggatggaaaatggggacaacaaaggaaaagcaaagtgtgacccttgggtttggacagcccagaggcccagctccccagtataagccatacaggccagggacccacaggagagtggattagagcacaagtctggcctcactgagtggacaagagctgatgggcctcatcagggtgacattcaccccagggcagcctgaccactcttggcccctcaggcattatcccatttggaatgtgaatgtggtggcaaagtgggcagaggaccccacctgggaacctttttccctcagttagtggggagactagcacctaggtacccacatgggtatttatatctgaaccagacagacgcttgaatcaggcactatgttaagaaatatatttatttgctaatatatttatccacaaatgtggtctggtcttgtggttttgttctgtcgtgactgtcactcagggtaacaacgtcatctctttctacatcaagagaagtaaattatttatgttatcagaggctaggctccgattcatgaaaggatagggtagagtagagggcttggcaataagaactggtttgtaagcccctaaaagtgtggcttagtgagatcagggaaggagaaagcatgactggattcttactgtgcttcagtcattattattatactgttcacttcacacattatcatacttcagtgactcagaccttgggcaaatactctgtgcctcgctttttcagtccataaaatgggcctacttaatagttgttgcaggacttacatgagataatagagtgtagaaaatatgttccaaagtggaaagttttattcagtgatagaaaacatccaaacctgtcacagagcccatctgaacacagcatgggaccgccaacaagaagaaagcccgcccggaagcagctcaatcaggaggctgggctggaatgacagcgcagcggggcctgaaactatttatatcccaaagctcctctcagataaacacaaatgactgcgttctgcctgcactcgggctattgcgaggacagagagctggtgctccattggcgtgaagtctccagggccagaaggggcctttgtcgcttcctcacaaggcacaagttccccttctgcttccccgagaaaggtttggtaggggtggtggtttagtgcctatagaacaaggcatttcgcttcctagacggtgaaatgaaagggaaaaaaaggacacctaatctcctacaaatggtctttagtaaaggaaccgtgtctaagcgctaagaactgcgcaaagtataaattatcagccggaacgagcaaacagacggagttttaaaagataaatacgcatttttttccgccgtagctcccaggccagcattcctgtgggaagcaagtggaaaccctatagcgctctcgcagttaggaaggaggggtggggctgtccctggatttcttctcggtctctgcagagacaatccagagggagacagtggattcactgcccccaatgcttctaaaacggggagacaaaacaaaaaaaaacaaacttcgggttaccatcggggaacaggaccgacgcccagggccaccagccc

SEQ ID NO: 17976 - DNA, 3560 bp, Homo sapiens
  source 1..3560: mol_type = unassigned DNA
tgcatttggtattagctagtggaagcagtatgtatggttgaagtgcattgctgcagctggtagcatgagtggtggccaccagctgcagctggctgccctctggccctggctgctgatggctaccctgcaggcaggctttggacgcacaggactggtactggcagcagcggtggagtctgaaagatcagcagaacagaaagctattatcagagtgatccccttgaaaatggaccccacaggaaaactgaatctcactttggaaggtgtgtttgctggtgttgctgaaataactccagcagaaggaaaattaatgcaggctcggatggcgggtgagcgaggagccagtgctgtcctctttgacatcactgaggatcgagctgctgctgagcagctgcagcagccgctggggctgacctggccagtggtgttgatctggggtaatgacgctgagaagctgatggagtttgtgtacaagaaccaaaaggcccatgtgaggattgagctgaaggagcccccggcctggccagattatgatgtgtggatcctaatgacagtggtgggcaccatctttgtgatcatcctggcttcggtgctgcgcatccggtgccgcccccgccacagcaggccggatccgcttcagcagagaacagcctgggccatcagccagctggccaccaggaggtaccaggccagctgcaggcaggcccggggtgagtggccagactcagggagcagctgcagctcagcccctgtgtgtgccatctgtctggaggagttctctgaggggcaggagctacgggtcatttcctgcctccatgagttccatcgtaactgtgtggacccctggttacatcagcatcggacttgccccctctgcatgttcaacatcacagagggagattcattttcccagtccctgggaccctctcgatcttaccaagaaccaggtcgaagactccacctcattcgccagcatcccggccatgcccactaccacctccctgctgcctacctgttgggcccttcccggagtgcagtggctcggcccccacgacctggtcccttcctgccatcccaggagccaggcatgggccctcggcatcaccgcttccccagagctgcacatccccgggctccaggagagcagcagcgcctggcaggagcccagcacccctatgcacaaggctggggactgagccacctccaatccacctcacagcaccctgctgcttgcccagtgcccctacgccgggccaggccccctgacagcagtggatctggagaaagctattgcacagaacgcagtgggtacctggcagatgggccagccagtgactccagctcagggccctgtcatggctcttccagtgactctgtggtcaactgcacggacatcagcctacagggggtccatggcagcagttctactttctgcagctccctaagcagtgactttgaccccctagtgtactgcagccctaaaggggatccccagcgagtggacatgcagcctagtgtgacctctcggcctcgttccttggactcggtggtgcccacaggggaaacccaggtttccagccatgtccactaccaccgccaccggcaccaccactacaaaaagcggttccagtggcatggcaggaagcctggcccagaaaccggagtcccccagtccaggcctcctattcctcggacacagccccagccagagccaccttctcctgatcagcaagtcaccagatccaactcagcagccccttcggggcggctctctaacccacagtgccccagggccctccctgagccagcccctggcccagttgacgcctccagcatctgccccagtaccagcagtctgttcaacttgcaaaaatccagcctctctgcccgacacccacagaggaaaaggcgggggggtccctccgagcccacccctggctctcggccccaggatgcaactgtgcacccagcttgccagatttttccccattacacccccagtgtggcatatccttggtccccagaggcacaccccttgatctgtggacctccaggcctggacaagaggctgctaccagaaaccccaggcccctgttactcaaattcacagccagtgtggttgtgcctgactcctcgccagcccctggaaccacatccacctggggaggggccttctgaatggagttctgacaccgcagagggcaggccatgcccttatccgcactgccaggtgctgtcggcccagcctggctcagaggaggaactcgaggagctgtgtgaacaggctgtgtgagatgttcaggcctagctccaaccaagagtgtgctccagatgtgtttgggccctacctggcacagagtcctgctcctgggaaaggaaaggaccacagcaaacaccattctttttgccgtacttcctagaagcactggaagaggactggtgatggtggagggtgagagggtgccgtttcctgctccagctccagaccttgtctgcagaaaacatctgcagtgcagcaaatccatgtccagccaggcaaccagctgctgcctgtggcgtgtgtgggctggatcccttgaaggctgagtttttgagggcagaaagctagctatgggtagccaggtgttacaaaggtgctgctccttctccaacccctacttggtttccctcaccccaagcctcatgttcataccagccagtgggttcagcagaacgcatgacaccttatcacctccctccttgggtgagctctgaacaccagctttggcccctccacagtaaggctgctacatcaggggcaaccctggctctatcattttccttttttgccaaaaggaccagtagcataggtgagccctgagcactaaaaggaggggtccctgaagctttcccactatagtgtggagttctgtccctgaggtgggtacagcagccttggttcctctgggggttgagaataagaatagtggggagggaaaaactcctccttgaagatttcctgtctcagagtcccagagaggtagaaaggaggaatttctgctggactttatctgggcagaggaaggatggaatgaaggtagaaaaggcagaattacagctgagcggggacaacaaagagttcttctctgggaaaagttttgtcttagagcaaggatggaaaatggggacaacaaaggaaaagcaaagtgtgacccttgggtttggacagcccagaggcccagctccccagtataagccatacaggccagggacccacaggagagtggattagagcacaagtctggcctcactgagtggacaagagctgatgggcctcatcagggtgacattcaccccagggcagcctgaccactcttggcccctcaggcattatcccatttggaatgtgaatgtggtggcaaagtgggcagaggaccccacctgggaacctttttccctcagttagtggggagactagcacctaggtacccacatgggtatttatatctgaaccagacagacgcttgaatcaggcactatgttaagaaatatatttatttgctaatatatttatccacaaa

SEQ ID NO: 17977 - DNA, 5575 bp, Homo sapiens
  source 1..5575: mol_type = unassigned DNA
ggagttgatccagaattgtctttctgaaaggaagcactcggaatccttccgaactttccaagtccatccatgattcagagatactgccttctctctctctgggattttatgtgtttctgatagtgaattgttgatgtatttgctactttgcttcttttctctttcaagacttgatcattttatatgctgtttggagaaaaaaagaacttttgttagcaaggaggtttcagaaatgattttggattttctgtaagtgtttaatttagttctaggggacagcatctctcatcccggagtaaatttctgcctttgacctgcatggattattttttcaggctgcggaatttctcggcacctacctgtagtatggggcacttggtttggttgcagagtaagaaggtggaagaatgagctgtacttggttaagcagttgaaaccttttttgagcaggatctgtaaaagcataattgaatttgtttcacccccgtggattccagtgggcccgacagcgcaacaggtttgcagatttcttttgaaattcctttttcccccctccctctgcctcagcaaaagaaaagaatccatataacaggttcatgttcaattgcttggcttttcagcacttattctgaagactttataatatttttaaacttgaccttggaacacagagggctttgtgggtgaggtgtatttatatttacttaagggtgcacattttaaaaatcttattctgtgtttgtacaaagacgcaaattttcatagtgcctagaaatagcacagatctattctactcaagattatttgtattttttcagggtattctacctagagcctgtggttaatcgcctccctgctccccctaccttttattccctaccccctcagggaatttggatacatgtgaggaatagtcctttgtttttcttatgaacctagaaaattacagatcataaaatctggatattaaagtagtttccaaaagcatctcatgggaaatcaaagtgctcggcatttccgagctggagaataaaatcaagaatccttaagagagaaaagaaaatggagatggaaatatgaattttaactgggaaaaataattggaaagctaaccttttcaaatactctaattatgaaagttggaaaaggttgtgatgctcaggattatcctgtaatgtgtgaagatacataaattagcacctaatttataggcaaattttggtaaaacacaaaaaattatggtatgtctaagttcatgaaaagtatgtaaatgcagtgggcctagaaacctggccacactgaaatacagtttaatgtggaaacttttctaaatacatattgtagcatctttggacatcaacgtgtggcctgaaatttttattattgttccctcttctcctccattaaaaaaaaaatctccttgtggtatttagtcatttaccattaacacatattatggcttaaaaagggccatcccttccttttctgagctggagttcttcacgctcacctttgatgcatggccttagctgtttactttgccttgttttgttcatgaacattgggtttagtgcctggcaacttgatgcatatggaagagcaatgccaagtgatctgacataatacaaattcacgaagtgacattcaatcacaagcaaagttggaaattccaaagagaagtggtgagatctttactagtcacagtgaagatgggagaaaatgacatacctgcagcagatgtgggctgaaaatatcctcttctctgcccaatcaggaatgctacctgtttttgggaataaactttagagaaaggaagggccaaaactacgacttggctttctgaaacggaagcataaatgttcttttcctccatttgtctggatctgagaacctgcatttggtattagctagtggaagcagtatgtatggttgaagtgcattgctgcagctggtagcatgagtggtggccaccagctgcagctggctgccctctggccctggctgctgatggctaccctgcaggcaggctttggacgcacaggactggtactggcagcagcggtggagtctgaaagatcagcagaacagaaagctattatcagagtgatccccttgaaaatggaccccacaggaaaactgaatctcactttggaaggtgtgtttgctggtgttgctgaaataactccagcagaaggaaaattaatgcagtcccacccgctgtacctgtgcaatgccagtgatgacgacaatctggagcctggattcatcagcatcgtcaagctggagagtcctcgacgggccccccgcccctgcctgtcactggctagcaaggctcggatggcgggtgagcgaggagccagtgctgtcctctttgacatcactgaggatcgagctgctgctgagcagctgcagcagccgctggggctgacctggccagtggtgttgatctggggtaatgacgctgagaagctgatggagtttgtgtacaagaaccaaaaggcccatgtgaggattgagctgaaggagcccccggcctggccagattatgatgtgtggatcctaatgacagtggtgggcaccatctttgtgatcatcctggcttcggtgctgcgcatccggtgccgcccccgccacagcaggccggatccgcttcagcagagaacagcctgggccatcagccagctggccaccaggaggtaccaggccagctgcaggcaggcccggggtgagtggccagactcagggagcagctgcagctcagcccctgtgtgtgccatctgtctggaggagttctctgaggggcaggagctacgggtcatttcctgcctccatgagttccatcgtaactgtgtggacccctggttacatcagcatcggacttgccccctctgcatgttcaacatcacagagggagattcattttcccagtccctgggaccctctcgatcttaccaagaaccaggtcgaagactccacctcattcgccagcatcccggccatgcccactaccacctccctgctgcctacctgttgggcccttcccggagtgcagtggctcggcccccacgacctggtcccttcctgccatcccaggagccaggcatgggccctcggcatcaccgcttccccagagctgcacatccccgggctccaggagagcagcagcgcctggcaggagcccagcacccctatgcacaaggctggggactgagccacctccaatccacctcacagcaccctgctgcttgcccagtgcccctacgccgggccaggccccctgacagcagtggatctggagaaagctattgcacagaacgcagtgggtacctggcagatgggccagccagtgactccagctcagggccctgtcatggctcttccagtgactctgtggtcaactgcacggacatcagcctacagggggtccatggcagcagttctactttctgcagctccctaagcagtgactttgaccccctagtgtactgcagccctaaaggggatccccagcgagtggacatgcagcctagtgtgacctctcggcctcgttccttggactcggtggtgcccacaggggaaacccaggtttccagccatgtccactaccaccgccaccggcaccaccactacaaaaagcggttccagtggcatggcaggaagcctggcccagaaaccggagtcccccagtccaggcctcctattcctcggacacagccccagccagagccaccttctcctgatcagcaagtcaccagatccaactcagcagccccttcggggcggctctctaacccacagtgccccagggccctccctgagccagcccctggcccagttgacgcctccagcatctgccccagtaccagcagtctgttcaacttgcaaaaatccagcctctctgcccgacacccacagaggaaaaggcgggggggtccctccgagcccacccctggctctcggccccaggatgcaactgtgcacccagcttgccagatttttccccattacacccccagtgtggcatatccttggtccccagaggcacaccccttgatctgtggacctccaggcctggacaagaggctgctaccagaaaccccaggcccctgttactcaaattcacagccagtgtggttgtgcctgactcctcgccagcccctggaaccacatccacctggggaggggccttctgaatggagttctgacaccgcagagggcaggccatgcccttatccgcactgccaggtgctgtcggcccagcctggctcagaggaggaactcgaggagctgtgtgaacaggctgtgtgagatgttcaggcctagctccaaccaagagtgtgctccagatgtgtttgggccctacctggcacagagtcctgctcctgggaaaggaaaggaccacagcaaacaccattctttttgccgtacttcctagaagcactggaagaggactggtgatggtggagggtgagagggtgccgtttcctgctccagctccagaccttgtctgcagaaaacatctgcagtgcagcaaatccatgtccagccaggcaaccagctgctgcctgtggcgtgtgtgggctggatcccttgaaggctgagtttttgagggcagaaagctagctatgggtagccaggtgttacaaaggtgctgctccttctccaacccctacttggtttccctcaccccaagcctcatgttcataccagccagtgggttcagcagaacgcatgacaccttatcacctccctccttgggtgagctctgaacaccagctttggcccctccacagtaaggctgctacatcaggggcaaccctggctctatcattttccttttttgccaaaaggaccagtagcataggtgagccctgagcactaaaaggaggggtccctgaagctttcccactatagtgtggagttctgtccctgaggtgggtacagcagccttggttcctctgggggttgagaataagaatagtggggagggaaaaactcctccttgaagatttcctgtctcagagtcccagagaggtagaaaggaggaatttctgctggactttatctgggcagaggaaggatggaatgaaggtagaaaaggcagaattacagctgagcggggacaacaaagagttcttctctgggaaaagttttgtcttagagcaaggatggaaaatggggacaacaaaggaaaagcaaagtgtgacccttgggtttggacagcccagaggcccagctccccagtataagccatacaggccagggacccacaggagagtggattagagcacaagtctggcctcactgagtggacaagagctgatgggcctcatcagggtgacattcaccccagggcagcctgaccactcttggcccctcaggcattatcccatttggaatgtgaatgtggtggcaaagtgggcagaggaccccacctgggaacctttttccctcagttagtggggagactagcacctaggtacccacatgggtatttatatctgaaccagacagacgcttgaatcaggcactatgttaagaaatatatttatttgctaatatatttatccacaaa

SEQ ID NO: 17978 - DNA, 4367 bp, Homo sapiens
  source 1..4367: mol_type = unassigned DNA
ggagtcagagctagaacaccaattacaaaccacaggcttcctgctctagggagttgatccagaattgtctttctgaaaggaagcactcggaatccttccgaactttccaagtccatccatgattcagagatactgccttctctctctctgggattttatgtgtttctgatagtgaattgttgatgtatttgctactttgcttcttttctctttcaagacttgatcattttatatgctgtttggagaaaaaaagaacttttgttagcaaggaggtttcagaaatgattttggattttctgtaagtgtttaatttagttctaggggacagcatctctcatcccggagtaaatttctgcctttgacctgcatggattattttttcaggctgcggaatttctcggcacctacctgtagtatggggcacttggtttggttgcagagtaagaaggtggaagaatgagctgtacttggttaagcagttgaaaccttttttgagcaggatctgtaaaagcataattgaatttgtttcacccccgtggattccagtgggcccgacagcgcaacaggaatgctacctgtttttgggaataaactttagagaaaggaagggccaaaactacgacttggctttctgaaacggaagcataaatgttcttttcctccatttgtctggatctgagaacctgcatttggtattagctagtggaagcagtatgtatggttgaagtgcattgctgcagctggtagcatgagtggtggccaccagctgcagctggctgccctctggccctggctgctgatggctaccctgcaggcaggctttggacgcacaggactggtactggcagcagcggtggagtctgaaagatcagcagaacagaaagctattatcagagtgatccccttgaaaatggaccccacaggaaaactgaatctcactttggaaggtgtgtttgctggtgttgctgaaataactccagcagaaggaaaattaatgcagtcccacccgctgtacctgtgcaatgccagtgatgacgacaatctggagcctggattcatcagcatcgtcaagctggagagtcctcgacgggccccccgcccctgcctgtcactggctagcaaggctcggatggcgggtgagcgaggagccagtgctgtcctctttgacatcactgaggatcgagctgctgctgagcagctgcagcagccgctggggctgacctggccagtggtgttgatctggggtaatgacgctgagaagctgatggagtttgtgtacaagaaccaaaaggcccatgtgaggattgagctgaaggagcccccggcctggccagattatgatgtgtggatcctaatgacagtggtgggcaccatctttgtgatcatcctggcttcggtgctgcgcatccggtgccgcccccgccacagcaggccggatccgcttcagcagagaacagcctgggccatcagccagctggccaccaggaggtaccaggccagctgcaggcaggcccggggtgagtggccagactcagggagcagctgcagctcagcccctgtgtgtgccatctgtctggaggagttctctgaggggcaggagctacgggtcatttcctgcctccatgagttccatcgtaactgtgtggacccctggttacatcagcatcggacttgccccctctgcatgttcaacatcacagagggagattcattttcccagtccctgggaccctctcgatcttaccaagaaccaggtcgaagactccacctcattcgccagcatcccggccatgcccactaccacctccctgctgcctacctgttgggcccttcccggagtgcagtggctcggcccccacgacctggtcccttcctgccatcccaggagccaggcatgggccctcggcatcaccgcttccccagagctgcacatccccgggctccaggagagcagcagcgcctggcaggagcccagcacccctatgcacaaggctggggactgagccacctccaatccacctcacagcaccctgctgcttgcccagtgcccctacgccgggccaggccccctgacagcagtggatctggagaaagctattgcacagaacgcagtgggtacctggcagatgggccagccagtgactccagctcagggccctgtcatggctcttccagtgactctgtggtcaactgcacggacatcagcctacagggggtccatggcagcagttctactttctgcagctccctaagcagtgactttgaccccctagtgtactgcagccctaaaggggatccccagcgagtggacatgcagcctagtgtgacctctcggcctcgttccttggactcggtggtgcccacaggggaaacccaggtttccagccatgtccactaccaccgccaccggcaccaccactacaaaaagcggttccagtggcatggcaggaagcctggcccagaaaccggagtcccccagtccaggcctcctattcctcggacacagccccagccagagccaccttctcctgatcagcaagtcaccagatccaactcagcagccccttcggggcggctctctaacccacagtgccccagggccctccctgagccagcccctggcccagttgacgcctccagcatctgccccagtaccagcagtctgttcaacttgcaaaaatccagcctctctgcccgacacccacagaggaaaaggcgggggggtccctccgagcccacccctggctctcggccccaggatgcaactgtgcacccagcttgccagatttttccccattacacccccagtgtggcatatccttggtccccagaggcacaccccttgatctgtggacctccaggcctggacaagaggctgctaccagaaaccccaggcccctgttactcaaattcacagccagtgtggttgtgcctgactcctcgccagcccctggaaccacatccacctggggaggggccttctgaatggagttctgacaccgcagagggcaggccatgcccttatccgcactgccaggtgctgtcggcccagcctggctcagaggaggaactcgaggagctgtgtgaacaggctgtgtgagatgttcaggcctagctccaaccaagagtgtgctccagatgtgtttgggccctacctggcacagagtcctgctcctgggaaaggaaaggaccacagcaaacaccattctttttgccgtacttcctagaagcactggaagaggactggtgatggtggagggtgagagggtgccgtttcctgctccagctccagaccttgtctgcagaaaacatctgcagtgcagcaaatccatgtccagccaggcaaccagctgctgcctgtggcgtgtgtgggctggatcccttgaaggctgagtttttgagggcagaaagctagctatgggtagccaggtgttacaaaggtgctgctccttctccaacccctacttggtttccctcaccccaagcctcatgttcataccagccagtgggttcagcagaacgcatgacaccttatcacctccctccttgggtgagctctgaacaccagctttggcccctccacagtaaggctgctacatcaggggcaaccctggctctatcattttccttttttgccaaaaggaccagtagcataggtgagccctgagcactaaaaggaggggtccctgaagctttcccactatagtgtggagttctgtccctgaggtgggtacagcagccttggttcctctgggggttgagaataagaatagtggggagggaaaaactcctccttgaagatttcctgtctcagagtcccagagaggtagaaaggaggaatttctgctggactttatctgggcagaggaaggatggaatgaaggtagaaaaggcagaattacagctgagcggggacaacaaagagttcttctctgggaaaagttttgtcttagagcaaggatggaaaatggggacaacaaaggaaaagcaaagtgtgacccttgggtttggacagcccagaggcccagctccccagtataagccatacaggccagggacccacaggagagtggattagagcacaagtctggcctcactgagtggacaagagctgatgggcctcatcagggtgacattcaccccagggcagcctgaccactcttggcccctcaggcattatcccatttggaatgtgaatgtggtggcaaagtgggcagaggaccccacctgggaacctttttccctcagttagtggggagactagcacctaggtacccacatgggtatttatatctgaaccagacagacgcttgaatcaggcactatgttaagaaatatatttatttgctaatatatttatccacaaa

SEQ ID NO: 17979 - DNA, 2198 bp, Homo sapiens
  source 1..2198: mol_type = unassigned DNA
acagcctcatctctgggacctgaatagacaatttatcatttgaagaaaattaagactataactttaagaaattatcttctggtcccacccgctgtacctgtgcaatgccagtgatgacgacaatctggagcctggattcatcagcatcgtcaagctggagagtcctcgacgggccccccgcccctgcctgtcactggctagcaaggctcggatggcgggtgagcgaggagccagtgctgtcctctttgacatcactgaggatcgagctgctgctgagcagctgcagcagccgctggggctgacctggccagtggtgttgatctggggtaatgacgctgagaagctgatggagtttgtgtacaagaaccaaaaggcccatgtgaggattgagctgaaggagcccccggcctggccagattatgatgtgtggatcctaatgacagtggtgggcaccatctttgtgatcatcctggcttcggtgctgcgcatccggtgccgcccccgccacagcaggccggatccgcttcagcagagaacagcctgggccatcagccagctggccaccaggaggtaccaggccagctgcaggcaggcccggggtgagtggccagactcagggagcagctgcagctcagcccctgtgtgtgccatctgtctggaggagttctctgaggggcaggagctacgggtcatttcctgcctccatgagttccatcgtaactgtgtggacccctggttacatcagcatcggacttgccccctctgcatgttcaacatcacagagggagattcattttcccagtccctgggaccctctcgatcttaccaagaaccaggtcgaagactccacctcattcgccagcatcccggccatgcccactaccacctccctgctgcctacctgttgggcccttcccggagtgcagtggctcggcccccacgacctggtcccttcctgccatcccaggagccaggcatgggccctcggcatcaccgcttccccagagctgcacatccccgggctccaggagagcagcagcgcctggcaggagcccagcacccctatgcacaaggctggggactgagccacctccaatccacctcacagcaccctgctgcttgcccagtgcccctacgccgggccaggccccctgacagcagtggatctggagaaagctattgcacagaacgcagtgggtacctggcagatgggccagccagtgactccagctcagggccctgtcatggctcttccagtgactctgtggtcaactgcacggacatcagcctacagggggtccatggcagcagttctactttctgcagctccctaagcagtgactttgaccccctagtgtactgcagccctaaaggggatccccagcgagtggacatgcagcctagtgtgacctctcggcctcgttccttggactcggtggtgcccacaggggaaacccaggtttccagccatgtccactaccaccgccaccggcaccaccactacaaaaagcggttccagtggcatggcaggaagcctggcccagaaaccggagtcccccagtccaggcctcctattcctcggacacagccccagccagagccaccttctcctgatcagcaagtcaccagatccaactcagcagccccttcggggcggctctctaacccacagtgccccagggccctccctgagccagcccctggcccagttgacgcctccagcatctgccccagtaccagcagtctgttcaacttgcaaaaatccagcctctctgcccgacacccacagaggaaaaggcgggggggtccctccgagcccacccctggctctcggccccaggatgcaactgtgcacccagcttgccagatttttccccattacacccccagtgtggcatatccttggtccccagaggcacaccccttgatctgtggacctccaggcctggacaagaggctgctaccagaaaccccaggcccctgttactcaaattcacagccagtgtggttgtgcctgactcctcgccagcccctggaaccacatccacctggggaggggccttctgaatggagttctgacaccgcagagggcaggccatgcccttatccgcactgccaggtgctgtcggcccagcctggctcagaggaggaactcgaggagctgtgtgaacaggctgtgtgagatgttcaggcctagc

SEQ ID NO: 17980 - DNA, 2610 bp, Homo sapiens
  source 1..2610: mol_type = unassigned DNA
aggatctgtaaaagcataattgaatttgtttcacccccgtggattccagtgggcccgacagcgcaacagtcccacccgctgtacctgtgcaatgccagtgatgacgacaatctggagcctggattcatcagcatcgtcaagctggagagtcctcgacgggccccccgcccctgcctgtcactggctagcaaggctcggatggcgggtgagcgaggagccagtgctgtcctctttgacatcactgaggatcgagctgctgctgagcagctgcagcagccgctggggctgacctggccagtggtgttgatctggggtaatgacgctgagaagctgatggagtttgtgtacaagaaccaaaaggcccatgtgaggattgagctgaaggagcccccggcctggccagattatgatgtgtggatcctaatgacagtggtgggcaccatctttgtgatcatcctggcttcggtgctgcgcatccggtgccgcccccgccacagcaggccggatccgcttcagcagagaacagcctgggccatcagccagctggccaccaggaggtaccaggccagctgcaggcaggcccggggtgagtggccagactcagggagcagctgcagctcagcccctgtgtgtgccatctgtctggaggagttctctgaggggcaggagctacgggtcatttcctgcctccatgagttccatcgtaactgtgtggacccctggttacatcagcatcggacttgccccctctgcatgttcaacatcacagagggagattcattttcccagtccctgggaccctctcgatcttaccaagaaccaggtcgaagactccacctcattcgccagcatcccggccatgcccactaccacctccctgctgcctacctgttgggcccttcccggagtgcagtggctcggcccccacgacctggtcccttcctgccatcccaggagccaggcatgggccctcggcatcaccgcttccccagagctgcacatccccgggctccaggagagcagcagcgcctggcaggagcccagcacccctatgcacaaggctggggactgagccacctccaatccacctcacagcaccctgctgcttgcccagtgcccctacgccgggccaggccccctgacagcagtggatctggagaaagctattgcacagaacgcagtgggtacctggcagatgggccagccagtgactccagctcagggccctgtcatggctcttccagtgactctgtggtcaactgcacggacatcagcctacagggggtccatggcagcagttctactttctgcagctccctaagcagtgactttgaccccctagtgtactgcagccctaaaggggatccccagcgagtggacatgcagcctagtgtgacctctcggcctcgttccttggactcggtggtgcccacaggggaaacccaggtttccagccatgtccactaccaccgccaccggcaccaccactacaaaaagcggttccagtggcatggcaggaagcctggcccagaaaccggagtcccccagtccaggcctcctattcctcggacacagccccagccagagccaccttctcctgatcagcaagtcaccagatccaactcagcagccccttcggggcggctctctaacccacagtgccccagggccctccctgagccagcccctggcccagttgacgcctccagcatctgccccagtaccagcagtctgttcaacttgcaaaaatccagcctctctgcccgacacccacagaggaaaaggcgggggggtccctccgagcccacccctggctctcggccccaggatgcaactgtgcacccagcttgccagatttttccccattacacccccagtgtggcatatccttggtccccagaggcacaccccttgatctgtggacctccaggcctggacaagaggctgctaccagaaaccccaggcccctgttactcaaattcacagccagtgtggttgtgcctgactcctcgccagcccctggaaccacatccacctggggaggggccttctgaatggagttctgacaccgcagagggcaggccatgcccttatccgcactgccaggtgctgtcggcccagcctggtgagttttcagagggaagtgggtgtggtagggagaggagactacagctgaatatttcaggacaggtgaagtcagccaacaaagggttgatggaagctgagaaggatacagcagagatgacaaccaaaatacttaaccatcgggacagcgtatcatgctggctagagtgcaggaacaccccacctctgccaggtgctacccctttagttggcagatcacagggaggtcccagggaggtgctggtgtggctgaggcatcagaaaggcacttggaaggccgggtgtgatggctcatgcctgtaatcccagaactttgggaggcctaggtgggtggatcccttgaggccaggagttcaagaccaacctggccaacatggtgaaaccctatctctactaaaaatacaaaaattagccgggtatggtggcgggcacttataatcccagctactcaggaggctgaggcaggagaatcgcgtgaacctaaga

SEQ ID NO: 17981 - DNA, 324 bp, Homo sapiens
  source 1..324: mol_type = unassigned DNA
ggcgggtgagcgaggagccagtgctgtcctctttgacatcactgaggatcgagctgctgctgagcagctgcagcagccgctggggctgacctggccagtggtgttgatctggggtaatgacgctgagaagctgatggagtttgtgtacaagaaccaaaaggcccatgtgaggattgagctgaaggagcccccggcctgggtaagcacactagacctccagaccttgccctgcacttagccctactttgtcctgtggcaactcccaccaaaagcccttagactcctggagctgcgagagatcctggaaaccctctagtccaactt

SEQ ID NO: 17982 - DNA, 497 bp, Homo sapiens
  source 1..497: mol_type = unassigned DNA
agtcccaggggagggagtcagagctagaacaccaattacaaaccacaggcttcctgctctagggagttgatccagaattgtctttctgaaaggaagcactcggaatccttccgaactttccaagtccatccatgattcagagatactgccttctctctctctgggattttatgtgtttctgatagtgaattgttgatgtatttgctactttgcttcttttctctttcaagacttgatcattttatatgctgtttggagaaaaaaagaacttttgttagcaaggaggtttcagaaatgattttggattttctgctgcggaatttctcggcacctacctgtagtatggggcacttggtttggttgcagagtaagaaggtggaagaatgagctgtacttggttaagcagttgaaaccttttttgagcaggatctgtaaaagcataattgaatttgtttcacccccgtggattccagtgggcccgacagcgcaacaggttt

SEQ ID NO: 17983 - DNA, 5919 bp, Homo sapiens
  source 1..5919: mol_type = unassigned DNA
cgctggaggagggaggcggaaggacagcgctgcgccaccacccggaggagggagcgcggtagctgcaggcaggggagggagaggaaagaaaaggaaggacggctcccagacagagagtgggagaaaccggggagcagcgggagcagcaggtccggggggagctgttccgctgcgctgccctcgttattcacacggacgctgcggagcttcccagggctgcttccctgtccccctgggtggaggctgccgtctaaacctgactccagagtttaagatgcaatggccagaagacatgaacgtgtcactagaaggatgtggacatgggctccgggactgttgatgatgactgtggtgttttggggtcatcaggggaatggacaaggccaaggatcgcgtcttcgccaggaggactttcccccgcggattgtggagcatccttccgatgtcatcgtctctaagggcgagcccacgactctgaactgcaaggcggagggccggccaacgcccaccattgagtggtacaaagatggggagcgagtggagactgacaaggacgatccccggtcccacaggatgcttctgcccagcggatccttattcttcttgcgcatcgtgcacgggcgcaggagtaaacctgatgaaggaagctacgtttgtgttgcgaggaactatcttggtgaagcagtgagtcgaaatgcgtctctggaagtggcattgttacgagatgacttccgacaaaaccccacagatgttgtagtggcagctggagagcctgcaatcctggagtgccagcctccccggggacacccagaacccaccatctactggaaaaaagacaaagttcgaattgatgacaaggaagaaagaataagtatccgtggtggaaaactgatgatctccaataccaggaaaagtgatgcagggatgtatacttgtgttggtaccaatatggtgggagaaagggacagtgacccagcagagctgactgtctttgaacgacccacatttctcaggaggccaattaaccaggtggtactggaggaagaagctgtagaatttcgttgtcaagtccaaggagatcctcaaccaactgtgaggtggaaaaaggatgatgcagacttgccaagaggaaggtatgacatcaaagacgattacacactaagaattaaaaagaccatgagtacagatgaaggcacctatatgtgtattgctgagaatcgggttggaaaaatggaagcctctgctacactcaccgtccgagctcccccacagtttgtggttcggccaagagatcagattgttgctcaaggtcgaacagtgacatttccctgtgaaactaaaggaaacccacagccagctgttttttggcagaaagaaggcagccagaacctacttttcccaaaccaaccccagcagcccaacagtagatgctcagtgtcaccaactggagacctcacaatcaccaacattcaacgttccgacgcgggttactacatctgccaggctttaactgtggcaggaagcattttagcaaaagctcaactggaggttactgatgttttgacagatagacctccacctataattctacaaggcccagccaaccaaacgctggcagtggatggtacagcgttactgaaatgtaaagccactggtgatcctcttcctgtaattagctggttaaaggagggatttacttttccgggtagagatccaagagcaacaattcaagagcaaggcacactgcagattaagaatttacggatttctgatactggcacttatacttgtgtggctacaagttcaagtggagagacttcctggagtgcagtgctggatgtgacagagtctggagcaacaatcagtaaaaactatgatttaagtgacctgccagggccaccatccaaaccgcaggtcactgatgttactaagaacagtgtcaccttgtcctggcagccaggtacccctggaacccttccagcaagtgcatatatcattgaggctttcagccaatcagtgagcaacagctggcagaccgtggcaaaccatgtaaagaccaccctctatactgtaagaggactgcggcccaatacaatctacttattcatggtcagagcgatcaacccccaaggtctcagtgacccaagtcccatgtcagatcctgtgcgcacacaagatatcagcccaccagcacaaggagtggaccacaggcaagtgcagaaagagctaggagatgtccttgtccgtcttcataatccagttgtgctgactcccaccacggttcaggtcacatggacggttgatcgccaaccccagtttatccaaggctaccgagtgatgtatcgtcagacttcaggtctgcaggcgacatcttcgtggcagaatttagatgccaaagtcccgactgaacgaagtgctgtcttagtcaacctgaaaaagggggtgacttatgaaattaaagtacggccatattttaatgagttccaaggaatggatagtgaatctaaaacggttcgtactactgaagaagccccaagtgccccaccacagtctgtcactgtactgacagttggaagctacaatagcacaagtattagtgtttcctgggatcctcctcctccagatcaccagaatggaattatccaagaatacaagatctggtgtctaggaaatgaaacgcgattccatatcaacaaaactgtggatgcagccattcggtccgtaataattggtggattattcccaggtattcaataccgggtagaggttgcagctagtaccagtgcaggggttggagtaaagagtgagccacagccaataataatcgggagacgcaatgaagttgtcattactgaaaacaataacagcataactgagcaaatcactgatgtggtgaagcaaccagcctttatagctggtattggtggtgcctgctgggtaattctgatgggttttagcatatggttgtattggcgaagaaagaagaggaagggactcagtaattatgctgttacgtttcaaagaggagatggaggactaatgagcaatggaagccgtccaggtcttctcaatgctggtgatcccagctatccatggcttgctgattcttggccagccacgagcttgccagtaaataatagcaacagtggcccaaatgagattggaaattttggccgtggagatgtgctgccaccagttccaggccaaggggataaaacagcaacgatgctctcagatggagccatttatagtagcattgacttcactaccaaaaccagttacaacagttccagccaaataacacaggctaccccatatgccacgacacagatcttgcattccaacagcatacatgaattggctgtcgatctgcctgatccacaatggaaaagctcaattcagcaaaaaacagatctgatgggatttggttattctctacctgatcagaacaaaggtaacaatggtgggaaaggtggaaaaaagaagaaaaataaaaactcttctaaaccacagaaaaacaatggatccacttgggccaatgtccctctacctccccccccagtccagccccttcctggcacggagctggaacactatgcagtggaacaacaagaaaatggctatgacagtgatagctggtgcccaccattgccagtacaaacttacttacaccaaggtctggaagatgaactggaagaagatgatgatagggtcccaacacctcctgttcgaggcgtggcttcttctcctgctatctcctttggacagcagtccactgcaactcttactccatccccacgggaagagatgcaacccatgctgcaggctcacctggatgagttgacaagagcctatcagtttgatatagcaaaacaaacatggcacattcaaagcaataatcaacctccacagcctccagttccaccgttaggttatgtgtctggagccttgatttctgatttggaaacggatgttgcagatgatgatgccgacgacgaagaggaagctttagaaatccccaggcccctgagagcactggaccagactcctggatccagcatggacaatctagacagctctgtgacaggaaaagcctttacctcctctcaaagacctcgacctaccagcccattttctactgacagtaacaccagtgcagccctgagtcaaagtcagaggcctcggcccactaaaaaacacaagggagggcggatggaccaacaaccagcattgcctcatcgaagggaaggaatgacagatgaggaggccttggtgccctatagcaagcccagtttcccatctccaggtggccacagctcatcaggaacagcttcttctaagggatccactggacctaggaaaaccgaggtgttgagagcaggccaccagcgcaatgccagcgaccttcttgacataggatatatgggctccaacagtcaaggacagtttacaggtgaattatagtaaatgagaggagacatacaaagctgctctgaaggaccatcaggtccggactcatggaagtgatgactctaaacagtgcaatgaacaatttatttatgtactattaaaagaactgtaaatgcaatgtaaagacacacagccacacatatcccacagatattttcattgtgttcttctcttaagtacaccacccaccttaactctttcttgtcaggagtatataaaaaagaaagaaaacaaaactcgccctacaggaagaaaaggattctcctctgtatataatttcttttgtgcattgctatgcaagctcactctttttagctctgctcatattattgtctgttcttattggtctgttgtactatatgtgaattaataggctgtggtgccatatattaacttttaattgtgtaacttttatgtttaaattttgcactgcaattttatttggtgataagcacaaatctctactcctcatgacatgaagaaaaagactgaatgtgaagggagtttctgtactgtaagctagattggataatgatggctgtaacaaatcatgttagatggttttcagttggggtgtagaaataggaagatgcaaaggaacaatggtgttggcaaagtcttctttgaatatcagggactgagtcaataaaaaaaatagtagaaaggtggcttttactattgacaaaagccggggtcaaaaaaagtagtttaagtcttaagactgaatatgcattaaagtatgcaggtagcaaagatgtaataaatttgcttaaaaaaagaaattaaagttttatttagaatcaattttacctgtcattgtaattgacccatctgagaattacaataagcaagaggaaattaaggtgttttgcaagagctgtatttatattacagttttttaaaaacattttctgaattatcgtaattaagctctccaactcgttaagtcagaatataatatgaagttccccaaggaaacgaacaaaatgaactctagaatatctagcaaatagttaaagaagcaatttattattagggcatactcgggctgtttccaaatataaactctattgcaatatcttatttcatctttctaatacatgtacagtgcacactagaggatagagctgcatcacttaaattcatgacttaaaaaataatacagtttatatacaacttgttttttatttgattaagaagtgaagtttacgccacccaatgtatagccaaattgtacgtgcttaaaaaacagtgccgagagtatgttcagttcgcagtaagtagatttattggaataaatattctatggtacattctcagaaattggcttccaactaaaatacgtttgacccattttgaataaggaaattgaaaagaaaaatttaaaaggagaaaaaaatgcatgtttataaactttttaaataaaaccagaccttgtaagtggacatt

SEQ ID NO: 17984 - DNA, 3382 bp, Homo sapiens
  source 1..3382: mol_type = unassigned DNA
agacagagagtgggagaaaccggggagcagcgggagcagcaggtccggggggagctgttccgctgcgctgccctcgttattcacacggacgctgcggagcttcccagggctgcttccctgtccccctgggtggaggctgccgtctaaacctgactccagagtttaagatgcaatggccagaagacatgaacgtgtcactagaaggatgtggacatgggctccgggactgttgatgatgactgtggtgttttggggtcatcaggggaatggacaaggccaaggatcgcgtcttcgccaggaggactttcccccgcggattgtggagcatccttccgatgtcatcgtctctaagggcgagcccacgactctgaactgcaaggcggagggccggccaacgcccaccattgagtggtacaaagatggggagcgagtggagactgacaaggacgatccccggtcccacaggatgcttctgcccagcggatccttattcttcttgcgcatcgtgcacgggcgcaggagtaaacctgatgaaggaagctacgtttgtgttgcgaggaactatcttggtgaagcagtgagtcgaaatgcgtctctggaagtggcattgttacgagatgacttccgacaaaaccccacagatgttgtagtggcagctggagagcctgcaatcctggagtgccagcctccccggggacacccagaacccaccatctactggaaaaaagacaaagttcgaattgatgacaaggaagaaagaataagtatccgtggtggaaaactgatgatctccaataccaggaaaagtgatgcagggatgtatacttgtgttggtaccaatatggtgggagaaagggacagtgacccagcagagctgactgtctttgaacgacccacatttctcaggaggccaattaaccaggtggtactggaggaagaagctgtagaatttcgttgtcaagtccaaggagatcctcaaccaactgtgaggtggaaaaaggatgatgcagacttgccaagaggaaggtatgacatcaaagacgattacacactaagaattaaaaagaccatgagtacagatgaaggcacctatatgtgtattgctgagaatcgggttggaaaaatggaagcctctgctacactcaccgtccgagctcgccctgttgctcccccacagtttgtggttcggccaagagatcagattgttgctcaaggtcgaacagtgacatttccctgtgaaactaaaggaaacccacagccagctgttttttggcagaaagaaggcagccagaacctacttttcccaaaccaaccccagcagcccaacagtagatgctcagtgtcaccaactggagacctcacaatcaccaacattcaacgttccgacgcgggttactacatctgccaggctttaactgtggcaggaagcattttagcaaaagctcaactggaggttactgatgttttgacagatagacctccacctataattctacaaggcccagccaaccaaacgctggcagtggatggtacagcgttactgaaatgtaaagccactggtgatcctcttcctgtaattagctggttaaaggagggatttacttttccgggtagagatccaagagcaacaattcaagagcaaggcacactgcagattaagaatttacggatttctgatactggcacttatacttgtgtggctacaagttcaagtggagagacttcctggagtgcagtgctggatgtgacagagtctggagcaacaatcagtaaaaactatgatttaagtgacctgccagggccaccatccaaaccgcaggtcactgatgttactaagaacagtgtcaccttgtcctggcagccaggtacccctggaacccttccagcaagtgcatatatcattgaggctttcagccaatcagtgagcaacagctggcagaccgtggcaaaccatgtaaagaccaccctctatactgtaagaggactgcggcccaatacaatctacttattcatggtcagagcgatcaacccccaaggtctcagtgacccaagtcccatgtcagatcctgtgcgcacacaagatatcagcccaccagcacaaggagtggaccacaggcaagtgcagaaagagctaggagatgtccttgtccgtcttcataatccagttgtgctgactcccaccacggttcaggtcacatggacggttgatcgccaaccccagtttatccaaggctaccgagtgatgtatcgtcagacttcaggtctgcaggcgacatcttcgtggcagaatttagatgccaaagtcccgactgaacgaagtgctgtcttagtcaacctgaaaaagggggtgacttatgaaattaaagtacggccatattttaatgagttccaaggaatggatagtgaatctaaaacggttcgtactactgaagaagccccaagtgccccaccacagtctgtcactgtactgacagttggaagctacaatagcacaagtattagtgtttcctgggatcctcctcctccagatcaccagaatggaattatccaagaatacaagatctggtgtctaggaaatgaaacgcgattccatatcaacaaaactgtggatgcagccattcggtccgtaataattggtggattattcccaggtattcaataccgggtagaggttgcagctagtaccagtgcaggggttggagtaaagagtgagccacagccaataataatcgggagacgcaatgaagttgtcattactgaaaacaataacagcataactgagcaaatcactgatgtggtgaagcaaccagcctttatagctggtattggtggtgcctgctgggtaattctgatgggttttagcatatggttgtattggcgaagaaagaagaggaagggactcagtaattatgctgttacgtttcaaagaggagatggaggactaatgagcaatggaagccgtccaggtcttctcaatgctggtgatcccagctatccatggcttgctgattcttggccagccacgagcttgccagtaaataatagcaacagtggcccaaatgagattggaaattttggccgtggagatgtgctgccaccagttccaggccaaggggataaaacagcaacgatgctctcagatggagccatttatagtagcattgacttcactaccaaaaccagttacaacagttccagccaaataacacaggctaccccatatgccacgacacagatcttgcattccaacagcatacatgaattggctgtcgatctgcctgatccacaatggaaaagctcaattcagcaaaaaacagatctgatgggatttggttattctctacctgatcagaacaaaggtaacaatggtgggaaaggtgga

SEQ ID NO: 17985 - DNA, 522 bp, Homo sapiens
  source 1..522: mol_type = unassigned DNA
gactgcgtactgaggagaaggagccggatccgtgagaaatgtagcttggctcagggctacatcaggaagctgctacttcagctgttaaagatggcaaaacaacacctacctcaggtttttcaatgattaatgctattttcataaccaggagggaagaggatgtgagaaattttgtgaaattaacttgtggaaatgttatcatcagagaaagtggagaaaattactaggcttgaacttctcttcgttttgatgctcttcctctctggaccaactctgagcaagctgacccggaccccctggaaaggaaaaccttggaaggggggatcgcgtcttcgccaggaggactttcccccgcggattgtggagcatccttccgatgtcatcgtctctaagggcgagcccacgactctgaactgcaaggcggagggccggccaacgcccaccattgagtggtacaaagatggggagcgagtggagactgacaaggacgatccccggtcccacaggatgcttctgcccagc

SEQ ID NO: 17986 - DNA, 8946 bp, Homo sapiens
  source 1..8946: mol_type = unassigned DNA
ggcgaggggcctcagcgcgcctggcgctggactgagcgctccctttctccgccgcgcccgggctgggctctcacgcccgtctctgctcgcgcccgcagccgcctggtgcactatcctcagaggcggcaccgcgggggtgtctgcagcctcggcctccgcccggcccctccctccctccctccctccctcgctccttccctgcctccctcaccacgtaggagttcggattctccacccgaatcgtcctgatttcccttctcctctcttttggaaaccggagaggtggagggagggcaacaccgctgcaaaggagaggcccgccaagtctgcccgcctgcaaagtgttgctttgacacattcttattatggaagttaagtaaaaatatagacatattaaaaaataactccggacgtggagctgctacggagaaggaaaccgggggaaagaaaaccagtaggcaggccaatggtttttcggcagcgcgctggcaagtttgtggaacactttctaggaattaggtcttttcctcccccttcatcatcttgacttctgaaggaagaacttggctttggattgcagtggagcctaaggagagagggttagacacactcgaataatccctctggctgggctgaatttgtgggaatttaggaagccagagtgctggaaatacagcagcctttgaagtaccctctgttaatttggatggatctcagtgtgccccgttcgagacctctccaccaaccccttctgatcttgcgatttgctcttcttgactttaattagtatctaggaaagtctaaactttggacctacctctttttttgatactcatttttgtacttttgctctctgggattggtttcttaaagaatctggatcctttttaatatgtcaaaatgagtctgctgatgtttacacaactactgctctgtggatttttatatgttcgggttgatggatcgcgtcttcgccaggaggactttcccccgcggattgtggagcatccttccgatgtcatcgtctctaagggcgagcccacgactctgaactgcaaggcggagggccggccaacgcccaccattgagtggtacaaagatggggagcgagtggagactgacaaggacgatccccggtcccacaggatgcttctgcccagcggatccttattcttcttgcgcatcgtgcacgggcgcaggagtaaacctgatgaaggaagctacgtttgtgttgcgaggaactatcttggtgaagcagtgagtcgaaatgcgtctctggaagtggcattgttacgagatgacttccgacaaaaccccacagatgttgtagtggcagctggagagcctgcaatcctggagtgccagcctccccggggacacccagaacccaccatctactggaaaaaagacaaagttcgaattgatgacaaggaagaaagaataagtatccgtggtggaaaactgatgatctccaataccaggaaaagtgatgcagggatgtatacttgtgttggtaccaatatggtgggagaaagggacagtgacccagcagagctgactgtctttgaacgacccacatttctcaggaggccaattaaccaggtggtactggaggaagaagctgtagaatttcgttgtcaagtccaaggagatcctcaaccaactgtgaggtggaaaaaggatgatgcagacttgccaagaggaaggtatgacatcaaagacgattacacactaagaattaaaaagaccatgagtacagatgaaggcacctatatgtgtattgctgagaatcgggttggaaaaatggaagcctctgctacactcaccgtccgagctcccccacagtttgtggttcggccaagagatcagattgttgctcaaggtcgaacagtgacatttccctgtgaaactaaaggaaacccacagccagctgttttttggcagaaagaaggcagccagaacctacttttcccaaaccaaccccagcagcccaacagtagatgctcagtgtcaccaactggagacctcacaatcaccaacattcaacgttccgacgcgggttactacatctgccaggctttaactgtggcaggaagcattttagcaaaagctcaactggaggttactgatgttttgacagatagacctccacctataattctacaaggcccagccaaccaaacgctggcagtggatggtacagcgttactgaaatgtaaagccactggtgatcctcttcctgtaattagctggttaaaggagggatttacttttccgggtagagatccaagagcaacaattcaagagcaaggcacactgcagattaagaatttacggatttctgatactggcacttatacttgtgtggctacaagttcaagtggagagacttcctggagtgcagtgctggatgtgacagagtctggagcaacaatcagtaaaaactatgatttaagtgacctgccagggccaccatccaaaccgcaggtcactgatgttactaagaacagtgtcaccttgtcctggcagccaggtacccctggaacccttccagcaagtgcatatatcattgaggctttcagccaatcagtgagcaacagctggcagaccgtggcaaaccatgtaaagaccaccctctatactgtaagaggactgcggcccaatacaatctacttattcatggtcagagcgatcaacccccaaggtctcagtgacccaagtcccatgtcagatcctgtgcgcacacaagatatcagcccaccagcacaaggagtggaccacaggcaagtgcagaaagagctaggagatgtccttgtccgtcttcataatccagttgtgctgactcccaccacggttcaggtcacatggacggttgatcgccaaccccagtttatccaaggctaccgagtgatgtatcgtcagacttcaggtctgcaggcgacatcttcgtggcagaatttagatgccaaagtcccgactgaacgaagtgctgtcttagtcaacctgaaaaagggggtgacttatgaaattaaagtacggccatattttaatgagttccaaggaatggatagtgaatctaaaacggttcgtactactgaagaagccccaagtgccccaccacagtctgtcactgtactgacagttggaagctacaatagcacaagtattagtgtttcctgggatcctcctcctccagatcaccagaatggaattatccaagaatacaagatctggtgtctaggaaatgaaacgcgattccatatcaacaaaactgtggatgcagccattcggtccgtaataattggtggattattcccaggtattcaataccgggtagaggttgcagctagtaccagtgcaggggttggagtaaagagtgagccacagccaataataatcgggagacgcaatgaagttgtcattactgaaaacaataacagcataactgagcaaatcactgatgtggtgaagcaaccagcctttatagctggtattggtggtgcctgctgggtaattctgatgggttttagcatatggttgtattggcgaagaaagaagaggaagggactcagtaattatgctgttacgtttcaaagaggagatggaggactaatgagcaatggaagccgtccaggtcttctcaatgctggtgatcccagctatccatggcttgctgattcttggccagccacgagcttgccagtaaataatagcaacagtggcccaaatgagattggaaattttggccgtggagatgtgctgccaccagttccaggccaaggggataaaacagcaacgatgctctcagatggagccatttatagtagcattgacttcactaccaaaaccagttacaacagttccagccaaataacacaggctaccccatatgccacgacacagatcttgcattccaacagcatacatgaattggctgtcgatctgcctgatccacaatggaaaagctcaattcagcaaaaaacagatctgatgggatttggttattctctacctgatcagaacaaaggtaacaatggtgggaaaggtggaaaaaagaagaaaaataaaaactcttctaaaccacagaaaaacaatggatccacttgggccaatgtccctctacctccccccccagtccagccccttcctggcacggagctggaacactatgcagtggaacaacaagaaaatggctatgacagtgatagctggtgcccaccattgccagtacaaacttacttacaccaaggtctggaagatgaactggaagaagatgatgatagggtcccaacacctcctgttcgaggcgtggcttcttctcctgctatctcctttggacagcagtccactgcaactcttactccatccccacgggaagagatgcaacccatgctgcaggctcacctggatgagttgacaagagcctatcagtttgatatagcaaaacaaacatggcacattcaaagcaataatcaacctccacagcctccagttccaccgttaggttatgtgtctggagccttgatttctgatttggaaacggatgttgcagatgatgatgccgacgacgaagaggaagctttagaaatccccaggcccctgagagcactggaccagactcctggatccagcatggacaatctagacagctctgtgacaggaaaagcctttacctcctctcaaagacctcgacctaccagcccattttctactgacagtaacaccagtgcagccctgagtcaaagtcagaggcctcggcccactaaaaaacacaagggagggcggatggaccaacaaccagcattgcctcatcgaagggaaggaatgacagatgaggaggccttggtgccctatagcaagcccagtttcccatctccaggtggccacagctcatcaggaacagcttcttctaagggatccactggacctaggaaaaccgaggtgttgagagcaggccaccagcgcaatgccagcgaccttcttgacataggatatatgggctccaacagtcaaggacagtttacaggtgaattatagtaaatgagaggagacatacaaagctgctctgaaggaccatcaggtccggactcatggaagtgatgactctaaacagtgcaatgaacaatttatttatgtactattaaaagaactgtaaatgcaatgtaaagacacacagccacacatatcccacagatattttcattgtgttcttctcttaagtacaccacccaccttaactctttcttgtcaggagtatataaaaaagaaagaaaacaaaactcgccctacaggaagaaaaggattctcctctgtatataatttcttttgtgcattgctatgcaagctcactctttttagctctgctcatattattgtctgttcttattggtctgttgtactatatgtgaattaataggctgtggtgccatatattaacttttaattgtgtaacttttatgtttaaattttgcactgcaattttatttggtgataagcacaaatctctactcctcatgacatgaagaaaaagactgaatgtgaagggagtttctgtactgtaagctagattggataatgatggctgtaacaaatcatgttagatggttttcagttggggtgtagaaataggaagatgcaaaggaacaatggtgttggcaaagtcttctttgaatatcagggactgagtcaataaaaaaaatagtagaaaggtggcttttactattgacaaaagccggggtcaaaaaaagtagtttaagtcttaagactgaatatgcattaaagtatgcaggtagcaaagatgtaataaatttgcttaaaaaaagaaattaaagttttatttagaatcaattttacctgtcattgtaattgacccatctgagaattacaataagcaagaggaaattaaggtgttttgcaagagctgtatttatattacagttttttaaaaacattttctgaattatcgtaattaagctctccaactcgttaagtcagaatataatatgaagttccccaaggaaacgaacaaaatgaactctagaatatctagcaaatagttaaagaagcaatttattattagggcatactcgggctgtttccaaatataaactctattgcaatatcttatttcatctttctaatacatgtacagtgcacactagaggatagagctgcatcacttaaattcatgacttaaaaaataatacagtttatatacaacttgttttttatttgattaagaagtgaagtttacgccacccaatgtatagccaaattgtacgtgcttaaaaaacagtgccgagagtatgttcagttcgcagtaagtagatttattggaataaatattctatggtacattctcagaaattggcttccaactaaaatacgtttgacccattttgaataaggaaattgaaaagaaaaatttaaaaggagaaaaaaatgcatgtttataaactttttaaataaaaccagaccttgtaagtggacattaataattgtcctgcctcatttgttttcacgactttgacaacaagaagttcctgaacattagtcatgtatgctcagaataaatgtgactttgaaatatatgttagctactgtacatgtatagtcagtcaagtagaagaggaccttcctgaaattcccacttgtgacattttcccatgggtttcctacacaatcttaaattttatttctgtctatactttctcaaatttttcctatgataagttcagttgttggtactcttctaaaaatattcaacgtgattaggatcagttctaaaatacgggacccctttgagtgacaattcgcactccatgcattattggctcagtagccaatttttgtcacgtcgttataacaaggagatgacataattaaacatttccatcctttctattccctgagactgcatcagcacaggcaagtatagaatgtaatgttcttcatgggccccaccagctttttggtgccatgtaatttatttcttcgctgaagagaaaaagaattctgagacacagttattaaaccctttatcaactttctaccatcagtgcctgaattctaatgcagtgtgatttctctgggacaaagagactgaggaagatgaaaagtttcttcaaagagtgaatacatacttattcacaactctaggatgtgaggactttaaatatctctttatgaagttccctgcctaacctctttctatttaaaggcaaacaaatttcgaagaggttttgtgttccctctttatgtttctctatgacccagtttagtctaaaaccttagttcattacatatacaacacatagcctttgatccctggtaactggcaggtgttggtgattaataaaccaaggcttcaaagtgaagtatgtgtgtgcagatgacttttggaataacgtgggcatagcatcataccttcctgattgtcttcagcatataaaaattaactgttgtagttaaaattatgtcagtgcagagcttgtggttacttggaatgttctttcagaatagtccatgttgcctattaaacctagttttaaacacattgggcagtcaatttatgcacccaaaatatcaccctcaggtagattgagggcaagataaaatgctgtatgtagctatacaaaggaattcagaaacattactggaaagcaaagcctttgtcagcttgctactgacaaagtagtaaaaagctactaatcagtgttgagtcagatgtcaacagaaaaatacaaatacctatgagagccacagcagtttctcgtttcatagccgattcaatgaatatgattagaaattcactgagctcactcttgcaggtttaaatggaggcctgcataaggactgcaagaggaaatctgggtgggagagaatgtaatctgatcttgcactcataggcaatgctgcaatgcaatcatgtccaatacaagcacagcttcattcataacaggaaacgtcttctttgggaaaatagctctattggtgcccaaactcaggtatgccagtgtatgcaggtggagtcgccctacccctcttccaaacatgtcctgtgagatttttaaaataagatgggatagtacaggggcatgaaaagaattgattccttcacaggatttgaatccagttcaagggagaatgtagaaaattcaaaaccaacatataaggtatcacacaaccaagaaaagtaaaaccattgcaagtttacttgcgttgagtacaaaacagatttaatggtgttctatgtcatagtttaatgctctgggtatttaaatatgttttcaacaggatttgagttgaaagtttgtaatgtgctttgatggaacacctctcaatttctattcaataaacttatgtaattgtccattgacaatataatgataacagtaccattgaactctaaactgtggtttatcttcactactgggaagcaactgtgcatcagtattaaagatatgcagaaacataatattcactaatttgttcatctgcttctgtatattgtttatggaattacatggcaagaactgttctaaagcaacatgtctttccacattattttagaggtgaaattacttttgttttgcttctctataatgtgtacttcaaatgaaacaccatacttttttctaaaaaaagatgttcaatttactaatttttttaaatctcataatttaaaaagcatttgttgtgattttaaagtgttgcaagaaaagggattttgtggccgtgggtagactttttatactttgttttatagatggattttttttaactgtagtttgtttaagtcaccaagcagcatccaaaatcttaatgtgtttcatttgatgttgttagatcagagaagaaattggcataaaatcggttaatagtattgtcaaagaattgtgtattgtgtactcactgggaaaaaataaaatatattcacatttcaaa

SEQ ID NO: 17987 - DNA, 5437 bp, Homo sapiens
  source 1..5437: mol_type = unassigned DNA
ttttgctctctgggattggtttcttaaagaatctggatcctttttaatatgtcaaaatgagtctgctgatgtttacacaactactgctctgtggatttttatatgttcgggttgatggatcgcgtcttcgccaggaggactttcccccgcggattgtggagcatccttccgatgtcatcgtctctaagggcgagcccacgactctgaactgcaaggcggagggccggccaacgcccaccattgagtggtacaaagatggggagcgagtggagactgacaaggacgatccccggtcccacaggatgcttctgcccagcggatccttattcttcttgcgcatcgtgcacgggcgcaggagtaaacctgatgaaggaagctacgtttgtgttgcgaggaactatcttggtgaagcagtgagtcgaaatgcgtctctggaagtggcattgttacgagatgacttccgacaaaaccccacagatgttgtagtggcagctggagagcctgcaatcctggagtgccagcctccccggggacacccagaacccaccatctactggaaaaaagacaaagttcgaattgatgacaaggaagaaagaataagtatccgtggtggaaaactgatgatctccaataccaggaaaagtgatgcagggatgtatacttgtgttggtaccaatatggtgggagaaagggacagtgacccagcagagctgactgtctttgaacgacccacatttctcaggaggccaattaaccaggtggtactggaggaagaagctgtagaatttcgttgtcaagtccaaggagatcctcaaccaactgtgaggtggaaaaaggatgatgcagacttgccaagaggaaggtatgacatcaaagacgattacacactaagaattaaaaagaccatgagtacagatgaaggcacctatatgtgtattgctgagaatcgggttggaaaaatggaagcctctgctacactcaccgtccgagctcccccacagtttgtggttcggccaagagatcagattgttgctcaaggtcgaacagtgacatttccctgtgaaactaaaggaaacccacagccagctgttttttggcagaaagaaggcagccagaacctacttttcccaaaccaaccccagcagcccaacagtagatgctcagtgtcaccaactggagacctcacaatcaccaacattcaacgttccgacgcgggttactacatctgccaggctttaactgtggcaggaagcattttagcaaaagctcaactggaggttactgatgttttgacagatagacctccacctataattctacaaggcccagccaaccaaacgctggcagtggatggtacagcgttactgaaatgtaaagccactggtgatcctcttcctgtaattagctggttaaaggagggatttacttttccgggtagagatccaagagcaacaattcaagagcaaggcacactgcagattaagaatttacggatttctgatactggcacttatacttgtgtggctacaagttcaagtggagagacttcctggagtgcagtgctggatgtgacagagtctggagcaacaatcagtaaaaactatgatttaagtgacctgccagggccaccatccaaaccgcaggtcactgatgttactaagaacagtgtcaccttgtcctggcagccaggtacccctggaacccttccagcaagtgcatatatcattgaggctttcagccaatcagtgagcaacagctggcagaccgtggcaaaccatgtaaagaccaccctctatactgtaagaggactgcggcccaatacaatctacttattcatggtcagagcgatcaacccccaaggtctcagtgacccaagtcccatgtcagatcctgtgcgcacacaagatatcagcccaccagcacaaggagtggaccacaggcaagtgcagaaagagctaggagatgtccttgtccgtcttcataatccagttgtgctgactcccaccacggttcaggtcacatggacggttgatcgccaaccccagtttatccaaggctaccgagtgatgtatcgtcagacttcaggtctgcaggcgacatcttcgtggcagaatttagatgccaaagtcccgactgaacgaagtgctgtcttagtcaacctgaaaaagggggtgacttatgaaattaaagtacggccatattttaatgagttccaaggaatggatagtgaatctaaaacggttcgtactactgaagaagccccaagtgccccaccacagtctgtcactgtactgacagttggaagctacaatagcacaagtattagtgtttcctgggatcctcctcctccagatcaccagaatggaattatccaagaatacaagatctggtgtctaggaaatgaaacgcgattccatatcaacaaaactgtggatgcagccattcggtccgtaataattggtggattattcccaggtattcaataccgggtagaggttgcagctagtaccagtgcaggggttggagtaaagagtgagccacagccaataataatcgggagacgcaatgaagttgtcattactgaaaacaataacagcataactgagcaaatcactgatgtggtgaagcaaccagcctttatagctggtattggtggtgcctgctgggtaattctgatgggttttagcatatggttgtattggcgaagaaagaagaggaagggactcagtaattatgctgttacgtttcaaagaggagatggaggactaatgagcaatggaagccgtccaggtcttctcaatgctggtgatcccagctatccatggcttgctgattcttggccagccacgagcttgccagtaaataatagcaacagtggcccaaatgagattggaaattttggccgtggagatgtgctgccaccagttccaggccaaggggataaaacagcaacgatgctctcagatggagccatttatagtagcattgacttcactaccaaaaccagttacaacagttccagccaaataacacaggctaccccatatgccacgacacagatcttgcattccaacagcatacatgaattggctgtcgatctgcctgatccacaatggaaaagctcaattcagcaaaaaacagatctgatgggatttggttattctctacctgatcagaacaaaggtaacaatggtgggaaaggtggaaaaaagaagaaaaataaaaactcttctaaaccacagaaaaacaatggatccacttgggccaatgtccctctacctccccccccagtccagccccttcctggcacggagctggaacactatgcagtggaacaacaagaaaatggctatgacagtgatagctggtgcccaccattgccagtacaaacttacttacaccaaggtctggaagatgaactggaagaagatgatgatagggtcccaacacctcctgttcgaggcgtggcttcttctcctgctatctcctttggacagcagtccactgcaactcttactccatccccacgggaagagatgcaacccatgctgcaggctcacctggatgagttgacaagagcctatcagtttgatatagcaaaacaaacatggcacattcaaagcaataatcaacctccacagcctccagttccaccgttaggttatgtgtctggagccttgatttctgatttggaaacggatgttgcagatgatgatgccgacgacgaagaggaagctttagaaatccccaggcccctgagagcactggaccagactcctggatccagcatggacaatctagacagctctgtgacaggttcaatggtaaatggatggggctctgcatctgatgaggatcgtaacttttctagtcatagatctagtgtaggtagctcctcagatggctctatctttgccagcggcagttttgcacaagcactggtggcagcagcagataaagctggttttaggctggatggaaccagccttacaagaacaggaaaagcctttacctcctctcaaagacctcgacctaccagcccattttctactgacagtaacaccagtgcagccctgagtcaaagtcagaggcctcggcccactaaaaaacacaagggagggcggatggaccaacaaccagcattgcctcatcgaagggaaggaatgacagatgaggaggccttggtgccctatagcaagcccagtttcccatctccaggtggccacagctcatcaggaacagcttcttctaagggatccactggacctaggaaaaccgaggtgttgagagcaggccaccagcgcaatgccagcgaccttcttgacataggatatatgggctccaacagtcaaggacagtttacaggtgaattatagtaaatgagaggagacatacaaagctgctctgaaggaccatcaggtccggactcatggaagtgatgactctaaacagtgcaatgaacaatttatttatgtactattaaaagaactgtaaatgcaatgtaaagacacacagccacacatatcccacagatattttcattgtgttcttctcttaagtacaccacccaccttaactctttcttgtcaggagtatataaaaaagaaagaaaacaaaactcgccctacaggaagaaaaggattctcctctgtatataatttcttttgtgcattgctatgcaagctcactctttttagctctgctcatattattgtctgttcttattggtctgttgtactatatgtgaattaataggctgtggtgccatatattaacttttaattgtgtaacttttatgtttaaattttgcactgcaattttatttggtgataagcacaaatctctactcctcatgacatgaagaaaaagactgaatgtgaagggagtttctgtactgtaagctagattggataatgatggctgtaacaaatcatgttagatggttttcagttggggtgtagaaataggaagatgcaaaggaacaatggtgttggcaaagtcttctttgaatatcagggactgagtcaataaaaaaaatagtagaaaggtggcttttactattgacaaaagccggggtcaaaaaaagtagtttaagtcttaagactgaatatgcattaaagtatgcaggtagcaaagatgtaataaatttgcttaaaaaaagaaattaaagttttatttagaatcaattttacctgtcattgtaattgacccatctgagaattacaataagcaagaggaaattaaggtgttttgcaagagctgtatttatattacagttttttaaaaacattttctgaattatcgtaattaagctctccaactcgttaagtcagaatataatatgaagttccccaaggaaacgaacaaaatgaactctagaatatctagcaaatagttaaagaagcaatttattattagggcatactcgggctgtttc

SEQ ID NO: 17988 - DNA, 5393 bp, Homo sapiens
  source 1..5393: mol_type = unassigned DNA
ttttgctctctgggattggtttcttaaagaatctggatcctttttaatatgtcaaaatgagtctgctgatgtttacacaactactgctctgtggatttttatatgttcgggttgatggatcgcgtcttcgccaggaggactttcccccgcggattgtggagcatccttccgatgtcatcgtctctaagggcgagcccacgactctgaactgcaaggcggagggccggccaacgcccaccattgagtggtacaaagatggggagcgagtggagactgacaaggacgatccccggtcccacaggatgcttctgcccagcggatccttattcttcttgcgcatcgtgcacgggcgcaggagtaaacctgatgaaggaagctacgtttgtgttgcgaggaactatcttggtgaagcagtgagtcgaaatgcgtctctggaagtggcattgttacgagatgacttccgacaaaaccccacagatgttgtagtggcagctggagagcctgcaatcctggagtgccagcctccccggggacacccagaacccaccatctactggaaaaaagacaaagttcgaattgatgacaaggaagaaagaataagtatccgtggtggaaaactgatgatctccaataccaggaaaagtgatgcagggatgtatacttgtgttggtaccaatatggtgggagaaagggacagtgacccagcagagctgactgtctttgaacgacccacatttctcaggaggccaattaaccaggtggtactggaggaagaagctgtagaatttcgttgtcaagtccaaggagatcctcaaccaactgtgaggtggaaaaaggatgatgcagacttgccaagaggaaggtatgacatcaaagacgattacacactaagaattaaaaagaccatgagtacagatgaaggcacctatatgtgtattgctgagaatcgggttggaaaaatggaagcctctgctacactcaccgtccgagctcccccacagtttgtggttcggccaagagatcagattgttgctcaaggtcgaacagtgacatttccctgtgaaactaaaggaaacccacagccagctgttttttggcagaaagaaggcagccagaacctacttttcccaaaccaaccccagcagcccaacagtagatgctcagtgtcaccaactggagacctcacaatcaccaacattcaacgttccgacgcgggttactacatctgccaggctttaactgtggcaggaagcattttagcaaaagctcaactggaggttactgatgttttgacagatagacctccacctataattctacaaggcccagccaaccaaacgctggcagtggatggtacagcgttactgaaatgtaaagccactggtgatcctcttcctgtaattagctggttaaaggagggatttacttttccgggtagagatccaagagcaacaattcaagagcaaggcacactgcagattaagaatttacggatttctgatactggcacttatacttgtgtggctacaagttcaagtggagagacttcctggagtgcagtgctggatgtgacagagtctggagcaacaatcagtaaaaactatgatttaagtgacctgccagggccaccatccaaaccgcaggtcactgatgttactaagaacagtgtcaccttgtcctggcagccaggtacccctggaacccttccagcaagtgcatatatcattgaggctttcagatatgtagtttagaaggctcagttataatattgcatgtggaaatgatgcaaaagaaaacacaccttgtaacaggaaaatgtattggcataatttactctgtagtccatttattctttctacaggttaattcttttcaagccaatcagtgagcaacagctggcagaccgtggcaaaccatgtaaagaccaccctctatactgtaagaggactgcggcccaatacaatctacttattcatggtcagagcgatcaacccccaaggtctcagtgacccaagtcccatgtcagatcctgtgcgcacacaagatatcagcccaccagcacaaggagtggaccacaggcaagtgcagaaagagctaggagatgtccttgtccgtcttcataatccagttgtgctgactcccaccacggttcaggtcacatggacggttgatcgccaaccccagtttatccaaggctaccgagtgatgtatcgtcagacttcaggtctgcaggcgacatcttcgtggcagaatttagatgccaaagtcccgactgaacgaagtgctgtcttagtcaacctgaaaaagggggtgacttatgaaattaaagtacggccatattttaatgagttccaaggaatggatagtgaatctaaaacggttcgtactactgaagaagccccaagtgccccaccacagtctgtcactgtactgacagttggaagctacaatagcacaagtattagtgtttcctgggatcctcctcctccagatcaccagaatggaattatccaagaatacaagatctggtgtctaggaaatgaaacgcgattccatatcaacaaaactgtggatgcagccattcggtccgtaataattggtggattattcccaggtattcaataccgggtagaggttgcagctagtaccagtgcaggggttggagtaaagagtgagccacagccaataataatcgggagacgcaatgaagttgtcattactgaaaacaataacagcataactgagcaaatcactgatgtggtgaagcaaccagcctttatagctggtattggtggtgcctgctgggtaattctgatgggttttagcatatggttgtattggcgaagaaagaagaggaagggactcagtaattatgctgttacgtttcaaagaggagatggaggactaatgagcaatggaagccgtccaggtcttctcaatgctggtgatcccagctatccatggcttgctgattcttggccagccacgagcttgccagtaaataatagcaacagtggcccaaatgagattggaaattttggccgtggagatgtgctgccaccagttccaggccaaggggataaaacagcaacgatgctctcagatggagccatttatagtagcattgacttcactaccaaaaccagttacaacagttccagccaaataacacaggctaccccatatgccacgacacagatcttgcattccaacagcatacatgaattggctgtcgatctgcctgatccacaatggaaaagctcaattcagcaaaaaacagatctgatgggatttggttattctctacctgatcagaacaaaggtaacaatggtgggaaaggtggaaaaaagaagaaaaataaaaactcttctaaaccacagaaaaacaatggatccacttgggccaatgtccctctacctccccccccagtccagccccttcctggcacggagctggaacactatgcagtggaacaacaagaaaatggctatgacagtgatagctggtgcccaccattgccagtacaaacttacttacaccaaggtctggaagatgaactggaagaagatgatgatagggtcccaacacctcctgttcgaggcgtggcttcttctcctgctatctcctttggacagcagtccactgcaactcttactccatccccacgggaagagatgcaacccatgctgcaggctcacctggatgagttgacaagagcctatcagtttgatatagcaaaacaaacatggcacattcaaagcaataatcaacctccacagcctccagttccaccgttaggttatgtgtctggagccttgatttctgatttggaaacggatgttgcagatgatgatgccgacgacgaagaggaagctttagaaatccccaggcccctgagagcactggaccagactcctggatccagcatggacaatctagacagctctgtgacaggaaaagcctttacctcctctcaaagacctcgacctaccagcccattttctactgacagtaacaccagtgcagccctgagtcaaagtcagaggcctcggcccactaaaaaacacaagggagggcggatggaccaacaaccagcattgcctcatcgaagggaaggaatgacagatgaggaggccttggtgccctatagcaagcccagtttcccatctccaggtggccacagctcatcaggaacagcttcttctaagggatccactggacctaggaaaaccgaggtgttgagagcaggccaccagcgcaatgccagcgaccttcttgacataggatatatgggctccaacagtcaaggacagtttacaggtgaattatagtaaatgagaggagacatacaaagctgctctgaaggaccatcaggtccggactcatggaagtgatgactctaaacagtgcaatgaacaatttatttatgtactattaaaagaactgtaaatgcaatgtaaagacacacagccacacatatcccacagatattttcattgtgttcttctcttaagtacaccacccaccttaactctttcttgtcaggagtatataaaaaagaaagaaaacaaaactcgccctacaggaagaaaaggattctcctctgtatataatttcttttgtgcattgctatgcaagctcactctttttagctctgctcatattattgtctgttcttattggtctgttgtactatatgtgaattaataggctgtggtgccatatattaacttttaattgtgtaacttttatgtttaaattttgcactgcaattttatttggtgataagcacaaatctctactcctcatgacatgaagaaaaagactgaatgtgaagggagtttctgtactgtaagctagattggataatgatggctgtaacaaatcatgttagatggttttcagttggggtgtagaaataggaagatgcaaaggaacaatggtgttggcaaagtcttctttgaatatcagggactgagtcaataaaaaaaatagtagaaaggtggcttttactattgacaaaagccggggtcaaaaaaagtagtttaagtcttaagactgaatatgcattaaagtatgcaggtagcaaagatgtaataaatttgcttaaaaaaagaaattaaagttttatttagaatcaattttacctgtcattgtaattgacccatctgagaattacaataagcaagaggaaattaaggtgttttgcaagagctgtatttatattacagttttttaaaaacattttctgaattatcgtaattaagctctccaactcgttaagtcagaatataatatgaagttccccaaggaaacgaacaaaatgaactctagaatatctagcaaatagttaaagaagcaatttattattagggcatactcgggctgtttc

SEQ ID NO: 17989 - DNA, 1431 bp, Homo sapiens
  source 1..1431: mol_type = unassigned DNA
acaataacagcataactgagcaaatcactgatgtggtgaagcaaccagcctttatagctggtattggtggtgcctgctgggtaattctgatgggttttagcatatggttgtattggcgaagaaagaagaggaagggactcagtaattatgctgttacgtttcaaagaggagatggaggactaatgagcaatggaagccgtccaggtcttctcaatgctggtgatcccagctatccatggcttgctgattcttggccagccacgagcttgccagtaaataatagcaacagtggcccaaatgagattggaaattttggccgtggagatgtgctgccaccagttccaggccaaggggataaaacagcaacgatgctctcagatggagccatttatagtagcattgacttcactaccaaaaccagttacaacagttccagccaaataacacaggctaccccatatgccacgacacagatcttgcattccaacagcatacatgaattggctgtcgatctgcctgatccacaatggaaaagctcaattcagcaaaaaacagatctgatgggatttggttattctctacctgatcagaacaaaggtaacaatggtgggaaaggtggaaaaaagaagaaaaataaaaactcttctaaaccacagaaaaacaatggatccacttgggccaatgtccctctacctccccccccagtccagccccttcctggcacggagctggaacactatgcagtggaacaacaagaaaatggctatgacagtgatagctggtgcccaccattgccagtacaaacttacttacaccaaggtctggaagatgaactggaagaagatgatgatagggtcccaacacctcctgttcgaggcgtggcttcttctcctgctatctcctttggacagcagtccactgcaactcttactccatccccacgggaagagatgcaacccatgctgcaggctcacctggatgagttgacaagagcctatcagtttgatatagcaaaacaaacatggtaaatatcttcattaagtcaagagacccatgctttcaacacatggaaatttttttcagaataaattcacaagagattctgatagaactacacagctagggttaaaagtgattttgtatgactccttaatcatttagataaatgtatccactgagaaatgttaaataatttggccaaaactagaactagaactagaactagaactggaactggagctgtaactgtaactgtaactagaactagaactaaaactagaactagagcaagaattcaaatctgctgtatttcaggctaaagtgctcttggctacaccagaatcttttctaatttatggtttatcttcaattagcttatcattgaactcacatcccatgatgtaataaaagactccttttagattcctcaaa

SEQ ID NO: 17990 - DNA, 642 bp, Homo sapiens
  source 1..642: mol_type = unassigned DNA
ttcttggccagccacgagcttgccagtaaataatagcaacagtggcccaaatgagattggaaattttggccgtggagatgtgctgccaccagttccaggccaaggggataaaacagcaacgatgctctcagatggagccatttatagtagcattgacttcactaccaaaaccagttacaacagttccagccaaataacacaggctaccccatatgccacgacacagatcttgcattccaacagcatacatgaattggctgtcgatctgcctgatccacaatggaaaagctcaattcagcaaaaaacagatctgatgggatttggttattctctacctgatcagaacaaaggtaacaatgccttactttacattcctgactaccgattggctgagggattgtctaatagaatgccacacaaccagtctcaggatttcagcaccaccagctctcacaacagctcagaaaggagtggcagtctctcaggtgggaaaggtggaaaaaagaagaaaaataaaaactcttctaaaccacagaaaaacaatggatccacttgggccaatgtccctctacctccccccccagtccagccccttcctggcacggagctggaacactatgcagtggaacaacaagaaaatgg

SEQ ID NO: 17991 - DNA, 780 bp, Homo sapiens
  source 1..780: mol_type = unassigned DNA
tgaaattttcctggcccaaagatccttacctgtaaaatgaggaggttgtagtagacacactctaactttcaaccatgacatatacattgtatggctgatgactttgtgcatttctaatttattccatgaccccacttgtttaatttgtttggattaactatatgctatttgtttgtactgagattttgttttatttttttaattacaggttatttgtaaaagactatagtgtattatggcatgtcacaggctaccaagcatcaaagccataaagagttaaactttttacatcattagggtgggaaaggtggaaaaaagaagaaaaataaaaactcttctaaaccacagaaaaacaatggatccacttgggccaatgtccctctacctccccccccagtccagccccttcctggcacggagctggaacactatgcagtggaacaacaagaaaatggctatgacagtgatagctggtgcccaccattgccagtacaaacttacttacaccaaggtctggaagatgaactggaagaagatgatgatagggtcccaacacctcctgttcgaggcgtggcttcttctcctgctatctcctttggacagcagtccactgcaactcttactccatccccacgggaagagatgcaacccatgctgcaggctcacctggatgagttgacaagagcctatcagtttgatatagcaaaacaaacatggtaaatatcttcattaagtcaagagacccatgctttcaacacatggaaatttttttcagaataa

SEQ ID NO: 17992 - DNA, 686 bp, Homo sapiens
  source 1..686: mol_type = unassigned DNA
ggatgagttgacaagagcctatcagtttgatatagcaaaacaaacatggcacattcaaagcaataatcaacctccacagcctccagttccaccgttaggttatgtgtctggagccttgatttctgatttggaaacggatgttgcagatgatgatgccgacgacgaagaggaagctttagaaatccccaggcccctgagagcactggaccagactcctggatccagcatggacaatctagacagctctgtgacaggaaaagcctttacctcctctcaaagacctcgacctaccagcccattttctactgacagtaacaccagtgcagccctgagtcaaagtcagaggcctcggcccactaaaaaacacaagggagggcggatggaccaacaaccagcattgcctcatcgaagggaaggaatgacagatgaggaggccttggtgccctatagcaagcccagtttcccatctccaggtggccacagctcatcaggaacagcttcttctaagggatccactggacctaggaaaaccgaggtgttgagagcaggccaccagcgcaatgccagcgaccttcttgacataggatatatgggctccaacagtcaaggacagtttacagagtaaatgagaggagacatacaaagctgctctgaaggaccatcaggtccggactcatggaagtgat

SEQ ID NO: 17993 - DNA, 9570 bp, Homo sapiens
  source 1..9570: mol_type = unassigned DNA
gctggaagtagtccatttgtttagagtatcacaagtgtgtgtgtggaaatgctcggatgaagaactgtcaagttaccacagggagataaacagggttatctgaggcggaaagttaggctgattctctgctaggaggtctcacaggatatcatttctttagtgatgctaccgtggtgtaggatttactggtttcacctgtcaatagctacaccacagtcagttttataggttcagagactaaatgtgtcactatgctagatcctcaggctggaattacacagcaagcagacatagacaggaaacgaaagaaactcaactatttttaggctggttatagtggaaaaagaaaaattttagaaaacaaatcactgggccaagtgcattaagatggataaatgaggatggaaaagttacactccaaagaaacttagctgccacttaatgtaaattttttatcttaatttgaataagatattgctaaatatcaatattcaagtatatcaaagcataaccaatacacatgcatatatatcacatatatgtatactatttatatagtgtcatcatattccttatttaataaactttctaagagttcttataagaaaattctttctatagttaaaataaggacattgctaagaaattacacatcaaataatgtcatacacagaattatagaataatgaaaacgttgaatgcatttaattccatatgcctactgtttattgaatttctaatgtacaatgtcactggacaataaatatgaaaataaacatgaaatagttcctaatctccagaattccattgtctaggagaggaaacacatgtgcagtagaccataatatatagagagaactgatatgcgagtttatgtgtagtgtttggaaaccaaaggaggtagagagattgattctcgctgtaataggacagaatcatggtgataacagaaatggcatttaatttagactttaaagtttgtcagtggttaatagtgttagtggcaatatctctgtctaaagaatgaaggatgatgttacataaatgagcaaggagacacacaggctgtaagagtgaatgaggactaatacacagcaggtatattagtctgttttcacactactgtaaagatattaccggagactgggtaatctacaaacaaaagaggtttaactgactcacagttccacacggctggagaggcctcaggaaacttacaatcatggcagaagacaaaggggcatgtcttacaaggtagcaggagagagagagcaggggaaatgccagagatttatcgaacaaccagttctcatgagaactccctcactatcatgagaacagcatgagggaaaccgcccccatgatccaatcaccccccacaaagtcccccccttgacacatggggattacaattcgagatgaaatttgggtggggatgcagagccaaatcatatcagtaggctagcctagatatggaagggttgcaaatatttaattagaagtttagatatggcattggctagctgggtaaggctttaaacagaggaacacatgtatgtaagtgcttcacaaaaataatgtagaaagcaatgaggaagatagaagagactagagggaaatcaggtaggaggggtttaggagtaaaacaagatgaagattaaagagatgcttatttggaaagtaagagcaggtatttagaaatacaagagcaggcatttagaaatacagaaaacagcacagggaagggactgggagtgaactttcaaatgtttttaaactatcctccgttccagagtttcatattcttttgtgaccccctcactgaatttctttgatttttttcttatctagtatagcattatattgcaaagcctactgcattatttcttctttcattttggatcgttggtccttgacttgtggttattaacccagaaatgattctctcagaagaggctcagtttctggtgttatctcggcttccttgcagtggcctgtgtcaagggaatttgtttgaaaagtaaaaagtgtatctctgtgcttttggcaaccagaatcaaaactctatctttctttgctacacttaacacccttttaacttctccgatcattctaaccagttcagcttctgttttctctgtattgaaagtgcatgaatccgtgtcattgtatcctggcctcttgactaaaattacaaatacagcatcaaggcaacactcctaactattctgttgttgcttaaatattacagaaaaaaattaaatggtctatagcatttgactttcatctcttttatgtaaatatgtatttggtttatttagaaatcttaaattagtttcttacaaatattttttgcccctcttctaacaaatttaggataagcaatacttggtagttttttgtgtcatgaattaatggtataccaacataaatcttgtaatattaattttattaagtaggaggttatgttctcagtctgtttttgtctaagaaaacatataaaattgtaaatgacttgctagaaaattaagaaaaaatgtttctgagtatcctcacaacttacagctctttaaacgtaaaattaaaattattttcctctattctcatgttgcattttgcagaaaaaattcatattaatgctgatgatagtccttataagtgttactttttaatataaatatcagtattaaagagaaaactggagttcttaaataacttaaaaggcaaagtaagcagaaagagcatttaaattaatagaacttctttaaaatacattttttcttatgttctaagttcatttgctttgatattgtttatacattttttgtttgtgaatttttgttgttatttgtaattaagtttaaattttaaaatcttgaaataatttttgcccttttatgatatacagtgtagtttctatgcagattatcattggagtctgcgttaaattcaaaatatattcacactatttcttcaactgagtctttgataagtttaagtacactaagtttgttttactaaaagtgttaatttctgaattatagtaacttaaaatacacatcgcagctctcttttggaaaacgattgtgtaataatttaaacaatgtaagagttgaacagtgcagcacatgctttgcttatgtgctgcaaacagatacaggtttcaaatgagcttcattcttctgcacaaaaaatgtttaaaatgtacatgatacttgcatttggctaaagaaatcatgatgaaacttcaaggaagaagcatggacaacttacttgctcattagtatagtgtgtacaagcagatgagattttcaatatatacaactcactagacaactacatttgtttttaggttcaatggtaaatggatggggctctgcatctgatgaggatcgtaacttttctagtcatagatctagtgtaggtagctcctcagatggctctatctttgccagcggcagttttgcacaagcactggtggcagcagcagataaagctggttttaggctggatggaaccagccttacaagaacaggttggtagactccaagtcaacactctttgcatgagagaatcttgtccttggacactgtcctcttttctcctgttctttctccttagtgagtctgactgtagggctttctttaatacgcatgaatacagtttggatgctccattacccaaactctcttctgatgctagttttgcagagccaagaatagactcctcctcaacactttctcttattttcctttctcttcacggctttactgattaattggaatatgcttcctttttatattacggcaaagcagcaactaagattgccattaaattttcaataacacattttgcaaaatcctcatacaattaataatgtacccagtgattaaaattactcagcttttatctccattactttcctttgcctcatctctttctgcaaatgcattttctgggaaggtttccttagcatggggtgaatgggtctaaggttgtcggtcttaccagttcaaatagcttatgatctttttaattgtttggctagtaagattttaatacaataatttattatttgtcttaaaggatgctaattaaagatacacccactgcatttgcaagttgaataaaataatgactacatgtgtatttctctttagaataatttaattttgatttctgagagtgataagtaatcatataaaagaacaattatataatttttcaagtgctgctcattccacaaaaaagaatgtgggattaataatagatcagtaatttgtaaacttttgcaacaaaataacttaggcatgatgcgtgcttttacatttgtatgtataattcttaactatacatataagaatattctaatatatgaattaaactgaattaccttgcaaagcaaactaataaaacattaagtacatttgcaaaatcttaactgtaatcaaatagtaaagaaaaaagatttttacccttcactaaactctcaggttataaaaatgagtcttggaagttttcttggaattataccatcaatatttcttttaagcatacattagctatctttaagtgaaataaaaaagatcttctaagcattgcagaggtttatttttcaaatagcatccaaactaaaatacgttgtaatagaactgttatttgaattgtcttgcattataaggcataagtctgaaactttatgttgcttgagtgctttttgcagcattagctgtaaacagagcagtgagaacgtgcaaggaaactaatacattagaaggcacaagtgcatttcctgcatgtatgctaatagctaacacagcattaagtaatatcatatcacgtcgtcgtaagaaaatgtaactacatataataatgttgtatgaaatgaaaacatacacaggagaataaatgcatgcacataaaccaggcctctgttactacaataaacatggtattgaaatcataagttgttgaaaatttattagctaaccttttcccagaataaatttccccgtatacctactctaaaccacaagaaaaggacacagcacatatcatttttcaatgagaatttggagcctgctcagatacaataatattaatcagaaaatacctattgcatgctggatatacaaggtgattttaacctgctatcctctacacagatgttgttgagtttctgccaaaagagatagaattcattgtgtatgtggataagtggtaaggtcaatttaatatatgtgtctgagcagacctttcatgtaaaatttcagatgtaattactatatgacatttttctgtgttcagagagattttgtaagtttccaaggatgaaattttattaaacaaatacaacagtatatacttcataaatagcttctttaattttaagaaataaaaactgcatgaatttgcatatatctttgacaatatcaataatattgtcaaggttaaataaaagtataatcatgcaatattgagttgtggattggtggatctgttttatgttcatttgtttgattttgagggggccagtgggggtgttgttagcttattaaaaattgaacaaaatatgtgcagctgagaatgtagaaaatacatttttctacagagatgcaccaatatttggtatcttcatatgttatctctaggtagatttacaggttagtcatagtgcagaaatataggacagaatcagtgtgctataatgtcattctctagaacccattccctttattttcattttaggaaaagcctttacctcctctcaaagacctcgacctaccagcccattttctactgacagtaacaccagtgcagccctgagtcaaagtcagaggcctcggcccactaaaaaacacaagggagggcggatggaccaacaaccagcattgcctcatcgaagggaaggaatgacagatgaggaggccttggtgccctatagcaagcccagtttcccatctccaggtggccacagctcatcaggaacagcttcttctaagggatccactggacctaggaaaaccgaggtgttgagagcaggccaccagcgcaatgccagcgaccttcttgacataggatatatgggctccaacagtcaaggacagtttacaggtgaattatagtaaatgagaggagacatacaaagctgctctgaaggaccatcaggtccggactcatggaagtgatgactctaaacagtgcaatgaacaatttatttatgtactattaaaagaactgtaaatgcaatgtaaagacacacagccacacatatcccacagatattttcattgtgttcttctcttaagtacaccacccaccttaactctttcttgtcaggagtatataaaaaagaaagaaaacaaaactcgccctacaggaagaaaaggattctcctctgtatataatttcttttgtgcattgctatgcaagctcactctttttagctctgctcatattattgtctgttcttattggtctgttgtactatatgtgaattaataggctgtggtgccatatattaacttttaattgtgtaacttttatgtttaaattttgcactgcaattttatttggtgataagcacaaatctctactcctcatgacatgaagaaaaagactgaatgtgaagggagtttctgtactgtaagctagattggataatgatggctgtaacaaatcatgttagatggttttcagttggggtgtagaaataggaagatgcaaaggaacaatggtgttggcaaagtcttctttgaatatcagggactgagtcaataaaaaaaatagtagaaaggtggcttttactattgacaaaagccggggtcaaaaaaagtagtttaagtcttaagactgaatatgcattaaagtatgcaggtagcaaagatgtaataaatttgcttaaaaaaagaaattaaagttttatttagaatcaattttacctgtcattgtaattgacccatctgagaattacaataagcaagaggaaattaaggtgttttgcaagagctgtatttatattacagttttttaaaaacattttctgaattatcgtaattaagctctccaactcgttaagtcagaatataatatgaagttccccaaggaaacgaacaaaatgaactctagaatatctagcaaatagttaaagaagcaatttattattagggcatactcgggctgtttccaaatataaactctattgcaatatcttatttcatctttctaatacatgtacagtgcacactagaggatagagctgcatcacttaaattcatgacttaaaaaataatacagtttatatacaacttgttttttatttgattaagaagtgaagtttacgccacccaatgtatagccaaattgtacgtgcttaaaaaacagtgccgagagtatgttcagttcgcagtaagtagatttattggaataaatattctatggtacattctcagaaattggcttccaactaaaatacgtttgacccattttgaataaggaaattgaaaagaaaaatttaaaaggagaaaaaaatgcatgtttataaactttttaaataaaaccagaccttgtaagtggacattaataattgtcctgcctcatttgttttcacgactttgacaacaagaagttcctgaacattagtcatgtatgctcagaataaatgtgactttgaaatatatgttagctactgtacatgtatagtcagtcaagtagaagaggaccttcctgaaattcccacttgtgacattttcccatgggtttcctacacaatcttaaattttatttctgtctatactttctcaaatttttcctatgataagttcagttgttggtactcttctaaaaatattcaacgtgattaggatcagttctaaaatacgggacccctttgagtgacaattcgcactccatgcattattggctcagtagccaatttttgtcacgtcgttataacaaggagatgacataattaaacatttccatcctttctattccctgagactgcatcagcacaggcaagtatagaatgtaatgttcttcatgggccccaccagctttttggtgccatgtaatttatttcttcgctgaagagaaaaagaattctgagacacagttattaaaccctttatcaactttctaccatcagtgcctgaattctaatgcagtgtgatttctctgggacaaagagactgaggaagatgaaaagtttcttcaaagagtgaatacatacttattcacaactctaggatgtgaggactttaaatatctctttatgaagttccctgcctaacctctttctatttaaaggcaaacaaatttcgaagaggttttgtgttccctctttatgtttctctatgacccagtttagtctaaaaccttagttcattacatatacaacacatagcctttgatccctggtaactggcaggtgttggtgattaataaaccaaggcttcaaagtgaagtatgtgtgtgcagatgacttttggaataacgtgggcatagcatcataccttcctgattgtcttcagcatataaaaattaactgttgtagttaaaattatgtcagtgcagagcttgtggttacttggaatgttctttcagaatagtccatgttgcctattaaacctagttttaaacacattgggcagtcaatttatgcacccaaaatatcaccctcaggtagattgagggcaagataaaatgctgtatgtagctatacaaaggaattcagaaacattactggaaagcaaagcctttgtcagcttgctactgacaaagtagtaaaaagctactaatcagtgttgagtcagatgtcaacagaaaaatacaaatacctatgagagccacagcagtttctcgtttcatagccgattcaatgaatatgattagaaattcactgagctcactcttgcaggtttaaatggaggcctgcataaggactgcaagaggaaatctgggtgggagagaatgtaatctgatcttgcactcataggcaatgctgcaatgcaatcatgtccaatacaagcacagcttcattcataacaggaaacgtcttctttgggaaaatagctctattggtgcccaaactcaggtatgccagtgtatgcaggtggagtcgccctacccctcttccaaacatgtcctgtgagatttttaaaataagatgggatagtacaggggcatgaaaagaattgattccttcacaggatttgaatccagttcaagggagaatgtagaaaattcaaaaccaacatataaggtatcacacaaccaagaaaagtaaaaccattgcaagtttacttgcgttgagtacaaaacagatttaatggtgttctatgtcatagtttaatgctctgggtatttaaatatgttttcaacaggatttgagttgaaagtttgtaatgtgctttgatggaacacctctcaatttctattcaataaacttatgtaattgtccattgacaatataatgataacagtaccattgaactctaaactgtggtttatcttcactactgggaagcaactgtgcatcagtattaaagatatgcagaaacataatattca

SEQ ID NO: 17994 - DNA, 805 bp, Homo sapiens
  source 1..805: mol_type = unassigned DNA
cagtaacaccagtgcagccctgagtcaaagtcagaggcctcggcccactaaaaaacacaagggagggcggatggaccaacaaccagcattgcctcatcgaagggaaggaatgacagatgatcttccaccaccaccagatcccccgccaggtcagggtttaaggcagcaaataggcccgagccagcaggctggtaacgtggaaaactcagcagagagaaaaggaagctctctagagagacaacatgcatccagcttagaagacacaaagagctcattggattgtccagctagaacctccctagagtggcagcgacaaacccaggaatggataagctccacagaacgacaagaagatatacggaaagccccacacaaacaaggtgtcggatcagaggaggccttggtgccctatagcaagcccagtttcccatctccaggtggccacagctcatcaggaacagcttcttctaagggatccactggacctaggaaaaccgaggtgttgagagcaggccaccagcgcaatgccagcgaccttcttgacataggatatatgggctccaacagtcaaggacagtttacaggtgaattatagtaaatgagaggagacatacaaagctgctctgaaggaccatcaggtccggactcatggaagtgatgactctaaacagtgcaatgaacaatttatttatgtactattaaaagaactgtaaatgcaatgtaaagacacacagccacacatatcccacagatattttcattgtgttcttctcttaagtacaccacccaccttaactctttcttg

SEQ ID NO: 17995 - DNA, 7662 bp, Homo sapiens
  source 1..7662: mol_type = unassigned DNA
tcagtgttacgagatgacttccgacaaaaccccacagatgttgtagtggcagctggagagcctgcaatcctggagtgccagcctccccggggacacccagaacccaccatctactggaaaaaagacaaagttcgaattgatgacaaggaagaaagaataagtatccgtggtggaaaactgatgatctccaataccaggaaaagtgatgcagggatgtatacttgtgttggtaccaatatggtgggagaaagggacagtgacccagcagagctgactgtctttgaacgacccacatttctcaggaggccaattaaccaggtggtactggaggaagaagctgtagaatttcgttgtcaagtccaaggagatcctcaaccaactgtgaggtggaaaaaggatgatgcagacttgccaagaggaaggtatgacatcaaagacgattacacactaagaattaaaaagaccatgagtacagatgaaggcacctatatgtgtattgctgagaatcgggttggaaaaatggaagcctctgctacactcaccgtccgagctcccccacagtttgtggttcggccaagagatcagattgttgctcaaggtcgaacagtgacatttccctgtgaaactaaaggaaacccacagccagctgttttttggcagaaagaaggcagccagaacctacttttcccaaaccaaccccagcagcccaacagtagatgctcagtgtcaccaactggagacctcacaatcaccaacattcaacgttccgacgcgggttactacatctgccaggctttaactgtggcaggaagcattttagcaaaagctcaactggaggttactgatgttttgacagatagacctccacctataattctacaaggcccagccaaccaaacgctggcagtggatggtacagcgttactgaaatgtaaagccactggtgatcctcttcctgtaattagctggttaaaggagggatttacttttccgggtagagatccaagagcaacaattcaagagcaaggcacactgcagattaagaatttacggatttctgatactggcacttatacttgtgtggctacaagttcaagtggagagacttcctggagtgcagtgctggatgtgacagagtctggagcaacaatcagtaaaaactatgatttaagtgacctgccagggccaccatccaaaccgcaggtcactgatgttactaagaacagtgtcaccttgtcctggcagccaggtacccctggaacccttccagcaagtgcatatatcattgaggctttcagccaatcagtgagcaacagctggcagaccgtggcaaaccatgtaaagaccaccctctatactgtaagaggactgcggcccaatacaatctacttattcatggtcagagcgatcaacccccaaggtctcagtgacccaagtcccatgtcagatcctgtgcgcacacaagatatcagcccaccagcacaaggagtggaccacaggcaagtgcagaaagagctaggagatgtccttgtccgtcttcataatccagttgtgctgactcccaccacggttcaggtcacatggacggttgatcgccaaccccagtttatccaaggctaccgagtgatgtatcgtcagacttcaggtctgcaggcgacatcttcgtggcagaatttagatgccaaagtcccgactgaacgaagtgctgtcttagtcaacctgaaaaagggggtgacttatgaaattaaagtacggccatattttaatgagttccaaggaatggatagtgaatctaaaacggttcgtactactgaagaagccccaagtgccccaccacagtctgtcactgtactgacagttggaagctacaatagcacaagtattagtgtttcctgggatcctcctcctccagatcaccagaatggaattatccaagaatacaagatctggtgtctaggaaatgaaacgcgattccatatcaacaaaactgtggatgcagccattcggtccgtaataattggtggattattcccaggtattcaataccgggtagaggttgcagctagtaccagtgcaggggttggagtaaagagtgagccacagccaataataatcgggagacgcaatgaagttgtcattactgaaaacaataacagcataactgagcaaatcactgatgtggtgaagcaaccagcctttatagctggtattggtggtgcctgctgggtaattctgatgggttttagcatatggttgtattggcgaagaaagaagaggaagggactcagtaattatgctgttacgtttcaaagaggagatggaggactaatgagcaatggaagccgtccaggtcttctcaatgctggtgatcccagctatccatggcttgctgattcttggccagccacgagcttgccagtaaataatagcaacagtggcccaaatgagattggaaattttggccgtggagatgtgctgccaccagttccaggccaaggggataaaacagcaacgatgctctcagatggagccatttatagtagcattgacttcactaccaaaaccagttacaacagttccagccaaataacacaggctaccccatatgccacgacacagatcttgcattccaacagcatacatgaattggctgtcgatctgcctgatccacaatggaaaagctcaattcagcaaaaaacagatctgatgggatttggttattctctacctgatcagaacaaaggtaacaatggtgggaaaggtggaaaaaagaagaaaaataaaaactcttctaaaccacagaaaaacaatggatccacttgggccaatgtccctctacctccccccccagtccagccccttcctggcacggagctggaacactatgcagtggaacaacaagaaaatggctatgacagtgatagctggtgcccaccattgccagtacaaacttacttacaccaaggtctggaagatgaactggaagaagatgatgatagggtcccaacacctcctgttcgaggcgtggcttcttctcctgctatctcctttggacagcagtccactgcaactcttactccatccccacgggaagagatgcaacccatgctgcaggctcacctggatgagttgacaagagcctatcagtttgatatagcaaaacaaacatggcacattcaaagcaataatcaacctccacagcctccagttccaccgttaggttatgtgtctggagccttgatttctgatttggaaacggatgttgcagatgatgatgccgacgacgaagaggaagctttagaaatccccaggcccctgagagcactggaccagactcctggatccagcatggacaatctagacagctctgtgacaggaaaagcctttacctcctctcaaagacctcgacctaccagcccattttctactgacagtaacaccagtgcagccctgagtcaaagtcagaggcctcggcccactaaaaaacacaagggagggcggatggaccaacaaccagcattgcctcatcgaagggaaggaatgacagatgaggaggccttggtgccctatagcaagcccagtttcccatctccaggtggccacagctcatcaggaacagcttcttctaagggatccactggacctaggaaaaccgaggtgttgagagcaggccaccagcgcaatgccagcgaccttcttgacataggatatatgggctccaacagtcaaggacagtttacaggtgaattatagtaaatgagaggagacatacaaagctgctctgaaggaccatcaggtccggactcatggaagtgatgactctaaacagtgcaatgaacaatttatttatgtactattaaaagaactgtaaatgcaatgtaaagacacacagccacacatatcccacagatattttcattgtgttcttctcttaagtacaccacccaccttaactctttcttgtcaggagtatataaaaaagaaagaaaacaaaactcgccctacaggaagaaaaggattctcctctgtatataatttcttttgtgcattgctatgcaagctcactctttttagctctgctcatattattgtctgttcttattggtctgttgtactatatgtgaattaataggctgtggtgccatatattaacttttaattgtgtaacttttatgtttaaattttgcactgcaattttatttggtgataagcacaaatctctactcctcatgacatgaagaaaaagactgaatgtgaagggagtttctgtactgtaagctagattggataatgatggctgtaacaaatcatgttagatggttttcagttggggtgtagaaataggaagatgcaaaggaacaatggtgttggcaaagtcttctttgaatatcagggactgagtcaataaaaaaaatagtagaaaggtggcttttactattgacaaaagccggggtcaaaaaaagtagtttaagtcttaagactgaatatgcattaaagtatgcaggtagcaaagatgtaataaatttgcttaaaaaaagaaattaaagttttatttagaatcaattttacctgtcattgtaattgacccatctgagaattacaataagcaagaggaaattaaggtgttttgcaagagctgtatttatattacagttttttaaaaacattttctgaattatcgtaattaagctctccaactcgttaagtcagaatataatatgaagttccccaaggaaacgaacaaaatgaactctagaatatctagcaaatagttaaagaagcaatttattattagggcatactcgggctgtttccaaatataaactctattgcaatatcttatttcatctttctaatacatgtacagtgcacactagaggatagagctgcatcacttaaattcatgacttaaaaaataatacagtttatatacaacttgttttttatttgattaagaagtgaagtttacgccacccaatgtatagccaaattgtacgtgcttaaaaaacagtgccgagagtatgttcagttcgcagtaagtagatttattggaataaatattctatggtacattctcagaaattggcttccaactaaaatacgtttgacccattttgaataaggaaattgaaaagaaaaatttaaaaggagaaaaaaatgcatgtttataaactttttaaataaaaccagaccttgtaagtggacattaataattgtcctgcctcatttgttttcacgactttgacaacaagaagttcctgaacattagtcatgtatgctcagaataaatgtgactttgaaatatatgttagctactgtacatgtatagtcagtcaagtagaagaggaccttcctgaaattcccacttgtgacattttcccatgggtttcctacacaatcttaaattttatttctgtctatactttctcaaatttttcctatgataagttcagttgttggtactcttctaaaaatattcaacgtgattaggatcagttctaaaatacgggacccctttgagtgacaattcgcactccatgcattattggctcagtagccaatttttgtcacgtcgttataacaaggagatgacataattaaacatttccatcctttctattccctgagactgcatcagcacaggcaagtatagaatgtaatgttcttcatgggccccaccagctttttggtgccatgtaatttatttcttcgctgaagagaaaaagaattctgagacacagttattaaaccctttatcaactttctaccatcagtgcctgaattctaatgcagtgtgatttctctgggacaaagagactgaggaagatgaaaagtttcttcaaagagtgaatacatacttattcacaactctaggatgtgaggactttaaatatctctttatgaagttccctgcctaacctctttctatttaaaggcaaacaaatttcgaagaggttttgtgttccctctttatgtttctctatgacccagtttagtctaaaaccttagttcattacatatacaacacatagcctttgatccctggtaactggcaggtgttggtgattaataaaccaaggcttcaaagtgaagtatgtgtgtgcagatgacttttggaataacgtgggcatagcatcataccttcctgattgtcttcagcatataaaaattaactgttgtagttaaaattatgtcagtgcagagcttgtggttacttggaatgttctttcagaatagtccatgttgcctattaaacctagttttaaacacattgggcagtcaatttatgcacccaaaatatcaccctcaggtagattgagggcaagataaaatgctgtatgtagctatacaaaggaattcagaaacattactggaaagcaaagcctttgtcagcttgctactgacaaagtagtaaaaagctactaatcagtgttgagtcagatgtcaacagaaaaatacaaatacctatgagagccacagcagtttctcgtttcatagccgattcaatgaatatgattagaaattcactgagctcactcttgcaggtttaaatggaggcctgcataaggactgcaagaggaaatctgggtgggagagaatgtaatctgatcttgcactcataggcaatgctgcaatgcaatcatgtccaatacaagcacagcttcattcataacaggaaacgtcttctttgggaaaatagctctattggtgcccaaactcaggtatgccagtgtatgcaggtggagtcgccctacccctcttccaaacatgtcctgtgagatttttaaaataagatgggatagtacaggggcatgaaaagaattgattccttcacaggatttgaatccagttcaagggagaatgtagaaaattcaaaaccaacatataaggtatcacacaaccaagaaaagtaaaaccattgcaagtttacttgcgttgagtacaaaacagatttaatggtgttctatgtcatagtttaatgctctgggtatttaaatatgttttcaacaggatttgagttgaaagtttgtaatgtgctttgatggaacacctctcaatttctattcaataaacttatgtaattgtccattgacaatataatgataacagtaccattgaactctaaactgtggtttatcttcactactgggaagcaactgtgcatcagtattaaagatatgcagaaacataatattcactaatttgttcatctgcttctgtatattgtttatggaattacatggcaagaactgttctaaagcaacatgtctttccacattattttagaggtgaaattacttttgttttgcttctctataatgtgtacttcaaatgaaacaccatacttttttctaaaaaaagatgttcaatttactaatttttttaaatctcataatttaaaaagcatttgttgtgattttaaagtgttgcaagaaaagggattttgtggccgtgggtagactttttatactttgttttatagatggattttttttaactgtagtttgtttaagtcaccaagcagcatccaaaatcttaatgtgtttcatttgatgttgttagatcagagaagaaattggcataaaatcggttaatagtattgtcaaagaattgtgtattgtgtactcactgggaaaaaataaaatatattcacatttcaaa

SEQ ID NO: 17996 - DNA, 4569 bp, Homo sapiens
  source 1..4569: mol_type = unassigned DNA
ggagagaaggacgagggaaggaggagggcacgaagaggcaccgaccgtacccaggcgcaccggcaggagagcggcaccgtggctgccgcagcgcgcagaggctgtggaggggcttacggctcccagcccacgggtctcagacccaggggctgggcccccagcccccagtcccgatcccagctgggtcgagccatgctgcgctacctgctgaaaacgctgctgcagatgaacttgttcgcggactctctggccggggacatctccaactccagcgagctgctcttgggcttcaactcctcgctggcggcgctcaaccacaccctgctgcctcccggcgatccctctctcaacgggtcaagggtaggaccggaggacgctatgccccgcatcgtggagcagccgccagatctgctggtctcccgaggcgagcccgccacgttgccctgccgcgctgaaggccgaccccgacccaacattgagtggtacaagaacggggcgcgtgtggccactgtgcgggaggatccgcgtgcgcaccgcctgctgctgcccagcggcgccctcttcttcccgcgcatcgtgcacgggcgccgcgcgcggccggacgaaggtgtctacacttgcgtggctcgcaactacctgggggcagcagcgagcagaaacgcctcgctggaagtggcagtcctccgtgatgatttccggcagtctcctggaaacgtggtggtggcagtgggggagccagcagtactggaatgcgtgcccccccgcggccacccggagccttccgtgtcctggaggaaggacggtgcaagactcaaggaagaggaaggaaggatcacgatccgtggagggaagctgatgatgtcacatacactcaagagcgatgcaggcatgtatgtgtgcgtagcctccaacatggcgggagaacgggagagtgcggcagctgaagtcatggtactggagcgtccctcattcctgcgcagaccagtgaatcaggtggtcctggctgatgcccctgtgactttcctatgtgaggtgaagggggatcccccacctcgtctacgctggcgcaaggaggatggggaactgcccacaggcaggtatgagatccggagtgaccacagcctttggattgggcatgtgagtgccgaagatgagggaacgtacacctgtgtggcggagaacagtgtgggccgcgctgaagcatctggctccctcagtgttcacgtcccaccccagttggtgacccagccccaggaccagatggcagctcctggagagagcgtggctttccagtgcgagaccaaaggaaaccccccacctgccatcttctggcagaaggaggggagtcaggtcctgcttttccccagtcagtcacttcagccgacggggcgcttctcagtgtctccaagaggccaacttaacatcaccgcggtgcagcgtggggatgctgggtactacgtgtgccaggctgtcagtgtggctggcagcatcctggccaaggccctgctggagataaaaggagcctctttggatgggctgcctcctgtcatcctccagggaccagccaatcagacgctggtgcttggctcctccgtgtggctgccctgcagagtgactgggaaccctcaacccagtgtccgatggaagaaggatgggcagtggctgcagggggatgacctccagttcaagacaatggccaacggtaccctgtacatcgccaatgtgcaggagatggacatgggcttctacagctgcgtggccaagagttccacaggggaagccacatggagcggctggcttaagatgcgggaagactggggagtatcaccagacccccctacagaacccagttcccctccgggggctccctctcagccagtggtcactgagatcaccaagaacagcattaccctgacctggaagcccaacccacaaactggggctgcagtcacgtcttatgtgatagaggccttcagcccagcagctggcaacacatggcgtactgtggcagatggcgtgcagctggagacacacacagtcagcggtctgcagcccaataccatctacctgtttctggttcgagcagtgggagcctggggcctcagtgagcccagccccgtctctgagcctgtccgtacacaggatagcagcccctctaggccagtggaggacccatggagaggccagcagggactggcggaagtggctgtgcgcctgcaggagcccatagtcctgggaccccggaccctgcaggtgtcctggactgtggatggcccagtccagctggtgcaaggtttccgggtgtcttggagggtagcaggccctgagggaggaagctggacaatgttggacctacagtccccaagccagcaaagtactgtgctaagaggactccctccagggacccaaatccagatcaaggtgcaagcccaaggccaggaggggctgggggctgaaagcctctctgtgaccaggagcattcctgaggaggcccccagtggccccccacagggagtggcggtggccttggggggtgatggcaacagcagtatcactgtgtcctgggaacctccactcccctcccagcaaaatggggtcatcacggaataccagatctggtgcctgggcaatgagagccgctttcacctcaatcgatctgcagcaggctgggcacgctccgcaatgctccgaggactggtgcccggtctcctctatcgaaccctggtcgcggcggccaccagcgcaggcgtgggcgtgcccagtgccccagtgctggtgcagctgccgtccccgccggacctggagcccgggctggaggtgggcgcggggctggcggtgcggctggcgagggtgctgcgggagcccgccttcctcgcgggcagcggcgcagcctgcggggcgctgcttctcgggctctgcgccgccctctactggcgccggaaacagcgcaaagagctcagccactacacggcctcttttgcctacacaccggcagtgtccttcccgcactcagagggcctctctggagccagttccaggccacccatgggccttggccccgccccctactcatggctggcagattcgtggccccacccatctcgaagcccctcggcccaggaacccaggggaagctgctgccctagcaatcctgacccggacgacagatattacaacgaagcgggaatctccctgtatctagctcagacggccaggggcacggccgcccctggcgagggtcctgtctatagcaccattgacccagcgggggaggagctgcagaccttccatgggggcttcccccaacatccctcaggagatctgggtccctggagccagtacgctcctccagagtggagccagggggacagtggagccaagggaggcaaagtgaagcttctggggaaacctgtgcagatgccctctctgaactggccagaagccctgcccccacctcctccttcttgtgaactgagctgcctagaagggccggaggaggagctggagggcagctcagagccagaggagtggtgcccgccaatgcctgagagaagtcacctgacggagcccagctccagtggagggtgcctggtcaccccatcccgaagggaaaccccctctcccacaccttcctatggacagcagtccacagccactcttacaccctcacctcctgaccctccccagcccccaactgacatgccccatctccatcagatgcccaggagggtgccccttgggccgagttcccctctcagtgtatcccagcccatgctgggcatccgtgaagcgaggcctgctggcttgggtgctggccctgcagcctcaccccacctcagccccagtcctgcccctagcacagccagcagtgccccaggcagaacctggcaggggaatggggagatgactcccccacttcaaggaccccgtgctcgattccggaagaaacccaaggctcttccctacaggagggagaacagtcctggggacttgcccccaccacccttgccaccgccagaggaagaggcgagctgggccctagagctgagggcagcaggcagcatgtcctccctggagcgggagcgcagtggggagaggaaagcggtccaggccgtgcccctggcagcccagcgggtgctccacccagatgaagaggcctggctcccatacagcagaccaagcttcctgtcccggggccagggcaccagcacatgttccacggccggcagcaactcttccaggggctccagcagctctaggggctcccggggccctggccggagccggagtcggagtcagagccggagccagagccaaaggccaggacagaaacgccgagaggaaccaagatgacccttgttggggcattgagaatatcatgagtgccacggggaaggggagtagggatgtcttttcccccccagcagtgatgagtggggctagctgaagcccattggtttccacgatttcaattggctgagaaggcagagagctagctcctccctttctttctttttccacctgagacttgtttataaaaaacaaaacaataaaaagagtctgatcaga

SEQ ID NO: 17997 - DNA, 4551 bp, Homo sapiens
  source 1..4551: mol_type = unassigned DNA
tcgccaagcgtggttcagccactcccgcttaaacttggcaggagaggagacggaggtctctaggtggtccagaaagccggcctagaagtttgtgtcccgatccctctactaaccggcctgtctgtaggcatcttcctttgagacgaggaacgcggaacgtctgccaataaggacatattggatcctgcagagggagagggtaggcaggtggggactgagctccgcagagaagcataggagatggaacgaccagaggattctctttccctctggagcctcaatctctccccacaatttccctgtctgaacgctctgcgccaccccctgtccccagggtcaagggtaggaccggaggacgctatgccccgcatcgtggagcagccgccagatctgctggtctcccgaggcgagcccgccacgttgccctgccgcgctgaaggccgaccccgacccaacattgagtggtacaagaacggggcgcgtgtggccactgtgcgggaggatccgcgtgcgcaccgcctgctgctgcccagcggcgccctcttcttcccgcgcatcgtgcacgggcgccgcgcgcggccggacgaaggtgtctacacttgcgtggctcgcaactacctgggggcagcagcgagcagaaacgcctcgctggaagtggcagtcctccgtgatgatttccggcagtctcctggaaacgtggtggtggcagtgggggagccagcagtactggaatgcgtgcccccccgcggccacccggagccttccgtgtcctggaggaaggacggtgcaagactcaaggaagaggaaggaaggatcacgatccgtggagggaagctgatgatgtcacatacactcaagagcgatgcaggcatgtatgtgtgcgtagcctccaacatggcgggagaacgggagagtgcggcagctgaagtcatggtactggagcgtccctcattcctgcgcagaccagtgaatcaggtggtcctggctgatgcccctgtgactttcctatgtgaggtgaagggggatcccccacctcgtctacgctggcgcaaggaggatggggaactgcccacaggcaggtatgagatccggagtgaccacagcctttggattgggcatgtgagtgccgaagatgagggaacgtacacctgtgtggcggagaacagtgtgggccgcgctgaagcatctggctccctcagtgttcacgtcccaccccagttggtgacccagccccaggaccagatggcagctcctggagagagcgtggctttccagtgcgagaccaaaggaaaccccccacctgccatcttctggcagaaggaggggagtcaggtcctgcttttccccagtcagtcacttcagccgacggggcgcttctcagtgtctccaagaggccaacttaacatcaccgcggtgcagcgtggggatgctgggtactacgtgtgccaggctgtcagtgtggctggcagcatcctggccaaggccctgctggagataaaaggagcctctttggatgggctgcctcctgtcatcctccagggaccagccaatcagacgctggtgcttggctcctccgtgtggctgccctgcagagtgactgggaaccctcaacccagtgtccgatggaagaaggatgggcagtggctgcagggggatgacctccagttcaagacaatggccaacggtaccctgtacatcgccaatgtgcaggagatggacatgggcttctacagctgcgtggccaagagttccacaggggaagccacatggagcggctggcttaagatgcgggaagactggggagtatcaccagacccccctacagaacccagttcccctccgggggctccctctcagccagtggtcactgagatcaccaagaacagcattaccctgacctggaagcccaacccacaaactggggctgcagtcacgtcttatgtgatagaggccttcagcccagcagctggcaacacatggcgtactgtggcagatggcgtgcagctggagacacacacagtcagcggtctgcagcccaataccatctacctgtttctggttcgagcagtgggagcctggggcctcagtgagcccagccccgtctctgagcctgtccgtacacaggatagcagcccctctaggccagtggaggacccatggagaggccagcagggactggcggaagtggctgtgcgcctgcaggagcccatagtcctgggaccccggaccctgcaggtgtcctggactgtggatggcccagtccagctggtgcaaggtttccgggtgtcttggagggtagcaggccctgagggaggaagctggacaatgttggacctacagtccccaagccagcaaagtactgtgctaagaggactccctccagggacccaaatccagatcaaggtgcaagcccaaggccaggaggggctgggggctgaaagcctctctgtgaccaggagcattcctgaggaggcccccagtggccccccacagggagtggcggtggccttggggggtgatggcaacagcagtatcactgtgtcctgggaacctccactcccctcccagcaaaatggggtcatcacggaataccagatctggtgcctgggcaatgagagccgctttcacctcaatcgatctgcagcaggctgggcacgctccgcaatgctccgaggactggtgcccggtctcctctatcgaaccctggtcgcggcggccaccagcgcaggcgtgggcgtgcccagtgccccagtgctggtgcagctgccgtccccgccggacctggagcccgggctggaggtgggcgcggggctggcggtgcggctggcgagggtgctgcgggagcccgccttcctcgcgggcagcggcgcagcctgcggggcgctgcttctcgggctctgcgccgccctctactggcgccggaaacagcgcaaagagctcagccactacacggcctcttttgcctacacaccggcagtgtccttcccgcactcagagggcctctctggagccagttccaggccacccatgggccttggccccgccccctactcatggctggcagattcgtggccccacccatctcgaagcccctcggcccaggaacccaggggaagctgctgccctagcaatcctgacccggacgacagatattacaacgaagcgggaatctccctgtatctagctcagacggccaggggcacggccgcccctggcgagggtcctgtctatagcaccattgacccagcgggggaggagctgcagaccttccatgggggcttcccccaacatccctcaggagatctgggtccctggagccagtacgctcctccagagtggagccagggggacagtggagccaagggaggcaaagtgaagcttctggggaaacctgtgcagatgccctctctgaactggccagaagccctgcccccacctcctccttcttgtgaactgagctgcctagaagggccggaggaggagctggagggcagctcagagccagaggagtggtgcccgccaatgcctgagagaagtcacctgacggagcccagctccagtggagggtgcctggtcaccccatcccgaagggaaaccccctctcccacaccttcctatggacagcagtccacagccactcttacaccctcacctcctgaccctccccagcccccaactgacatgccccatctccatcagatgcccaggagggtgccccttgggccgagttcccctctcagtgtatcccagcccatgctgggcatccgtgaagcgaggcctgctggcttgggtgctggccctgcagcctcaccccacctcagccccagtcctgcccctagcacagccagcagtgccccaggcagaacctggcaggggaatggggagatgactcccccacttcaaggaccccgtgctcgattccggaagaaacccaaggctcttccctacaggagggagaacagtcctggggacttgcccccaccacccttgccaccgccagaggaagaggcgagctgggccctagagctgagggcagcaggcagcatgtcctccctggagcgggagcgcagtggggagaggaaagcggtccaggccgtgcccctggcagcccagcgggtgctccacccagatgaagaggcctggctcccatacagcagaccaagcttcctgtcccggggccagggcaccagcacatgttccacggccggcagcaactcttccaggggctccagcagctctaggggctcccggggccctggccggagccggagtcggagtcagagccggagccagagccaaaggccaggacagaaacgccgagaggaaccaagatgacccttgttggggcattgagaatatcatgagtgccacggggaaggggagtagggatgtcttttcccccccagcagtgatgagtggggctagctgaagcccattggtttccacgatttcaattggctgagaaggcagagagctagctcctccctttctttctttttccacctgagacttgtttataaaaaacaaaacaataaaaagagtctgatcaga

SEQ ID NO: 17998 - DNA, 1942 bp, Homo sapiens
  source 1..1942: mol_type = unassigned DNA
gctgcgtgagtccacccgagggcagtgctgaggatcttgacgggggcggggcaagccccccactggggtagctgtgcctgccgggtcgggaatgaccctttcccagttccagggtttcgggcccctcctcccctcacttctctgacccccacagcgtccccgccggacctggagcccgggctggaggtgggcgcggggctggcggtgcggctggcgagggtgctgcgggagcccgccttcctcgcgggcagcggcgcagcctgcggggcgctgcttctcgggctctgcgccgccctctactggcgccggaaacagcgcaaagagctcagccactacacggcctcttttgcctacacaccggcagtgtccttcccgcactcagagggcctctctggagccagttccaggccacccatgggccttggccccgccccctactcatggctggcagattcgtggccccacccatctcgaagcccctcggcccaggaacccaggggaagctgctgccctagcaatcctgacccggacgacagatattacaacgaagcgggaatctccctgtatctagctcagacggccaggggcacggccgcccctggcgagggtcctgtctatagcaccattgacccagcgggggaggagctgcagaccttccatgggggcttcccccaacatccctcaggagatctgggtccctggagccagtacgctcctccagagtggagccagggggacagtggagccaagggaggcaaagtgaagcttctggggaaacctgtgcagatgccctctctgaactggccagaagccctgcccccacctcctccttcttgtgaactgagctgcctagaagggccggaggaggagctggagggcagctcagagccagaggagtggtgcccgccaatgcctgagagaagtcacctgacggagcccagctccagtggagggtgcctggtcaccccatcccgaagggaaaccccctctcccacaccttcctatggacagcagtccacagccactcttacaccctcacctcctgaccctccccagcccccaactgacatgccccatctccatcagatgcccaggagggtgccccttgggccgagttcccctctcagtgtatcccagcccatgctgggcatccgtgaagcgaggcctgctggcttgggtgctggccctgcagcctcaccccacctcagccccagtcctgcccctagcacagccagcagtgccccaggcagaacctggcaggggaatggggagatgactcccccacttcaaggaccccgtgctcgattccggaagaaacccaaggctcttccctacaggagggagaacagtcctggggacttgcccccaccacccttgccaccgccagaggaagaggcgagctgggccctagagctgagggcagcaggcagcatgtcctccctggagcgggagcgcagtggggagaggaaagcggtccaggccgtgcccctggcagcccagcgggtgctccacccagatgaagaggcctggctcccatacagcagaccaagcttcctgtcccggggccagggcaccagcacatgttccacggccggcagcaactcttccaggggctccagcagctctaggggctcccggggccctggccggagccggagtcggagtcagagccggagccagagccaaaggccaggacagaaacgccgagaggaaccaagatgacccttgttggggcattgagaatatcatgagtgccacggggaaggggagtagggatgtcttttcccccccagcagtgatgagtggggctagctgaagcccattggtttccacgatttcaattggctgagaaggcagagagctagctcctccctttctttctttttccacctgagacttgtttataaaaaacaaaacaataaaaagagtctgatcagagccc

SEQ ID NO: 17999 - DNA, 3255 bp, Homo sapiens
  source 1..3255: mol_type = unassigned DNA
ctcccggcctcggagcggacggatccgggagggagccaggcggcccatggggaggggcaggggcttagccgctggcgagtgaggaccgggtcgggagaaaggggtcgcacctggagttcagcctcttgggtaggggcgggatacgtggggcgactcgaggagctgccaggactagggagggctgcgggccaagacggggcgggatctggatgacgtttgcctctaagacgccacgaggaggccaggctttgcaaccatctccataaagaaggggcaagttcgaggacggaaagcccactcaaagggcggggggcggggcctggcaagagggggtgtggccaggatcccaggcagtaaattgtgcggcggggtctggatggaaaggcggggcccgctgaaagaaggcgatccgagttctgctacttcctagtaagggacgtctctggagagattctgaggtgtttgaggtcagtggttttcaatcttggttggctacacataggaatcacttgaggggcttgagaaaaataccgacacctgagtcccacccccgagaaattctgatgaaatgggtccagggtgcagcctgagtggtggaactgggaccggggcctaggcgtggacaagtataggggtatttctgacccttctcctcatttcacctcttctttctcccacgggttcctttctggaagcctcttttgcctacacaccggcaggtaagccatctctgccccagtggggttcagaccccccgggacgggcccttctctcactcattcgccccctcattttccccagtgtccttcccgcactcagagggcctctctggagccagttccaggtaattctcttagcccatttcctcaggatgacctccaccgacaggccactcttcttccgccccgctgacgccccaggtggagggagcatggccacctcccaccccaacaccaccgccactgtcctgaaactcccgaatatcgccacctccctttcctttgctggcctcttcaggctctccgtccccaacgctcacctgctctccctcaggccacccatgggccttggccccgccccctactcatggctggcagattcgtggccccacccatctcgaagcccctcggcccaggaacccaggggaagctgctgccctagcaatcctgacccggacgacagatattacaacggtgaggagttctcattccctcacctggcttcagcgcacttctcccgacctactggggcaaaccgaagggcgcccgggagcccggtctctctgaggttggtcagtccctggggaggatgtgagctggggaagcctctcagacctacctccaccctggtttaggatgtaaggcttgtgtgggggaagaagttgatcccgtgggatttccctttgtcttccattctgttgtcctctatgtttctgtctctgcttccgggcctccctctttcttctctgcagaagcgggaatctccctgtatctagctcagacggccaggggcacggccgcccctggcgagggtcctgtctatagcaccattgacccagcgggggaggagctgcagaccttccatgggggcttcccccaacatccctcaggagatctgggtccctggagccagtacgctcctccagagtggagccagggggacagtggagccaagggaggcaaagtgaagcttctggggaaacctgtgcagatgccctctctgaactggccagaagccctgcccccacctcctccttcttgtgaactgagctgcctagaagggccggaggaggagctggagggcagctcagagccagaggagtggtgcccgccaatgcctgagagaagtcacctgacggagcccagctccagtggagggtgcctggtcaccccatcccgaagggaaaccccctctcccacaccttcctatggacagcagtccacagccactcttacaccctcacctcctgaccctccccagcccccaactgacatgccccatctccatcagatgcccaggtagggaggtatatagtacctcactcattgcaagccctctatacgtatctactcagtagatgactgggtgggtggatggatggatgggtggatggatctggggtacagaggtctcagggctgtgtcagggtggaagtgtaatttgggcaggaatatggaggctgacaagatctctcatgcccattagactggctcttgctggagtggtcagcactctacctgagacatttcagatatggctctccttatgcttctctagcttgggaggacttacgggcggacgggttgtgtctcgtttatctgttaggttgattgtctagcacagtgccaggcacatagtaggcattcagtttttgtggagggaacagaggctgcggcctcctgtcattgcaggagggtgccccttgggccgagttcccctctcagtgtatcccagcccatgctgggcatccgtgaagcgaggcctgctggcttgggtgctggccctgcagcctcaccccacctcagccccagtcctgcccctagcacagccagcagtgccccaggcagaacctggcaggggaatggggagatgactcccccacttcaaggaccccgtgctcgattccggaagaaacccaaggctcttccctacaggagggagaacagtcctggggacttgcccccaccacccttgccaccgccagaggaagaggcgagctgggccctagagctgagggcagcaggcagcatgtcctccctggagcgggagcgcagtggggagaggaaagcggtccaggccgtgcccctggcagcccagcgggtgctccacccagatgaagaggcctggctcccatacagcagaccaagcttcctgtcccggggccagggcaccagcacatgttccacggccggcagcaactcttccaggggctccagcagctctaggggctcccggggccctggccggagccggagtcggagtcagagccggagccagagccaaaggccaggacagaaacgccgagaggaaccaagatgacccttgttggggcattgagaatatcatgagtgccacggggaaggggagtagggatgtcttttcccccccagcagtgatgagtggggctagctgaagcccattggtttccacgatttcaattggctgagaaggcagagagctagctcctccctttctttctttttccacctgagacttgtttataaaaaacaaaacaataaaaagagtctgatcaga

SEQ ID NO: 18000 - DNA, 2272 bp, Homo sapiens
  source 1..2272: mol_type = unassigned DNA
cggcctcggagcggacggatccgggagggagccaggcggcccatggggaggggcaggggcttagccgctggcgagtgaggaccgggtcgggagaaaggggtcgcacctggagttcagcctcttgggtaggggcgggatacgtggggcgactcgaggagctgccaggactagggagggctgcgggccaagacggggcgggatctggatgacgtttgcctctaagacgccacgaggaggccaggctttgcaaccatctccataaagaaggggcaagttcgaggacggaaagcccactcaaagggcggggggcggggcctggcaagagggggtgtggccaggatcccaggcagtaaattgtgcggcggggtctggatggaaaggcggggcccgctgaaagaaggcgatccgagttctgctacttcctagtaagggacgtctctggagagattctgaggtgtttgaggccacccatgggccttggccccgccccctactcatggctggcagattcgtggccccacccatctcgaagcccctcggcccaggaacccaggggaagctgctgccctagcaatcctgacccggacgacagatattacaacggtgaggagttctcattccctcacctggcttcagcgcacttctcccgacctactggggcaaaccgaagggcgcccgggagcccggtctctctgaggttggtcagtccctggggaggatgtgagctggggaagcctctcagacctacctccaccctggtttaggatgtaaggcttgtgtgggggaagaagttgatcccgtgggatttccctttgtcttccattctgttgtcctctatgtttctgtctctgcttccgggcctccctctttcttctctgcagaagcgggaatctccctgtatctagctcagacggccaggggcacggccgcccctggcgagggtcctgtctatagcaccattgacccagcgggggaggagctgcagaccttccatgggggcttcccccaacatccctcaggagatctgggtccctggagccagtacgctcctccagagtggagccagggggacagtggagccaagggaggcaaagtgaagcttctggggaaacctgtgcagatgccctctctgaactggccagaagccctgcccccacctcctccttcttgtgaactgagctgcctagaagggccggaggaggagctggagggcagctcagagccagaggagtggtgcccgccaatgcctgagagaagtcacctgacggagcccagctccagtggagggtgcctggtcaccccatcccgaagggaaaccccctctcccacaccttcctatggacagcagtccacagccactcttacaccctcacctcctgaccctccccagcccccaactgacatgccccatctccatcagatgcccaggagggtgccccttgggccgagttcccctctcagtgtatcccagcccatgctgggcatccgtgaagcgaggcctgctggcttgggtgctggccctgcagcctcaccccacctcagccccagtcctgcccctagcacagccagcagtgccccaggcagaacctggcaggggaatggggagatgactcccccacttcaaggaccccgtgctcgattccggaagaaacccaaggctcttccctacaggagggagaacagtcctggggacttgcccccaccacccttgccaccgccagaggaagaggcgagctgggccctagagctgagggcagcaggcagcatgtcctccctggagcgggagcgcagtggggagaggaaagcggtccaggccgtgcccctggcagcccagcgggtgctccacccagatgaagaggcctggctcccatacagcagaccaagcttcctgtcccggggccagggcaccagcacatgttccacggccggcagcaactcttccaggggctccagcagctctaggggctcccggggccctggccggagccggagtcggagtcagagccggagccagagccaaaggccaggacagaaacgccgagaggaaccaagatgacccttgttggggcattgagaatatcatgagtgccacggggaaggggagtagggatgtcttttcccccccagcagtgatgagtggggctagctgaagcccattggtttccacgatttcaattggctgagaaggcagagagctagctcctccctttctttctttttccacctgagacttgtttataaaaaacaaaacaataaaaagagtctgatcaga

SEQ ID NO: 18001 - DNA, 473 bp, Homo sapiens
  source 1..473: mol_type = unassigned DNA
ggatccgggagggagccaggcggcccatggggaggggcaggggcttagccgctggcgagtgaggaccgggtcgggagaaaggggtcgcacctggagttcagcctcttgggtaggggcgggatacgtggggcgactcgaggagctgccaggactagggagggctgcgggccaagacggggcgggatctggatgacgtttgcctctaagacgccacgaggaggccaggctttgcaaccatctccataaagaagggcctcttttgcctacacaccggcagtgtccttcccgcactcagagggcctctctggagccagttccaggccacccatgggccttggccccgccccctactcatggctggcagattcgtggccccacccatctcgaagcccctcggcccaggaacccaggggaagctgctgccctagcaatcctgacccggacgacagatattacaacggtgaggagttctc

SEQ ID NO: 18002 - DNA, 2139 bp, Homo sapiens
  source 1..2139: mol_type = unassigned DNA
ggatccgggagggagccaggcggcccatggggaggggcaggggcttagccgctggcgagtgaggaccgggtcgggagaaaggggtcgcacctggagttcagcctcttgggtaggggcgggatacgtggggcgactcgaggagctgccaggactagggagggctgcgggccaagacggggcgggatctggatgacgtttgcctctaagacgccacgaggaggccaggctttgcaaccatctccataaagaaggggcaagttcgaggacggaaagcccactcaaagggcggggggcggggcctggcaagagggggtgtggccaggatcccaggcagtaaattgtgcggcggggtctggatggaaaggcggggcccgctgaaagaaggcgatccgagttctgctacttcctagtaagggacgtctctggagagattctgaggtgtttgagcctcttttgcctacacaccggcagtgtccttcccgcactcagagggcctctctggagccagttccaggccacccatgggccttggccccgccccctactcatggctggcagattcgtggccccacccatctcgaagcccctcggcccaggaacccaggggaagctgctgccctagcaatcctgacccggacgacagatattacaacggtgaggagttctcattccctcacctggcttcagcgcacttctcccgacctactggggcaaaccgaagggcgcccgggagcccggtctctctgagaagcgggaatctccctgtatctagctcagacggccaggggcacggccgcccctggcgagggtcctgtctatagcaccattgacccagcgggggaggagctgcagaccttccatgggggcttcccccaacatccctcaggagatctgggtccctggagccagtacgctcctccagagtggagccagggggacagtggagccaagggaggcaaagtgaagcttctggggaaacctgtgcagatgccctctctgaactggccagaagccctgcccccacctcctccttcttgtgaactgagctgcctagaagggccggaggaggagctggagggcagctcagagccagaggagtggtgcccgccaatgcctgagagaagtcacctgacggagcccagctccagtggagggtgcctggtcaccccatcccgaagggaaaccccctctcccacaccttcctatggacagcagtccacagccactcttacaccctcacctcctgaccctccccagcccccaactgacatgccccatctccatcagatgcccaggagggtgccccttgggccgagttcccctctcagtgtatcccagcccatgctgggcatccgtgaagcgaggcctgctggcttgggtgctggccctgcagcctcaccccacctcagccccagtcctgcccctagcacagccagcagtgccccaggcagaacctggcaggggaatggggagatgactcccccacttcaaggaccccgtgctcgattccggaagaaacccaaggctcttccctacaggagggagaacagtcctggggacttgcccccaccacccttgccaccgccagaggaagaggcgagctgggccctagagctgagggcagcaggcagcatgtcctccctggagcgggagcgcagtggggagaggaaagcggtccaggccgtgcccctggcagcccagcgggtgctccacccagatgaagaggcctggctcccatacagcagaccaagcttcctgtcccggggccagggcaccagcacatgttccacggccggcagcaactcttccaggggctccagcagctctaggggctcccggggccctggccggagccggagtcggagtcagagccggagccagagccaaaggccaggacagaaacgccgagaggaaccaagatgacccttgttggggcattgagaatatcatgagtgccacggggaaggggagtagggatgtcttttcccccccagcagtgatgagtggggctagctgaagcccattggtttccacgatttcaattggctgagaaggcagagagctagctcctccctttctttctttttccacctgagacttgtttataaaaaacaaaacaataaaaagagtctgatcaga

SEQ ID NO: 18003 - DNA, 706 bp, Homo sapiens
  source 1..706: mol_type = unassigned DNA
acgaggaggccaggctttgcaaccatctccataaagaaggggcaagttcgaggacggaaagcccactcaaagggcggggggcggggcctggcaagagggggtgtggccaggatcccaggcagtaaattgtgcggcggggtctggatggaaaggcggggcccgctgaaagaaggcgatccgagttctgctacttcctagtaagggacgtctctggagagattctgaggtgtttgaggccacccatgggccttggccccgccccctactcatggctggcagattcgtggccccacccatctcgaagcccctcggcccaggaacccaggggaagctgctgccctagcaatcctgacccggacgacagatattacaacgctcagagccagaggagtggtgcccgccaatgcctgagagaagtcacctgacggagcccagctccagtggagggtgcctggtcaccccatcccgaagggaaaccccctctcccacaccttcctatggacagcagtccacagccactcttacaccctcacctcctgaccctccccagcccccaactgacatgccccatctccatcagatgcccaggagggtgccccttgggccgagttcccctctcagtgtatcccagcccatgctgggcatccgtgaagcgaggcctgctggcttgggtgctggccctgcagcctcaccccacctcagcccc

SEQ ID NO: 18004 - DNA, 562 bp, Homo sapiens
  source 1..562: mol_type = unassigned DNA
ataaagaaggggcaagttcgaggacggaaagcccactcaaagggcggggggcggggcctggcaagagggggtgtggccaggatcccaggcagtaaattgtgcggcggggtctggatggaaaggcggggcccgctgaaagaaggcgatccgagttctgctacttcctagtaagggacgtctctggagagattctgaggtgtttgagcctcttttgcctacacaccggcaggtaagccatctctgccccagtggggttcagaccccccgggacgggcccttctctcactcattcgccccctcattttccccagtgtccttcccgcactcagagggcctctctggagccagttccaggtaattctcttagcccatttcctcaggatgacctccaccgacaggccactcttcttccgccccgctgacgccccaggtggagggagcatggccacctcccaccccaacaccaccgccactgtcctgaaactcccgaatatcgccacctccctttcctttgctggcctcttcaggctctccgtccccaacgctcacctgctctccctca

SEQ ID NO: 18005 - DNA, 572 bp, Homo sapiens
  source 1..572: mol_type = unassigned DNA
aggcagtaaattgtgcggcggggtctggatggaaaggcggggcccgctgaaagaaggcgatccgagttctgctacttcctagtaagggacgtctctggagagattctgaggtgtttgaggtcagtggttttcaatcttggttggctacacataggaatcacttgaggggcttgagaaaaataccgacacctgagtcccacccccgagaaattctgatgaaatgggtccagggtgcagcctgagtggtggaactgggaccggggcctaggcgtggacaagtataggggtatttctgacccttctcctcatttcacctcttctttctcccacgggttcctttctggaagcctcttttgcctacacaccggcagtgtccttcccgcactcagagggcctctctggagccagttccaggccacccatgggccttggccccgccccctactcatggctggcagattcgtggccccacccatctcgaagcccctcggcccaggaacccaggggaagctgctgccctagcaatcctgacccggacgacagatattacaacggtgaggagttctcattcc

SEQ ID NO: 18006 - DNA, 546 bp, Homo sapiens
  source 1..546: mol_type = unassigned DNA
agtaaattgtgcggcggggtctggatggaaaggcggggcccgctgaaagaaggcgatccgagttctgctacttcctagtaagggacgtctctggagagattctgaggtgtttgaggtcagtggttttcaatcttggttggctacacataggaatcacttgaggggcttgagaaaaataccgacacctgagtcccacccccgagaaattctgatgaaatgggtccagggtgcagcctgagtggtggaactgggaccggggcctaggcgtggacaagtataggggtatttctgacccttctcctcatttcacctcttctttctcccacgggttcctttctggaagcctcttttgcctacacaccggcagattcgtggccccacccatctcgaagcccctcggcccaggaacccaggggaagctgctgccctagcaatcctgacccggacgacagatattacaacggtgaggagttctcattccctcacctggcttcagcgcacttctcccgacctactggggcaaaccgaagggcgcccgggagcccg

SEQ ID NO: 18007 - DNA, 538 bp, Homo sapiens
  source 1..538: mol_type = unassigned DNA
aattgtgcggcggggtctggatggaaaggcggggcccgctgaaagaaggcgatccgagttctgctacttcctagtaagggacgtctctggagagattctgaggtgtttgagcctcttttgcctacacaccggcaggtaagccatctctgccccagtggggttcagaccccccgggacgggcccttctctcactcattcgccccctcattttccccagtgtccttcccgcactcagagggcctctctggagccagttccaggccacccatgggccttggccccgccccctactcatggctggcagattcgtggccccacccatctcgaagcccctcggcccaggaacccaggggaagctgctgccctagcaatcctgacccggacgacagatattacaacggtgaggagttctcattccctcacctggcttcagcgcacttctcccgacctactggggcaaaccgaagggcgcccgggagcccggtctctctgaggttggtcagtccctggggaggatgtgagctggggaagcctctca

SEQ ID NO: 18008 - DNA, 542 bp, Homo sapiens
  source 1..542: mol_type = unassigned DNA
gtgcggcggggtctggatggaaaggcggggcccgctgaaagaaggcgatccgagttctgctacttcctagtaagggacgtctctggagagattctgaggtgtttgagtgtccttcccgcactcagagggcctctctggagccagttccaggccacccatgggccttggccccgccccctactcatggctggcagattcgtggccccacccatctcgaagcccctcggcccaggaacccaggggaagctgctgccctagcaatcctgacccggacgacagatattacaacggtgaggagttctcattccctcacctggcttcagcgcacttctcccgacctactggggcaaaccgaagggcgcccgggagcccggtctctctgaggttggtcagtccctggggaggatgtgagctggggaagcctctcagacctacctccaccctggtttaggatgtaaggcttgtgtgggggaagaagttgatcccgtgggatttccctttgtcttccattctgttgtcctctatgtttctgtctctgcttc

SEQ ID NO: 18009 - DNA, 583 bp, Homo sapiens
  source 1..583: mol_type = unassigned DNA
gtgcggcggggtctggatggaaaggcggggcccgctgaaagaaggcgatccgagttctgctacttcctagtaagggacgtctctggagagattctgaggtgtttgagcctcttttgcctacacaccggcagtgtccttcccgcactcagagggcctctctggagccagttccaggccacccatgggccttggccccgccccctactcatggctggcagattcgtggccccacccatctcgaagcccctcggcccaggaacccaggggaagctgctgccctagcaatcctgacccggacgacagatattacaacggagccaagggaggcaaagtgaagcttctggggaaacctgtgcagatgccctctctgaactggccagaagccctgcccccacctcctccttcttgtgaactgagctgcctagaagggccggaggaggagctggagggcagctcagagccagaggagtggtgcccgccaatgcctgagagaagtcacctgacggagcccagctccagtggagggtgcctggtcaccccatcccgaagggaaaccccctctcccacaccttcctatggacag

SEQ ID NO: 18010 - DNA, 825 bp, Homo sapiens
  source 1..825: mol_type = unassigned DNA
atggaaaggcggggcccgctgaaagaaggcgatccgagttctgctacttcctagtaagggacgtctctggagagattctgaggtgtttgagagggcctctctggagccagttccaggccacccatgggccttggccccgccccctactcatggctggcagattcgtggccccacccatctcgaagcccctcggcccaggaacccaggggaagctgctgccctagcaatcctgacccggacgacagatattacaacgctcagagccagaggagtggtgcccgccaatgcctgagagaagtcacctgacggagcccagctccagtggagggtgcctggtcaccccatcccgaagggaaaccccctctcccacaccttcctatggacagcagtccacagccactcttacaccctcacctcctgaccctccccagcccccaactgacatgccccatctccatcagatgcccaggagggtgccccttgggccgagttcccctctcagtgtatcccagcccatgctgggcatccgtgaagcgaggcctgctggcttgggtgctggccctgcagcctcaccccacctcagccccagtcctgcccctagcacagccagcagtgccccaggcagaacctggcaggggaatggggagatgactcccccacttcaaggaccccgtgctcgattccggaagaaacccaaggctcttccctacaggagggagaacagtcctggggacttgcccccaccacccttgccaccgccagaggaagaggcgagctgggccctagagctgagggcagcaggcagcatgtcctccctggagcggg

SEQ ID NO: 18011 - DNA, 1645 bp, Homo sapiens
  source 1..1645: mol_type = unassigned DNA
atggaaaggcggggcccgctgaaagaaggcgatccgagttctgctacttcctagtaagggacgtctctggagagattctgaggtgtttgagcctcttttgcctacacaccggcaggccacccatgggccttggccccgccccctactcatggctggcagattcgtggccccacccatctcgaagcccctcggcccaggaacccaggggaagctgctgccctagcaatcctgacccggacgacagatattacaacgaagcgggaatctccctgtatctagctcagacggccaggggcacggccgcccctggcgagggtcctgtctatagcaccattgacccagcgggggaggagctgcagaccttccatgggggcttcccccaacatccctcaggagatctgggtccctggagccagtacgctcctccagagtggagccagggggacagtggagccaagggaggcaaagtgaagcttctggggaaacctgtgcagatgccctctctgaactggccagaagccctgcccccacctcctccttcttgtgaactgagctgcctagaagggccggaggaggagctggagggcagctcagagccagaggagtggtgcccgccaatgcctgagagaagtcacctgacggagcccagctccagtggagggtgcctggtcaccccatcccgaagggaaaccccctctcccacaccttcctatggacagcagtccacagccactcttacaccctcacctcctgaccctccccagcccccaactgacatgccccatctccatcagatgcccaggagggtgccccttgggccgagttcccctctcagtgtatcccagcccatgctgggcatccgtgaagcgaggcctgctggcttgggtgctggccctgcagcctcaccccacctcagccccagtcctgcccctagcacagccagcagtgccccaggcagaacctggcaggggaatggggagatgactcccccacttcaaggaccccgtgctcgattccggaagaaacccaaggctcttccctacaggagggagaacagtcctggggacttgcccccaccacccttgccaccgccagaggaagaggcgagctgggccctagagctgagggcagcaggcagcatgtcctccctggagcgggagcgcagtggggagaggaaagcggtccaggccgtgcccctggcagcccagcgggtgctccacccagatgaagaggcctggctcccatacagcagaccaagcttcctgtcccggggccagggcaccagcacatgttccacggccggcagcaactcttccaggggctccagcagctctaggggctcccggggccctggccggagccggagtcggagtcagagccggagccagagccaaaggccaggacagaaacgccgagaggaaccaagatgacccttgttggggcattgagaatatcatgagtgccacggggaaggggagtagggatgtcttttcccccccagcagtgatgagtggggctagctgaagcccattggtttccacgatttcaattggctgagaaggcagagagctagctcctccctttctttctttttccacctgagacttgtttataaaaaacaaaacaataaaaagagtctgatcag

SEQ ID NO: 18012 - DNA, 1046 bp, Homo sapiens
  source 1..1046: mol_type = unassigned DNA
aaaggcggggcccgctgaaagaaggcgatccgagttctgctacttcctagtaagggacgtctctggagagattctgaggtgtttgagcctcttttgcctacacaccggcagtgtccttcccgcactcagagggcctctctggagccagttccaggccacccatgggccttggccccgccccctactcatggctggcagattcgtggccccacccatctcgaagcccctcggcccaggaacccaggggaagctgctgccctagcaatcctgacccggacgacagatattacaacggtgaggagttctcattccctcacctggcttcagcgcacttctcccgacctactggggcaaaccgaagggcgcccgggagcccggtctctctgaggttggtcagtccctggggaggatgtgagctggggaagcctctcagacctacctccaccctggtttaggatgtaaggcttgtgtgggggaagaagttgatcccgtgggatttccctttgtcttccattctgttgtcctctatgtttctgtctctgcttccgggcctccctctttcttctctgcagaagcgggaatctccctgtatctagctcagacggccaggggcacggccgcccctggcgagggtcctgtctatagcaccattgacccagcgggggaggagctgcagaccttccatgggggcttcccccaacatccctcaggagatctgggtccctggagccagtacgctcctccagagtggagccagggggacagtggtatgactccaactcctgaaaccccgtttagccctgaccagggtatccccaaagaggatcctcctccctgaccctctggcacctagcccggcacttccttctgacctgtctcatctctggctctttcctgcctgttctccgggtgtccccatcctattctcctcaggagccaagggaggcaaagtgaagcttctggggaaacctgtgcagatgccctctctgaactggccagaagccctgcccccacctcctccttcttgtgaactgagctgcctagaa

SEQ ID NO: 18013 - DNA, 662 bp, Homo sapiens
  source 1..662: mol_type = unassigned DNA
ccgagttctgctacttcctagtaagggacgtctctggagagattctgaggtgtttgagtgtccttcccgcactcagagggcctctctggagccagttccaggccacccatgggccttggccccgccccctactcatggctggcagattcgtggccccacccatctcgaagcccctcggcccaggaacccaggggaagctgctgccctagcaatcctgacccggacgacagatattacaacggagggtgccccttgggccgagttcccctctcagtgtatcccagcccatgctgggcatccgtgaagcgaggcctgctggcttgggtgctggccctgcagcctcaccccacctcagccccagtcctgcccctagcacagccagcagtgccccaggcagaacctggcaggggaatggggagatgactcccccacttcaaggaccccgtgctcgattccggaagaaacccaaggctcttccctacaggagggagaacagtcctggggacttgcccccaccacccttgccaccgccagaggaagaggcgagctgggccctagagctgagggcagcaggcagcatgtcctccctggagcgggagcgcagtggggagaggaaagcggtccaggccgtgcccctggcagcccagcgggtgctccaccca

SEQ ID NO: 18014 - DNA, 920 bp, Homo sapiens
  source 1..920: mol_type = unassigned DNA
ggagccaagggaggcaaagtgaagcttctggggaaacctgtgcagatgccctctctgaactggccagaagccctgcccccacctcctccttcttgtgaactgagctgcctagaagggccggaggaggagctggagggcagctcagagccagaggagtggtgcccgccaatgcctgagagaagtcacctgacggagcccagctccagtggagggtgcctggtcaccccatcccgaagggaaaccccctctcccacaccttcctatggacagcagtccacagccactcttacaccctcacctcctgaccctccccagcccccaactgacatgccccatctccatcagatgcccaggagggtgccccttgggccgagttcccctctcagtgtatcccagcccatgctgggcatccgtgaagcgaggcctgctggcttgggtgctggccctgcagcctcaccccacctcagccccagtcctgcccctagcacagccagcagtgccccaggcagaacctggcaggggaatggggagatgactcccccacttcaaggaccccgtgctcgattccggaagaaacccaaggctcttccctacaggagggagaacagtcctggggacttgcccccaccacccttgccaccgccagaggaagaggcgagctgggccctagagctgagggcagcaggcagcatgtcctccctggagcgggagcgcagtggggagaggaaagcggtccaggccgtgcccctggcagcccagcgggtgctccacccagatgaagaggcctggctcccatacagcagaccaagcttcctgtcccggggccagggcaccagcacatgttccacggccggcagcaactcttccaggggctccagcagctctaggggctcccggggccctggccggagccggagtcg

SEQ ID NO: 18015 - DNA, 955 bp, Homo sapiens
  source 1..955: mol_type = unassigned DNA
agccctgcccccacctcctccttcttgtgaactgagctgcctagaagggccggaggaggagctggagggcaggtagagatgctccctgcttccaggcccacacacctgcggccagaccatgggctgctggggaggaaggggagggggcagcaggaaggccaacgggaaggtatggaagcagctgagccctttccttctctcctgcctctttgatcccagctcagagccagaggagtggtgcccgccaatgcctgagagaagtcacctgacggagcccagctccagtggagggtgcctggtcaccccatcccgaagggaaaccccctctcccacaccttcctatggacagcagtccacagccactcttacaccctcacctcctgaccctccccagcccccaactgacatgccccatctccatcagatgcccaggagggtgccccttgggccgagttcccctctcagtgtatcccagcccatgctgggcatccgtgaagcgaggcctgctggcttgggtgctggccctgcagcctcaccccacctcagccccagtcctgcccctagcacagccagcagtgccccaggcagaacctggcaggggaatggggagatgactcccccacttcaaggaccccgtgctcgattccggaagaaacccaaggctcttccctacaggagggagaacagtcctggggacttgcccccaccacccttgccaccgccagaggaagaggcgagctgggccctagagctgagggcagcaggcagcatgtcctccctggagcgggagcgcagtggggagaggaaagcggtccaggccgtgcccctggcagcccagcgggtgctccacccagatgaagaggcctggctcccatacagcagaccaagcttcctgtcccggggccagggcaccagcacatgttccacggccggcagcaactcttccaggggctcc

SEQ ID NO: 18016 - DNA, 1520 bp, Homo sapiens
  source 1..1520: mol_type = unassigned DNA
ggagggagcatggccacctcccaccccaacaccaccgccactgtcctgaaactcccgaatatcgccacctccctttcctttgctggcctcttcaggctctccgtccccaacgctcacctgctctccctcaggccacccatgggccttggccccgccccctactcatggctggcagattcgtggccccacccatctcgaagcccctcggcccaggaacccaggggaagctgctgccctagcaatcctgacccggacgacagatattacaacgaagcgggaatctccctgtatctagctcagacggccaggggcacggccgcccctggcgagggtcctgtctatagcaccattgacccagcgggggaggagctgcagaccttccatgggggcttcccccaacatccctcaggagatctgggtccctggagccagtacgctcctccagagtggagccagggggacagtgctcagagccagaggagtggtgcccgccaatgcctgagagaagtcacctgacggagcccagctccagtggagggtgcctggtcaccccatcccgaagggaaaccccctctcccacaccttcctatggacagcagtccacagccactcttacaccctcacctcctgaccctccccagcccccaactgacatgccccatctccatcagatgcccaggagggtgccccttgggccgagttcccctctcagtgtatcccagcccatgctgggcatccgtgaagcgaggcctgctggcttgggtgctggccctgcagcctcaccccacctcagccccagtcctgcccctagcacagccagcagtgccccaggcagaacctggcaggggaatggggagatgactcccccacttcaaggaccccgtgctcgattccggaagaaacccaaggctcttccctacaggagggagaacagtcctggggacttgcccccaccacccttgccaccgccagaggaagaggcgagctgggccctagagctgagggcagcaggcagcatgtcctccctggagcgggagcgcagtggggagaggaaagcggtccaggccgtgcccctggcagcccagcgggtgctccacccagatgaagaggcctggctcccatacagcagaccaagcttcctgtcccggggccagggcaccagcacatgttccacggccggcagcaactcttccaggggctccagcagctctaggggctcccggggccctggccggagccggagtcggagtcagagccggagccagagccaaaggccaggacagaaacgccgagaggaaccaagatgacccttgttggggcattgagaatatcatgagtgccacggggaaggggagtagggatgtcttttcccccccagcagtgatgagtggggctagctgaagcccattggtttccacgatttcaattggctgagaaggcagagagctagctcctccctttctttctttttccacctgagacttgtttataaaaaacaaaacaataaaaagagtctgatc

SEQ ID NO: 18017 - DNA, 10844 bp, Homo sapiens
  source 1..10844: mol_type = unassigned DNA
ttttttttttttttttggtaccatagagttgctctgaaaacagaagatagagggagtctcggagctcgccatctccagcgatctctacattgggaaaaaacatggagtcagctccggcagcccccgaccccgccgccagcgagccaggcagcagcggcgcggacgcggccgccggctccagggagaccccgctgaaccaggaatccgcccgcaagagcgagccgcctgccccggtgcgcagacagagctattccagcaccagcagaggtatctcagtaacgaagaagacacatacatctcaaattgaaattattccatgcaagatctgtggagacaaatcatcaggaatccattatggtgtcattacatgtgaaggctgcaagggctttttcaggagaagtcagcaaagcaatgccacctactcctgtcctcgtcagaagaactgtttgattgatcgaaccagtagaaaccgctgccaacactgtcgattacagaaatgccttgccgtagggatgtctcgagatgctgtaaaatttggccgaatgtcaaaaaagcagagagacagcttgtatgcagaagtacagaaacaccggatgcagcagcagcagcgcgaccaccagcagcagcctggagaggctgagccgctgacgcccacctacaacatctcggccaacgggctgacggaacttcacgacgacctcagtaactacattgacgggcacacccctgaggggagtaaggcagactccgccgtcagcagcttctacctggacatacagccttccccagaccagtcaggtcttgatatcaatggaatcaaaccagaaccaatatgtgactacacaccagcatcaggcttctttccctactgttcgttcaccaacggcgagacttccccaactgtgtccatggcagaattagaacaccttgcacagaatatatctaaatcgcatctggaaacctgccaatacttgagagaagagctccagcagataacgtggcagacctttttacaggaagaaattgagaactatcaaaacaagcagcgggaggtgatgtggcaattgtgtgccatcaaaattacagaagctatacagtatgtggtggagtttgccaaacgcattgatggatttatggaactgtgtcaaaatgatcaaattgtgcttctaaaagcaggttctctagaggtggtgtttatcagaatgtgccgtgcctttgactctcagaacaacaccgtgtactttgatgggaagtatgccagccccgacgtcttcaaatccttaggttgtgaagactttattagctttgtgtttgaatttggaaagagtttatgttctatgcacctgactgaagatgaaattgcattattttctgcatttgtactgatgtcagcagatcgctcatggctgcaagaaaaggtaaaaattgaaaaactgcaacagaaaattcagctagctcttcaacacgtcctacagaagaatcaccgagaagatggaatactaacaaagttaatatgcaaggtgtctaccttaagagccttatgtggacgacatacagaaaagctaatggcatttaaagcaatatacccagacattgtgcgacttcattttcctccattatacaaggagttgttcacttcagaatttgagccagcaatgcaaattgatgggtaaatgttatcacctaagcacttctagaatgtctgaagtacaaacatgaaaaacaaacaaaaaaattaaccgagacactttatatggccctgcacagacctggagcgccacacactgcacatcttttggtgatcggggtcaggcaaaggaggggaaacaatgaaaacaaataaaagttgaacttgtttttctcatgcatatgatttccattatgcctacagatatggaccctttttctgtcttgacttcttgatcattgacctctgtttacaacaggaggagggtactaaagtcggaggatttccttttcttgtagctcactgcccacagactttctacagagtcaccaatctgtcagtaacaacagagagtccagcaataatcggtgactggtgtgcatagcggaggttgcggcattactttgcacaactagctctttgtttcatgaaggaagtttttattttttcaccgattattgccagtccgcaggatggcatgaaaagggtccatagcagtagcaacaatagcattataatatattacagggtaaatgggcatgaagactatatatagctaaaagagatattgtttatatattgttttaagtaatataaaatgtagttactggtgtagcttttcctgttgaattgataaggcactttcattttgcacctttttctttaaattaaatgctagcgtgttcactgtcgtgtcgcatgtgcaccagaaacacaagtttaactgagaaggcttggaaggtacgttgggaggtatttatgctgctgtttacaaaattatttttaagagactggctggtcatatctagaaatcaccacgttggattttttttttaacatgtgaatttggaattagaaacggaactctccctaaattatactttgctttttggtaagtttaatgatagatgtgtttatgcttcatacaaagttgaatgattgattggcgtggtggacatataccatcatgctcattttttttttttaaagctttttaaaatgccacctcatggaggcgagggggaggagaagctcattttacacaattcagtagttaaatatggactcggtctcaacttggaattcttatgctttgagaacaaatcaacaaccagaatatttattggaatctagcttttattataagaaggacccaaagattatatcctgagcaaatgcacactccccatgtgaggacatgaagtatttactttgtgaatgtttatgttcttggtataatctaggaaccctatgagtttatctcagagtgaactaattctagatttgttgtcaatagatgctataattcaagaatgttgctctccatatttgaaaaacgatggataggagggtgagggaagcatacaatgttgaaccagtttctcttatttaaatattaaatactttaagcctttaaagtgaagttgatgctagctgcaaacatttactcttgtatttatcttcactaggaaactgtggactgtaatttattttattaaatatttagaagattatttggcttgtgtgttcaggtgagaaatactgagttgtttttgtttaatttcatggtttttttttttttaatgatccctagtgggggaaggggaaaggaatagtctgataaacagatgtgcatattttaaaaacaagtgaccttttgggaatgtaggcatttagacgatgattttagtcgcactaggggtgggattcaaactactggtcaaagaccattttgtacagaaaagggaacatctccgatgggtgttaaggtaggagtttccatgcagccctttatgtctgagaaatagtctcctctgccattggggtccctgcggaatcttctacaggaattgcagctcttcacgtcatgctaggttaccagcatgggcttcccagagcacttcactctgtttctaactccactgacttttctgacttgtttcttgagggacttggaaaaggggaaggtattattcacacagatgtgtgtatgaagcctaaataacatccaactttttttccaaaaacatagtaagagtttaaccataaatagaagagtaatattcctttaaatttcttacaggcatgtaaaattttatgtgtttatagagagatgctaactgtcagcatatagtatttatattggggcaagaagggttaaatcaaatctttaatttaagtaagcatagttcctttaaagatcagtagtatttatactctgaaaagagtaccaagcttagttcagttatttattcatccattttttttctattgtttctcctctggggggaaatggtgttttgtttttgtttgagttttgtgttttagttttttggttttggttttgttttgtttttttgtcattcagattcactaaatttggggatggttttattaaagtatattaacttctttttaaccaaagctttctgaatatgaccagcctcaggtgctagcgcattaaagagcaactaaacctaattccagtgtcgatttgtgaaataataaaagctaattgaatttctctaagggtgagagagaacataatgatgaacttaaaaagaaattccttttcccagaagggattctgcatgtacctacaaacaatcatgctctaaccacagtaatagtcatgccatggtgacattgcttttacggtaaaccaagataggtaatatgatgcttcttcccaggtgtttctgaaagaaaagcagcggtggagcttaagagccaagtccactgattgacataataggatggaattgtagacagagacatgctccatgaaacaaggaaacaactgactactatttggatctaagttgggatctgatgttaaacaataaattcagtttaaaaaaaatatggagctcagaaaaggatgtgaaaaactttgcattttcctttcttcattattacaaaaacacctatgtgatgacataaaatacttgggtgatatcagaacaattatccttaatagtttttataattaaagtttcctaaacttcagtctccaatagtcttttaaggattggaaccacatcactgtcagccccgctgctacaatgcctttgtacaatttttttacataaggcaaataaggcttttgtacaaagcctgaataccttctgttccaatggtgtccaaatggttattatattgtgaaaaacctggccttggtcacaatgcaaacaaaagtacagatgaaagtgctttttggacagtttgcaaattgtgttaaagctacggattttttttaaagtgttcagcatcttaacgtgtattaaagctatggatttttttttaaagtcttcagcatcctaattcaccctttctaacttaagaaaaacatgacttaagacactgcttctaagtttggttgttctttatagtgtggatacccagttatctgtgagcgtatgggggtgggctgagggtcaggtgaggaaggagtgtgtgtgtgtgtgtgtgtgtgtgtgtgtgtgtgtgtgatttgcatgtgtatgatgtgtgtgcgtcggaccgcttctaggctactaagtgtcaatggaaaagaaaatgtattcaaaatacttaaatcaaaactagaagatggggaaaaaaagatttattctatacaaagccttgtctggaccactttagagagacttctatttttttaacccttctataaatatttgatggcacttgaaatattcctgcaataaaatgtgatttgtgtaaagaaaaaaagattttgtaatgtgaaacaaagaaagaaagtaatgtaattttctaaaaaaaaaaatacaaacaaacaaactttgtattattttcttgatggaatttgtctatctgtctttggaaaactttttatttcattgaatgtgccatagtagaaatgtgtgtttttagttttagactaaggaatagctagttgttgtgttccgacattccaaaatgcaaaacaacctagtagtatctttcatgaaaaggtttaagtagtatgtaagcttctctcattgttgcttttttgcacatgttcttcattcctctctagtgcaatatgtacatagagcacttgcgggtgtaccttgatccctcagggaaaaatacatatttgtacagttttttggggtttttttgttttttggttttttttgttttgccttttgtttttggctaaggaatgtcgatcgaatcacttgttattgttgaggggcagccagataataatcctaaagccactgtttccaacattgattgtttaaatcatatgtccttccaatgctattattttaagataataataaaaagttattttctgacagttctttgtgctgactggtgaaaaacaagggtaaataagcaccttataattgacttactgtgaatgacaatccatcttggtatcaacgatagaagccctatcattttggagttggggttaagagtcagaaacaatgtgctcagggatctcctaaaactcttaaaacagggtggccagtactactgggacaaattgtgttttttattattaataataatgataataatactatccctccaaggcacaagtgaactatatagaactgcgtgtgtgtaaactctttactctcgtctcattttgttgagtttagaacttgatgtgctcgtcagtcttgtgtttcaaaacactgaataacttccaaagcaaagttatgccagtgtgttcaaaagataaattaataatgtaccagcaaagagcatcattcaaagtatagtccttgcatattccagttaccatttctctaataattaaaatattcatgataaatatatatatagcatcatatgttaaaaactatttcaaattctacatattaaggatgaaaattttaaaatccagtaataagaggagagacctgcctatcagtacagtgatataggtaaaagatgaaatatgtttttaaaataccagcaattaactattgttttcatgggttctcctctagaagcaaaccaaaaattccttcatggaaaacaattcttacttctacatgtgtagtttatatctgatgcattacaagagctaatgtttaaagacaaaacaaaacctgcctgtatgacagcagcaactcgagccaacatttagtgttacatgttatatttttgaaataccgttttgttatcatattccacatattactttccataaagtcagagaagttcaatgtaattgttggctctgattcttccaccttgggatacacattcacaagaagatttatatattttcttactatgatagaggaacataatctgggaaaacttcccatgtctgtaagatgaaaaggatacctttaccatgttgtttttgataataaagaatatggaaaatggtagaaatctctcctctctatgtgtatttgtatatgtgtgtatacacacacacgttgacatttttacataacatgtgattgccacttcttataaagttatgatatagaaccccatgaaaacaactttatattatagatcaaataatgtgcccagaaacgcaattgcaacagtaaatcttgatctattggtaagagtctatgatacaggtcttcattctatccctaaacataatgttagtaaagaggttccatcagattgtattatagagaccttcctattgctatttatttttaagagatgagaagactgactagcaatgtctccacagtgcaattggtttcacttctgggtctgtctgtctgtttgtgtaggtgagatcagtgttgtcaggctctcagaataatttttaaaagaatccagaagcctgacttcacaccaagtagccatcctagatgggcgggggggatctccatgttcaaccaaaccctcagaacttagagcaataaatacattcagtcatttatttataaatgaatgacagaatattcaatccaaatagaaacaaccttttgtcagtgatgcaacataacatggagtcttatattgagaaagtgaatatgaatattttaaatagatgcctaggaaatctgtgtttgctgtttacatttaatgtactttgccacattagcagtaccacacttcttttactttcatccttctaagaactaatgaaagatagcttgctattagctttgacatgttgcacatgccattatgttgttctctaagaacaactaaattctctccagtgttcatgtgtgattcctttttcatcattattactttaatgtggatgaatactatttctaggaacttgattatcactgaacagattgcatatgtaaatgcagataattcttgagcaatatagtgaaaatgatttcacaaaaaaaatccatatgtactgtatacatcttcctgaatccaaaattctcctgttatccacacagtttgaaatctcatattaaacagtggtaaatttttaaacattaggacattagctggctgcttctataaatgtacctgtattgtctgcctgctccttttgtggagatgtgtttttgtattggatgtttgggccaatgggaggcttcaagctacaacatattttcccactttaaataatatttaacatatgacaaaccccagacaaggcttttaatatgtataaagaactgcagtgttaggtggtttatttgcaaactgttttcagtgttgtccatttttatggcacctttaacaatattcttgtttccaaagtacaaaaaaaataggttaaataatctagccataactgaatgtcaagcaataaaacaaatgacttttgtgcatagacttaaaaaatacaaattttagacatctgcatgtaaatgcaatctcttgtttactgctttcttcaacttgagcaatcgattccttatttactattaacttaagaacttgtaacggcctgtaaacattttctctcttactcttctttcaaatttacctgtccctgcttttgagtcataatatttaatgttgttctgcacatctctatacagttaactttttggctttcattctgtatagataagaaaatgttatattataaacagcctactcagtgcaaatatttatctgtttatcaaatccacaatatgctgtataataccggttttactatataatctattttagacatagctgtttagaactagagtgtgctatttttgtgtttttctgatgtgtggtgctagacaagttacttttgtgaacaacaaaaattatcccttttattcctagacaataccacctttgggtcttgttaatttcactgagtataactatatatttgtatatatatacatatatatatatatctacctatgcccaactggcagctgtatcagagtgctggatttgggacatgcttttctctttaaatacataatatcattatataaattattctagagtgtatttaattaggataaaattacttccttagtatggatatttgacatctatagggtgaatttgtttataaatatggctatatggaaacttattagcatttactttatgtttgctacttggctttacagcatatctcctaagctgaaaaataatttgccaggccttcaagatcctaaagaaacttgtttaatggagtaatatacttttttttcttattaaggaattgtattactggcacctaacacagttgtattcttagctcctattatagataatgggcatttacataaaatatcctagatggcttgatggcagaataaacctttcccctcctacctgagtcatgagaaggatggagacgtcctctgccataacatgggccataaagcaaattcgacatgggatgttctgtttcagtatgacctcaaccagttccatgaactgagtgaaggaccttcattttcaaagttatttaataagtagcttaattaagcctttctacccattctcccaagatctactggcattattgaaaagcaaagtttatcaaatatctaactaaggatgtagttaaccttattaaatattgattagaattgttctgtaatattactgaatttgtaagatctttagcaaagatttttgagcaatttataaatgtagagcaaatgtttctgtttactgcactttttgtaactgaaggtgataaattctcaagccatgattattggcttccatgcactgcaatatttatccacaattctagacattttccatttttgtggaagagttgctgttaccttaattataaatgcaattgtgtggttaatgagagctaatgctagtagttaaccttttaaagtggattggctacagttgagggagaaatctcttttaatataaatcacatcattccttaactgcctctcttggaaagagattgaaaccttttttttaaagcacgatttagcatcctaagcttcctgagggtagagattgtatctttttgcgtctgcacaatggctagcacatgtcagcatttgacaattgttaaatgataacaagtgtgccccaattaaaacgtttttcctgggttgttttgttaaatttacaaagtaagccaagccttacggttaacattctcctctacaaccaagtattaaagccacatttaaaaagaccacatgaaatgctgattctaattgtgtgtaggtcttgaggattaagcacacaaatttcacaaacttctgtttgagtaaacaaactcagccttctgtaaatatacatgcaagtttggaaacagtaatactgtacctataaatatatgctgtctgttttgtgtacagtatgtaaaaactccttttctgccacactaaaaatgcaagccatttatgggaatcctaaaactagtattgaactaaaactttgctaatgatctttattagaggatcgtccaacttttcacttaccttgggttttcttttcaattcactcttacactagtctgcttatttccagctgtttattttattgagtcctgaatttaaaaaaaaaatattttgattcattttgtaaatacaagctgtacaaaaaagagagatttaatgttgtcttttaaatactccaattttcattctaatatgaatgttgttatattgtacttagaaactgtacctttaatattacattacctttattaaaagtgcattgaacacatcaattttagatgtgctttatgtactgttatcctataataaaacttcagcttctaatggaa

SEQ ID NO: 18018 - DNA, 1908 bp, Homo sapiens
  source 1..1908: mol_type = unassigned DNA
ggactccatagtacactggggcaaagcacagccccagtttctggaggcagatgggtaaccaggaaaaggcatgaatgagggggccccaggagacagtgacttagagactgaggcaagagtgccgtggtcaatcatgggtcattgtcttcgaactggacaggccagaatgtctgccacacccacacctgcaggtgaaggagccagaagctcttcaacctgtagctccctgagcaggctgttctggtctcaacttgagcacataaactgggatggagccacagccaagaactttattaatttaagggagttcttctcttttctgctccctgcattgagaaaagctcaaattgaaattattccatgcaagatctgtggagacaaatcatcaggaatccattatggtgtcattacatgtgaaggctgcaagggctttttcaggagaagtcagcaaagcaatgccacctactcctgtcctcgtcagaagaactgtttgattgatcgaaccagtagaaaccgctgccaacactgtcgattacagaaatgccttgccgtagggatgtctcgagatgctgtaaaatttggccgaatgtcaaaaaagcagagagacagcttgtatgcagaagtacagaaacaccggatgcagcagcagcagcgcgaccaccagcagcagcctggagaggctgagccgctgacgcccacctacaacatctcggccaacgggctgacggaacttcacgacgacctcagtaactacattgacgggcacacccctgaggggagtaaggcagactccgccgtcagcagcttctacctggacatacagccttccccagaccagtcaggtcttgatatcaatggaatcaaaccagaaccaatatgtgactacacaccagcatcaggcttctttccctactgttcgttcaccaacggcgagacttccccaactgtgtccatggcagaattagaacaccttgcacagaatatatctaaatcgcatctggaaacctgccaatacttgagagaagagctccagcagataacgtggcagacctttttacaggaagaaattgagaactatcaaaacaagcagcgggaggtgatgtggcaattgtgtgccatcaaaattacagaagctatacagtatgtggtggagtttgccaaacgcattgatggatttatggaactgtgtcaaaatgatcaaattgtgcttctaaaagcaggttctctagaggtggtgtttatcagaatgtgccgtgcctttgactctcagaacaacaccgtgtactttgatgggaagtatgccagccccgacgtcttcaaatccttaggttgtgaagactttattagctttgtgtttgaatttggaaagagtttatgttctatgcacctgactgaagatgaaattgcattattttctgcatttgtactgatgtcagcagatcgctcatggctgcaagaaaaggtaaaaattgaaaaactgcaacagaaaattcagctagctcttcaacacgtcctacagaagaatcaccgagaagatggaatactaacaaagttaatatgcaaggtgtctaccttaagagccttatgtggacgacatacagaaaagctaatggcatttaaagcaatatacccagacattgtgcgacttcattttcctccattatacaaggagttgttcacttcagaatttgagccagcaatgcaaattgatgggtaaatgttatcacctaagcacttctagaatgtctgaagtacaaacatgaaaaacaaacaaaaaaattaaccgagacactttatatggccctgcacagacctggagcgccacacactgcacatcttttggtgatcggggtcaggcaaaggaggggaaacaatgaaaacaaataaaagttgaacttgtttttctca

SEQ ID NO: 18019 - DNA, 1951 bp, Homo sapiens
  source 1..1951: mol_type = unassigned DNA
ccatctgtctgatcaccttggactccatagtacactggggcaaagcacagccccagtttctggaggcagatgggtaaccaggaaaaggcatgaatgagggggccccaggagacagtgacttagagactgaggcaagagtgccgtggtcaatcatgggtcattgtcttcgaactggacaggccagaatgtctgccacacccacacctgcaggtgaaggagccagaagggatgaactttttgggattctccaaatactccatcagtgtatcctgtcttcaggtgatgcttttgttcttactggcgtctgttgttcctggaggcagaatggcaagccaccatattcacaaaaggaagataaggaagtacaaactggatacatgaatgctcaaattgaaattattccatgcaagatctgtggagacaaatcatcaggaatccattatggtgtcattacatgtgaaggctgcaagggctttttcaggagaagtcagcaaagcaatgccacctactcctgtcctcgtcagaagaactgtttgattgatcgaaccagtagaaaccgctgccaacactgtcgattacagaaatgccttgccgtagggatgtctcgagatgctgtaaaatttggccgaatgtcaaaaaagcagagagacagcttgtatgcagaagtacagaaacaccggatgcagcagcagcagcgcgaccaccagcagcagcctggagaggctgagccgctgacgcccacctacaacatctcggccaacgggctgacggaacttcacgacgacctcagtaactacattgacgggcacacccctgaggggagtaaggcagactccgccgtcagcagcttctacctggacatacagccttccccagaccagtcaggtcttgatatcaatggaatcaaaccagaaccaatatgtgactacacaccagcatcaggcttctttccctactgttcgttcaccaacggcgagacttccccaactgtgtccatggcagaattagaacaccttgcacagaatatatctaaatcgcatctggaaacctgccaatacttgagagaagagctccagcagataacgtggcagacctttttacaggaagaaattgagaactatcaaaacaagcagcgggaggtgatgtggcaattgtgtgccatcaaaattacagaagctatacagtatgtggtggagtttgccaaacgcattgatggatttatggaactgtgtcaaaatgatcaaattgtgcttctaaaagcaggttctctagaggtggtgtttatcagaatgtgccgtgcctttgactctcagaacaacaccgtgtactttgatgggaagtatgccagccccgacgtcttcaaatccttaggttgtgaagactttattagctttgtgtttgaatttggaaagagtttatgttctatgcacctgactgaagatgaaattgcattattttctgcatttgtactgatgtcagcagatcgctcatggctgcaagaaaaggtaaaaattgaaaaactgcaacagaaaattcagctagctcttcaacacgtcctacagaagaatcaccgagaagatggaatactaacaaagttaatatgcaaggtgtctaccttaagagccttatgtggacgacatacagaaaagctaatggcatttaaagcaatatacccagacattgtgcgacttcattttcctccattatacaaggagttgttcacttcagaatttgagccagcaatgcaaattgatgggtaaatgttatcacctaagcacttctagaatgtctgaagtacaaacatgaaaaacaaacaaaaaaattaaccgagacactttatatggccctgcacagacctggagcgccacacactgcacatcttttggtgatcggggtcaggcaaaggaggggaaacaatgaaaacaaataaaagttgaacttgtttttctca

SEQ ID NO: 18020 - DNA, 1701 bp, Homo sapiens
  source 1..1701: mol_type = unassigned DNA
tctcggcgggcgggcagctgcggcagctgctgctgtggctcgggcggcggcggcgcggcggcggcagagggggctccggggtcggaccatccgctctccctgcgctctccgcaccgcggcttaaatgatgtattttgtgatcgcagcgatgaaagctcaaattgaaattattccatgcaagatctgtggagacaaatcatcaggaatccattatggtgtcattacatgtgaaggctgcaagggctttttcaggagaagtcagcaaagcaatgccacctactcctgtcctcgtcagaagaactgtttgattgatcgaaccagtagaaaccgctgccaacactgtcgattacagaaatgccttgccgtagggatgtctcgagatgctgtaaaatttggccgaatgtcaaaaaagcagagagacagcttgtatgcagaagtacagaaacaccggatgcagcagcagcagcgcgaccaccagcagcagcctggagaggctgagccgctgacgcccacctacaacatctcggccaacgggctgacggaacttcacgacgacctcagtaactacattgacgggcacacccctgaggggagtaaggcagactccgccgtcagcagcttctacctggacatacagccttccccagaccagtcaggtcttgatatcaatggaatcaaaccagaaccaatatgtgactacacaccagcatcaggcttctttccctactgttcgttcaccaacggcgagacttccccaactgtgtccatggcagaattagaacaccttgcacagaatatatctaaatcgcatctggaaacctgccaatacttgagagaagagctccagcagataacgtggcagacctttttacaggaagaaattgagaactatcaaaacaagcagcgggaggtgatgtggcaattgtgtgccatcaaaattacagaagctatacagtatgtggtggagtttgccaaacgcattgatggatttatggaactgtgtcaaaatgatcaaattgtgcttctaaaagcaggttctctagaggtggtgtttatcagaatgtgccgtgcctttgactctcagaacaacaccgtgtactttgatgggaagtatgccagccccgacgtcttcaaatccttaggttgtgaagactttattagctttgtgtttgaatttggaaagagtttatgttctatgcacctgactgaagatgaaattgcattattttctgcatttgtactgatgtcagcagatcgctcatggctgcaagaaaaggtaaaaattgaaaaactgcaacagaaaattcagctagctcttcaacacgtcctacagaagaatcaccgagaagatggaatactaacaaagttaatatgcaaggtgtctaccttaagagccttatgtggacgacatacagaaaagctaatggcatttaaagcaatatacccagacattgtgcgacttcattttcctccattatacaaggagttgttcacttcagaatttgagccagcaatgcaaattgatgggtaaatgttatcacctaagcacttctagaatgtctgaagtacaaacatgaaaaacaaacaaaaaaattaaccgagacactttatatggccctgcacagacctggagcgccacacactgcacatcttttggtgatcggggtcaggcaaaggaggggaaacaatgaaaacaaataa

SEQ ID NO: 18021 - DNA, 485 bp, Homo sapiens
  source 1..485: mol_type = unassigned DNA
ggagcgtacaagacggtgaactgaatgaacgctgaggtttgactgcttattccttgatgaaccctctgtaaaatttggccgaatgtcaaaaaagcagagagacagcttgtatgcagaagtacagaaacaccggatgcagcagcagcagcgcgaccaccagcagcagcctggagaggctgagccgctgacgcccacctacaacatctcggccaacgggctgacggaacttcacgacgacctcagtaactacattgacgggcacacccctgaggggagtaaggcagactccgccgtcagcagcttctacctggacatacagccttccccagaccagtcaggtcttgatatcaatggaatcaaaccagaaccaatatgtgactacacaccagcatcaggcttctttccctactgttcgttcaccaacggcgagacttccccaactgtgtccatggcagaattagaacaccttgcacagaatatatcta

SEQ ID NO: 18022 - DNA, 749 bp, Homo sapiens
  source 1..749: mol_type = unassigned DNA
ccccgctgaaccaggaatccgcccgcaagagcgagccgcctgccccggtgcgcagacagagctattccagcaccagcagaggtatctcagtaacgaagaagacacatacatggcaggcatggtacagagcgcttccttgcacagccttgcccatgagctcgtccctggcccggagggacccactctagaggtgctcaaattgaaattattccatgcaagatctgtggagacaaatcatcaggaatccattatggtgtcattacatgtgaaggctgcaagggctttttcaggagaagtcagcaaagcaatgccacctactcctgtcctcgtcagaagaactgtttgattgatcgaaccagtagaaaccgctgccaacactgtcgattacagaaatgccttgccgtagggatgtctcgagatgctgtaaaatttggccgaatgtcaaaaaagcagagagacagcttgtatgcagaagtacagaaacaccggatgcagcagcagcagcgcgaccaccagcagcagcctggagaggctgagccgctgacgcccacctacaacatctcggccaacgggctgacggaacttcacgacgacctcagtaactacattgacgggcacacccctgaggggagtaaggcagactccgccgtcagcagcttctacctggacatacagccttccccagaccagtcaggtcttgatatcaatggaatcaaaccagaaccaatatgtgactacacaccagcatc

SEQ ID NO: 18023 - DNA, 544 bp, Homo sapiens
  source 1..544: mol_type = unassigned DNA
aaccacagccacatggctgatgtgctgcttgagggtgctgtgtcaagcagcaaatgggaaactgaagcaatccgtactacccatgctgtccttctgaagaagccaccaggctggaagtcaggtatctcagtaacgaagaagacacatacatctcaaattgaaattattccatgcaagatctgtggagacaaatcatcaggaatccattatggtgtcattacatgtgaaggctgcaagggctttttcaggagaagtcagcaaagcaatgccacctactcctgtcctcgtcagaagaactgtttgattgatcgaaccagtagaaaccgctgccaacactgtcgattacagaaatgccttgccgtagggatgtctcgagatgctgtaaaatttggccgaatgtcaaaaaagcagagagacagcttgtatgcagaagtacagaaacaccggatgcagcagcagcagcgcgaccaccagcagcagcctggagaggctgagccgctgacgcccacctacaacatctcggccaacgggctgacggaacttc

SEQ ID NO: 18024 - DNA, 577 bp, Homo sapiens
  source 1..577: mol_type = unassigned DNA
ctctccagaaagacttcggaggagcttactccactccccggacggtcccagtggcttcgttctccacggcccagaagtgggccgtaccttccgattagagctggggcactctaggaaatgcgggtgaccgtagctccccagaccaaacctgtcttttccaccaacgagctggcgcatttatcgcccccgagtgctccggcaagccagcgggagagtggcgtcgggttgcgagcctcttgccccaccgagtgggggcagaaagtggtcagaggcgcgttccgcggggcgctgcgtgcagaaaagcgaccggcggccacagctcaaattgaaattattccatgcaagatctgtggagacaaatcatcaggaatccattatggtgtcattacatgtgaaggctgcaagggctttttcaggagaagtcagcaaagcaatgccacctactcctgtcctcgtcagaagaactgtttgattgatcgaaccagtagaaaccgctgccaacactgtcgattacagaaatgccttgccgtagggatgtctcgagatgctgtaaaatttggccgaatgtcaaaaaagc

SEQ ID NO: 18025 - DNA, 3910 bp, Homo sapiens
  source 1..3910: mol_type = unassigned DNA
agctgctgctgtggctcgggcggcggcggcgcggcggcggcagagggggctccggggtcggaccatccgctctccctgcgctctccgcaccgcggcttaaatgatgtattttgtgatcgcagcgatgaaagctcaaattgaaattattccatgcaagatctgtggagacaaatcatcaggaatccattatggtgtcattacatgtgaaggctgcaaggtaagcctttttaattgttgttgtttctattaatgtttgttagaatatatctttgtgatttgtatgtctccacttatgtcttaaaattcaactccttagaattttgaatgataagaaattacaggatagaagaaatattttggtgttaaattacaattaaagaagttatatatatttttactccttccttcaaaataataggagattacaaaaaggtatttgagcattgcttgtttatcactttcaaccccagagttgaactcatgagcaatctctgtggcaatcttttttaaaaaagagctaactccagacttctacaatgtccctgtcataagcttataaaaagacatctccagtaagtttaattggaatgtcactgagttgagtcttattgttagcacacataatgttaacacatctggcaaaattgtgggaaagctatcaggaagacctgagttccagtcctattgcctccacttgtccatattgttttgaatgtgtcttaatctctttgtcactcagttgcttcatttttaaagtgggtataacacctgatctttctactggttaggactattccaagaatagaaggagaacctgtacataaaaaagtccttacaaacagaaaagtgctatttaactctaaatattatcagtattatttctgctatgactattttattatttctgaccttggtcatggggcaatgtgtacagcacatgcataatgtgcagatgagaaacagagatgtttatcccaataattcaagaccccccaagcccagattacctctgttattcaaatctcaatttattaagatttaaatcctcatgcttatattggaagggcctcgagacagcttacaggataaaacagtgcaaaataaacaggagagaagctatttaaacatgcaggaggcctttgagacagccgattgctacaaccaggcctgaatcagccctaaggctttttgaggctgaggcaaaaaataaaatccacgaatttggttagctttcctttcatgaaattagaaaatacaatgttgtaaaatacaaaatcacctatagacacaaatgactactgagagacttcaaggaaattaaccttataatttccttaattcttcattttactgttagtcatggtaacatttgctaatttgtacatgtacagatgcttcatgttgatcccatcttagcaaagcttcagatttccgcatactacagaaccatctatgccctttacttccaaaatctgccctccctcaaaattagttgactaattaaataaattaagcaaaatgagaggcccggtgtagtggtgtgtacctgtagtcccagctactcagggaagacagctgcaggtttatcacttgagtccaggagttcaaggttacagtgagctatgatcacaccactggactccagcctgggcaatggagtgagaccctctctccaaaaaagtaaataaaaataatgaaaaaacaaaatgaaataatctgtctggtctgtgccatcccaggttataaggtgagagtgatctgcctgtgaccactgtcatcgcattgatttttggagctgatttggctgacgtggccaggtagccattgcttttcaccctcaccctgtcttgtgttctgcctcccaaatctgtgtccctggtagacatgtcatggcctttctcaatagagggtttatagactgcagtgcttgcctgctgggagttccagtgctttttgtgcattgcgtatcacctgggtgtcttcttaaatggacagggttctaggcagcatcccggataccagttcaccatttgtcccttcattctgcccaaaaaactgatggcttcctctgaatctgtcagtaaggcaagtgattatctaggaattgacagaagtgattatctaggaatggagtctggggaaaggacaaggtgggggtaggggctacttcatatgaaataccccaacaatttggaagattaattaacaacatgctattgagtaaaacctaagttgactgagtaccatggcacaaacaatgtgaattttctttttactcttaatatttatcatgacaaaaataaaagcgataagaaaacaaaaggtatctattattccaaagttgccatttttctagattcccttccagatcttgtctgcatacctcctcagtgccaaagtggttttcagttatctgtggctctgttcctctgctctgttgactttatccaatgaaaaccacaaaataaataaaacataattttattaacagattgggcctatgcctagccagggacttgaacaatgtttcatgtttatatttgatacatatactctttgttctccattataatttctctctgctataactaacacttttattcctagttataaaaatagaagtcaaaagacttctatttttgccattttatgttaattatttatcatgttctaaccaggtaaaggtggttctatcatgatcaattgtaaataactttgctgagatagtgtaattaaacataagaaaaatttcacattagacatatcaaatagatatctaatgagagaagaaaggtgatcagtcatcttctgagctaatcattttgtgaacgtattttaaattgcatttttaaattaacaagctgacaccataagaaactagaggacctgtttaattgctgaaataattattttggcacatagttgctaagcattgcacatgaacagcaaaaatggtagaagctttagtagctctttctgtcatttctggctcttcctagttcatcctctccccaacccctttgctgtctgtagagagacagcaggtgccatgcttctgctctgactctggaaccagactgcccgagttgaaatcccagctctgctatttaccagcttgagcacctataccactgctctgtgcctcagttcccccatctgtaaaatgaggactgtaattgtaataacttcatagggttgtcacatgcatttaaggaaagtacctggaagaatgccagatgcatcacaagcacttactaagtgttagctgttgttatcattgtcattactaggcagacttcttggtggcttggtaatgctgctctgtatagtcagatattatttctgggacatctatggatatagtcttgattgttgtgaccatttgcaatgtgttatgtagaatctgccaataaaaaagaatactatgagcactcccttgggaccaagcactatgtaagcactgtaagggatccaaagacatagaagaccacatctttccctcaagcagtttatggtctagttgtagagatgaggcctgtgtagggaaagctaaatagcaatgcaagaactaatatagagtaaggccacaatctatgatatacataagaagcacatataggctgggcacagtggctcacacctgtagccccagcagtttgggaggctgagctgagaggaagatgtgagcacaagagttcaagaccagcctgagcaacacagcaagactctgtctctacaaaaaaattaaaaataaaaaaaactggctaggcatggtggtgtttgcctgaagtcccaactactcggaaggctgaagcaggaggattgcttgagcccaggagttcaaggctcctggtgagctatgatggtgccactgcattccagcctggcaacagagcaagacccctgtctc

SEQ ID NO: 18026 - DNA, 545 bp, Homo sapiens
  source 1..545: mol_type = unassigned DNA
agcgatctctacattgggaaaaaacatggagtcagctccggcagcccccgaccccgccgccagcgagccaggcagcagcggcgcggacgcggccgccggctccagggagaccccgctgaaccaggaatccgcccgcaagagcgagccgcctgccccggtgcgcagacagagctattccagcaccagcagaggtatctcagtaacgaagaagacacatacatctcaaattgaaattattccatgcaagatctgtggagacaaatcatcaggaatccattatggtgtcattacatgtgaaggctgcaaggtaagcctttttaattgttgttgtttctattaatgtttgttagaatatatctttgtgatttgtatgtctccacttatgtcttaaaattcaactccttagaattttgaatgataagaaattacaggatagaagaaatattttggtgttaaattacaattaaagaagttatatatatttttactccttccttcaaaataataggagattacaaaaaggtatttgagcattgcttgtttat

SEQ ID NO: 18027 - DNA, 373 bp, Homo sapiens
  source 1..373: mol_type = unassigned DNA
aaaaaacatggagtcagctccggcagcccccgaccccgccgccagcgagccaggcagcagcggcgcggacgcggccgccggctccagggagaccccgctgaaccaggaatccgcccgcaagagcgagccgcctgccccggtgcgcagacagagctattccagcaccagcagaggtatctcagtaacgaagaagacacatacatggcaggcatggtacagagcgcttccttgcacagccttgcccatgagctcgtccctggcccggagggacccactctagaggtgggaccaacagaaaattgcaaactcctgagtggaaaccttcacgagggctccgcaaattggtgctctcttctcctggtttcatcccgca

SEQ ID NO: 18028 - DNA, 642 bp, Homo sapiens
  source 1..642: mol_type = unassigned DNA
attgggaaaaaacatggagtcagctccggcagcccccgaccccgccgccagcgagccaggcagcagcggcgcggacgcggccgccggctccagggagaccccgctgaaccaggaatccgcccgcaagagcgagccgcctgccccggtgcgcagacagagctattccagcaccagcagaggtatctcagtaacgaagaagacacatacatgtaagtaatgcattttttttctgtccaaagttttctgaagagttggaattcgcatatgtctggctgctgtgacccttcaagtatatactaatgtttcagctgtgatccatggtcaacagaggtcattttttttcaatctgtagtggtcggaagtggcacatctccacctgtttgtactgagtgtgtgttgaagagagaggctagagacatattctgatgaattccagtgtttccagccatgaagctttagaaaaatcatgaaatctagccaggaggatcaattacttactgatcacccttatcctagatccttcttagaagagctggtatgtttctaggaaacatcaccttgatttcttttaagctttggtctccttttcctcaccactagttcacaaattaggccgtttcgtactcatgtctgtggagcaga

SEQ ID NO: 18029 - DNA, 514 bp, Homo sapiens
  source 1..514: mol_type = unassigned DNA
acattgggaaaaaacatggagtcagctccggcagcccccgaccccgccgccagcgagccaggcagcagcggcgcggacgcggccgccggctccagggagaccccgctgaaccaggaatccgcccgcaagagcgagccgcctgccccggtgcgcagacagagctattccagcaccagcagaggcttctggaggatctgttgctgattgcactgaaaccagaagttgtacttggccaaggacgagctaaccccaaacagcaagaggtttgagttggctccaaagcacaagcctcacaaatatcccgtgagtctcccacaggcttggggctctctgtttagaattagaacctaatcttcaaatatccctttaccctcttgcctcaaaaaggaaggcagtgaagagcagcagcaaggcatcctggatgagcactggaaggggagaatgctcatgttttagtcgtgggctttccaccagttagctgtgcagctttgggcagatacttgaacttctctgg

SEQ ID NO: 18030 - DNA, 492 bp, Homo sapiens
  source 1..492: mol_type = unassigned DNA
gcggccgccggctccagggagaccccgctgaaccaggaatccgcccgcaagagcgagccgcctgccccggtgcgcagacagagctattccagcaccagcagagattggcatgcttaaagggctgaccatctgatgtacaggaaatggaaactactctctgaaaagcaagtgatctcccagccgcacccatttaggagaccaggattttattttgatccacaggagactaaatgagttagaggccactcctgtatcaacagagtttgttacttaaatgacagtagggcggttcgcagaaggaacaccaaatagtctgactatctaccaagaagagagtgtttgaacacatgtgcaacctcttgactgtggtgtgtggggcagcatttaataagaaagagctaaatctgcttgatgtgggaatatattcaacacatgttaagtgctaaaatattcaaagtaaataaatgtctatgtactccatattgttaaaga

SEQ ID NO: 18031 - DNA, 577 bp, Homo sapiens
  source 1..577: mol_type = unassigned DNA
tttaacctcctctgggataccaacccgtgcactcgccagagaccgaggcgagaacgcctcgagaaccgctcagacgcgcccggaactgcgccctggtctccctcccagcgcccgcgcagctcctggcgcgccccttggcgccccgctccgccccgcaccgcgtccggcgtcccgcgccaggcctcgcttgggaccatgggccatcatgcagaagggggatacaaacataaagcccatcctccaagtcatcaacatccgtcccattactacggggaatagtccgccgcgttatcgactgctcatgagtgatggattgaacactctatcctctttcatgttggcgacacagttgaaccctctcgtggaggaagaacaattgtccagcaactgtgtatgccagattcacagatttattgtgaacactctgaaagacggaaggagagtagttatcttgatggaattagaagttttgaagtcagctgaagcagttggagtgaagattggcaatccagtgccctataatgaaggactcgggcagccgcaagtagctcctccagcgccagcagccagcccagca

SEQ ID NO: 18032 - DNA, 630 bp, Homo sapiens
  source 1..630: mol_type = unassigned DNA
cgcacgtcgggggcgggagcggtgcgcgcaacttctcgggccaataactgcgcagcgcgcgggacccgggtggggaagctggagctgttgcggggtccgcggggaagtcttggcggtggagccatggtcggccaactgagcgagggggccattgcggtgaggaggccatcatgcagaagggggatacaaacataaagcccatcctccaagtcatcaacatccgtcccattactacggggaatagtccgccgcgttatcgactgctcatgagtgatggattgaacactctatcctctttcatgttggcgacacagttgaaccctctcgtggaggaagaacaattgtccagcaactgtgtatgccagattcacagatttattgtgaacactctgaaagacggaaggagagtagttatcttgatggaattagaagttttgaagtcagctgaagcagttggagtgaagattggcaatccagtgccctataatgaaggactcgggcagccgcaagtagctcctccagcgccagcagccagcccagcagcaagcagcaggccccagccgcagaatggaagctcgggaatgggttctactgtttctaaggcttatggtgcttcaaagacatttggaa

SEQ ID NO: 18033 - DNA, 4340 bp, Homo sapiens
  source 1..4340: mol_type = unassigned DNA
cgggagcggtgcgcgcaacttctcgggccaataactgcgcagcgcgcgggacccgggtggggaagctggagctgttgcggggtccgcggggaagtcttggcggtggagccatggtcggccaactgagcgagggggccattgcggccatcatgcagaagggggatacaaacataaagcccatcctccaagtcatcaacatccgtcccattactacggggaatagtccgccgcgttatcgactgctcatgagtgatggattgaacactctatcctctttcatgttggcgacacagttgaaccctctcgtggaggaagaacaattgtccagcaactgtgtatgccagattcacagatttattgtgaacactctgaaagacggaaggagagtagttatcttgatggaattagaagttttgaagtcagctgaagcagttggagtgaagattggcaatccagtgccctataatgaaggactcgggcagccgcaagtagctcctccagcgccagcagccagcccagcagcaagcagcaggccccagccgcagaatggaagctcgggaatgggttctactgtttctaaggcttatggtgcttcaaagacatttggaaaagctgcaggtcccagcctgtcacacacttctgggggaacacagtccaaagtggtgcccattgccagcctcactccttaccagtccaagtggaccatttgtgctcgtgttaccaacaaaagtcagatccgtacctggagcaactcccgaggggaagggaagcttttctccctagaactggttgacgaaagtggtgaaatccgagctacagctttcaatgagcaagtggacaagttctttcctcttattgaagtgaacaaggtgtattatttctcgaaaggcaccctgaagattgctaacaagcagttcacagctgttaaaaatgactacgagatgaccttcaataacgagacttccgtcatgccctgtgaggacgaccatcatttacctacggttcagtttgatttcacggggattgatgacctcgagaacaagtcgaaagactcacttgtagacatcatcgggatctgcaagagctatgaagacgccactaaaatcacagtgaggtctaacaacagagaagttgccaagaggaatatctacttgatggacacatccgggaaggtggtgactgctacactgtggggggaagatgctgataaatttgatggttctagacagcccgtgttggctatcaaaggagcccgagtctctgatttcggtggacggagcctctccgtgctgtcttcaagcactatcattgcgaatcctgacatcccagaggcctataagcttcgtggatggtttgacgcagaaggacaagccttagatggtgtttccatctctgatctaaagagcggcggagtcggagggagtaacaccaactggaaaaccttgtatgaggtcaaatccgagaacctgggccaaggcgacaagccggactactttagttctgtggccacagtggtgtatcttcgcaaagagaactgcatgtaccaagcctgcccgactcaggactgcaataagaaagtgattgatcaacagaatggattgtaccgctgtgagaagtgcgacaccgaatttcccaatttcaagtaccgcatgatcctgtcagtaaatattgcagattttcaagagaatcagtgggtgacttgtttccaggagtctgctgaagctatccttggacaaaatgctgcttatcttggggaattaaaagacaagaatgaacaggcatttgaagaagttttccagaatgccaacttccgatctttcatattcagagtcagggtcaaagtggagacctacaacgacgagtctcgaattaaggccactgtgatggacgtgaagcccgtggactacagagagtatggccgaaggctggtcatgagcatcaggagaagtgcattgatgtgagaggagcagtgccaatcgggcagaagtttgcaaataggcagaatggaatcgatttcctcccacctccgtgtgacgatcccatgttagctacacagtgcagaggctcttgatggtggactaagcaatttcccccctcgtgcgcatctcagaacccatcggtaggcaaaggaaaatacgctcaggtggttgtggtgtagactgtgtcaggcctacggagtcagccagtggctagcgcaagaccagtcactccctctgccttcaggcttctgtcaatttcattatcatcaagcaggaattatgtcgtaagtcactgaccctaactgcagaccatgaagtaaattatgtaactaggtttttgcttctccagtggtgaccacccccccccatccccgctcacaacttgggttcttctcagcggggcgagctgagaagcggtcatgagcacctggggattttagtaagtgtgtcttcctagaattcgaaggctctctctttctagaggtgctacatagttggtaatgcttggaatggcaatagggtagaatgattaatcaaaggcatatcttctatatctgaagagtatccttccttcagggtttaatagactgagtcagatgggtctgatattaatcaaaattgtctcttctgaggaccgctgataagcattgacttgccgtcccctaaggaaatccgagcggctacaaagcgtttctttacttctcacttcaattaatgctgcgcttcgcttggtgagtgcgtactttttctacctgtacacattcctgcattcatgtattttgttttttttgactaaagctatgttacatggaaaggattttgaagccttttgtttcccttgctttgttttaataaacagtatattctttggttgtgaatcctactttctttgaatgcaaagagttcctataactggaaagcaattaattagccttcataataaatgttcacttgggggggatgttaactcattataaacccgaagattagtccaaggcatggagatccttcttcctagtgtttgcagccctgaaatgcatctttcaaagcatgaaaacactaaaaacaaaaagccattttgcctgaggatgctgatgatctggcacttgggattttattgatgtttacgcagcagtctaacaccaaccacgctttgaaatgtgtacagacagtgagctggtaagaaaacagtaattatgctagtgggcctttcagtcagcaaaagcatgctcgctctgtgtgttcctaatcatattaattatctatccggtggctgcaacacaccgcctgccattggccgcacatctcgccgtcgtaccccggcagtgcggcggtcactctgcagccagaggacctgctgttcatcactgcacatgccgcctgcggaggcttttggatatggggagtgatggtgtcctgtctgtctcccccctcggtgtctgccgttgacataggggccagccagccctagacgggatgacttccgttcctgaggacagacacagagggactcctgctcagcctcactaattgtttagacacattccttcctacccttctctagtctcaggagatggtaactgggtcgcatttcagtctctgactgaggcctcagccatttttacggaagttcttttctgtctgaccttgcttataaagcatcgacgagaaaattacagtcttcaaccctcttctggattgacaaattgtggctgggaagtggcgatctagctttcagcccagtaaccagtctttcatgcctactactcccagcattccctcctctccccacgtgtctgtccacacagtgaagaggcctgaccagccgtggtaccaggacaggacgtgtccagggaacgctgacacctgtcctcgcgccttctcagtggccagcgtgatgaaaccagcacgtctccgtggatgtgattgggaacccaggggcagtgccagggggagggctccctcgaggaggctgtttctaacagatttccccactcaaagatcagatcaccagcagaggagcatcagaaactggctccactgttgggcttttcagagattttggtccctgcgggttgcctaaatagattctggcccacagtttacctcgaaaggctgttgatgttgttctgtttctcctctttcacttagagatcaatgttgattttgcgtacaccatgacatcagcgttaggcaattaggagaaaaaaatctaatcatttcgcctttatttcaagtggttcttgaattccctccagtctcattgtgaaaggggcagggaaaaaaataaaagggtaataatctgatttctgtccatatttccagtgttttatgctttccattaaaaccttgctaatctct

SEQ ID NO: 18034 - DNA, 413 bp, Homo sapiens
  source 1..413: mol_type = unassigned DNA
aacatccgtcccattactacggggaatagtccgccgcgttatcgactgctcatgagtgatggattgaacactctatcctctttcatgttggcgacacagttgaaccctctcgtggaggaagaacaattgtccagcaactgtgtatgccagattcacagatttattgtgaacactctgaaagacggaaggagagtagttatcttgatggaattagaagttttgaagtcagctgaagcagttggagtgaagattggcaatccagtgccctataatgaagaagctgaaaaaaaagtcattacttcagacaattctagagaaaggcgaaaagaatcttcaaatcactggccccattaaaggaaaggattgtttgcccttacaccaagtcaaaacataaaagcctcatttgacaccaa

SEQ ID NO: 18035 - DNA, 574 bp, Homo sapiens
  source 1..574: mol_type = unassigned DNA
actttactgcaggttgttgcaggagaaatgggcaaggctttaggggagaacctcattaacactgaaggctatcaattctaagcaggactcgggcagccgcaagtagctcctccagcgccagcagccagcccagcagcaagcagcaggccccagccgcagaatggaagctcgggaatgggttctactgtttctaaggcttatggtgcttcaaagacatttggaaaagctgcaggtcccagcctgtcacacacttctgggggaacacagtccaaagtggtgcccattgccagcctcactccttaccagtccaagtggaccatttgtgctcgtgttaccaacaaaagtcagatccgtacctggagcaactcccgaggggaagggaagcttttctccctagaactggttgacgaaagtggtgaaatccgagctacagctttcaatgagcaagtggacaagttctttcctcttattgaagtgaacaaggtgtattatttctcgaaaggcaccctgaagattgctaacaagcagttcacagctgttaaaaatgactacgagatgaccttcaataacgaga

SEQ ID NO: 18036 - DNA, 3849 bp, Homo sapiens
  source 1..3849: mol_type = unassigned DNA
ttctttcctcttattgaagtgaacaaggtgtattatttctcgaaaggcaccctgaagattgctaacaagcagttcacagctgttaaaaatgactacgagatgaccttcaataacgagacttccgtcatgccctgtgaggacgaccatcatttacctacggttcagtttgatttcacggggattgatgacctcgagaacaagtcgaaagactcacttgtagacatcatcgggatctgcaagagctatgaagacgccactaaaatcacagtgaggtctaacaacagagaagttgccaagaggaatatctacttgatggacacatccgggaaggtggtgactgctacactgtggggggaagatgctgataaatttgatggttctagacagcccgtgttggctatcaaaggagcccgagtctctgatttcggtggacggagcctctccgtgctgtcttcaagcactatcattgcgaatcctgacatcccagaggcctataagcttcgtggatggtttgacgcagaaggacaagccttagatggtgtttccatctctgatctaaagagcggcggagtcggagggagtaacaccaactggaaaaccttgtatgaggtcaaatccgagaacctgggccaaggcgacaaggtaaatattgcagattttcaagagaatcagtgggtgacttgtttccaggagtctgctgaagctatccttggacaaaatgctgcttatcttggggaattaaaagacaagaatgaacaggcatttgaagaagttttccagaatgccaacttccgatctttcatattcagagtcagggtcaaagtggagacctacaacgacgagtctcgaattaaggccactgtgatggacgtgaagcccgtggactacagagagtatggccgaaggctggtcatgagcatcaggagaagtgcattgatgtgagaggagcagtgccaatcgggcagaagtttgcaaataggcagaatggaatcgatttcctcccacctccgtgtgacgatcccatgttagctacacagtgcagaggctcttgatggtggactaagcaatttcccccctcgtgcgcatctcagaacccatcggtaggcaaaggaaaatacgctcaggtggttgtggtgtagactgtgtcaggcctacggagtcagccagtggctagcgcaagaccagtcactccctctgccttcaggcttctgtcaatttcattatcatcaagcaggaattatgtcgtaagtcactgaccctaactgcagaccatgaagtaaattatgtaactaggtttttgcttctccagtggtgaccacccccccccatccccgctcacaacttgggttcttctcagcggggcgagctgagaagcggtcatgagcacctggggattttagtaagtgtgtcttcctagaattcgaaggctctctctttctagaggtgctacatagttggtaatgcttggaatggcaatagggtagaatgattaatcaaaggcatatcttctatatctgaagagtatccttccttcagggtttaatagactgagtcagatgggtctgatattaatcaaaattgtctcttctgaggaccgctgataagcattgacttgccgtcccctaaggaaatccgagcggctacaaagcgtttctttacttctcacttcaattaatgctgcgcttcgcttggtgagtgcgtactttttctacctgtacacattcctgcattcatgtattttgttttttttgactaaagctatgttacatggaaaggattttgaagccttttgtttcccttgctttgttttaataaacagtatattctttggttgtgaatcctactttctttgaatgcaaagagttcctataactggaaagcaattaattagccttcataataaatgttcacttgggggggatgttaactcattataaacccgaagattagtccaaggcatggagatccttcttcctagtgtttgcagccctgaaatgcatctttcaaagcatgaaaacactaaaaacaaaaagccattttgcctgaggatgctgatgatctggcacttgggattttattgatgtttacgcagcagtctaacaccaaccacgctttgaaatgtgtacagacagtgagctggtaagaaaacagtaattatgctagtgggcctttcagtcagcaaaagcatgctcgctctgtgtgttcctaatcatattaattatctatccggtggctgcaacacaccgcctgccattggccgcacatctcgccgtcgtaccccggcagtgcggcggtcactctgcagccagaggacctgctgttcatcactgcacatgccgcctgcggaggcttttggatatggggagtgatggtgtcctgtctgtctcccccctcggtgtctgccgttgacataggggccagccagccctagacgggatgacttccgttcctgaggacagacacagagggactcctgctcagcctcactaattgtttagacacattccttcctacccttctctagtctcaggagatggtaactgggtcgcatttcagtctctgactgaggcctcagccatttttacggaagttcttttctgtctgaccttgcttataaagcatcgacgagaaaattacagtcttcaaccctcttctggattgacaaattgtggctgggaagtggcgatctagctttcagcccagtaaccagtctttcatgcctactactcccagcattccctcctctccccacgtgtctgtccacacagtgaagaggcctgaccagccgtggtaccaggacaggacgtgtccagggaacgctgacacctgtcctcgcgccttctcagtggccagcgtgatgaaaccagcacgtctccgtggatgtgattgggaacccaggggcagtgccagggggagggctccctcgaggaggctgtttctaacagatttccccactcaaagatcagatcaccagcagaggagcatcagaaactggctccactgttgggcttttcagagattttggtccctgcgggttgcctaaatagattctggcccacagtttacctcgaaaggctgttgatgttgttctgtttctcctctttcacttagagatcaatgttgattttgcgtacaccatgacatcagcgttaggcaattaggagaaaaaaatctaatcatttcgcctttatttcaagtggttcttgaattccctccagtctcattgtgaaaggggcagggaaaaaaataaaagggtaataatctgatttctgtccatatttccagtgttttatgctttccattaaaaccttgctaatctctcgcgtgctgttccttttttgaactgcagggtcaaaaatgttcccctcccccacttctgtttcctgagtgggctgtcttcaaaaagtataaatactattgatcgtggtatttaatacactaatgaaacccatggttattgactacataattaatatactgtccaaaagtgaagtttggccgcccagtatgtaaaggtttatattgactcatgtttctttggcaatatgccgcccaaggttttatttatagaggatgaaacaggttgtttggtctccttttcttcttttcacctgttagaaggccactattcccctagtaaactgattgtttccttgtctcaaagggaagattccccccactccccggccaccttttatgtggtttgttaactcttagtcttatatccactccgctggtagagttctggcttttataaacacctttggaagtcatcggttcctcaaaaagagagcatagatgtttaattttcacttattcaaaaaaactggtatttttgttattaagaca

SEQ ID NO: 18037 - DNA, 844 bp, Homo sapiens
  source 1..844: mol_type = unassigned DNA
cctcaagtgttccacccgccttggcctcccaaagtgctgggatgacaggcatgagcccactgcacctggccctctctggaaattattttaataagtggaaaaagaacattaacctctccccatcttctcagtgtgtctttttattatttctttgctgaaataatgtagaattgtgttttttaggtaaatattgcagattttcaagagaatcagtgggtgacttgtttccaggagtctgctgaagctatccttggacaaaatgctgcttatcttggggaattaaaagacaagaatgaacaggcatttgaagaagttttccagaatgccaacttccgatctttcatattcagagtcagggtcaaagtggagacctacaacgacgagtctcgaattaaggccactgtgatggacgtgaagcccgtggactacagagagtatggccgaaggctggtcatgagcatcaggagaagtgcattgatgtgagaggagcagtgccaatcgggcagaagtttgcaaataggcagaatggaatcgatttcctcccacctccgtgtgacgatcccatgttagctacacagtgcagaggctcttgatggtggactaagcaatttcccccctcgtgcgcatctcagaacccatcggtaggcaaaggaaaatacgctcaggtggttgtggtgtagactgtgtcaggcctacggagtcagccagtggctagcgcaagaccagtcactccctctgccttcaggcttctgtcaatttcattatcatcaagcaggaattatgtcgtaagtcactgaccctaactgcagaccatgaagtaaattatgtaactaggtttttgctt

SEQ ID NO: 18038 - DNA, 534 bp, Homo sapiens
  source 1..534: mol_type = unassigned DNA
gaatttcaggaatattgggagaagtcaccagaaaagaggactgctcccttctgaagctggacttgaacctgagaaaatgtgacctggggctgctggcggccagcttgtccccgttaggtgacaataagcagacagaagagccaagcagctatggaggaaaatcaggtcatcagttgggtcaaagatggagctactagccaggcctgagacctgagcccctggacaccatgtttctattttctgcttctgtgaaattgcctcttctacatacctcatgcacctccgctgagcttttaaaccaagtcattgggacttagcgtctttctacccggcagggaagggaggagttggcaagaatttggctcacccattccccctgcaagcctccagcgtcgcggagcactagacatctactatgactgacaccgtgttcagcaacagttctaaccgttggatgtaccccagtgaccggccccttcaatcaaatgataaagaacagctccaggcaggctggtccgtccaccccggtggtca

SEQ ID NO: 18039 - DNA, 570 bp, Homo sapiens
  source 1..570: mol_type = unassigned DNA
ccttctgaagctggacttgaacctgagaaaatgtgacctggggctgctggcggccagcttgtccccgttaggtgacaataagcagacagaagagccaagcagctatggaggaaaatcaggcacctccgctgagcttttaaaccaagtcattgggacttagcgtctttctacccggcagggaagggaggagttggcaagaatttggctcacccattccccctgcaagcctccagcgtcgcggagcactagacatctactatgactgacaccgtgttcagcaacagttctaaccgttggatgtaccccagtgaccggccccttcaatcaaatgataaagaacagctccaggcaggctggtccgtccaccccggtggtcagcctgacaggcagaggaagcaggaagagctgactgatgaggagaaagaaatcatcaacagggtgattgctcgagctgagaaaatggaagagatggagcaggagcgaatcggacgcctggtggaccgcctagaaaacatgaggaagaacgtggctggagatggggtgaaccgctgcatactgtgtggagaacag

SEQ ID NO: 18040 - DNA, 531 bp, Homo sapiens
  source 1..531: mol_type = unassigned DNA
gagagggaggaagaggagggagaggggcgatggagaaggtcatcagttgggtcaaagatggagctactagccaggcctgagacctgagcccctggacaccatgtttctattttctgcttctgtgaaattgcctcttctacatacctcatgcaacgttcgttctacataattcagcaccagcttagattctcactatcaaattgaaccctttcccctttgctatccacacaggagcactagacatctactatgactgacaccgtgttcagcaacagttctaaccgttggatgtaccccagtgaccggccccttcaatcaaatgataaagaacagctccaggcaggctggtccgtccaccccggtggtcagcctgacaggcagaggaagcaggaagagctgactgatgaggagaaagaaatcatcaacagggtgattgctcgagctgagaaaatggaagagatggagcaggagcgaatcggacgcctggtggaccgcctagaaaacatgaggaagaacgtggctggagatggg

SEQ ID NO: 18041 - DNA, 2581 bp, Homo sapiens
  source 1..2581: mol_type = unassigned DNA
gttcctaacccttgatcttggcttgttaaccctttctgagcttccctttagcggggggatgaggatggtcggctgtttccacatttaagggcagagctgggtgaagggtggtgttagtgctcgagggtcacgcgcgggtggctttgccgcggtggtggcagcggtggcagaggcgacaccgctggaggcggcggagggacgggcccaccaacgctgcaggccggcacctccgctgagcttttaaaccaagtcattgggacttagcgtctttctacccggcagggaagggaggagttggcaagaatttggctcacccattccccctgcaagcctccagcgtcgcggagcactagacatctactatgactgacaccgtgttcagcaacagttctaaccgttggatgtaccccagtgaccggccccttcaatcaaatgataaagaacagctccaggcaggctggtccgtccaccccggtggtcagcctgacaggcagaggaagcaggaagagctgactgatgaggagaaagaaatcatcaacagggtgattgctcgagctgagaaaatggaagagatggagcaggagcgaatcggacgcctggtggaccgcctagaaaacatgaggaagaacgtggctggagatggggtgaaccgctgcatactgtgtggagaacagctggggatgctgggctctgcctgtgtagtatgtgaggactgtaagaagaacgtctgcaccaagtgcggagtggagaccaacaaccgcctgcattctgtgtggctctgcaaaatctgcattgagcagagggaggtgtggaagcgttctggagcgtggttcttcaaaggcttccccaaacaggtcctcccacagcctatgcctataaagaagaccaagccccagcagcctgtcagtgagcctgctgcccctgaacagcctgctcctgagcccaagcaccctgcccgggctccagctcgaggtgacagtgaagataggaggggcccgggtcagaagacaggccctgacccagcctctgctcccgggcgaggaaactatgggcctcccgtgcgcagggcctccgaggcacgaatgagctcatctagccgagattcagagagctgggaccacagtgggggtgctggagactccagccggagcccagcaggtttgagacgggccaactcagtccaggcctccagacctgccccaggctcggtgcagagcccagcgccacctcagcctgggcagccagggaccccaggaggaagcagaccgggtcctgggccagcaggacgctttccagatcagaagccagaggtggctccgagcgaccctgggaccactgccccaccccgagaggagagaacagggggagtcgggggctacccagcagttggagccagagaggaccgaatgagccacccctccggaccctattcccaagcatctgcagctgccccccagcctgctgcagcccgccagccaccacccccagaggaggaggaagaggaagccaacagctacgattcggatgaagcaaccaccctgggtgccctggaattcagccttctctacgaccaggacaacagctccctgcagtgcaccatcattaaggccaagggcctgaagcccatggattcaaacggcttggctgatccctacgttaagctgcacctcctgccgggagccagcaagtccaacaagcttcgtacaaaaactctgcggaatacccggaaccccatctggaatgagaccctcgtgtatcacggcatcaccgatgaggacatgcaaaggaagaccctcaggatctccgtctgtgatgaggacaaatttggccacaatgaatttattggtgagaccagattctccctcaagaaactgaagcccaaccagaggaagaatttcaacatctgcctggagcgagtgattcctatgaaacgtgctgggaccaccgggtcagcccgaggcatggccctttatgaggaagagcaggtggagcgtgttggtgacatcgaggagcgtggcaagatcctggtctccctcatgtacagcacacagcagggaggcctcattgtgggcatcatacgctgcgtgcacctggctgccatggacgctaatggctactcagacccattcgtcaagctctggctgaaaccggacatgggaaagaaggccaaacacaagactcaaattaaaaagaaaaccttgaatcccgaattcaatgaggagtttttctatgacatcaaacacagtgacctggcaaagaagtcactggacatttcagtctgggactatgacatcggcaagtccaatgattacatcggaggctgccagctggggatctctgccaagggagagcgcttaaaacactggtacgagtgtctgaaaaataaagacaagaagatagagcgctggcaccagctacagaatgagaaccacgtgtcaagtgattaggctagtgcccaggtccccatctccatgtcccgggtcccccccagcctgctctagctgcccaccgcaccctgatctctcttctctatgcctacctccccccataccctgctgatctccctgagcctgcctttgag

SEQ ID NO: 18042 - DNA, 740 bp, Homo sapiens
  source 1..740: mol_type = unassigned DNA
tttagcggggggatgaggatggtcggctgtttccacatttaagggcagagctgggtgaagggtggtgttagtgctcgagggtcacgcgcgggtggctttgccgcggtggtggcagcggtggcagaggcgacaccgctggaggcggcggagggacgggcccaccaacgctgcaggccggagcactagacatctactatgactgacaccgtgttcagcaacagttctaaccgttggatgtaccccagtgaccggccccttcaatcaaatgataaagaacagctccaggcaggctggtccgtccaccccggtggtcagcctgacaggcagaggaagcaggaagagctgactgatgaggagaaagaaatcatcaacagggtgattgctcgagctgagaaaatggaagagatggagcaggagcgaatcggacgcctggtggaccgcctagaaaacatgaggaagaacgtggctggagatggggtgaaccgctgcatactgtgtggagaacagctggggatgctgggctctgcctgtgtagtatgtgaggactgtaagaagaacgtctgcaccaagtgcggagtggagaccaacaaccgcctgcattctgtgtggctctgcaaaatctgcattgagcagagggaggtgtggaagcgttctggagcgtggttcttcaaaggcttccccaaacaggtcctcccacagcctatgcctataaagaagaccaagccccagcagcctgtcag

SEQ ID NO: 18043 - DNA, 492 bp, Homo sapiens
  source 1..492: mol_type = unassigned DNA
ggtggctttgccgcggtggtggcagcggtggcagaggcgacaccgctggaggcggcggagggacgggcccaccaacgctgcaggccggttcttgctctgttgcccaggctggactgcagtggcaccagcatggctcactgcagcctcgaccccctaggctcaagtgatcctcctgcttcagcctcctgagtagctgggaccacaggtcatcagttgggtcaaagatggagctactagccaggcctgagacctgagcccctggacaccatgtttctattttctgcttctgtgaaattgcctcttctacatacctcatgcacctccgctgagcttttaaaccaagtcattgggacttagcgtctttctacccggcagggaagggaggagttggcaagaatttggctcacccattccccctgcaagcctccagcgtcgcggagcactagacatctactatgactgacaccgtgttcagcaacagttctaaccgtt

SEQ ID NO: 18044 - DNA, 557 bp, Homo sapiens
  source 1..557: mol_type = unassigned DNA
ctttgccgcggtggtggcagcggtggcagaggcgacaccgctggaggcggcggagggacgggcccaccaacgctgcagggtctcgctctgtcacccaggctggagtgcaggagcagatcatagttcaccgcaacctccgcctcctgggctccagtgatccttccatcttagcctcctgagtagctgggaccacagcccctggacaccatgtttctattttctgcttctgtgaaattgcctcttctacatacctcatgagcactagacatctactatgactgacaccgtgttcagcaacagttctaaccgttggatgtaccccagtgaccggccccttcaatcaaatgataaagaacagctccaggcaggctggtccgtccaccccggtggtcagcctgacaggcagaggaagcaggaagagctgactgatgaggagaaagaaatcatcaacagggtgattgctcgagctgagaaaatggaagagatggagcaggagcgaatcggacgcctggtggaccgcctagaaaacatgaggaagaacgtggctggagatgggg

SEQ ID NO: 18045 - DNA, 561 bp, Homo sapiens
  source 1..561: mol_type = unassigned DNA
agaggcgacaccgctggaggcggcggagggacgggcccaccaacgctgcaggccggttcttgctctgttgcccaggctggactgcagtggcaccagcatggctcactgcagcctcgaccccctaggctcaagtgatcctcctgcttcagcctcctgagtagctgggaccacaggcacctccgctgagcttttaaaccaagtcattgggacttagcgtctttctacccggcagggaagggaggagttggcaagaatttggctcacccattccccctgcaagcctccagcgtcgcggagcactagacatctactatgactgacaccgtgttcagcaacagttctaaccgttggatgtaccccagtgaccggccccttcaatcaaatgataaagaacagctccaggcaggctggtccgtccaccccggtggtcagcctgacaggcagaggaagcaggaagagctgactgatgaggagaaagaaatcatcaacagggtgattgctcgagctgagaaaatggaagagatggagcaggagcgaatcggacgcctggtggaccgccta

SEQ ID NO: 18046 - DNA, 561 bp, Homo sapiens
  source 1..561: mol_type = unassigned DNA
acttttcactttcagaatggcgtccagtaaatcaatcctgggcacctccgctgagcttttaaaccaagtcattgggacttagcgtctttctacccggcagggaagggaggagttggcaagaatttggctcacccattccccctgcaagcctccagcgtcgcggagcactagacatctactatgactgacaccgtgttcagcaacagttctaaccgttggatgtaccccagtgaccggccccttcaatcaaatgataaagaacagctccaggcaggctggtccgtccaccccggtggtcagcctgacaggcagaggaagcaggaagagctgactgatgaggagaaagaaatcatcaacagggtgattgctcgagctgagaaaatggaagagatggagcaggagcgaatcggacgcctggtggaccgcctagaaaacatgaggaagaacgtggctggagatggggtgaaccgctgcatactgtgtggagaacagctggggatgctgggctctgcctgtgtagtatgtgaggactgtaagaagaacgtctgcaccaagtgcgga

SEQ ID NO: 18047 - DNA, 660 bp, Homo sapiens
  source 1..660: mol_type = unassigned DNA
ttttctgctctgaattctgagaaactccaggcacctccgctgagcttttaaaccaagtcattgggacttagcgtctttctacccggcagggaagggaggagttggcaagaatttggctcacccattccccctgcaagcctccagcgtcgcggagcactagacatctactatgactgacaccgtgttcagcaacagttctaaccgttggatgtaccccagtgaccggccccttcaatcaaatgataaagaacagctccaggcaggctggtccgtccaccccggtggtcagcctgacaggcagaggaagcaggaagagctgactgatgaggagaaagaaatcatcaacagggtgattgctcgagctgagaaaatggaagagatggagcaggagcgaatcggacgcctggtggaccgcctagaaaacatgaggaagaacgtggctggagatggggtgaaccgctgcatactgtgtggagaacagctggggatgctgggctctgcctgtgtagtatgtgaggactgtaagaagaacgtctgcaccaagtgcggagtggagaccaacaaccgcctgcattctgtgtggctctgcaaaatctgcattgagcagagggaggtgtggaagcgttctggagcgtggttcttcaaaggcttccccaaaca

SEQ ID NO: 18048 - DNA, 538 bp, Homo sapiens
  source 1..538: mol_type = unassigned DNA
atagttcctttgctctgagagtgagcgacagtattagaaaaagtgtgtggtaggcacctccgctgagcttttaaaccaagtcattgggacttagcgtctttctacccggcagggaagggaggagttggcaagaatttggctcacccattccccctgcaagcctccagcgtcgcggagcactagacatctactatgactgacaccgtgttcagcaacagttctaaccgttggatgtaccccagtgaccggccccttcaatcaaatgataaagaacagctccaggcaggctggtccgtccaccccggtggtcagcctgacaggcagaggaagcaggaagagctgactgatgaggagaaagaaatcatcaacagggtgattgctcgagctgagaaaatggaagagatggagcaggagcgaatcggacgcctggtggaccgcctagaaaacatgaggaagaacgtggctggagatggggtgaaccgctgcatactgtgtggagaacagctggggatgctgggctctgcctgtgtagtatgtg

SEQ ID NO: 18049 - DNA, 572 bp, Homo sapiens
  source 1..572: mol_type = unassigned DNA
aaggcatcttagcgctgtccgtggtgctgaccgccaatcccctggttgccgtttcgaccagctgggatctctggcacctccgctgagcttttaaaccaagtcattgggacttagcgtctttctacccggcagggaagggaggagttggcaagaatttggctcacccattccccctgcaagcctccagcgtcgcggagcactagacatctactatgactgacaccgtgttcagcaacagttctaaccgttggatgtaccccagtgaccggccccttcaatcaaatgataaagaacagctccaggcaggctggtccgtccaccccggtggtcagcctgacaggcagaggaagcaggaagagctgactgatgaggagaaagaaatcatcaacagggtgattgctcgagctgagaaaatggaagagatggagcaggagcgaatcggacgcctggtggaccgcctagaaaacatgaggaagaacgtggctggagatggggtgaaccgctgcatactgtgtggagaacagctggggatgctgggctctgcctgtgtagtatgtgaggactgtaagaag

SEQ ID NO: 18050 - DNA, 4679 bp, Homo sapiens
  source 1..4679: mol_type = unassigned DNA
ggcaccgcacacataaatcacgggtgggaggcaggcttggttcccgcttggttccccctgcactgggaagctgccgccccgcttcccttgctcacacagggctttgcagtagtggtggcagccgcggcagaaactggctctggggaagcaattgattcgtctactgccagcagcccggagttgcctacgcggactggaaaggaagggagaagggagagagagagagagagagagagagagagagagagagactcacagagctaaaaccttcatccatgtggaggacagtctgagggagccactgtcccttgtccactgactcactggctggtccgagttttctccgcttctggcagtggcacctccgctgagcttttaaaccaagtcattgggacttagcgtctttctacccggcagggaagggaggagttggcaagaatttggctcacccattccccctgcaagcctccagcgtcgcggagcactagacatctactatgactgacaccgtgttcagcaacagttctaaccgttggatgtaccccagtgaccggccccttcaatcaaatgataaagaacagctccaggcaggctggtccgtccaccccggtggtcagcctgacaggcagaggaagcaggaagagctgactgatgaggagaaagaaatcatcaacagggtgattgctcgagctgagaaaatggaagagatggagcaggagcgaatcggacgcctggtggaccgcctagaaaacatgaggaagaacgtggctggagatggggtgaaccgctgcatactgtgtggagaacagctggggatgctgggctctgcctgtgtagtatgtgaggactgtaagaagaacgtctgcaccaagtgcggagtggagaccaacaaccgcctgcattctgtgtggctctgcaaaatctgcattgagcagagggaggtgtggaagcgttctggagcgtggttcttcaaaggcttccccaaacaggtcctcccacagcctatgcctataaagaagaccaagccccagcagcctgtcagtgagcctgctgcccctgaacagcctgctcctgagcccaagcaccctgcccgggctccagctcgaggtgacagtgaagataggaggggcccgggtcagaagacaggccctgacccagcctctgctcccgggcgaggaaactatgggcctcccgtgcgcagggcctccgaggcacgaatgagctcatctagccgagattcagagagctgggaccacagtgggggtgctggagactccagccggagcccagcaggtttgagacgggccaactcagtccaggcctccagacctgccccaggctcggtgcagagcccagcgccacctcagcctgggcagccagggaccccaggaggaagcagaccgggtcctgggccagcaggacgctttccagatcagaagccagaggtggctccgagcgaccctgggaccactgccccaccccgagaggagagaacagggggagtcgggggctacccagcagttggagccagagaggaccgaatgagccacccctccggaccctattcccaagcatctgcagctgccccccagcctgctgcagcccgccagccaccacccccagaggaggaggaagaggaagccaacagctacgattcggatgaagcaaccaccctgggtgccctggaattcagccttctctacgaccaggacaacagctccctgcagtgcaccatcattaaggccaagggcctgaagcccatggattcaaacggcttggctgatccctacgttaagctgcacctcctgccgggagccagcaagtccaacaagcttcgtacaaaaactctgcggaatacccggaaccccatctggaatgagaccctcgtgtatcacggcatcaccgatgaggacatgcaaaggaagaccctcaggatctccgtctgtgatgaggacaaatttggccacaatgaatttattggtgagaccagattctccctcaagaaactgaagcccaaccagaggaagaatttcaacatctgcctggagcgagtgattcctatgaaacgtgctgggaccaccgggtcagcccgaggcatggccctttatgaggaagagcaggtggagcgtgttggtgacatcgaggagcgtggcaagatcctggtctccctcatgtacagcacacagcagggaggcctcattgtgggcatcatacgctgcgtgcacctggctgccatggacgctaatggctactcagacccattcgtcaagctctggctgaaaccggacatgggaaagaaggccaaacacaagactcaaattaaaaagaaaaccttgaatcccgaattcaatgaggagtttttctatgacatcaaacacagtgacctggcaaagaagtcactggacatttcagtctgggactatgacatcggcaagtccaatgattacatcggaggctgccagctggggatctctgccaagggagagcgcttaaaacactggtacgagtgtctgaaaaataaagacaagaagatagagcgctggcaccagctacagaatgagaaccacgtgtcaagtgattaggctagtgcccaggtccccatctccatgtcccgggtcccccccagcctgctctagctgcccaccgcaccctgatctctcttctctatgcctacctccccccataccctgctgatctccctgagcctgcctttgagcccccgtcacgttgggcactgctgccaaagactccctcctccctgatgctgggatgtgggctctgaatacagcccctctctcatccctgggatggagcaatggggatggggttggggagacgtttacaaagaggttgatcatttaataacctctcagtttgggtaaattacaaaggttcttcatcatttaggactgtttttagaccctcctagccttgaacacacacatgtacacacacacacacacacacacacacacaccctttcattccctgtgttgtgtctctgtatatccccagttgtcagcagacccggacaatgctgtgagagaagcattggggcacaaatagagcctccgggctcccactgccccctgagatgtacaccctgattgccaggaaaacagactgctgtgttcagtaacacaccctccctgctccaagtgcaccaggatgcaaatgcacagaattcaccaggggcttggacgctctcctctttccgaatgtcacctgtgtgcttcctagcaaaacaaaaacaaacgacaacaacaaaaaacccttcctctgtcaccttttctcctcctccctcttctttcccttccatgatagtagattctctctttctcagcctctcccctctcctttctctccctgcctttcttccctttgcctttctctctctctaaagcagtaacaccgcaaaaacaacagcaaaaaaagtgtatgttaacctagcctcacccccttgctctcaccagcctgaccaggaaactgagaaactggcccaaacctgagattccacttgggcccacgcttcttaactgacccactcctcccgttggcagaaccagacattcccagggcttgggccaatggctggcactgccctgagtgcatggcagcatccctcaagctgtgtagatgccccatagaggactctctcatccgtgggctccccgggtgggcacggaggcatttagaagaccagggccatgggtctgaggaagcctcagccaaagcctccagcctttctcctttctccgctcttaggtaaatgaacaagctaccctcctccccaatgcccttgactctgtttcattgactcttttgcatcccatctctcactcagaaccccctccagtctctctgtctctctttgtctgtctctctgtctcctgcactctcgttactaagcttcctgggagaatcaaataatatcatggctatggaacagtagagagagacaggcctgatgccaaaggctttgggctcatcatcaatctttcactttcttcctataaaaaaaattattttataaaggaggaaaaggcaatgtgggcaaacattacaaatttgaggttgaagtcaggcaatcttcaatgccctgtgagaaaggttcgattttcccaattttgatgaagtcttccctcatgaaaatcactcccagtcatcccaaacccctgacattctctacagaagcatcagacagatactcaaactctcactttccccaaatcacatctcttaacttttcaacgccctccaccctcagctccctgcacaattcatgggaggactcatttcttgccttgaataaccattttctaaacatcgagctcttcaccttccccaaggtggccaacagcttcctggctgccatctttccttttgaccttatctttccccattagtccctggtggcacctactctcagcccacctccctcaccacagtttccccttaggagacagcatgctggctgtgtcgcccaagcctgatgctggtgtaggcgctggaatcagcatgcagcaagctcacagtgcccctagtctgggtgcccgctgtccccgacaaatgtaaccacctccctgcctagaatacacacacgtcctccggtgcatgcacaaccacccagcatctttctttgtgatgatgtagccaaaaataaagtaggagcatccaag

SEQ ID NO: 18051 - DNA, 595 bp, Homo sapiens
  source 1..595: mol_type = unassigned DNA
agagctaaaaccttcatccatgtggaggacagtctgagggagccactgtcccttgtccactgactcactggctggtccgagttttctccgcttctggcagtggcacctccgctgagcttttaaaccaagtcattgggacttagcgtctttctacccggcagggaagggaggagttggcaagaatttggctcacccattccccctgcaagcctccagcgtcgcgtgataaagaacagctccaggcaggctggtccgtccaccccggtggtcagcctgacaggcagaggaagcaggaagagctgactgatgaggagaaagaaatcatcaacagggtgattgctcgagctgagaaaatggaagagatggagcaggagcgaatcggacgcctggtggaccgcctagaaaacatgaggaagaacgtggctggagatggggtgaaccgctgcatactgtgtggagaacagctggggatgctgggctctgcctgtgtagtatgtgaggactgtaagaagaacgtctgcaccaagtgcggagtggagaccaacaaccgcctgcattctgtgtggctctgcaaaatctgcattgagcagaggga

SEQ ID NO: 18052 - DNA, 579 bp, Homo sapiens
  source 1..579: mol_type = unassigned DNA
cttcatccatgtggaggacagtctgagggagccactgtcccttgtccactgactcactggctggcacctccgctgagcttttaaaccaagtcattgggacttagcgtctttctacccggcagggaagggaggagttggcaagaatttggctcacccattccccctgcaagcctccagcgtcgcggagcactagacatctactatgactgacaccgtgttcagcaacagttctaaccgttggatgtaccccagtgaccggccccttcaatcaaatgataaagaacagctccaggcaggctggtccgtccaccccggtggtcagcctgacaggcagaggaagcaggaagagctgactgatgaggagaaagaaatcatcaacagggtgattgctcgagctgagaaaatggaagagatggagcaggagcgaatcggacgcctggtggaccgcctagaaaacatgaggaagaacgtggctggagatggggtgaaccgctgcatactgtgtggagaacagctggggatgctgggctctgcctgtgtagtatgtgaggactgtaagaagaacgtctgcaccaagtg

SEQ ID NO: 18053 - DNA, 2961 bp, Homo sapiens
  source 1..2961: mol_type = unassigned DNA
ggacagtctgagggagccactgtcccttgtccactgactcactggctggtccgagttttctccgcttctggcagtggcacctccgctgagcttttaaaccaagtcattgggacttagcgtctttctacccggcagggaagggaggagttggcaagaatttggctcacccattccccctgcaagcctccagcgtcgcggagcactagacatctactatgactgacaccgtgttcagcaacagttctaaccgttggatgtaccccagtgaccggccccttcaatcaaagctccaggcaggctggtccgtccaccccggtggtcagcctgacaggcagaggaagcaggaagagctgactgatgaggagaaagaaatcatcaacagggtgattgctcgagctgagaaaatggaagagatggagcaggagcgaatcggacgcctggtggaccgcctagaaaacatgaggaagaacgtggctggagatggggtgaaccgctgcatactgtgtggagaacagctggggatgctgggctctgcctgtgtagtatgtgaggactgtaagaagaacgtctgcaccaagtgcggagtggagaccaacaaccgcctgcattctgtgtggctctgcaaaatctgcattgagcagagggaggtgtggaagcgttctggagcgtggttcttcaaaggcttccccaaacaggtcctcccacagcctatgcctataaagaagaccaagccccagcagcctgtcagtgagcctgctgcccctgaacagcctgctcctgagcccaagcaccctgcccgggctccagctcgaggtgacagtgaagataggaggggcccgggtcagaagacaggccctgacccagcctctgctcccgggcgaggaaactatgggcctcccgtgcgcagggcctccgaggcacgaatgagctcatctagccgagattcagagagctgggaccacagtgggggtgctggagactccagccggagcccagcaggtttgagacgggccaactcagtccaggcctccagacctgccccaggctcggtgcagagcccagcgccacctcagcctgggcagccagggaccccaggaggaagcagaccgggtcctgggccagcaggacgctttccagatcagaagccagaggtggctccgagcgaccctgggaccactgccccaccccgagaggagagaacagggggagtcgggggctacccagcagttggagccagagaggaccgaatgagccacccctccggaccctattcccaagcatctgcagctgccccccagcctgctgcagcccgccagccaccacccccagaggaggaggaagaggaagccaacagctacgattcggatgaagcaaccaccctgggtgccctggaattcagccttctctacgaccaggacaacagctccctgcagtgcaccatcattaaggccaagggcctgaagcccatggattcaaacggcttggctgatccctacgttaagctgcacctcctgccgggagccagcaagtccaacaagcttcgtacaaaaactctgcggaatacccggaaccccatctggaatgagaccctcgtgtatcacggcatcaccgatgaggacatgcaaaggaagaccctcaggatctccgtctgtgatgaggacaaatttggccacaatgaatttattggtgagaccagattctccctcaagaaactgaagcccaaccagaggaagaatttcaacatctgcctggagcgagtgattcctatgaaacgtgctgggaccaccgggtcagcccgaggcatggccctttatgaggaagagcaggtggagcgtgttggtgacatcgaggagcgtggcaagatcctggtctccctcatgtacagcacacagcagggaggcctcattgtgggcatcatacgctgcgtgcacctggctgccatggacgctaatggctactcagacccattcgtcaagctctggctgaaaccggacatgggaaagaaggccaaacacaagactcaaattaaaaagaaaaccttgaatcccgaattcaatgaggagtttttctatgacatcaaacacagtgacctggcaaagaagtcactggacatttcagtctgggactatgacatcggcaagtccaatgattacatcggaggctgccagctggggatctctgccaagggagagcgcttaaaacactggtacgagtgtctgaaaaataaagacaagaagatagagcgctggcaccagctacagaatgagaaccacgtgtcaagtgattaggctagtgcccaggtccccatctccatgtcccgggtcccccccagcctgctctagctgcccaccgcaccctgatctctcttctctatgcctacctccccccataccctgctgatctccctgagcctgcctttgagcccccgtcacgttgggcactgctgccaaagactccctcctccctgatgctgggatgtgggctctgaatacagcccctctctcatccctgggatggagcaatggggatggggttggggagacgtttacaaagaggttgatcatttaataacctctcagtttgggtaaattacaaaggttcttcatcatttaggactgtttttagaccctcctagccttgaacacacacatgtacacacacacacacacacacacacacacaccctttcattccctgtgttgtgtctctgtatatccccagttgtcagcagacccggacaatgctgtgagagaagcattggggcacaaatagagcctccgggctcccactgccccctgagatgtacaccctgattgccaggaaaacagactgctgtgttcagtaacacaccctccctgctccaagtgcaccaggatgcaaatgcacagaattcaccaggggcttggacgctctcctctttccgaatgtcacctgtgtgcttcctagcaaaacaaaaacaaa

SEQ ID NO: 18054 - DNA, 4452 bp, Homo sapiens
  source 1..4452: mol_type = unassigned DNA
tttctttttgtcttggtcctgcatgatttaggggtagttgatgtgtctgtgtgtctacgtgtgtgcactggtgctttgattttattttgggaagagtaggagagtcaaatgaacaattttctttcaggcacctccgctgagcttttaaaccaagtcattgggacttagcgtctttctacccggcagggaagggaggagttggcaagaatttggctcacccattccccctgcaagcctccagcgtcgcggagcactagacatctactatgactgacaccgtgttcagcaacagttctaaccgttggatgtaccccagtgaccggccccttcaatcaaatgataaagaacagctccaggcaggctggtccgtccaccccggtggtcagcctgacaggcagaggaagcaggaagagctgactgatgaggagaaagaaatcatcaacagggtgattgctcgagctgagaaaatggaagagatggagcaggagcgaatcggacgcctggtggaccgcctagaaaacatgaggaagaacgtggctggagatggggtgaaccgctgcatactgtgtggagaacagctggggatgctgggctctgcctgtgtagtatgtgaggactgtaagaagaacgtctgcaccaagtgcggagtggagaccaacaaccgcctgcattctgtgtggctctgcaaaatctgcattgagcagagggaggtgtggaagcgttctggagcgtggttcttcaaaggcttccccaaacaggtcctcccacagcctatgcctataaagaagaccaagccccagcagcctgtcagtgagcctgctgcccctgaacagcctgctcctgagcccaagcaccctgcccgggctccagctcgaggtgacagtgaagataggaggggcccgggtcagaagacaggccctgacccagcctctgctcccgggcgaggaaactatgggcctcccgtgcgcagggcctccgaggcacgaatgagctcatctagccgagattcagagagctgggaccacagtgggggtgctggagactccagccggagcccagcaggtttgagacgggccaactcagtccaggcctccagacctgccccaggctcggtgcagagcccagcgccacctcagcctgggcagccagggaccccaggaggaagcagaccgggtcctgggccagcaggacgctttccagatcagaagccagaggtggctccgagcgaccctgggaccactgccccaccccgagaggagagaacagggggagtcgggggctacccagcagttggagccagagaggaccgaatgagccacccctccggaccctattcccaagcatctgcagctgccccccagcctgctgcagcccgccagccaccacccccagaggaggaggaagaggaagccaacagctacgattcggatgaagcaaccaccctgggtgccctggaattcagccttctctacgaccaggacaacagctccctgcagtgcaccatcattaaggccaagggcctgaagcccatggattcaaacggcttggctgatccctacgttaagctgcacctcctgccgggagccagcaagtccaacaagcttcgtacaaaaactctgcggaatacccggaaccccatctggaatgagaccctcgtgtatcacggcatcaccgatgaggacatgcaaaggaagaccctcaggatctccgtctgtgatgaggacaaatttggccacaatgaatttattggtgagaccagattctccctcaagaaactgaagcccaaccagaggaagaatttcaacatctgcctggagcgagtgattcctatgaaacgtgctgggaccaccgggtcagcccgaggcatggccctttatgaggaagagcaggtggagcgtgttggtgacatcgaggagcgtggcaagatcctggtctccctcatgtacagcacacagcagggaggcctcattgtgggcatcatacgctgcgtgcacctggctgccatggacgctaatggctactcagacccattcgtcaagctctggctgaaaccggacatgggaaagaaggccaaacacaagactcaaattaaaaagaaaaccttgaatcccgaattcaatgaggagtttttctatgacatcaaacacagtgacctggcaaagaagtcactggacatttcagtctgggactatgacatcggcaagtccaatgattacatcggaggctgccagctggggatctctgccaagggagagcgcttaaaacactggtacgagtgtctgaaaaataaagacaagaagatagagcgctggcaccagctacagaatgagaaccacgtgtcaagtgattaggctagtgcccaggtccccatctccatgtcccgggtcccccccagcctgctctagctgcccaccgcaccctgatctctcttctctatgcctacctccccccataccctgctgatctccctgagcctgcctttgagcccccgtcacgttgggcactgctgccaaagactccctcctccctgatgctgggatgtgggctctgaatacagcccctctctcatccctgggatggagcaatggggatggggttggggagacgtttacaaagaggttgatcatttaataacctctcagtttgggtaaattacaaaggttcttcatcatttaggactgtttttagaccctcctagccttgaacacacacatgtacacacacacacacacacacacacacacaccctttcattccctgtgttgtgtctctgtatatccccagttgtcagcagacccggacaatgctgtgagagaagcattggggcacaaatagagcctccgggctcccactgccccctgagatgtacaccctgattgccaggaaaacagactgctgtgttcagtaacacaccctccctgctccaagtgcaccaggatgcaaatgcacagaattcaccaggggcttggacgctctcctctttccgaatgtcacctgtgtgcttcctagcaaaacaaaaacaaacgacaacaacaaaaaacccttcctctgtcaccttttctcctcctccctcttctttcccttccatgatagtagattctctctttctcagcctctcccctctcctttctctccctgcctttcttccctttgcctttctctctctctaaagcagtaacaccgcaaaaacaacagcaaaaaaagtgtatgttaacctagcctcacccccttgctctcaccagcctgaccaggaaactgagaaactggcccaaacctgagattccacttgggcccacgcttcttaactgacccactcctcccgttggcagaaccagacattcccagggcttgggccaatggctggcactgccctgagtgcatggcagcatccctcaagctgtgtagatgccccatagaggactctctcatccgtgggctccccgggtgggcacggaggcatttagaagaccagggccatgggtctgaggaagcctcagccaaagcctccagcctttctcctttctccgctcttaggtaaatgaacaagctaccctcctccccaatgcccttgactctgtttcattgactcttttgcatcccatctctcactcagaaccccctccagtctctctgtctctctttgtctgtctctctgtctcctgcactctcgttactaagcttcctgggagaatcaaataatatcatggctatggaacagtagagagagacaggcctgatgccaaaggctttgggctcatcatcaatctttcactttcttcctataaaaaaaattattttataaaggaggaaaaggcaatgtgggcaaacattacaaatttgaggttgaagtcaggcaatcttcaatgccctgtgagaaaggttcgattttcccaattttgatgaagtcttccctcatgaaaatcactcccagtcatcccaaacccctgacattctctacagaagcatcagacagatactcaaactctcactttccccaaatcacatctcttaacttttcaacgccctccaccctcagctccctgcacaattcatgggaggactcatttcttgccttgaataaccattttctaaacatcgagctcttcaccttccccaaggtggccaacagcttcctggctgccatctttccttttgaccttatctttccccattagtccctggtggcacctactctcagcccacctccctcaccacagtttccccttaggagacagcatgctggctgtgtcgcccaagcctgatgctggtgtaggcgctggaatcagcatgcagcaagctcacagtgcccctagtctgggtgcccgctgtccccgacaaatgtaaccacctccctgcctagaatacacacacgtcctccggtgcatgcacaaccacccagcatctttctttgtgatgatgtagccaaaaataaagtaggagcatccaagaaaa

SEQ ID NO: 18055 - DNA, 548 bp, Homo sapiens
  source 1..548: mol_type = unassigned DNA
aattttctttcaggcacctccgctgagcttttaaaccaagtcattgggacttagcgtctttctacccggcagggaagggaggagttggcaagaatttggctcacccattccccctgcaagcctccagcgtcgcggagcactagacatctactatgactgacaccgtgttcagcaacagttctaaccgttggatgtaccccagtgaccggccccttcaatcaaaaacagctccaggcaggctggtccgtccaccccggtggtcagcctgacaggcagaggaagcaggaagagctgactgatgaggagaaagaaatcatcaacagggtgattgctcgagctgagaaaatggaagagatggagcaggagcgaatcggacgcctggtggaccgcctagaaaacatgaggaagaacgtggctggagatggggtgaaccgctgcatactgtgtggagaacagctggggatgctgggctctgcctgtgtagtatgtgaggactgtaagaaggtatcatcatcctcttctcccttcttccctgtgcagcacctgca

SEQ ID NO: 18056 - DNA, 562 bp, Homo sapiens
  source 1..562: mol_type = unassigned DNA
gtctttctacccggcagggaagggaggagttggcaagaatttggctcacccattccccctgcaagcctccagcgtcgcggggcaagaagaggagaagaggaagattgtggtccattcatgttctccagccaatactggccaaggagcactagacatctactatgactgacaccgtgttcagcaacagttctaaccgttggatgtaccccagtgaccggccccttcaatcaaatgataaagaacagctccaggcaggctggtccgtccaccccggtggtcagcctgacaggcagaggaagcaggaagagctgactgatgaggagaaagaaatcatcaacagggtgattgctcgagctgagaaaatggaagagatggagcaggagcgaatcggacgcctggtggaccgcctagaaaacatgaggaagaacgtggctggagatggggtgaaccgctgcatactgtgtggagaacagctggggatgctgggctctgcctgtgtagtatgtgaggactgtaagaagaacgtctgcaccaagtgcggagtggagaccaacaaccgcct

SEQ ID NO: 18057 - DNA, 2429 bp, Homo sapiens
  source 1..2429: mol_type = unassigned DNA
tttctacccggcagggaagggaggagttggcaagaatttggctcacccattccccctgcaagcctccagcgtcgcggagcactagacatctactatgactgacaccgtgttcagcaacagttctaaccgttggatgtaccccagtgaccggccccttcaatcaaatgataaagaacaacgcctggtggaccgcctagaaaacatgaggaagaacgtggctggagatggggtgaaccgctgcatactgtgtggagaacagctggggatgctgggctctgcctgtgtagtatgtgaggactgtaagaagaacgtctgcaccaagtgcggagtggagaccaacaaccgcctgcattctgtgtggctctgcaaaatctgcattgagcagagggaggtgtggaagcgttctggagcgtggttcttcaaaggcttccccaaacaggtcctcccacagcctatgcctataaagaagaccaagccccagcagcctgtcagtgagcctgctgcccctgaacagcctgctcctgagcccaagcaccctgcccgggctccagctcgaggtgacagtgaagataggaggggcccgggtcagaagacaggccctgacccagcctctgctcccgggcgaggaaactatgggcctcccgtgcgcagggcctccgaggcacgaatgagctcatctagccgagattcagagagctgggaccacagtgggggtgctggagactccagccggagcccagcaggtttgagacgggccaactcagtccaggcctccagacctgccccaggctcggtgcagagcccagcgccacctcagcctgggcagccagggaccccaggaggaagcagaccgggtcctgggccagcaggacgctttccagatcagaagccagaggtggctccgagcgaccctgggaccactgccccaccccgagaggagagaacagggggagtcgggggctacccagcagttggagccagagaggaccgaatgagccacccctccggaccctattcccaagcatctgcagctgccccccagcctgctgcagcccgccagccaccacccccagaggaggaggaagaggaagccaacagctacgattcggatgaagcaaccaccctgggtgccctggaattcagccttctctacgaccaggacaacagctccctgcagtgcaccatcattaaggccaagggcctgaagcccatggattcaaacggcttggctgatccctacgttaagctgcacctcctgccgggagccagcaagtccaacaagcttcgtacaaaaactctgcggaatacccggaaccccatctggaatgagaccctcgtgtatcacggcatcaccgatgaggacatgcaaaggaagaccctcaggatctccgtctgtgatgaggacaaatttggccacaatgaatttattggtgagaccagattctccctcaagaaactgaagcccaaccagaggaagaatttcaacatctgcctggagcgagtgattcctatgaaacgtgctgggaccaccgggtcagcccgaggcatggccctttatgaggaagagcaggtggagcgtgttggtgacatcgaggagcgtggcaagatcctggtctccctcatgtacagcacacagcagggaggcctcattgtgggcatcatacgctgcgtgcacctggctgccatggacgctaatggctactcagacccattcgtcaagctctggctgaaaccggacatgggaaagaaggccaaacacaagactcaaattaaaaagaaaaccttgaatcccgaattcaatgaggagtttttctatgacatcaaacacagtgacctggcaaagaagtcactggacatttcagtctgggactatgacatcggcaagtccaatgattacatcggaggctgccagctggggatctctgccaagggagagcgcttaaaacactggtacgagtgtctgaaaaataaagacaagaagatagagcgctggcaccagctacagaatgagaaccacgtgtcaagtgattaggctagtgcccaggtccccatctccatgtcccgggtcccccccagcctgctctagctgcccaccgcaccctgatctctcttctctatgcctacctccccccataccctgctgatctccctgagcctgcctttgagcccccgtcacgttgggcactgctgccaaagactccctcctccctgatgctgggatgtgggctctgaatacagcccctctctcatccctgggatggagcaatggggatggggttggggagacgtttacaaagaggttgatcatttaataacctctcagtttgggtaaattacaaaggttcttcatcatttaggactgtttttagaccctcctagccttgaacacacacatgtacacacacacacacacacacacacacacaccc

SEQ ID NO: 18058 - DNA, 547 bp, Homo sapiens
  source 1..547: mol_type = unassigned DNA
aagcctccagcgtcgcggagcactagacatctactatgactgacaccgtgttcagcaacagttctaaccgttggatgtaccccagtgaccggccccttcaatcaaagttgcagcattctaggtggactttgaaggattggttgtgctttcaagtgtctgttaagagtcttaagccaacaaattgcccttcctctgtagatggtttttccttccactgataaagaacagctccaggcaggctggtccgtccaccccggtggtcagcctgacaggcagaggaagcaggaagagctgactgatgaggagaaagaaatcatcaacagggtgattgctcgagctgagaaaatggaagagatggagcaggagcgaatcggacgcctggtggaccgcctagaaaacatgaggaagaacgtggctggagatggggtgaaccgctgcatactgtgtggagaacagctggggatgctgggctctgcctgtgtagtatgtgaggactgtaagaagaacgtctgcaccaagtgcggagtggagaccaacaaccgcctgc

SEQ ID NO: 18059 - DNA, 569 bp, Homo sapiens
  source 1..569: mol_type = unassigned DNA
actgcagaacatgaggatctcagttagtgagctcttgggacctcagttccccacccatcaaatgactcagtctctttctcaagattcttcctgctcagaatctacagtattttgggggtgtctgacgcctggtggaccgcctagaaaacatgaggaagaacgtggctggagatggggtgaaccgctgcatactgtgtggagaacagctggggatgctgggctctgcctgtgtagtatgtgaggactgtaagaagaacgtctgcaccaagtgcggagtggagaccaacaaccgcctgcattctgtgtggctctgcaaaatctgcattgagcagagggaggtgtggaagcgttctggagcgtggttcttcaaaggcttccccaaacaggtcctcccacagcctatgcctataaagaagaccaagccccagcagcctgtcagtgagcctgctgcccctgaacagcctgctcctgagcccaagcaccctgcccgggctccagctcgaggtgacagtgaagataggaggggcccgggtcagaagacaggccctgacccagcctctgctcccggg

SEQ ID NO: 18060 - DNA, 5188 bp, Homo sapiens
  source 1..5188: mol_type = unassigned DNA
gctgtgtactattggaccagtccttaagattttggatattcccctttctccatccaaactccactttcttcatgggtaaactgaagccctttctactgagttttcagggtggatgggctgaataaatatgaattgtgcagggctctgtagtaataataaaagtgtgctggctattgtgtcagtgtgctttggatgaggaggaaagataaaaatgggcactcatgaaggtaagagcaacagcgcttggctgccacatcttcaatccctgtctctcctccccaaggtgtggaagcgttctggagcgtggttcttcaaaggcttccccaaacaggtcctcccacagcctatgcctataaagaagaccaagccccagcagcctgtcagtgagcctgctgcccctgaacagcctgctcctgagcccaagcaccctgcccgggctccagctcgaggtaggacaaaacaggtgcttctttcaggaccaaggacagatcttagccaactggtctacctgagggatggcctgacatcatgtctgtgtttccacccagttgttgcatggtcagcttctgcacttgggtctaggactcctatatctccttcagagttcaccataaatcgttaccaagagggtagcacagggaactctccagcaatgccaagccgcccagaggcttcattgtcatccctggtggcatatctagtgtacaagaggtggaaattaaaattaggaactgagagagactttcaccaccaagatcacactggagcctgggagaatactcggcttgctgagaaggccttcctggaccctgttatttctcctactatccataagcaagtctgatttggactaattaaaagtgaaagatgaatagaaggaaatcagtaaaagaaaattactgctactaaattgctactattgacattatcactattatccaagtattatgattaattattaaaatgattaagagggagaagcaaaacagtaaaaattttaaaaagcaaccatagtaaaaatacattttagttggactagaccactaggactgaccagataaagcccttgcaataatttcaattgatgctaagtgataaaatctggactaaatgacaattccagattgagtgcaggcggtacttctgaaaggaagggtacagcgtttttcataagataacttatcaaggcacttagcacaatgcctgccacctaagaggcattcaacaaatgttttcttcctgacaaggcaagagcaatttctactccttgcagagaatcaccaaattgccaacatatattgcatccctgaggagtccccagttttcaccactaaaatactccttcttcctagttcttctaggctgagaaggctgtatagcataattgttctttataaagcctgtgtatgctcatatgtgtttgtgcatgcaaaaaaaaatgtgaaattgtaaacaggagctagatcaaagaggaggttgggagaaagacttttaatttttaaaacatattcttaggcaatagtcaatgaacccctttgtaggcttcttaagtaccggttttccagacaccagaaaaccagtactcctcataatttgtgttttctttctccaggtgacagtgaagataggaggggcccgggtcagaagacaggccctgacccagcctctgctcccgggcgaggaaactatgggcctcccgtgcgcagggcctccgaggcacgaatgagctcatctagccgagattcagagagctgggaccacagtgggggtgctggagactccagccggagcccagcaggtttgagacgggccaactcagtccaggcctccagacctgccccaggctcggtgcagagcccagcgccacctcagcctgggcagccagggaccccaggaggaagcagaccgggtcctgggccagcaggacgctttccagatcagaagccagaggtggctccgagcgaccctgggaccactgccccaccccgagaggagagaacagggggagtcgggggctacccagcagttggagccagagaggaccgaatgagccacccctccggaccctattcccaagcatctgcagctgccccccagcctgctgcagcccgccagccaccacccccagaggaggaggaagaggaagccaacagctacgattcggatgaagcaaccaccctgggtgccctggaattcagccttctctacgaccaggacaacagctccctgcagtgcaccatcattaaggccaagggcctgaagcccatggattcaaacggcttggctgatccctacgttaagctgcacctcctgccgggagccagcaagtccaacaagcttcgtacaaaaactctgcggaatacccggaaccccatctggaatgagaccctcgtgtatcacggcatcaccgatgaggacatgcaaaggaagaccctcaggatctccgtctgtgatgaggacaaatttggccacaatgaatttattggtgagaccagattctccctcaagaaactgaagcccaaccagaggaagaatttcaacatctgcctggagcgagtgattcctatgaaacgtgctgggaccaccgggtcagcccgaggcatggccctttatgaggaagagcaggtggagcgtgttggtgacatcgaggagcgtggcaagatcctggtctccctcatgtacagcacacagcagggaggcctcattgtgggcatcatacgctgcgtgcacctggctgccatggacgctaatggctactcagacccattcgtcaagctctggctgaaaccggacatgggaaagaaggccaaacacaagactcaaattaaaaagaaaaccttgaatcccgaattcaatgaggagtttttctatgacatcaaacacagtgacctggcaaagaagtcactggacatttcagtctgggactatgacatcggcaagtccaatgattacatcggaggctgccagctggggatctctgccaagggagagcgcttaaaacactggtacgagtgtctgaaaaataaagacaagaagatagagcgctggcaccagctacagaatgagaaccacgtgtcaagtgattaggctagtgcccaggtccccatctccatgtcccgggtcccccccagcctgctctagctgcccaccgcaccctgatctctcttctctatgcctacctccccccataccctgctgatctccctgagcctgcctttgagcccccgtcacgttgggcactgctgccaaagactccctcctccctgatgctgggatgtgggctctgaatacagcccctctctcatccctgggatggagcaatggggatggggttggggagacgtttacaaagaggttgatcatttaataacctctcagtttgggtaaattacaaaggttcttcatcatttaggactgtttttagaccctcctagccttgaacacacacatgtacacacacacacacacacacacacacacaccctttcattccctgtgttgtgtctctgtatatccccagttgtcagcagacccggacaatgctgtgagagaagcattggggcacaaatagagcctccgggctcccactgccccctgagatgtacaccctgattgccaggaaaacagactgctgtgttcagtaacacaccctccctgctccaagtgcaccaggatgcaaatgcacagaattcaccaggggcttggacgctctcctctttccgaatgtcacctgtgtgcttcctagcaaaacaaaaacaaacgacaacaacaaaaaacccttcctctgtcaccttttctcctcctccctcttctttcccttccatgatagtagattctctctttctcagcctctcccctctcctttctctccctgcctttcttccctttgcctttctctctctctaaagcagtaacaccgcaaaaacaacagcaaaaaaagtgtatgttaacctagcctcacccccttgctctcaccagcctgaccaggaaactgagaaactggcccaaacctgagattccacttgggcccacgcttcttaactgacccactcctcccgttggcagaaccagacattcccagggcttgggccaatggctggcactgccctgagtgcatggcagcatccctcaagctgtgtagatgccccatagaggactctctcatccgtgggctccccgggtgggcacggaggcatttagaagaccagggccatgggtctgaggaagcctcagccaaagcctccagcctttctcctttctccgctcttaggtaaatgaacaagctaccctcctccccaatgcccttgactctgtttcattgactcttttgcatcccatctctcactcagaaccccctccagtctctctgtctctctttgtctgtctctctgtctcctgcactctcgttactaagcttcctgggagaatcaaataatatcatggctatggaacagtagagagagacaggcctgatgccaaaggctttgggctcatcatcaatctttcactttcttcctataaaaaaaattattttataaaggaggaaaaggcaatgtgggcaaacattacaaatttgaggttgaagtcaggcaatcttcaatgccctgtgagaaaggttcgattttcccaattttgatgaagtcttccctcatgaaaatcactcccagtcatcccaaacccctgacattctctacagaagcatcagacagatactcaaactctcactttccccaaatcacatctcttaacttttcaacgccctccaccctcagctccctgcacaattcatgggaggactcatttcttgccttgaataaccattttctaaacatcgagctcttcaccttccccaaggtggccaacagcttcctggctgccatctttccttttgaccttatctttccccattagtccctggtggcacctactctcagcccacctccctcaccacagtttccccttaggagacagcatgctggctgtgtcgcccaagcctgatgctggtgtaggcgctggaatcagcatgcagcaagctcacagtgcccctagtctgggtgcccgctgtccccgacaaatgtaaccacctccctgcctagaatacacacacgtcctccggtgcatgcacaaccacccagcatctttctttgtgatgatgtagccaaaaataaagtaggagcatccaagaaaa

SEQ ID NO: 18061 - DNA, 1043 bp, Homo sapiens
  source 1..1043: mol_type = unassigned DNA
gtgcactcctggaggatataagatggtgttttgttcatcttagcacagggattggcacttggtagacacccactggatgcttgttgaatgaacaaatgaatgaatggacaaatgaacagggcctcaagtgaacaaacaaatggcagtgctaatgtgggaacctgggacaagacttggtgatttgtaagcccccaggcagaggtggtaaagcaccttttgttatgtgtattcaagcatccatccagccaaaagtgctggattcaggaaagatggcatctagcccagtgaggtgaggaaactgaggcccagagaggacaggtcacttgagcaacgtcacacaggtggaaggaggattgtagaacctgtgctttttaacaactgctgctgctgtgactcaccagagtctgagtattgagaagaaagaacacactgaaggcagaagagtcagaaagagctgagcgagtttgagacgggccaactcagtccaggcctccagacctgccccaggctcggtgcagagcccagcgccacctcagcctgggcagccagggaccccaggaggaagcagaccgggtcctgggccagcaggacgctttccagatcagaagccagaggtggctccgagcgaccctgggaccactgccccaccccgagaggagagaacagggggagtcgggggctacccagcagttggagccagagaggaccgaatgagccacccctccggaccctattcccaagcatctgcagctgccccccagcctgctgcagcccgccagccaccacccccagaggaggaggaagaggaagccaacagctacgattcggatgaagcaaccaccctgggtgccctggaattcagccttctctacgaccaggacaacagctccctgcagtgcaccatcattaaggccaagggcctgaagcccatggattcaaacggcttggctgatccctacgttaagctgcacctcctgccgggagccagcaagtccaacaagcttcgtacaaaaactctgcggaatacccggaaccccatctgg

SEQ ID NO: 18062 - DNA, 568 bp, Homo sapiens
  source 1..568: mol_type = unassigned DNA
tatcacggcatcaccgatgaggacatgcaaaggaagaccctcaggatctccgtctgtgatgaggacaaatttggccacaatgaatttattggtgagaccagattctccctcaagaaactgaagcccaaccagaggaagaatttcaacatctgcctggagcgagtgattcctatgaaacgtgctgggaccaccgggtcagcccgaggcatggccctttatgaggaagagcaggtggagcgtgttggtgacatcgaggagcgtggcaagatcctggtctccctcatgtacagcacacagcagggaggcctcattgtgggcatcatacgctgcgtgcacctggctgccatggacgctaatggctactcagacccattcgtcaagctgtaagtcaatgccttggggctacaggtgggccctgaaggagtcctggagccttggaaaaggagaaccagacagtttcaccaagatcgttgtacactgagacccagagagggcaaggaacctgcccaaggtcacagtgaaacaaatgcctacaactggcaagaatgtgggtctggagtctcaggca

SEQ ID NO: 18063 - DNA, 2535 bp, Homo sapiens
  source 1..2535: mol_type = unassigned DNA
gtccatggccaaagaacagatccatgtgggctgtctttcacatttcctttgaatgaagatttagttaacaaagaacacacaggtcagggacaagtttggtttctaagagtaatttgattttatttcctcgtatgacccaagagaggaaatgagctcaaggggtgctgtccagcactccattagaggtcagccatgtgcagattggttttcttaaataattctctctaccaccccctcccccacctacccaatccttccagaagaagtagaattgccgtggtcactactgaagcagctgacctgctgggtgcagttatgggagaaaaaatgggagaccactaagcagtttctgatcaaataaagattttttaaaagccagaacttcccattatttttgcttagctctttggtaacttctaattcctcatttttgtctcttcttaaaaattatcctcaaaaccacttctgtagatgagaatgaaatgttcgccctctttacaggtcaagaaacagaggcacggtaaagttacgctcatgtttaaagttgctccgctggtgacaacctgaatcagaatccaaatgtcccagcccttaggagtgtttagcccattgtgtttactcacccaggaaatattttgttttgtttggtttgtgttttgttctctctctcttttttaagagacagggtctcgctctattgcccaggctgtagtgcagtggtgtgatcatagctcactgcagcctcgaactctggggctcaagagatccttccacctcagcttcctgagtacctgggactgaaggcatacatcactgtgcccagataatttttgttattttttatagagacaggctctcgctatgttgcccaggccggtctggaactcctgggctcaagtgatcctcccgctttggcctcctaaagtgcagagattacaggcacgagccaccatacgcagcctcacccagaaaatattgattgagtacctactatgtgccagacactgggcctcactggaaaagagccctgtaggcagaagaaacagtttgctcaaaggcccttgggtggaaaggagaagtaaggagtggggtgaggaggatggcataaggttaggttgggatggagcagaaacccaacacacacggtcttaaggccacatgaaggattttgaactctcccctgagtttaaaaggaacccagtacacagttttgagaagtggagtgacaataatcagatttgcatcttcccctttctgtgcatacacccagcctctctctagggattgggggcagcctaaggtgggatagatggtaaaatgccaggcaccaccagccatggccatcaatttgacttatggggagaaagtgagcatgctaagaacacagactctagatgcaacatctggattcaatcccagctgtgtgagctagggcacacttctgcctctctggatctcagtttctgtttctgtaaactgagtggttgtggttctactgcctagggtcatgtggggattaaatatgcctaagttgctcagtcaagtgcctggtaccaagcagatgctctaatgcatattggtcattatcaatgttgatccctttctgatttattcatcaattcaccctgataaagaaggggcctttggggtcaagaggctgttcttattcattaaacgtcatccataatagcatgttgtgtcgcctcccagctggctgaaaccggacatgggaaagaaggccaaacacaagactcaaattaaaaagaaaaccttgaatcccgaattcaatgaggagtttttctatgacatcaaacacagtgacctggcaaagaagtcactggacatttcagtctgggactatgacatcggcaagtccaatgattacatcggaggctgccagctggggatctctgccaagggagagcgcttaaaacactggtacgagtgtctgaaaaataaagacaagaagatagagcgctggcaccagctacagaatgagaaccacgtgtcaagtgattaggctagtgcccaggtccccatctccatgtcccgggtcccccccagcctgctctagctgcccaccgcaccctgatctctcttctctatgcctacctccccccataccctgctgatctccctgagcctgcctttgagcccccgtcacgttgggcactgctgccaaagactccctcctccctgatgctgggatgtgggctctgaatacagcccctctctcatccctgggatggagcaatggggatggggttggggagacgtttacaaagaggttgatcatttaataacctctcagtttgggtaaattacaaaggttcttcatcatttaggactgtttttagaccctcctagccttgaacacacacatgtacacacacacacacacacacacacacacaccctttcattccctgtgttgtgtctctgtatatccccagttgtcagcagacccggacaatgctgtgagagaagcattggggcacaaatagagcctccgggctcccactgccccctgagatg

SEQ ID NO: 18064 - DNA, 2349 bp, Homo sapiens
  source 1..2349: mol_type = unassigned DNA
ttttattcctaagcaataaaaaaggggatgccccttcataaactaccagaggggaaggactatgttcatggccatttacctacaaggaaacttgagctctattagaaaaacctcaccagccttcccaatttcaagcagagaattcactgaaaagaggatgacagtgctttgttacacagagtgtttgttggaaggggatcacgggacctggggcagaggatcggcacgggaagacctccttgctcccagaatgccagctcaaggacctctccttggcccataacccctaggactcggcctcttacctcccaatgctgtgggttcagagggctcttacccacatgtcttcctctgttgtattcaggagtttttctatgacatcaaacacagtgacctggcaaagaagtcactggacatttcagtctgggactatgacatcggcaagtccaatgattacatcggaggctgccagctggggatctctgccaagggagagcgcttaaaacactggtacgagtgtctgaaaaataaagacaagaagatagagcgctggcaccagctacagaatgagaaccacgtgtcaagtgattaggctagtgcccaggtccccatctccatgtcccgggtcccccccagcctgctctagctgcccaccgcaccctgatctctcttctctatgcctacctccccccataccctgctgatctccctgagcctgcctttgagcccccgtcacgttgggcactgctgccaaagactccctcctccctgatgctgggatgtgggctctgaatacagcccctctctcatccctgggatggagcaatggggatggggttggggagacgtttacaaagaggttgatcatttaataacctctcagtttgggtaaattacaaaggttcttcatcatttaggactgtttttagaccctcctagccttgaacacacacatgtacacacacacacacacacacacacacacaccctttcattccctgtgttgtgtctctgtatatccccagttgtcagcagacccggacaatgctgtgagagaagcattggggcacaaatagagcctccgggctcccactgccccctgagatgtacaccctgattgccaggaaaacagactgctgtgttcagtaacacaccctccctgctccaagtgcaccaggatgcaaatgcacagaattcaccaggggcttggacgctctcctctttccgaatgtcacctgtgtgcttcctagcaaaacaaaaacaaacgacaacaacaaaaaacccttcctctgtcaccttttctcctcctccctcttctttcccttccatgatagtagattctctctttctcagcctctcccctctcctttctctccctgcctttcttccctttgcctttctctctctctaaagcagtaacaccgcaaaaacaacagcaaaaaaagtgtatgttaacctagcctcacccccttgctctcaccagcctgaccaggaaactgagaaactggcccaaacctgagattccacttgggcccacgcttcttaactgacccactcctcccgttggcagaaccagacattcccagggcttgggccaatggctggcactgccctgagtgcatggcagcatccctcaagctgtgtagatgccccatagaggactctctcatccgtgggctccccgggtgggcacggaggcatttagaagaccagggccatgggtctgaggaagcctcagccaaagcctccagcctttctcctttctccgctcttaggtaaatgaacaagctaccctcctccccaatgcccttgactctgtttcattgactcttttgcatcccatctctcactcagaaccccctccagtctctctgtctctctttgtctgtctctctgtctcctgcactctcgttactaagcttcctgggagaatcaaataatatcatggctatggaacagtagagagagacaggcctgatgccaaaggctttgggctcatcatcaatctttcactttcttcctataaaaaaaattattttataaaggaggaaaaggcaatgtgggcaaacattacaaatttgaggttgaagtcaggcaatcttcaatgccctgtgagaaaggttcgattttcccaattttgatgaagtcttccctcatgaaaatcactcccagtcatcccaaacccctgacattctctacagaagcatcagacagatactcaaactctcactttccccaaatcacatctcttaacttttcaacgccctccaccctcagctccctgcacaattcatgggaggactcatttcttgccttgaataaccattttctaaacatcgagctcttcac

SEQ ID NO: 18065 - DNA, 1656 bp, Homo sapiens
  source 1..1656: mol_type = unassigned DNA
ccgcttcggtcgctcctgaaatatacgtctgtcacagttaacggcaaagcctagggcaagagttctacgcccaagatggccagccggaagcgggcttctcgcgaccatgtggcgaagccccattcgtcagctggccgcccgcggccctggtacccggtcacctctctgatctgcgcatgtgctgggctacgcccgggcgcaagcgccaagagcggctgcgtctatggtcatgacgtctgacagagcgtccacccgtcttcgacaggactctatggttcttacgcgcgcagacagaccgcctatataagccatgcgcaggcggaggagcgcctctttcccttcggtgtgccactgaagatcctggtgtcgccatgggccgccgccccgcccgttgttaccggtattgtaagaacaagccgtacccaaagtctcgcttctgccgaggtgtccctgatgccaagattcgcatttttgacctggggcggaaaaaggcaaaagtggatgagtttccgctttgtggccacatggtgtcagatgaatatgagcagctgtcctctgaagccctggaggctgcccgaatttgtgccaataagtacatggtaaaaagttgtggcaaagatggcttccatatccgggtgcggctccaccccttccacgtcatccgcatcaacaagatgttgtcctgtgctggggctgacaggtgagcttggtctgggccttttaaggcagttggagtctctacattattaggcttgcattattttatcagagcatagaggtggccccagtgactcagccactatggctactagaaaagccaggctggcaagtgactttcagtggtcactcaggaccccttcctgcagatacaaacaaagcatgagtaagtcttagcaagctcttccccacaggttaggggaaacactggtgatgggagtagctcttcttgcttttagctgaatgacaaccatcttgccagcaggtagctgaagctggcagaggagcccagtggcgccttttcagtggttcttgggatgctccgcagccaattaagccgactgagttcctttcctcatggggacccagtgtgcgatggctgcacacagcagcttccttggtagtgtacgcagcctgttggttgtatgggttgctctaagggaccttggagacaggcctttcaggtggatgttcatgtttctgaccttgcactaccccaatgtaggctccaaacaggcatgcgaggtgcctttggaaagccccagggcactgtggccagggttcacattggccaagttatcatgtccatccgcaccaagctgcagaacaaggagcatgtgattgaggccctgcgcagggccaagttcaagtttcctggccgccagaaggtatgtagtgctgcagcccccttctcccacctttgccccaggcctcctgactcagttctttccattgctccttagatccacatctcaaagaagtggggcttcaccaagttcaatgctgatgaatttgaagacatggtggctgaaaagcggctcatcccagatggctgtggggtcaagtacatccccagtcgtggccctctggacaagtggcgggccctgcactcatgagggcttccaatgtgctgcccccctcttaatactcaccaataaa

SEQ ID NO: 18066 - DNA, 1284 bp, Homo sapiens
  source 1..1284: mol_type = unassigned DNA
gcaattcctgacttgtactgccccagtggtgttacagcctcgaacccagtttccagacctaagtcaccgccggcatccagagtcccatgatggaaagggaggctaggttcccctgggaaggaccttgcaccactgctgcaagtgcaccccagaaatcgtcccaagcttttctcaaagggacctgcagccatttataaaagcgacatatcatcctggaaaacagaaatatacgtctgtcacagttaacggcaaagcctagggcaagagttctacgcccaagatggccagccggaagcgggcttctcgcgaccatgtggcgaagccccattcgtcagctggccgcccgcggccctggtacccggtcacctctctgatctgcgcatgtgctgggctacgcccgggcgcaagcgccaagagcggctgcgtctatggtcatgacgtctgacagagcgtccacccgtcttcgacaggactctatggttcttacgcgcgcagacagaccgcctatataagccatgcgcaggcggaggagcgcctctttcccttcggtgtgccactgaagatcctggtgtcgccatgggccgccgccccgcccgttgttaccggtattgtaagaacaagccgtacccaaagtctcgcttctgccgaggtgtccctgatgccaagattcgcatttttgacctggggcggaaaaaggcaaaagtggatgagtttccgctttgtggccacatggtgtcagatgaatatgagcagctgtcctctgaagccctggaggctgcccgaatttgtgccaataagtacatggtaaaaagttgtggcaaagatggcttccatatccgggtgcggctccaccccttccacgtcatccgcatcaacaagatgttgtcctgtgctggggctgacaggctccaaacaggcatgcgaggtgcctttggaaagccccagggcactgtggccagggttcacattggccaagttatcatgtccatccgcaccaagctgcagaacaaggagcatgtgattgaggccctgcgcagggccaagttcaagtttcctggccgccagaagatccacatctcaaagaagtggggcttcaccaagttcaatgctgatgaatttgaagacatggtggctgaaaagcggctcatcccagatggctgtggggtcaagtacatccccagtcgtggccctctggacaagtggcgggccctgcactcatgagggcttccaatgtgctgcccccctcttaatactcaccaataaattctacttcctgtccaccta

SEQ ID NO: 18067 - DNA, 569 bp, Homo sapiens
  source 1..569: mol_type = unassigned DNA
agtctccgtggagatttctcctcgacctcttccccgcggcaatgtgcgaaccctgggtctccaggaaacggggatacggggcatggctcccagcaaggcctggtccagcctctccgaaatatacgtctgtcacagttaacggcaaagcctagggcaagagttctacgcccaagatggccagccggaagcgggcttctcgcgaccatgtggcgaagccccattcgtcagctggccgcccgcggccctggtacccggtcacctctctgatctgcgcatgtgctgggctacgcccgggcgcaagcgccaagagcggctgcgtctatggtcatgacgtctgacagagcgtccacccgtcttcgacaggactctatggttcttacgcgcgcagacagaccgcctatataagccatgcgcaggcggaggagcgcctctttcccttcggtgtgccactgaagatcctggtgtcgccatgggccgccgccccgcccgttggtgagtcttgaatccgtgtactttcactgctgggaaacgggcggggaaagaagtgcctatggccgctgaaaacaatt

SEQ ID NO: 18068 - DNA, 657 bp, Homo sapiens
  source 1..657: mol_type = unassigned DNA
ggaggagcgcctctttcccttcggtgtggtgaccactgaagatcctggtgtcgccatgggccgccgccccgcccgttgttaccggtattgtaagaacaagccgtacccaaagtctcgcttctgccgaggtgtccctgatgccaagattcgcatttttgacctggggcggaaaaaggcaaaagtggatgagtttccgctttgtggccacatggtgtcagatgaatatgagcagctgtcctctgaagccctggaggctgcccgaatttgtgccaataagtacatggtaaaaagttgtggcaaagatggcttccatatccgggtgcggctccaccccttccacgtcatccgcatcaacaagatgttgtcctgtgctggggctgacaggctccaaacaggcatgcgaggtgcctttggaaagccccagggcactgtggccagggttcacattggccaagttatcatgtccatccgcaccaagctgcagaacaaggagcatgtgattgaggccctgcgcagggccaagttcaagtttcctggccgccagaagatccacatctcaaagaagtggggcttcaccaagttcaatgctgatgaatttgaagacatggtggctgaaaagcggctcatcccagatggctgtggggtcaagtacatccc

SEQ ID NO: 18069 - DNA, 2278 bp, Homo sapiens
  source 1..2278: mol_type = unassigned DNA
agcgcctctttcccttcggtgtggtgagtaagcgcagttgtcgtctcttgcggtgccgttgctggttctcacaccttttaggtctgttctcgtcttccgttccgactctctctttttcgttgcagccactgaagatcctggtgtcgccatgggccgccgccccgcccgttgttaccggtattgtaagaacaagccgtacccaaagtctcgcttctgccgaggtgtccctgatgccaagattcgcatttttgacctggggcggaaaaaggcaaaagtggatgagtttccgctttgtggccacatggtgtcagatgaatatgagcagctgtcctctgaagccctggaggctgcccgaatttgtgccaataagtacatggtaaaaagttgtggcaaagatggcttccatatccgggtgcggctccaccccttccacgtcatccgcatcaacaagatgttgtcctgtgctggggctgacaggctccaaacaggcatgcgaggtgcctttggaaagccccagggcactgtggccagggttcacattggccaagttatcatgtccatccgcaccaagctgcagaacaaggagcatgtgattgaggccctgcgcagggccaagttcaagtttcctggccgccagaagatccacatctcaaagaagtggggcttcaccaagttcaatgctgatgaatttgaagacatggtggctgaaaagcggctcatcccagatggctgtggggtcaagtacatccccagtcgtggccctctggacaagtggcgggccctgcactcatgagggcttccaatgtgctgcccccctcttaatactcaccaataaattctacttcctgtccacctatgtctttgtatctacattcttgacggggaaggaacttcctctgggaacctttgggtcattgccctttcacttcagaaacaggttgacaactcagccctgctcatgaggcagcaaaccctgcaaagggctgggactggtggccttatgtcagttgtctactctggagcttgacttggacctccccaggtcctaggcagtaggttgaaaaacactgaagtgcttttcatgaagcacagctgcagcaaagccttgcaatcccaggctggggtcagcctacagttgtgttgcttattacaacacatgcggaccaagaggggcttgtgggctagaggctgaccagcagcgtttatttagcaagggtaggtgtgcatcacattgggcttgttctcacccatctggtttggccattcctccttggtgggaatcatccaggtactgctgaggtcacctgcgatttgccccatttcctatctctagcaacctcctgggccccatgcccccaccccttctagaacctgcattcccagggccttcaccacctgaccaaaggtctaggctaacctttggtcatttgtaacaagacctcggaacagacacgtgtgtggcatggtttggcctggggatcttagatgtctgacctgaactattgtagaacagcgctggcttttgggggagcagcaaaaatgagaggagtgctaggtgggtggcctgagcatctgtatccagggacaggactccaaaggcttttggtcccagagctggggtatgttggccccagcccccagcctgtggctcccaaaaggcctctggttttttgtaatctcagtttacagccatttcttaggtttttaattacctttattttattttgccaaacatacctgggaataccttttattttttttttaccttggggtgatggttccaaaccataaatgtgattatagttaacacatgacccttctagcgtcccagccagtgtttttcctgacctctcttctttggagaggaggatggaagggaggggtccggcatgctgctggcattttgctgtgtcctgcagcccctttccgggacacctgggttcacacagctttttagcttacataactggtgcagattttctgtgtggagatgttgccttgaccagccttggctggactttaccaggcatgcagaagcctgtaccaacacagactacagcacccaggaggtgcgagtgtggctgctcagcggttataacaggcctgactgcattgttcaccggattataatgagccaaaatgtttcccggtgtttgctggtttcagggaaggagtttgatatagcagattaaccaccctccttgtagctattggggcttaatggtttcctggtgattcttaccaatccacaataaacatggcccattggcatatctgc

SEQ ID NO: 18070 - DNA, 1519 bp, Homo sapiens
  source 1..1519: mol_type = unassigned DNA
ctctttcccttcggtgtggtgagtaagcgcagttgtcgtctcttgcggtgccgttgctggttctcacaccttttaggtctgttctcgtcttccgttccgactctctctttttcgttgcagccactgaagatcctggtgtcgccatgggccgccgccccgcccgttgttaccggtattgtaagaacaagccgtacccaaagtctcgcttctgccgaggtgtccctggtaagtagtggaagagcccctgcactggttggctctgcggactccgcgtccgtctgtgacaccccctgcacacttacccaatccttttagatgccaagattcgcatttttgacctggggcggaaaaaggcaaaagtggatgagtttccgctttgtggccacatggtgtcagatgaatatgagcagctgtcctctgaagccctggaggctgcccgaatttgtgccaataagtacatggtaaaaagttgtggcaaagatggcttccatatccgggtgcggctccaccccttccacgtcatccgcatcaacaagatgttgtcctgtgctggggctgacaggtgagcttggtctgggccttttaaggcagttggagtctctacattattaggcttgcattattttatcagagcatagaggtggccccagtgactcagccactatggctactagaaaagccaggctggcaagtgactttcagtggtcactcaggaccccttcctgcagatacaaacaaagcatgagtaagtcttagcaagctcttccccacaggttaggggaaacactggtgatgggagtagctcttcttgcttttagctgaatgacaaccatcttgccagcaggtagctgaagctggcagaggagcccagtggcgccttttcagtggttcttgggatgctccgcagccaattaagccgactgagttcctttcctcatggggacccagtgtgcgatggctgcacacagcagcttccttggtagtgtacgcagcctgttggttgtatgggttgctctaagggaccttggagacaggcctttcaggtggatgttcatgtttctgaccttgcactaccccaatgtaggctccaaacaggcatgcgaggtgcctttggaaagccccagggcactgtggccagggttcacattggccaagttatcatgtccatccgcaccaagctgcagaacaaggagcatgtgattgaggccctgcgcagggccaagttcaagtttcctggccgccagaaggtatgtagtgctgcagcccccttctcccacctttgccccaggcctcctgactcagttctttccattgctccttagatccacatctcaaagaagtggggcttcaccaagttcaatgctgatgaatttgaagacatggtggctgaaaagcggctcatcccagatggctgtggggtcaagtacatccccagtcgtggccctctggacaagtggcgggccctgcactcatgagggcttccaatgtgctgcccccctcttaatactcaccaataaat

SEQ ID NO: 18071 - DNA, 1369 bp, Homo sapiens
  source 1..1369: mol_type = unassigned DNA
ctctttcccttcggtgtggtgagtaagcgcagttgtcgtctcttgcggtgccgttgctggttctcacaccttttaggtctgttctcgtcttccgttccgactctctctttttcgttgcagccactgaagatcctggtgtcgccatgggccgccgccccgcccgttgttaccggtattgtaagaacaagccgtacccaaagtctcgcttctgccgaggtgtccctgatgccaagattcgcatttttgacctggggcggaaaaaggcaaaagtggatgagtttccgctttgtggccacatggtgtcagatgaatatgagcagctgtcctctgaagccctggaggctgcccgaatttgtgccaataagtacatggtaaaaagttgtggcaaagatggcttccatatccgggtgcggctccaccccttccacgtcatccgcatcaacaagatgttgtcctgtgctggggctgacaggtgagcttggtctgggccttttaaggcagttggagtctctacattattaggcttgcattattttatcagagcatagaggtggccccagtgactcagccactatggctactagaaaagccaggctggcaagtgactttcagtggtcactcaggaccccttcctgcagatacaaacaaagcatgagtaagtcttagcaagctcttccccacaggttaggggaaacactggtgatgggagtagctcttcttgcttttagctgaatgacaaccatcttgccagcaggtagctgaagctggcagaggagcccagtggcgccttttcagtggttcttgggatgctccgcagccaattaagccgactgagttcctttcctcatggggacccagtgtgcgatggctgcacacagcagcttccttggtagtgtacgcagcctgttggttgtatgggttgctctaagggaccttggagacaggcctttcaggtggatgttcatgtttctgaccttgcactaccccaatgtaggctccaaacaggcatgcgaggtgcctttggaaagccccagggcactgtggccagggttcacattggccaagttatcatgtccatccgcaccaagctgcagaacaaggagcatgtgattgaggccctgcgcagggccaagttcaagtttcctggccgccagaagatccacatctcaaagaagtggggcttcaccaagttcaatgctgatgaatttgaagacatggtggctgaaaagcggctcatcccagatggctgtggggtcaagtacatccccagtcgtggccctctggacaagtggcgggccctgcactcatgagggcttccaatgtgctgcccccctcttaatactcaccaataaattctacttcctgtcca

SEQ ID NO: 18072 - DNA, 585 bp, Homo sapiens
  source 1..585: mol_type = unassigned DNA
tctttcccttcggtgtgccactgaagatcctggtgtcgccatgggccgccgccccgcccgttgttaccggtattgtaagaacaagccgtacccaaagtctcgcttctgccgaggtgtccctgatgccaagattcgcatttttgacctggggcggaaaaaggcaaaagtggatgagtttccgctttgtggccacatggtgtcagatgaatatgagcagctgtcctctgaagccctggaggctgcccgaatttgtgccaataagtacatggtaaaaagttgtggcaaagatggcttccatatccgggtgcggctccaccccttccacgtcatccgcatcaacaagatgttgtcctgtgctggggctgacagatccacatctcaaagaagtggggcttcaccaagttcaatgctgatgaatttgaagacatggtggctgaaaagcggctcatcccagatggctgtggggtcaagtacatccccagtcgtggccctctggacaagtggcgggccctgcactcatgagggcttccaatgtgctgcccccctcttaatactcaccaataaattctacttcctgtccaccta

SEQ ID NO: 18073 - DNA, 839 bp, Homo sapiens
  source 1..839: mol_type = unassigned DNA
ctttcccttcggtgtggtgagtaagcgcagttgtcgtctcttgcggtgccgttgctggttctcacaccttttaggtctgttctcgtcttccgttccgactctctctttttcgttgcagccactgaagatcctggtgtcgccatgggccgccgccccgcccgttgttaccggtattgtaagaacaagccgtacccaaagtctcgcttctgccgaggtgtccctggtaagtagtggaagagcccctgcactggttggctctgcggactccgcgtccgtctgtgacaccccctgcacacttacccaatccttttagatgccaagattcgcatttttgacctggggcggaaaaaggcaaaagtggatgagtttccgctttgtggccacatggtgtcagatgaatatgagcagctgtcctctgaagccctggaggctgcccgaatttgtgccaataagtacatggtaaaaagttgtggcaaagatggcttccatatccgggtgcggctccaccccttccacgtcatccgcatcaacaagatgttgtcctgtgctggggctgacaggctccaaacaggcatgcgaggtgcctttggaaagccccagggcactgtggccagggttcacattggccaagttatcatgtccatccgcaccaagctgcagaacaaggagcatgtgattgaggccctgcgcagggccaagttcaagtttcctggccgccagaagatccacatctcaaagaagtggggcttcaccaagttcaatgctgatgaatttgaagacatggtggctgaaaagcggctcatcccagatggctgtggggtcaagtacatccccagtcg

SEQ ID NO: 18074 - DNA, 1731 bp, Homo sapiens
  source 1..1731: mol_type = unassigned DNA
cggtgtggtgagtaagcgcagttgtcgtctcttgcggtgccgttgctggttctcacaccttttaggtctgttctcgtcttccgttccgactctctctttttcgttgcagccactgaagatcctggtgtcgccatgggccgccgccccgcccgttgttaccggtattgtaagaacaagccgtacccaaagtctcgcttctgccgaggtgtccctggtaagtagtggaagagcccctgcactggttggctctgcggactccgcgtccgtctgtgacaccccctgcacacttacccaatccttttagatgccaagattcgcatttttgacctggggcggaaaaaggcaaaagtggatgagtttccgctttgtggccacatggtgtcagatgaatatgagcagctgtcctctgaaggtaaggcaggattctttgttcgtcaccccccagtccttcctccgtgctccctcaaccccacccacatacactgcactggaattgggagttgatgaaacatgagccttacaaaactcagccaacacagttcccctgagctggagatagtcgtggtgaatgtttctctattatcttctctcactttgctgcttttcttctccctacctagccctggaggctgcccgaatttgtgccaataagtacatggtaaaaagttgtggcaaagatggcttccatatccgggtgcggctccaccccttccacgtcatccgcatcaacaagatgttgtcctgtgctggggctgacaggtgagcttggtctgggccttttaaggcagttggagtctctacattattaggcttgcattattttatcagagcatagaggtggccccagtgactcagccactatggctactagaaaagccaggctggcaagtgactttcagtggtcactcaggaccccttcctgcagatacaaacaaagcatgagtaagtcttagcaagctcttccccacaggttaggggaaacactggtgatgggagtagctcttcttgcttttagctgaatgacaaccatcttgccagcaggtagctgaagctggcagaggagcccagtggcgccttttcagtggttcttgggatgctccgcagccaattaagccgactgagttcctttcctcatggggacccagtgtgcgatggctgcacacagcagcttccttggtagtgtacgcagcctgttggttgtatgggttgctctaagggaccttggagacaggcctttcaggtggatgttcatgtttctgaccttgcactaccccaatgtaggctccaaacaggcatgcgaggtgcctttggaaagccccagggcactgtggccagggttcacattggccaagttatcatgtccatccgcaccaagctgcagaacaaggagcatgtgattgaggccctgcgcagggccaagttcaagtttcctggccgccagaaggtatgtagtgctgcagcccccttctcccacctttgccccaggcctcctgactcagttctttccattgctccttagatccacatctcaaagaagtggggcttcaccaagttcaatgctgatgaatttgaagacatggtggctgaaaagcggctcatcccagatggctgtggggtcaagtacatccccagtcgtggccctctggacaagtggcgggccctgcactcatgagggcttccaatgtgctgcccccctcttaatactcaccaataaattctacttcctgtcca

SEQ ID NO: 18075 - DNA, 802 bp, Homo sapiens
  source 1..802: mol_type = unassigned DNA
ccactgaagatcctggtgtcgccatgggccgccgccccgcccgttgttaccggtattgtaagaacaagccgtacccaaagtctcgcttctgccgaggtgtccctgatgccaagattcgcatttttgacctggggcggaaaaaggcaaaagtggatgagtttccgctttgtggccacatggtgtcagatgaatatgagcagctgtcctctgaagccctggaggctgcccgaatttgtgccaataagtacatggtaaaaagttgtggcaaagatggcttccatatccgggtgcggctccaccccttccacgtcatccgcatcaacaagatgttgtcctgtgctggggctgacaggctccaaacaggcatgcgaggtgcctttggaaagccccagggcactgtggccagggttcacattggccaagttatcatgtccatccgcaccaagctgcagaacaaggagcatgtgattgaggccctgcgcagggccaagttcaagtttcctggccgccagaaggtatgtagtgctgcagcccccttctcccacctttgccccaggcctcctgactcagttctttccattgctccttagatccacatctcaaagaagtggggcttcaccaagttcaatgctgatgaatttgaagacatggtggctgaaaagcggctcatcccagatggctgtggggtcaagtacatccccagtcgtggccctctggacaagtggcgggccctgcactcatgagggcttccaatgtgctgcccccctcttaatactcaccaataaattctacttcctgtcca

SEQ ID NO: 18076 - DNA, 748 bp, Homo sapiens
  source 1..748: mol_type = unassigned DNA
cgggaaaaacgggtgcggccgcctcctgtgtcctacagggggcgccagacgcatttccactcggcttggagttaccggtattgtaagaacaagccgtacccaaagtctcgcttctgccgaggtgtccctgatgccaagattcgcatttttgacctggggcggaaaaaggcaaaagtggatgagtttccgctttgtggccacatggtgtcagatgaatatgagcagctgtcctctgaagccctggaggctgcccgaatttgtgccaataagtacatggtaaaaagttgtggcaaagatggcttccatatccgggtgcggctccaccccttccacgtcatccgcatcaacaagatgttgtcctgtgctggggctgacaggctccaaacaggcatgcgaggtgcctttggaaagccccagggcactgtggccagggttcacattggccaagttatcatgtccatccgcaccaagctgcagaacaaggagcatgtgattgaggccctgcgcagggccaagttcaagtttcctggccgccagaagatccacatctcaaagaagtggggcttcaccaagttcaatgctgatgaatttgaagacatggtggctgaaaagcggctcatcccagatggctgtggggtcaagtacatccccagtcgtggccctctggacaagtggcgggccctgcactcatgagggcttccaatgtgctgcccccctcttaatactcaccaataaattctacttcctg

SEQ ID NO: 18077 - DNA, 713 bp, Homo sapiens
  source 1..713: mol_type = unassigned DNA
ccaaagtctcgcttctgccgaggtgtccctgatgccaagattcgcatttttgacctggggcggaaaaaggcaaaagtggatgagtttccgctttgtggccacatggtgtcagatgaatatgagcagctgtcctctgaagccctggaggctgcccgaatttgtgccaataagtacatggtaaaaagttgtggcaaagatggcttccatatccgggtgcggctccaccccttccacgtcatccgcatcaacaagatgttgtcctgtgctggggctgacaggcctaccttgctctgccagtgctgggagacctccagaaacacatcgtagagggcgttcagctccttctctacggccttaggagtggtgtgcagcgggaccaacaccaggctgggaaggactgcaaggcccagggaccgagggctgccatccactcctggaccttctccccctagcccgtctgggtgaggaagcccccagtggagccagccagaactccccttctgctcccacataccaagcccacccttcccttcctaccattgctgggcaaagagaactgggccacaaatggctcccgggcaaagacgtcatcctcatcgttgtacacgtaggaactcaggacctgtgttttgtgtgacctgggaggacaaagggatgggcagcagtggccccacgtctttgattttggcttgcaagtgccaaacggcgctcag

SEQ ID NO: 18078 - DNA, 622 bp, Homo sapiens
  source 1..622: mol_type = unassigned DNA
ctccaccccttccacgtcatccgcatcaacaagatgttgtcctgtgctggggctgacagccccatcccttcacctcctcctcggtgagctggaagctcgtggggaagtcaaaggcagccgcagtgtgcagcagactccggcagcgctccccgtgcagcacgacgcggtcataggtgcagtgggtgctggcccgcactgtggtgtcctccccatcggcaatcacccagtggaagcctggctcagtccgcagctccagcttgtccaggcgctttttggtcagtgaagcgcagtcagcattgaagtccccaagcaggatcacgtcctagagacacagcagccatcaggctggccgctgggccaccctatccttgtccctcctgtacaaactgcccaggcctaccttgctctgccagtgctgggagacctccagaaacacatcgtagagggcgttcagctccttctctacggccttaggagtggtgtgcagcgggaccaacaccaggctgggaaggactgcaaggcccagggaccgagggctgccatccactcctggaccttctccccctagcccgtctgggtgaggaagcccccagtggagccagccagaactccccttctgctc

SEQ ID NO: 18079 - DNA, 457 bp, Homo sapiens
  source 1..457: mol_type = unassigned DNA
ctccaccccttccacgtcatccgcatcaacaagatgttgtcctgtgctggggctgacaggctccaaacaggcatgcgaggtgcctttggaaagccccagggcactgtggccagggttcacattggccaagttatcatgtccatccgcaccaagctgcagaacaaggagcatgtgattgaggccctgcgcagggccaagttcaagtttcctggccgccagaaggcctaccttgctctgccagtgctgggagacctccagaaacacatcgtagagggcgttcagctccttctctacggccttaggagtggtgtgcagcgggaccaacaccaggctgggaaggactgcaaggcccagggaccgagggctgccatccactcctggaccttctccccctagcccgtctgggtgaggaagcccccagtggagccagccagaactccccttctgctcccacata

SEQ ID NO: 18080 - DNA, 292 bp, Homo sapiens
  source 1..292: mol_type = unassigned DNA
ctccaccccttccacgtcatccgcatcaacaagatgttgtcctgtgctggggctgacaggctccaaacaggcatgcgaggtgcctttggaaagccccagggcactgtggccagggttcacattggccaagttatcatgtccatccgcaccaagctgcagaacaaggagcatgtgattgaggccctgcgcagggccaagttcaagtttcctggccgccagaagggggctcccatacctgctcagaccagcttgtcaccaagtctgcctcatccttaagtggatcgcgataccc

SEQ ID NO: 18081 - DNA, 2318 bp, Homo sapiens
  source 1..2318: mol_type = unassigned DNA
gggctacgcccgggcgcaagcgccaagagcggctgcgtctatggtcatgacgtctgacagagcgtccacccgtcttcgacaggactctatggttcttacgcgcgcagacagaccgcctatataagccatgcgcaggcggaggagcgcctctttcccttcggtgtgccactgaagatcctggtgtcgccatgggccgccgccccgcccgttgttaccggtattgtaagaacaagccgtacccaaagtctcgcttctgccgaggtgtccctgatgccaagattcgcatttttgacctggggcggaaaaaggcaaaagtggatgagtttccgctttgtggccacatggtgtcagatgaatatgagcagctgtcctctgaagccctggaggctgcccgaatttgtgccaataagtacatggtaaaaagttgtggcaaagatggcttccatatccgggtgcggctccaccccttccacgtcatccgcatcaacaagatgttgtcctgtgctggggctgacaggctccaaacaggcatgcgaggtgcctttggaaagccccagggcactgtggccagggttcacattggccaagttatcatgtccatccgcaccaagctgcagaacaaggagcatgtgattgaggccctgcgcagggccaagttcaagtttcctggccgccagaagatccacatctcaaagaagtggggcttcaccaagttcaatgctgatgaatttgaagacatggtggctgaaaagcggctcatcccagatggctgtggggtcaagtacatccccagtcgtggccctctggacaagtggcgggccctgcactcatgagggcttccaatgtgctgcccccctcttaatactcaccaataaattctacttcctgtccacctatgtctttgtatctacattcttgacggggaaggaacttcctctgggaacctttgggtcattgccctttcacttcagaaacaggttgacaactcagccctgctcatgaggcagcaaaccctgcaaagggctgggactggtggccttatgtcagttgtctactctggagcttgacttggacctccccaggtcctaggcagtaggttgaaaaacactgaagtgcttttcatgaagcacagctgcagcaaagccttgcaatcccaggctggggtcagcctacagttgtgttgcttattacaacacatgcggaccaagaggggcttgtgggctagaggctgaccagcagcgtttatttagcaagggtaggtgtgcatcacattgggcttgttctcacccatctggtttggccattcctccttggtgggaatcatccaggtactgctgaggtcacctgcgatttgccccatttcctatctctagcaacctcctgggccccatgcccccaccccttctagaacctgcattcccagggccttcaccacctgaccaaaggtctaggctaacctttggtcatttgtaacaagacctcggaacagacacgtgtgtggcatggtttggcctggggatcttagatgtctgacctgaactattgtagaacagcgctggcttttgggggagcagcaaaaatgagaggagtgctaggtgggtggcctgagcatctgtatccagggacaggactccaaaggcttttggtcccagagctggggtatgttggccccagcccccagcctgtggctcccaaaaggcctctggttttttgtaatctcagtttacagccatttcttaggtttttaattacctttattttattttgccaaacatacctgggaataccttttattttttttttaccttggggtgatggttccaaaccataaatgtgattatagttaacacatgacccttctagcgtcccagccagtgtttttcctgacctctcttctttggagaggaggatggaagggaggggtccggcatgctgctggcattttgctgtgtcctgcagcccctttccgggacacctgggttcacacagctttttagcttacataactggtgcagattttctgtgtggagatgttgccttgaccagccttggctggactttaccaggcatgcagaagcctgtaccaacacagactacagcacccaggaggtgcgagtgtggctgctcagcggttataacaggcctgactgcattgttcaccggattataatgagccaaaatgtttcccggtgtttgctggtttcagggaaggagtttgatatagcagattaaccaccctccttgtagctattggggcttaatggtttcctggtgattcttaccaatccacaataaacatggcccattggcatatctgc

SEQ ID NO: 18082 - DNA, 2210 bp, Homo sapiens
  source 1..2210: mol_type = unassigned DNA
gggctacgcccgggcgcaagcgccaagagcggctgcgtctatggtcatgacgtctgacagagcgtccacccgtcttcgacaggactctatggttcttacgcgcgcagacagaccgcctatataagccatgcgcaggcggaggagcgcctctttcccttcggtgtgccactgaagatcctggtgtcgccatgggccgccgccccgcccgttgttaccggtattgtaagaacaagccgtacccaaagtctcgcttctgccgaggtgtccctgccctggaggctgcccgaatttgtgccaataagtacatggtaaaaagttgtggcaaagatggcttccatatccgggtgcggctccaccccttccacgtcatccgcatcaacaagatgttgtcctgtgctggggctgacaggctccaaacaggcatgcgaggtgcctttggaaagccccagggcactgtggccagggttcacattggccaagttatcatgtccatccgcaccaagctgcagaacaaggagcatgtgattgaggccctgcgcagggccaagttcaagtttcctggccgccagaagatccacatctcaaagaagtggggcttcaccaagttcaatgctgatgaatttgaagacatggtggctgaaaagcggctcatcccagatggctgtggggtcaagtacatccccagtcgtggccctctggacaagtggcgggccctgcactcatgagggcttccaatgtgctgcccccctcttaatactcaccaataaattctacttcctgtccacctatgtctttgtatctacattcttgacggggaaggaacttcctctgggaacctttgggtcattgccctttcacttcagaaacaggttgacaactcagccctgctcatgaggcagcaaaccctgcaaagggctgggactggtggccttatgtcagttgtctactctggagcttgacttggacctccccaggtcctaggcagtaggttgaaaaacactgaagtgcttttcatgaagcacagctgcagcaaagccttgcaatcccaggctggggtcagcctacagttgtgttgcttattacaacacatgcggaccaagaggggcttgtgggctagaggctgaccagcagcgtttatttagcaagggtaggtgtgcatcacattgggcttgttctcacccatctggtttggccattcctccttggtgggaatcatccaggtactgctgaggtcacctgcgatttgccccatttcctatctctagcaacctcctgggccccatgcccccaccccttctagaacctgcattcccagggccttcaccacctgaccaaaggtctaggctaacctttggtcatttgtaacaagacctcggaacagacacgtgtgtggcatggtttggcctggggatcttagatgtctgacctgaactattgtagaacagcgctggcttttgggggagcagcaaaaatgagaggagtgctaggtgggtggcctgagcatctgtatccagggacaggactccaaaggcttttggtcccagagctggggtatgttggccccagcccccagcctgtggctcccaaaaggcctctggttttttgtaatctcagtttacagccatttcttaggtttttaattacctttattttattttgccaaacatacctgggaataccttttattttttttttaccttggggtgatggttccaaaccataaatgtgattatagttaacacatgacccttctagcgtcccagccagtgtttttcctgacctctcttctttggagaggaggatggaagggaggggtccggcatgctgctggcattttgctgtgtcctgcagcccctttccgggacacctgggttcacacagctttttagcttacataactggtgcagattttctgtgtggagatgttgccttgaccagccttggctggactttaccaggcatgcagaagcctgtaccaacacagactacagcacccaggaggtgcgagtgtggctgctcagcggttataacaggcctgactgcattgttcaccggattataatgagccaaaatgtttcccggtgtttgctggtttcagggaaggagtttgatatagcagattaaccaccctccttgtagctattggggcttaatggtttcctggtgattcttaccaatccacaataaacatggcccattggcatatctgc

SEQ ID NO: 18083 - DNA, 1471 bp, Homo sapiens
  source 1..1471: mol_type = unassigned DNA
gcgagcgccgggaacgagcaccaccagggctggagcggacggctttagaagagcctagctgctgcgcgcgtcggagaggctcctgggaaactcccacggcccagggactttcgaaagcagagcgaggagccctcgcacgcgctagtctgcgagtgagcgctcagcccggcacctgttcctccagcgccgccgccttcccacccctcggacccgcgccgctcgcggcgcccgcccgttcctgcgatgaatccggccctaggcaaccagacggacgtggcgggcctgttcctggccaacagcagcgaggcgctggagcgagccgtgcgctgctgcacccaggcgtccgtggtgaccgacgacggcttcgcggagggaggcccggacgagcgtagcctgtacataatgcgcgtggtgcagatcgcggtcatgtgcgtgctctcactcaccgtggtcttcggcatcttcttcctcggctgcaatctgctcatcaagtccgagggcatgatcaacttcctcgtgaaggaccggaggccgtctaaggaggtggaggcggtggtcgtggggccctactgacccgccctctgcccccgcggcaaccgctcccacgcctgcccactttgctagcccggctgtgcccctcactatcagagactgggcgaagcaaacctgtcggagtcaattatttctctcgacttcggcctttcggaaagaagcgaccggtttctccctcgccctctgaaagtcctcatgcctggcagtcggaggagagcgcccagactctgaactcagcagaaagtggcaagaagagggcgattagggcgcagaactttggaagctgctacttacttggaatgcggggagaccgacggtgcgaaggcccttctccacccgcaggtgggccaagctctgggggcaggtggagagggcgggcaggggagagacccagcggcactgatcgccttgtgaccggaagagtgacctgttaaaagccacgcagcagactcatggggtctcacaaatccgtgtccgggtgcgctcccactcttctcctgctccccccctgccctggaggggaggggcgataaatacctttgattgtaacgtgccgttttaagaggttttgtgtttgtttgcttgaatacaaatgtttgataagtctttttctgccccagtggcctgtttgcctgcctgaggagttacagttttgtcattgtgggagaaggggtggggggagggggagcctgcgaatttgaacggggtgagttgtttcttttagtgcatttcccactgggtcttttgggaggcgtctagcgttcctgctggccctgggacaaagacccagaatagaactcgtagctcgtgactgcacggtttacgccacaaaagtgctcttgacatccgtgacaccgttttgactttttgtttttttcttatttaacatttccttaataaatgcaacatttaagcgttt

SEQ ID NO: 18084 - DNA, 1305 bp, Homo sapiens
  source 1..1305: mol_type = unassigned DNA
ttccaggatatgaactctacagcggaagaataagaaaccggaactaaacttctcactcatctgacttcctgcggtttacgacaacagactttggttgcaccggaaaagaacagattctcttccgtcgcagagtttcgccatggcccggggccccaagaagcacttaaagcgtgttgcagcgccgaagcattggatgcttgacaaactaacgggtgtatttgcacctcgtccatcgacaggtccccacaagctgagggaatgtcttcctctgatcgtcttcctcaggaatagactcaagtatgcgttgactggagatgaggtaaagaagatatgtatgcaacgtttcatcaaaattgatggcaaggttcgagtggatgtcacataccctgctggattcatggatgtcatcagcatcgagaagacaggtgaacatttccgcctggtctatgacaccaagggccgttttgctgttcaccgcatcacagtggaagaggcaaagtacaagttgtgcaaagtgaggaagattactgtgggagtgaagggaatccctcacctggtgactcatgatgctcgaaccatccgctacccagatcctgtcatcaaggtgaacgatactgtgcagattgatttagggactggcaagataatcaactttatcaaatttgatacaggcaatttgtgtatggtgattggtggagccaacctcggtcgtgttggtgtgatcaccaacagggaaagacatcctggttcttttgatgtggtgcatgtgaaggatgccaatggcaacagctttgccacgaggctttccaacatttttgtcattggcaatggcaataaaccttggatttccctgcccaggggaaagggcattcgacttactgttgctgaagagagagataagaggctggccaccaaacagagcagtggctaaattgcagtagcagcatatctttttttctttgcacaaataaacagtgaattctcgtttcttaatgtgttttttcccccttgtggataatagtagggtttgaatttgctcatgattttggcactgtcttaagatctctaggaataccacctatacttcctctgaccctccagtaaataaacctttgcttccctcatacatgttacccacaccatctctgtgggcagagtgatggagtagcattccaaaacgaagtacaaaaaacgtatgacatttcagaaaggacggcattcttttgtggaagctatgggagatggtcttagttttcttgcttgttcacattattggtagaaattaaatcctgtggctgtaggaaa

SEQ ID NO: 18085 - DNA, 811 bp, Homo sapiens
  source 1..811: mol_type = unassigned DNA
gcactgtggacgctctcttgacggatgctagggagacccgccaagttttcaaaggcccggggccccaagaagcacttaaagcgtgttgcagcgccgaagcattggatgcttgacaaactaacgggtgtatttgcacctcgtccatcgacaggtccccacaagctgagggaatgtcttcctctgatcgtcttcctcaggaatagactcaagtatgcgttgactggagatgaggtaaagaagatatgtatgcaacgtttcatcaaaattgatggcaaggttcgagtggatgtcacataccctgctggattcatggatgtcatcagcatcgagaagacaggtgaacatttccgcctggtctatgacaccaagggccgttttgctgttcaccgcatcacagtggaagaggcaaagtacaagttgtgcaaagtgaggaagattactgtgggagtgaagggaatccctcacctggtgactcatgatgctcgaaccatccgctacccagatcctgtcatcaaggtgaacgatactgtgcagattgatttagggactggcaagataatcaactttatcaaatttgatacaggcaatttgtgtatggtgattggtggagccaacctcggtcgtgttggtgtgatcaccaacagggaaagacatcctggttcttttgatgtggtgcatgtgaaggatgccaatggcaacagctttgccacgaggctttccaacatttttgtcattggcaatggcaataaaccttggatttccctgcccaggggaaagggcattcgacttactgttgctgaagagagagata

SEQ ID NO: 18086 - DNA, 998 bp, Homo sapiens
  source 1..998: mol_type = unassigned DNA
attgagattacaggcatgagccaccgcacccggcaaaagccacatgttcttagcagttcttagtagtggtagagttaagtttgtctctggggctctttgttaccaccgctccagagttgcccattgaggactatcaattggaaatatgtccctgaggaaaaaatgatataccagttgattgtgtgttaccactcagatacacaggcaacaggcttttagcctgtgataaaggaccagaggttagttcagctgagcactcttccagcagccaccagagggttctgaaacagattcccccttggcaaggtttcccaaatgtctaaattactaaatcagtatgggagatcatcagctctgtgactggttaatatagtttttcccaagagcactccttctctgaccgaggaaatgctggaaatcgatgggataagtaatgtctgggtgactgctttaggctggctttgtgtttacatattgaattgattttccttgctgtgtttatagtacaagttgtgcaaagtgaggaagattactgtgggagtgaagggaatccctcacctggtgactcatgatgctcgaaccatccgctacccagatcctgtcatcaaggtgaacgatactgtgcagattgatttagggactggcaagataatcaactttatcaaatttgatacaggcaatttgtgtatggtgattggtggagccaacctcggtcgtgttggtgtgatcaccaacagggaaagacatcctggttcttttgatgtggtgcatgtgaaggatgccaatggcaacagctttgccacgaggctttccaacatttttgtcattggcaatggcaataaaccttggatttccctgcccaggggaaagggcattcgacttactgttgctgaagagagagataagaggctggccaccaaacagagcagtggctaaattgcagtagcagcatatctttttttctttgcacaaataaacagtgaattctcgtttcttaa

SEQ ID NO: 18087 - DNA, 454 bp, Homo sapiens
  source 1..454: mol_type = unassigned DNA
tagggactggcaagataatcaactttatcaaatttgatacaggctgtaaaaacaaaaacaagccaaacaagccagcaagcaaacaagaagaagaaaacaacaacaacacaaaccttgaaatagacttgtcagatgtaaatatttcttttctagggaaatagaaggtgtacagtggagttttctggaggctacatgacatgtgataagaaaacagactgaaaaagggaatacatctataaagagaaaattgctatcactgtttttggttgggaaaaacatttgtatgagataaacatgttattcttttcataatcagacattcttctcacaagtgttggttctctaccattcctcaaaggtgataattttttgaaatatgttattgtggattcatgattttggatatatccaatgggtttaagtgcattgcaataaaatggtattttgatactca

SEQ ID NO: 18088 - DNA, 543 bp, Homo sapiens
  source 1..543: mol_type = unassigned DNA
gaagtgctagtgccgcggcggcggcggcggacggcccagccggagcgcgaggggctcgggggggcgcggcggttcgggtcgcagagccagggaccccaggacccgggaggcggcgcagccggggccgccggaggagcgcgggtgacctggcggcggcgagatgccgctcgcccagctcaaggagccctggccgctcatggagctagtgcctctggacccggagaagcagctcctgacctcccttgagggctctgtggctccagtccctaagcgtgcagaaggccacctcttcctgtgccttttgaccccagggtcaaggtcaagcccctgaatgagctggtggaaaacttcctccttaacctcttgctgggaaggaagcagaatggacagacctcaggggaagaagctggacttcagccgtccaaggatgagggcgtcctcaaggagatctccatcacgcaccacgtcaaggctggctctgagaaggctgatccatcccatttcgagctcctcaaggttctgggccagggatcctttggcaaa

SEQ ID NO: 18089 - DNA, 500 bp, Homo sapiens
  source 1..500: mol_type = unassigned DNA
gaagtgctagtgccgcggcggcggcggcggacggcccagccggagcgcgaggggctcgggggggcgcggcggttcgggtcgcagagccagggaccccaggacccgggaggcggcgcagccggggccgccggaggagcgcgggtgacctggcggcggcgagatgccgctcgcccagctcaaggagccctggccgctcatggagctagtgcctctggacccggagaatggacagacctcaggggaagaagctggacttcagccgtccaagtacgtgaccgcgtccggaccaagatggagagagacatcctggctgatgtaaatcacccattcgtggtgaagctgcactatgccttccagaccgagggcaagctctatctcattctggacttcctgcgtggtggggacctcttcacccggctctcaaaagaggtgatgttcacggaggaggatgtgaagttttacctggctgagctggctctgggcctggatcacctgcacag

SEQ ID NO: 18090 - DNA, 3186 bp, Homo sapiens
  source 1..3186: mol_type = unassigned DNA
ctagtgccgcggcggcggcggcggacggcccagccggagcgcgaggggctcgggggggcgcggcggttcgggtcgcagagccagggaccccaggacccgggaggcggcgcagccggggccgccggaggagcgcgggtgacctggcggcggcgagatgccgctcgcccagctcaaggagccctggccgctcatggagctagtgcctctggacccggagaatggacagacctcaggggaagaagctggacttcagccgtccaaggatgagggcgtcctcaaggagatctccatcacgcaccacgtcaaggctggctctgagaaggctgatccatcccatttcgagctcctcaaggttctgggccagggatcctttggcaaagtcttcctggtgcggaaagtcacccggcctgacagtgggcacctgtatgctatgaaggtgctgaagaaggcaacgctgaaagtacgtgaccgcgtccggaccaagatggagagagacatcctggctgatgtaaatcacccattcgtggtgaagctgcactatgccttccagaccgagggcaagctctatctcattctggacttcctgcgtggtggggacctcttcacccggctctcaaaagaggtgatgttcacggaggaggatgtgaagttttacctggctgagctggctctgggcctggatcacctgcacagcctgggtatcatttacagagacctcaagcctgagaacatccttctggatgaggagggccacatcaaactcactgactttggcctgagcaaagaggccattgaccacgagaagaaggcctattctttctgcgggacagtggagtacatggcccctgaggtcgtcaaccgccagggccactcccatagtgcggactggtggtcctatggggtgttgatgtttgagatgctgacgggctccctgcccttccaggggaaggaccggaaggagaccatgacactgattctgaaggcgaagctaggcatgccccagtttctgagcactgaagcccagagcctcttgcgggccctgttcaagcggaatcctgccaaccggctcggctccggccctgatggggcagaggaaatcaagcggcatgtcttctactccaccattgactggaataagctataccgtcgtgagatcaagccacccttcaagccagcagtggctcagcctgatgacaccttctactttgacaccgagttcacgtcccgcacacccaaggattccccaggcatcccccccagcgctggggcccatcagctgttccggggcttcagcttcgtggccaccggcctgatggaagacgacggcaagcctcgtgccccgcaggcacccctgcactcggtggtacagcaactccatgggaagaacctggtttttagtgacggctacgtggtaaaggagacaattggtgtgggctcctactctgagtgcaagcgctgtgtccacaaggccaccaacatggagtatgctgtcaaggtcattgataagagcaagcgggatccttcagaagagattgagattcttctgcggtatggccagcaccccaacatcatcactctgaaagatgtgtatgatgatggcaaacacgtgtacctggtgacagagctgatgcggggtggggagctgctggacaagatcctgcggcagaagttcttctcagagcgggaggccagctttgtcctgcacaccattggcaaaactgtggagtatctgcactcacagggggttgtgcacagggacctgaagcccagcaacatcctgtatgtggacgagtccgggaatcccgagtgcctgcgcatctgtgactttggttttgccaaacagctgcgggctgagaatgggctcctcatgacaccttgctacacagccaactttgtggcgcctgaggtgctgaagcgccagggctacgatgaaggctgcgacatctggagcctgggcattctgctgtacaccatgctggcaggatatactccatttgccaacggtcccagtgacacaccagaggaaatcctaacccggatcggcagtgggaagtttaccctcagtgggggaaattggaacacagtttcagagacagccaaggacctggtgtccaagatgctacacgtggatccccaccagcgcctcacagctaagcaggttctgcagcatccatgggtcacccagaaagacaagcttccccaaagccagctgtcccaccaggacctacagcttgtgaagggagccatggctgccacgtactccgcactcaacagctccaagcccaccccccagctgaagcccatcgagtcatccatcctggcccagcggcgagtgaggaagttgccatccaccaccctgtgaggcaccagggcattcgggccacagggcggtgctagcttgacacagtcagcatgcttcccagagggagcaggccggaaccacagggccagagggagctggaacccgaggggccggggaagctgccagcccagaacacccctaatgagggtgtgagaagtgccttctccttccccaggatggactcttctcggctcaggctctgctggtggaaagcgattcactgtataaacttttttttatgaaaaaaatggcatcaaccaccatggatttttacaagatccatttgcctttctgggagcagaaacagccattgcggccccaggaggggaactgagtcacgctggggctctctgagactctttagagcagctttgggatcccaccctggggacccccacgattggccacctgtagccatctgcacacacctccgagacagtccagtgtcacctctctcagagcatctggctgtttagcagaactcattctatccccaatcagctccttttccgttctgttctgctgggagttctagaaccacttcctgctacaggaggggtctcatgtcctgctggcttccagcttcaggcaccagcatccaccttggctctgccagtggatcccctgcggtcaggctgggcagccccagagagaggatgtggaaagcactttttggctgacttcatctggggttggcaacaggacagagttcacaggaggccagtgggcgggccatgagggacagggtcttttttcatttcttcctcagctggttactcagggttcatctgtccatggcctttctaataaactgttgagttgaa

SEQ ID NO: 18091 - DNA, 560 bp, Homo sapiens
  source 1..560: mol_type = unassigned DNA
gcggcggcggcggcggacggcccagccggagcgcgaggggctcgggggggcgcggcggttcgggtcgcagagccagggaccccaggacccgggaggcggcgcagccggggccgccggaggagcgcgggtgacctggcggcggcgagatgccgctcgcccagctcaaggagccctggccgctcatggagctagtgcctctggacccggagaatggacagacctcaggggaagaagctggacttcagccgtccaaggatgagggcgtcctcaaggagatctccatcacgcaccacgtcaaggctggctctgagaaggctgatccatcccatttcgagctcctcaaggttctgggccagggatcctttggcaaagtcttcctggtgcggaaagtcacccggcctgacagtgggcacctgtatgctatgaaggtgctgaagaaggcaacgctgaaagtacgtgaccgcgtccggaccaagatggagagagacatcctggctgatgtaaatcacccattcgtggtgaagctgcactatggtaaagcttctggccctgcctgagct

SEQ ID NO: 18092 - DNA, 3131 bp, Homo sapiens
  source 1..3131: mol_type = unassigned DNA
gcggcggcggcggacggcccagccggagcgcgaggggctcgggggggcgcggcggttcgggtcgcagagccagggaccccaggacccgggaggcggcgcagccggggccgccggaggagcgcgggtgacctggcggcggcgagatgccgctcgcccagctcaaggagccctggccgctcatggagctagtgcctctggacccggagaatggacagacctcaggggaagaagctggacttcagccgtccaaggatgagggcgtcctcaaggagatctccatcacgcaccacgtcaaggctggctctgagaaggctgatccatcccatttcgagctcctcaaggttctgggccagggatcctttggcaaagtcttcctggtgcggaaagtcacccggcctgacagtgggcacctgtatgctatgaaggtgctgaagaaggcaacgctgaaagtacgtgaccgcgtccggaccaagatggagagagacatcctggctgatgtaaatcacccattcgtggtgaagctgcactatgccttccagaccgagggcaagctctatctcattctggacttcctgcgtggtggggacctcttcacccggctctcaaaagaggtgatgttcacggaggaggatgtgaagttttacctggctgagctggctctgggcctggatcacctgcacagcctgggtatcatttacagagacctcaagcctgagaacatccttctggatgaggagggccacatcaaactcactgactttggcctgagcaaagaggccattgaccacgagaagaaggcctattctttctgcgggacagtggagtacatggcccctgaggtcgtcaaccgccagggccactcccatagtgcggactggtggtcctatggggtgttgatggggaaggaccggaaggagaccatgacactgattctgaaggcgaagctaggcatgccccagtttctgagcactgaagcccagagcctcttgcgggccctgttcaagcggaatcctgccaaccggctcggctccggccctgatggggcagaggaaatcaagcggcatgtcttctactccaccattgactggaataagctataccgtcgtgagatcaagccacccttcaagccagcagtggctcagcctgatgacaccttctactttgacaccgagttcacgtcccgcacacccaaggattccccaggcatcccccccagcgctggggcccatcagctgttccggggcttcagcttcgtggccaccggcctgatggaagacgacggcaagcctcgtgccccgcaggcacccctgcactcggtggtacagcaactccatgggaagaacctggtttttagtgacggctacgtggtaaaggagacaattggtgtgggctcctactctgagtgcaagcgctgtgtccacaaggccaccaacatggagtatgctgtcaaggtcattgataagagcaagcgggatccttcagaagagattgagattcttctgcggtatggccagcaccccaacatcatcactctgaaagatgtgtatgatgatggcaaacacgtgtacctggtgacagagctgatgcggggtggggagctgctggacaagatcctgcggcagaagttcttctcagagcgggaggccagctttgtcctgcacaccattggcaaaactgtggagtatctgcactcacagggggttgtgcacagggacctgaagcccagcaacatcctgtatgtggacgagtccgggaatcccgagtgcctgcgcatctgtgactttggttttgccaaacagctgcgggctgagaatgggctcctcatgacaccttgctacacagccaactttgtggcgcctgaggtgctgaagcgccagggctacgatgaaggctgcgacatctggagcctgggcattctgctgtacaccatgctggcaggatatactccatttgccaacggtcccagtgacacaccagaggaaatcctaacccggatcggcagtgggaagtttaccctcagtgggggaaattggaacacagtttcagagacagccaaggacctggtgtccaagatgctacacgtggatccccaccagcgcctcacagctaagcaggttctgcagcatccatgggtcacccagaaagacaagcttccccaaagccagctgtcccaccaggacctacagcttgtgaagggagccatggctgccacgtactccgcactcaacagctccaagcccaccccccagctgaagcccatcgagtcatccatcctggcccagcggcgagtgaggaagttgccatccaccaccctgtgaggcaccagggcattcgggccacagggcggtgctagcttgacacagtcagcatgcttcccagagggagcaggccggaaccacagggccagagggagctggaacccgaggggccggggaagctgccagcccagaacacccctaatgagggtgtgagaagtgccttctccttccccaggatggactcttctcggctcaggctctgctggtggaaagcgattcactgtataaacttttttttatgaaaaaaatggcatcaaccaccatggatttttacaagatccatttgcctttctgggagcagaaacagccattgcggccccaggaggggaactgagtcacgctggggctctctgagactctttagagcagctttgggatcccaccctggggacccccacgattggccacctgtagccatctgcacacacctccgagacagtccagtgtcacctctctcagagcatctggctgtttagcagaactcattctatccccaatcagctccttttccgttctgttctgctgggagttctagaaccacttcctgctacaggaggggtctcatgtcctgctggcttccagcttcaggcaccagcatccaccttggctctgccagtggatcccctgcggtcaggctgggcagccccagagagaggatgtggaaagcactttttggctgacttcatctggggttggcaacaggacagagttcacaggaggccagtgggcgggccatgagggacagggtcttttttcatttcttcctcagctggttactcagggttcatctgtccatggcctttctaataaact

SEQ ID NO: 18093 - DNA, 2596 bp, Homo sapiens
  source 1..2596: mol_type = unassigned DNA
aaattgctctgggattcctgccatggggattttacaggcactgctaggctgctcagaggttctctcgctgactcaccctctgaggtgaggaacactgccctctgcagcccctgtactgccaccccgctactaggaccggggcgcaaggtcctgggggtggtgctcagaggtggattcctttgcccaggcacgcccctgggaccaggcctccaaaggagaagaatggacagacctcaggggaagaagctggacttcagccgtccaaggatgagggcgtcctcaaggagatctccatcacgcaccacgtcaaggctggctctgagaaggctgatccatcccatttcgagctcctcaaggttctgggccagggatcctttggcaaagtcttcctggtgcggaaagtcacccggcctgacagtgggcacctgtatgctatgaaggtgctgaagaaggcaacgctgaaagtacgtgaccgcgtccggaccaagatggagagagacatcctggctgatgtaaatcacccattcgtggtgaagctgcactatgccttccagaccgagggcaagctctatctcattctggacttcctgcgtggtggggacctcttcacccggctctcaaaagaggtgatgttcacggaggaggatgtgaagttttacctggctgagctggctctgggcctggatcacctgcacagcctgggtatcatttacagagacctcaagcctgagaacatccttctggatgaggagggccacatcaaactcactgactttggcctgagcaaagaggccattgaccacgagaagaaggcctattctttctgcgggacagtggagtacatggcccctgaggtcgtcaaccgccagggccactcccatagtgcggactggtggtcctatggggtgttgatgtttgagatgctgacgggctccctgcccttccaggggaaggaccggaaggagaccatgacactgattctgaaggcgaagctaggcatgccccagtttctgagcactgaagcccagagcctcttgcgggccctgttcaagcggaatcctgccaaccggctcggctccggccctgatggggcagaggaaatcaagcggcatgtcttctactccaccattgactggaataagctataccgtcgtgagatcaagccacccttcaagccagcagtggctcagcctgatgacaccttctactttgacaccgagttcacgtcccgcacacccaaggattccccaggcatcccccccagcgctggggcccatcagctgttccggggcttcagcttcgtggccaccggcctgatggaagacgacggcaagcctcgtgccccgcaggcacccctgcactcggtggtacagcaactccatgggaagaacctggtttttagtgacggctacgtggtaaaggagacaattggtgtgggctcctactctgagtgcaagcgctgtgtccacaaggccaccaacatggagtatgctgtcaaggtcattgataagagcaagcgggatccttcagaagagattgagattcttctgcggtatggccagcaccccaacatcatcactctgaaagatgtgtatgatgatggcaaacacgtgtacctggtgacagagctgatgcggggtggggagctgctggacaagatcctgcggcagaagttcttctcagagcgggaggccagctttgtcctgcacaccattggcaaaactgtggagtatctgcactcacagggggttgtgcacagggacctgaagcccagcaacatcctgtatgtggacgagtccgggaatcccgagtgcctgcgcatctgtgactttggttttgccaaacagctgcgggctgagaatgggctcctcatgacaccttgctacacagccaactttgtggcgcctgaggtgctgaagcgccagggctacgatgaaggctgcgacatctggagcctgggcattctgctgtacaccatgctggcaggatatactccatttgccaacggtcccagtgacacaccagaggaaatcctaacccggatcggcagtgggaagtttaccctcagtgggggaaattggaacacagtttcagagacagccaaggacctggtgtccaagatgctacacgtggatccccaccagcgcctcacagctaagcaggttctgcagcatccatgggtcacccagaaagacaagcttccccaaagccagctgtcccaccaggacctacagcttgtgaagggagccatggctgccacgtactccgcactcaacagctccaagcccaccccccagctgaagcccatcgagtcatccatcctggcccagcggcgagtgaggaagttgccatccaccaccctgtgaggcaccagggcattcgggccacagggcggtgctagcttgacacagtcagcatgcttcccagagggagcaggccggaaccacagggccagagggagctggaacccgaggggccggggaagctgccagcccagaacacccctaatgagggtgtgagaagtgccttctccttccccaggatggactcttctcggctcaggctctgctggtggaaagcgattcactgtataaac

SEQ ID NO: 18094 - DNA, 544 bp, Homo sapiens
  source 1..544: mol_type = unassigned DNA
ctgtactgccaccccgctactaggaccggggcgcaaggtcctgggggtggtgctcagaggtggattcctttgcccaggcacgcccctgggaccaggcctccaaaggagaagaatggacagacctcaggggaagaagctggacttcagccgtccaaggtcttcctggtgcggaaagtcacccggcctgacagtgggcacctgtatgctatgaaggtgctgaagaaggcaacgctgaaagtacgtgaccgcgtccggaccaagatggagagagacatcctggctgatgtaaatcacccattcgtggtgaagctgcactatgccttccagaccgagggcaagctctatctcattctggacttcctgcgtggtggggacctcttcacccggctctcaaaagaggtgatgttcacggaggaggatgtgaagttttacctggctgagctggctctgggcctggatcacctgcacagcctgggtatcatttacagagacctcaagcctgagaacatccttctggatgaggagggccacatcaaactcactg

SEQ ID NO: 18095 - DNA, 3023 bp, Homo sapiens
  source 1..3023: mol_type = unassigned DNA
agaagtaggaagagtaacggggccctctggtcaccggcttgagccccaccatgcagaccccagcagatttccccagggttgagagagacttggttccctgtcccagaaaggatgagggcgtcctcaaggagatctccatcacgcaccacgtcaaggctggctctgagaaggctgatccatcccatttcgagctcctcaaggttctgggccagggatcctttggcaaagtcttcctggtgcggaaagtcacccggcctgacagtgggcacctgtatgctatgaaggtgctgaagaaggcaacgctgaaagtacgtgaccgcgtccggaccaagatggagagagacatcctggctgatgtaaatcacccattcgtggtgaagctgcactatgccttccagaccgagggcaagctctatctcattctggacttcctgcgtggtggggacctcttcacccggctctcaaaagaggtgatgttcacggaggaggatgtgaagttttacctggctgagctggctctgggcctggatcacctgcacagcctgggtatcatttacagagacctcaagcctgagaacatccttctggatgaggagggccacatcaaactcactgactttggcctgagcaaagaggccattgaccacgagaagaaggcctattctttctgcgggacagtggagtacatggcccctgaggtcgtcaaccgccagggccactcccatagtgcggactggtggtcctatggggtgttgatgtttgagatgctgacgggctccctgcccttccaggggaaggaccggaaggagaccatgacactgattctgaaggcgaagctaggcatgccccagtttctgagcactgaagcccagagcctcttgcgggccctgttcaagcggaatcctgccaaccggctcggctccggccctgatggggcagaggaaatcaagcggcatgtcttctactccaccattgactggaataagctataccgtcgtgagatcaagccacccttcaagccagcagtggctcagcctgatgacaccttctactttgacaccgagttcacgtcccgcacacccaaggattccccaggcatcccccccagcgctggggcccatcagctgttccggggcttcagcttcgtggccaccggcctgatggaagacgacggcaagcctcgtgccccgcaggcacccctgcactcggtggtacagcaactccatgggaagaacctggtttttagtgacggctacgtggtaaaggagacaattggtgtgggctcctactctgagtgcaagcgctgtgtccacaaggccaccaacatggagtatgctgtcaaggtcattgataagagcaagcgggatccttcagaagagattgagattcttctgcggtatggccagcaccccaacatcatcactctgaaagatgtgtatgatgatggcaaacacgtgtacctggtgacagagctgatgcggggtggggagctgctggacaagatcctgcggcagaagttcttctcagagcgggaggccagctttgtcctgcacaccattggcaaaactgtggagtatctgcactcacagggggttgtgcacagggacctgaagcccagcaacatcctgtatgtggacgagtccgggaatcccgagtgcctgcgcatctgtgactttggttttgccaaacagctgcgggctgagaatgggctcctcatgacaccttgctacacagccaactttgtggcgcctgaggtgctgaagcgccagggctacgatgaaggctgcgacatctggagcctgggcattctgctgtacaccatgctggcaggatatactccatttgccaacggtcccagtgacacaccagaggaaatcctaacccggatcggcagtgggaagtttaccctcagtgggggaaattggaacacagtttcagagacagccaaggacctggtgtccaagatgctacacgtggatccccaccagcgcctcacagctaagcaggttctgcagcatccatgggtcacccagaaagacaagcttccccaaagccagctgtcccaccaggacctacagcttgtgaagggagccatggctgccacgtactccgcactcaacagctccaagcccaccccccagctgaagcccatcgagtcatccatcctggcccagcggcgagtgaggaagttgccatccaccaccctgtgaggcaccagggcattcgggccacagggcggtgctagcttgacacagtcagcatgcttcccagagggagcaggccggaaccacagggccagagggagctggaacccgaggggccggggaagctgccagcccagaacacccctaatgagggtgtgagaagtgccttctccttccccaggatggactcttctcggctcaggctctgctggtggaaagcgattcactgtataaacttttttttatgaaaaaaatggcatcaaccaccatggatttttacaagatccatttgcctttctgggagcagaaacagccattgcggccccaggaggggaactgagtcacgctggggctctctgagactctttagagcagctttgggatcccaccctggggacccccacgattggccacctgtagccatctgcacacacctccgagacagtccagtgtcacctctctcagagcatctggctgtttagcagaactcattctatccccaatcagctccttttccgttctgttctgctgggagttctagaaccacttcctgctacaggaggggtctcatgtcctgctggcttccagcttcaggcaccagcatccaccttggctctgccagtggatcccctgcggtcaggctgggcagccccagagagaggatgtggaaagcactttttggctgacttcatctggggttggcaacaggacagagttcacaggaggccagtgggcgggccatgagggacagggtcttttttcatttcttcctcagctggttactcagggttcatctgtccatggcctttctaataaact

SEQ ID NO: 18096 - DNA, 592 bp, Homo sapiens
  source 1..592: mol_type = unassigned DNA
ggggccctctggtcaccggcttgagccccaccatgcagaccccagcagatttccccagggttgagagagacttggttccctgtcccagaaaggtacagcagcaagaacccacagctctgcccttaaccccttcctggggatccctgccctgctgcctgcccgtgtgtctgccaggtgtcagacctatctgccctaggatgagggcgtcctcaaggagatctccatcacgcaccacgtcaaggctggctctgagaaggctgatccatcccatttcgagctcctcaaggttctgggccagggatcctttggcaaagtcttcctggtgcggaaagtcacccggcctgacagtgggcacctgtatgctatgaaggtgctgaagaaggcaacgctgaaagtacgtgaccgcgtccggaccaagatggagagagacatcctggctgatgtaaatcacccattcgtggtgaagctgcactatgccttccagaccgagggcaagctctatctcattctggacttcctgcgtggtggggacctcttcacccggctctcaaaagaggtgatgttcacggaggaggatgtgaagttttacctg

SEQ ID NO: 18097 - DNA, 2089 bp, Homo sapiens
  source 1..2089: mol_type = unassigned DNA
atgcagaccccagcagatttccccagggttgagagagacttggttccctgtcccagaaaggatgagggcgtcctcaaggagatctccatcacgcaccacgtcaaggctggctctgagaaggctgatccatcccatttcgagctcctcaaggttctgggccagggatcctttggcaaagtcttcctggtgcggaaagtcacccggcctgacagtgggcacctgtatgctatgaaggtgctgaagaaggcaacgctgaaagtacgtgaccgcgtccggaccaagatggagagagacatcctggctgatgtaaatcacccattcgtggtgaagctgcactatgccttccagaccgagggcaagctctatctcattctggacttcctgcgtggtggggacctcttcacccggctctcaaaagaggtgatgttcacggaggaggatgtgaagttttacctggctgagctggctctgggcctggatcacctgcacagcctgggtatcatttacagagacctcaagcctgagaacatccttctggatgaggagggccacatcaaactcactgactttggcctgagcaaagaggccattgaccacgagaagaaggcctattctttctgcgggacagtggagtacatggcccctgaggtcgtcaaccgccagggccactcccatagtgcggactggtggtcctatggggtgttgatgtttgagatgctgacgggctccctgcccttccaggggaaggaccggaaggagaccatgacactgattctgaaggcgaagctaggcatgccccagtttctgagcactgaagcccagagcctcttgcgggccctgttcaagcggaatcctgccaaccggctcggctccggccctgatggggcagaggaaatcaagcggcatgtcttctactccaccattgactggaataagctataccgtcgtgagatcaagccacccttcaagccagcagtggctcagcctgatgacaccttctactttgacaccgagttcacgtcccgcacacccaaggattccccaggcatcccccccagcgctggggcccatcagctgttccggggcttcagcttcgtggccaccggcctgatggaagacgacggcaagcctcgtgccccgcaggcacccctgcactcggtggtacagcaactccatgggaagaacctggtttttagtgacggctacgtggtaaaggagacaattggtgtgggctcctactctgagtgcaagcgctgtgtccacaaggccaccaacatggagtatgctgtcaaggtcattgataagagcaagcgggatccttcagaagagattgagattcttctgcggtatggccagcaccccaacatcatcactctgaaagatgtgtatgatgatggcaaacacgtgtacctggtgacagagctgatgcggggtggggagctgctggacaagatcctgcggcagaagttcttctcagagcgggaggccagctttgtcctgcacaccattggcaaaactgtggagtatctgcactcacagggggttgtgcacagggacctgaagcccagcaacatcctgtatgtggacgagtccgggaatcccgagtgcctgcgcatctgtgactttggttttgccaaacagctgcgggctgagaatgggctcctcatgacaccttgctacacagccaactttgtggcgcctgaggtgctgaagcgccagggctacgatgaaggctgcgacatctggagcctgggcattctgctgtacaccatgctggcagggtgagtgcccctggcctggacccttccccactcctgcagccctagcacttgggctgagtggtgcttgtctgataggaatggctcagccagccccgccccaggatggtctggaaatagggacatgctcctgcctccaggagctctaccttgggagtaccccatctgagggggagacacagtctcccaccgcagccccagccccagtatggaggccagagtctgtacccagaccgtgcgggcttttctgcagatatactccatttgccaacggtcccagtgacacaccagaggaaatcctaacccggatc

SEQ ID NO: 18098 - DNA, 3202 bp, Homo sapiens
  source 1..3202: mol_type = unassigned DNA
actgcggcagccccggactctgcctgctcctgccatggtgccgtggccctgctgggcggatggagcaggatcccaagccgccccgtctgcggctctgggccctgatcccctggcttcccaggaagcagcggcccaggatcagccagacctctctgcctgtccctggccctggctctggcccccagcgggactcggatgagggcgtcctcaaggagatctccatcacgcaccacgtcaaggctggctctgagaaggctgatccatcccatttcgagctcctcaaggttctgggccagggatcctttggcaaagtcttcctggtgcggaaagtcacccggcctgacagtgggcacctgtatgctatgaaggtgctgaagaaggcaacgctgaaagtacgtgaccgcgtccggaccaagatggagagagacatcctggctgatgtaaatcacccattcgtggtgaagctgcactatgccttccagaccgagggcaagctctatctcattctggacttcctgcgtggtggggacctcttcacccggctctcaaaagaggtaatatacatgattcaaaagaaaaatattcatgaagaagtcttcctcccaccccagccccctctattcccatctataggtgatgttcacggaggaggatgtgaagttttacctggctgagctggctctgggcctggatcacctgcacagcctgggtatcatttacagagacctcaagcctgagaacatccttctggatgaggagggccacatcaaactcactgactttggcctgagcaaagaggccattgaccacgagaagaaggcctattctttctgcgggacagtggagtacatggcccctgaggtcgtcaaccgccagggccactcccatagtgcggactggtggtcctatggggtgttgatgtttgagatgctgacgggctccctgcccttccaggggaaggaccggaaggagaccatgacactgattctgaaggcgaagctaggcatgccccagtttctgagcactgaagcccagagcctcttgcgggccctgttcaagcggaatcctgccaaccggctcggctccggccctgatggggcagaggaaatcaagcggcatgtcttctactccaccattgactggaataagctataccgtcgtgagatcaagccacccttcaagccagcagtggctcagcctgatgacaccttctactttgacaccgagttcacgtcccgcacacccaaggattccccaggcatcccccccagcgctggggcccatcagctgttccggggcttcagcttcgtggccaccggcctgatggaagacgacggcaagcctcgtgccccgcaggcacccctgcactcggtggtacagcaactccatgggaagaacctggtttttagtgacggctacgtggtaaaggagacaattggtgtgggctcctactctgagtgcaagcgctgtgtccacaaggccaccaacatggagtatgctgtcaaggtcattgataagagcaagcgggatccttcagaagagattgagattcttctgcggtatggccagcaccccaacatcatcactctgaaagatgtgtatgatgatggcaaacacgtgtacctggtgacagagctgatgcggggtggggagctgctggacaagatcctgcggcagaagttcttctcagagcgggaggccagctttgtcctgcacaccattggcaaaactgtggagtatctgcactcacagggggttgtgcacagggacctgaagcccagcaacatcctgtatgtggacgagtccgggaatcccgagtgcctgcgcatctgtgactttggttttgccaaacagctgcgggctgagaatgggctcctcatgacaccttgctacacagccaactttgtggcgcctgaggtgctgaagcgccagggctacgatgaaggctgcgacatctggagcctgggcattctgctgtacaccatgctggcaggatatactccatttgccaacggtcccagtgacacaccagaggaaatcctaacccggatcggcagtgggaagtttaccctcagtgggggaaattggaacacagtttcagagacagccaaggacctggtgtccaagatgctacacgtggatccccaccagcgcctcacagctaagcaggttctgcagcatccatgggtcacccagaaagacaagcttccccaaagccagctgtcccaccaggacctacagcttgtgaagggagccatggctgccacgtactccgcactcaacagctccaagcccaccccccagctgaagcccatcgagtcatccatcctggcccagcggcgagtgaggaagttgccatccaccaccctgtgaggcaccagggcattcgggccacagggcggtgctagcttgacacagtcagcatgcttcccagagggagcaggccggaaccacagggccagagggagctggaacccgaggggccggggaagctgccagcccagaacacccctaatgagggtgtgagaagtgccttctccttccccaggatggactcttctcggctcaggctctgctggtggaaagcgattcactgtataaacttttttttatgaaaaaaatggcatcaaccaccatggatttttacaagatccatttgcctttctgggagcagaaacagccattgcggccccaggaggggaactgagtcacgctggggctctctgagactctttagagcagctttgggatcccaccctggggacccccacgattggccacctgtagccatctgcacacacctccgagacagtccagtgtcacctctctcagagcatctggctgtttagcagaactcattctatccccaatcagctccttttccgttctgttctgctgggagttctagaaccacttcctgctacaggaggggtctcatgtcctgctggcttccagcttcaggcaccagcatccaccttggctctgccagtggatcccctgcggtcaggctgggcagccccagagagaggatgtggaaagcactttttggctgacttcatctggggttggcaacaggacagagttcacaggaggccagtgggcgggccatgagggacagggtcttttttcatttcttcctcagctggttactcagggttcatctgtccatggcctttctaataaactgttgagttgaagcacg

SEQ ID NO: 18099 - DNA, 580 bp, Homo sapiens
  source 1..580: mol_type = unassigned DNA
gcggcagccccggactctgcctgctcctgccatggtgccgtggccctgctgggcggatggagcaggatcccaagccgccccgtctgcggctctgggccctgatcccctggcttcccaggaagcagcggcccaggatcagccagacctctctgcctgtccctggccctggctctggcccccagcgggactcggatgagggcgtcctcaaggagatctccatcacgcaccacgtcaaggctggctctgagaaggctgatccatcccatttcgagctcctcaaggttctgggccagggatcctttggcaaagtcttcctggtgcggaaagtcacccggcctgacagtgggcacctgtatgctatgaaggtgctgaagaaggcaacgctgaaagtacgtgaccgcgtccggaccaagatggagagagacatcctggctgatgtaaatcacccattcgtggtgaagctgcactatggtaaagcttctggccctgcctgagctcctaccccacccatccttcgcccttgcctgtggtctgtacactgtcccaccgcctgcctggcaggccaagggagccagggccg

SEQ ID NO: 18100 - DNA, 2359 bp, Homo sapiens
  source 1..2359: mol_type = unassigned DNA
ccccggactctgcctgctcctgccatggtgccgtggccctgctgggcggatggagcaggatcccaagccgccccgtctgcggctctgggccctgatcccctggcttcccaggaagcagcggcccaggatcagccagacctctctgcctgtccctggccctggctctggcccccagcgggactcggatgagggcgtcctcaaggagatctccatcacgcaccacgtcaaggctggctctgagaaggctgatccatcccatttcgagctcctcaaggttctgggccagggatcctttggcaaagtcttcctggtgcggaaagtcacccggcctgacagtgggcacctgtatgctatgaaggtgctgaagaaggcaacgctgaaagtacgtgaccgcgtccggaccaagatggagagagacatcctggctgatgtaaatcacccattcgtggtgaagctgcactatgccttccagaccgagggcaagctctatctcattctggacttcctgcgtggtggggacctcttcacccggctctcaaaagaggtgatgttcacggaggaggatgtgaagttttacctggctgagctggctctgggcctggatcacctgcacagcctgggtatcatttacagagacctcaagcctgagaacatccttctggatgaggagggccacatcaaactcactgactttggcctgagcaaagaggccattgaccacgagaagaaggcctattctttctgcgggacagtggagtacatggcccctgaggtcgtcaaccgccagggccactcccatagtgcggactggtggtcctatggggtgttgatgtttgagatgctgacgggctccctgcccttccaggggaaggaccggaaggagaccatgacactgattctgaaggcgaagctaggcatgccccagtttctgagcactgaagcccagagcctcttgcgggccctgttcaagcggaatcctgccaaccggctcggctccggccctgatggggcagaggaaatcaagcggcatgtcttctactccaccattgactggaataagctataccgtcgtgagatcaagccacccttcaagccagcagtggctcagcctgatgacaccttctactttgacaccgagttcacgtcccgcacacccaaggattccccaggcatcccccccagcgctggggcccatcagctgttccggggcttcagcttcgtggccaccggcctgatggaagacgacggcaagcctcgtgccccgcaggcacccctgcactcggtggtacagcaactccatgggaagaacctggtttttagtgacggctacgtggtaaaggagacaattggtgtgggctcctactctgagtgcaagcgctgtgtccacaaggccaccaacatggagtatgctgtcaaggtcattgataagagcaagcgggatccttcagaagagattgagattcttctgcggtatggccagcaccccaacatcatcactctgaaagatgtgtatgatgatggcaaacacgtgtacctggtgacagagctgatgcggggtggggagctgctggacaagatcctgcggcagaagttcttctcagagcgggaggccagctttgtcctgcacaccattggcaaaactgtggagtatctgcactcacagggggttgtgcacagggacctgaagcccagcaacatcctgtatgtggacgagtccgggaatcccgagtgcctgcgcatctgtgactttggttttgccaaacagctgcgggctgagaatgggctcctcatgacaccttgctacacagccaactttgtggcgcctgaggtgctgaagcgccagggctacgatgaaggctgcgacatctggagcctgggcattctgctgtacaccatgctggcaggatatactccatttgccaacggtcccagtgacacaccagaggaaatcctaacccggatcggcagtgggaagtttaccctcagtgggggaaattggaacacagtttcagagacagccaaggacctggtgtccaagatgctacacgtggatccccaccagcgcctcacagctaagcaggttctgcagcatccatgggtcacccagaaagacaagcttccccaaagccagctgtcccaccaggacctacagcttgtgaagggagccatggctgccacgtactccgcactcaacagctccaagcccaccccccagctgaagcccatcgagtcatccatcctggcccagcggcgagtgaggaagttgccatccaccaccctgtgaggcaccagggcattcgggccacagggcggtgctagcttgacacagtcagcatgcttcccagagggagcaggccgg

SEQ ID NO: 18101 - DNA, 486 bp, Homo sapiens
  source 1..486: mol_type = unassigned DNA
caccacgtcaaggctggctctgagaaggctgatccatcccatttcgagctcctcaaggttctgggccagggatcctttggcaaagtcttcctggtgcggaaagtcacccggcctgacagtgggcacctgtatgctatgaaggtgctgaagaaggcaacgctgaaaggtgagtggggacacctccctgtgcagaacccaggcttggctgagggaggcagcccagacttcaagggccttgggtctggcaagggagacagctctgtcttcaggagcacctagttcaaaggtggagaaacaggcctatttctcagctatccctcgccagccaatcctcctccccctaagccaagtgctagtgactggctgtgaaggtctggaaggtggtaatagggtaaatgcaatgtgtttgtcagggggcggggccctcaactaccaagctggtcaagcagaggcattctgactgttgatgctagaagagtctggggg

SEQ ID NO: 18102 - DNA, 530 bp, Homo sapiens
  source 1..530: mol_type = unassigned DNA
aaggtgctgaagaaggcaacgctgaaagtacgtgaccgcgtccggaccaagatggagagagacatcctggctgatgtaaatcacccattcgtggtgaagctgcactatgccttccagaccgagggcaagctctatctcattctggacttcctgcgtggtggggacctcttcacccggctctcaaaagaggtgatgttcacggaggaggatgtgaagttttacctggctgagctggctctgggcctggatcacctgcacagcctgggtatcatttacagagacctcaagcctgagaacatccttctggatgaggagggccacatcaaactcactggtgagtggagggcgcctgccccctcgggacccaggggaggacaggacaaggtcatgataggtctcggctgagtgctgggggctcattcttcccgagaagccgtgccagttacttggaagtggtcaaaaactcaggcctcagacttggaacaccctcagctggaatcccagcccctcattgtgtaacgttgagcaag

SEQ ID NO: 18103 - DNA, 857 bp, Homo sapiens
  source 1..857: mol_type = unassigned DNA
aaatcacccattcgtggtgaagctgcactatgccttccagaccgagggcaagctctatctcattctggacttcctgcgtggtggggacctcttcacccggctctcaaaagaggtgatgttcacggaggaggatgtgaagttttacctggctgagctggctctgggcctggatcacctgcacagcctgggtatcatttacagagacctcaagcctgagaagtgagtgaagcctccagccccaccccagcctccccaggggaggcctcttctaggacagggccatcctgaggtgggtgggcatggctttctccagaaacgtctccctctcttgggcaatctgagggatgggtgagtggggtgggtggtagtgccagctgcccagtcactaatgctaccattaccaagggccaggtactttgcatgcaggtaatgttgcccgtctttttttgctaatctagtgtgacatttgagatgccacctttagaggtctttccttgataaagccctatagaattttccctaatatctaactaccctcaaatgataactaaggagccaggggcaggtggtgagttggaataagatctggctttagtgttaggcagccctgtattcaaatcctgtctccacctactagctagacttactagctcaatgactgtagagctacttaactgccctgagccttagttttcccattagcaaaacggggccctaatagtacttgcctcacacagttgcttcaaggattagcaaaaaagataggcaacacccctgcgtggtactgctaccaccctgcaacacccgcccagtcatcagagagaattgggtggagcacctcctctgggctgaaccca

SEQ ID NO: 18104 - DNA, 304 bp, Homo sapiens
  source 1..304: mol_type = unassigned DNA
gagaccatgacactgattctgaaggcgaagctaggcatgccccagtttctgagcactgaagcccagagcctcttgcgggccctgttcaagcggaatcctgccaaccggctcggttcctcgtctcaatgggagatgatgatcccaagcttgcttcagggctctgttgatgaaatgaggttgtgtgaacatgccggcatgtagctccggccctgatggggcagaggaaatcaagcggcatgtcttctactccaccattgactggaataagctataccgtcgtgagatcaagccacccttcaagcca

SEQ ID NO: 18105 - DNA, 498 bp, Homo sapiens
  source 1..498: mol_type = unassigned DNA
gctcagcctgatgacaccttctactttgacaccgagttcacgtcccgcacacccaaggattccccaggcatcccccccagcgctggggcccatcagctgttccggggcttcagcttcgtggccaccggcctgatggaagacgacggcaagcctcgtgccccgcaggcacccctgcactcggtggtacaggtcattgataagagcaagcgggatccttcagaagagattgagattcttctgcggtatggccagcaccccaacatcatcactctgaaagatgtgtatgatgatggcaaacacgtgtacctggtgacagagctgatgcggggtggggagctgctggacaagatcctgcggcagaagttcttctcagagcgggaggccagctttgtcctgcacaccattggcaaaactgtggagtatctgcactcacagggggttgtgcacagggacctgaagcccagcaacatcctgtatgtggacgagtccgggaatccc

SEQ ID NO: 18106 - DNA, 555 bp, Homo sapiens
  source 1..555: mol_type = unassigned DNA
ttttgacaggttaacttagagctacctgtagacacctacacagagtcagtagcagcagcaataagaccatcatttcagccccttccccttctctcggatgccaagtccatgcacccgtccctctgcaccctgtctgtgtagctttctaatctctggccgctgacctgggccactagccacctccccacactgagaactgaccccagccccctgcccctaggttgtgcacagggacctgaagcccagcaacatcctgtatgtggacgagtccgggaatcccgagtgcctgcgcatctgtgactttggttttgccaaacagctgcgggctgagaatgggctcctcatgacaccttgctacacagccaactttgtggcgcctgaggtgctgaagcgccagggctacgatgaaggctgcgacatctggagcctgggcattctgctgtacaccatgctggcagggtgagtgcccctggcctggacccttccccactcctgcagccctagcacttgggctgagtggtgcttgtctgataggaatggctcagccagccccgc

SEQ ID NO: 18107 - DNA, 639 bp, Homo sapiens
  source 1..639: mol_type = unassigned DNA
aacacagtttcagagacagccaaggacctggtgtccaagatgctacacgtggatccccaccagcgcctcacagctaagcaggttctgcagcatccatgggtcacccagaaagacaagcttccccaaagccagctgtcccaccaggacctacagcttgtgaagggagccatggctgccacgtactccgcactcaacagctccaagcccaccccccagctgaagcccatcgagtcatccatcctggcccagcggcgagtgaggaagttgccatccaccaccctgatggactcttctcggctcaggctctgctggtggaaagcgattcactgtataaacttttttttatgaaaaaaatggcatcaaccaccatggatttttacaagatccatttgcctttctgggagcagaaacagccattgcggccccaggaggggaactgagtcacgctggggctctctgagactctttagagcagctttgggatcccaccctggggacccccacgattggccacctgtagccatctgcacacacctccgagacagtccagtgtcacctctctcagagcatctggctgtttagcagaactcattctatccccaatcagctccttttccgttctgttctgctgggagttct

SEQ ID NO: 18108 - DNA, 543 bp, Homo sapiens; identical to SEQ ID NO: 18088
  source 1..543: mol_type = unassigned DNA

SEQ ID NO: 18109 - DNA, 500 bp, Homo sapiens; identical to SEQ ID NO: 18089
  source 1..500: mol_type = unassigned DNA

SEQ ID NO: 18110 - DNA, 3186 bp, Homo sapiens; identical to SEQ ID NO: 18090
  source 1..3186: mol_type = unassigned DNA

SEQ ID NO: 18111 - DNA, 560 bp, Homo sapiens; identical to SEQ ID NO: 18091
  source 1..560: mol_type = unassigned DNA

SEQ ID NO: 18112 - DNA, 3131 bp, Homo sapiens; identical to SEQ ID NO: 18092
  source 1..3131: mol_type = unassigned DNA

SEQ ID NO: 18113 - DNA, 2596 bp, Homo sapiens; identical to SEQ ID NO: 18093
  source 1..2596: mol_type = unassigned DNA

SEQ ID NO: 18114 - DNA, 544 bp, Homo sapiens; identical to SEQ ID NO: 18094
  source 1..544: mol_type = unassigned DNA

SEQ ID NO: 18115 - DNA, 3023 bp, Homo sapiens; identical to SEQ ID NO: 18095
  source 1..3023: mol_type = unassigned DNA

SEQ ID NO: 18116 - DNA, 592 bp, Homo sapiens; identical to SEQ ID NO: 18096
  source 1..592: mol_type = unassigned DNA

SEQ ID NO: 18117 - DNA, 2089 bp, Homo sapiens; identical to SEQ ID NO: 18097
  source 1..2089: mol_type = unassigned DNA

SEQ ID NO: 18118 - DNA, 3202 bp, Homo sapiens; identical to SEQ ID NO: 18098
  source 1..3202: mol_type = unassigned DNA

SEQ ID NO: 18119 - DNA, 580 bp, Homo sapiens; identical to SEQ ID NO: 18099
  source 1..580: mol_type = unassigned DNA

SEQ ID NO: 18120 - DNA, 2359 bp, Homo sapiens; identical to SEQ ID NO: 18100
  source 1..2359: mol_type = unassigned DNA

SEQ ID NO: 18121 - DNA, 486 bp, Homo sapiens; identical to SEQ ID NO: 18101
  source 1..486: mol_type = unassigned DNA

SEQ ID NO: 18122 - DNA, 530 bp, Homo sapiens; identical to SEQ ID NO: 18102
  source 1..530: mol_type = unassigned DNA

SEQ ID NO: 18123 - DNA, 857 bp, Homo sapiens; identical to SEQ ID NO: 18103
  source 1..857: mol_type = unassigned DNA

SEQ ID NO: 18124 - DNA, 304 bp, Homo sapiens; identical to SEQ ID NO: 18104
  source 1..304: mol_type = unassigned DNA

SEQ ID NO: 18125 - DNA, 498 bp, Homo sapiens; identical to SEQ ID NO: 18105
  source 1..498: mol_type = unassigned DNA

SEQ ID NO: 18126 - DNA, 555 bp, Homo sapiens; identical to SEQ ID NO: 18106
  source 1..555: mol_type = unassigned DNA

SEQ ID NO: 18127 - DNA, 639 bp, Homo sapiens; identical to SEQ ID NO: 18107
  source 1..639: mol_type = unassigned DNA

SEQ ID NO: 18128 - DNA, 26795 bp, Homo sapiens
  source 1..26795: mol_type = unassigned DNA
ggcgaggagcgagccgtgcggccagagcgggaaagagactcgtctttgcgtccgagttctggagccgccgcaccccgactcctggggccgcggcagcggctgcgaggggacgggcgtccgctgtctcctgggttcccctcgtagcgacccgcgggatcggaaaaaaaggagaagatggaggaggagggtggcagcagcggcggcgccgcggggaccagcgcggacggcggcgacggaggagagcagctcctcactgtcaagcacgagctgcggactgctaatttgacaggacatgctgagaaggtgggaatagaaaattttgagctcctgaaggtcctaggaactggagcttatggaaaagtatttctagttcgtaaaataagtggccatgatactggaaagctgtatgccatgaaagttttgaaaaaggcaacaatcgttcaaaaggccaaaaccacagagcatacaaggacagaacgacaagtcctggaacacattaggcagtcgccatttttggtaacattacattatgctttccagacagaaaccaaacttcatctcattttagattatataaatggtggtgaactttttactcatctttctcaaagagagcgtttcacagagcatgaggtgcagatttatgttggagagattgtgcttgccctcgaacatctccacaagttggggattatatatcgtgatattaagcttgagaatattctacttgattctaatggccatgtggtgctgacagattttggtctgagtaaggagtttgtggctgatgaaactgaaagagcatattccttttgtggaactattgaatacatggcaccagatattgtcagagggggagattcaggacatgacaaggcagttgactggtggagtttgggtgttctaatgtatgaattactaactggagcatctcctttcactgttgatggagaaaaaaattcccaagctgagatatctaggagaatattaaaaagtgagcctccatatccccaagaaatgagtgctttagcgaaagacctaattcagcgtcttttgatgaaagatcccaagaagagattgggatgtggtccacgtgatgcagatgaaatcaaagaacatctcttctttcagaaaataaattgggatgatttagccgccaaaaaagtgcctgcaccatttaagccagtcattcgagatgaattagatgtgagtaactttgcagaagagttcacagaaatggatcccacttattctcccgcagccctgccccagagttctgagaagctgtttcagggctattcctttgttgctccttccatcctattcaagcgtaatgcagctgtcatagaccctcttcagtttcacatgggagttgaacgtcctggagtgacaaatgttgccaggagtgcaatgatgaaggactctccattctatcaacactatgacctagatttgaaggacaaacccctgggagaaggtagtttttcaatttgtcgaaagtgtgtgcataaaaaaagtaaccaagcttttgcagtcaaaataatcagcaaaaggatggaagccaatactcaaaaggaaataacagctctgaaactctgtgaaggacaccccaatattgtgaagttgcatgaagtttttcatgatcagcttcacacgtttctagtgatggaacttctgaatggaggagaactgtttgagcgcattaagaaaaagaagcacttcagtgagacggaagccagctacatcatgaggaagcttgtttcagctgtaagccacatgcatgatgttggagtggtgcacagggatctgaaacctgagaatttattgttcaccgatgaaaatgacaatttggaaattaaaataattgattttggatttgcacggctaaagccaccggataatcagcccctgaagactccatgcttcacccttcattatgccgccccagagctcttgaatcagaacggctacgatgagtcctgtgacctgtggagcttgggcgtcattttgtacacaatgttgtcaggacaggttcccttccaatctcatgaccgaagtttgacgtgtaccagcgcggtggaaatcatgaagaaaattaaaaagggagatttctcctttgaaggagaagcctggaagaatgtatcccaagaggctaaagatttgatccaaggacttctcacagtagatccaaacaaaaggcttaaaatgtctggcttgaggtacaatgaatggctacaagatggaagtcagctgtcctccaatcctctgatgactccggatattctaggatcttccggagctgccgtgcatacctgtgtgaaagcaaccttccacgcctttaacaaatacaagagagaggggttttgccttcagaatgttgataaggcccctttggctaagagaagaaaaatgaaaaagactagcaccagtaccgagacgcgcagcagttccagtgagagttcccattcttcttcctctcattctcacggtaaaactacacccaccaagacactgcagcccagcaatcctgccgacagcaataacccggagaccctcttccagttctcggactcagtagcttaggcatggtaggagtgtatcagtgatccattgcacctttattccctcagcatatgcctgaggcgatcttttatgcttttaaaaatgtttcccgttggtctcattggaatctgcctcctaatgatttttttcaggaaaacctgtttggttatcctcattcaaaagcactggacagagaatgttactgtgaatagagcacatattactctttttagcaacctagcatgatgccaacaagactattcttgaaagagcaaaggttcctgtaaatttaattagggctagatttgagctgcttgtaagtcacaggttttccagatgtctgccaacaagaaatgactcatactgtgatgataccttttgctttgccttgtggacaatgtgggtttttgaaatttgcacccttcaaacaatgatttatcagagaaaggggtctgttttcaaaaaagattctgtaatgaattttatgtgtggcatatacttatttcttgagagaagattttaacttattgtttttattttatggttacatatgatgataacctgctattattaaactttttctaaaaagtgaaaaaaaaaaaaaaagatataagaactcaaggtcccatactctgtattcgggatccatctgagatgcatgctaagctatgtgtatgtttttaattttgcactgctctttcctggcaatttgttttaatggttattgcagaatattaaggtacatgtctctctgttttaagtaatattgcactttataaaaaagtatgaataaagcaaactattttataaagtgcactgtttaaagcatttgcactgtatttttgccatttattttcattttctactttaaatttgtcctcacattcctcttctactttgtatgcaacaagtagaatggggcatgttgtgtcatgtagtcagccacttatgcaccaatgtgaggaaaacctaaagggaaattaaactaaacactgtgcttcatatttgtacactgtgttgtactacagtgaggaatttcctcctgtagtcatatattatgtacataatattttagaatcatacctatgacttgtttggaaatttttctgttaaattttaaatccagaaagcatattttataaacttatgcagagcacttttattgctcaaaagttctgaattcatacagaaaacaagtactatgtgatgaaaacatttcattaaaagattgctgcatttaaaaatacaattaattcgttccctatgcaaaaaaaaaaaaaaaaaaaaaagaagtgatagggtttgtgtgttatattttcttttaaagccatcatgtgaaatgtcaggactgagaaaagtgatttttttgctttgtttacaggaatcatgcttaaagagataatgcccaacatgtttattttatagtttttgttaatgataaccttttgagcattagtttggaatttggacatgatatttatttattcctttcttgaggttatagcagcattaatttcaaccagttatgaatactaaaaatattgcactctatgtaatagtagtatatttattactaaatcaatgtatatattaatagcacaggcaaaaaatggcaaatattaaaatattttcaaaatattatattatcctgttcacattttgtccacagtggttattgggaataatattttacactttttgctggcccaaatggctacataatattgagttaatgaaagttttctactcccagctttcagttattcctagtaattatgggaaattttgtgtgaattattaccaaactattgctaattcacaaaatgtgattccatcaggcacagatctctagtaatcaagaaaatgaccatatttataattatattggacatattgggaacatatttggctcttcaagccattttttaaactgtgcatcctggtagaaaatactagttataaagtacaaactaaagggactatgttgctaatagaaaatgatccagaaaaatggtcagacagtatacagattgatgatgtgattgatttcattgtgaatattggaaattaatgggtttcattttcatttatttcccttgcctcttcttgaggaggattcgacaggcgatgaaatgggtaaaaaggcagtcagactaacaggaagaaggaaagataggctagctgtcaactgatgagcctgcctgaataatctcaaatgggcttttgaaaagaccttaacaaacactgttgcactcttgtcaaatatctttatctacaccctacttataagtaccaaaaagacagcatttgatgccaagtttgaagcagttaggtcctatgcaggctgtgtattaacatacagtgaattgcactttaaaattcagaaagctttcatttggtcacatcaaaaataaacactacaaaatatataaaaagttaaatgataggactctttttttggtattaagagtaaaatagaagaagatctaagaaatacaaatacttacattatttctccttatgacattaactttgggactagagccacaccaccccctcccttcttcacttactgattgtattgcatataattttcatgccaacataaatcctgattcatatattttgtaactgtatatgacaaattgagaggcaagaataagaaaaggaagataatagaggaaagatgttaagaaagaccagtttcttctaattactctgccagatcgtgtgtctgaaagaggttaattagcattttgaaattgattggctgagtgtggtggctcaggcctgtaatccttgtgctttgggagtataagactggagaatcacttgaaaccaggagttagagaccaacctgggcaacatagtgagacactgtctctccaaaaataaaaataaaaattagctgagcatggtggctcatgggaggccaacatgtggaggatcgcttgagcccaggagttcgaggctgcagtgagctgtgatcacaccactgcactccagcctgggcaacagagcgagaccctgtcttaagaaaaaaagaaattcattaattcttccaaacctttataaagtaagaaaccactgaattactagaatagaaagtcagtctcctgagttaatttccacattgttgtctgtcttggagtcacaggttcattacccaagaaaactgccttttaatttttttagattactgttgatttcttaagtatgtaaatgactaacttttaaatataaggtaagttattttaaagaaatctactaagatagaagtcactttttttaaagtaaggaaattccttttgtatctcagtttatgttctcaaatacactactttataaaagtatacaattgactggatacttattcaccttgcccccatttcaagcgcctgttattgtcatatttattaaaaacagggtacctcataatggtgaaaatttctaaattattgggtctatatgtgccttagactgcctgattactttggctgttctcccagtgactgataataatagcatgatttgagtgttcatgtgagaatacatctaatattccttaagatctaagtaaataagttaaattctgatatgccacttatgtcaaaataattgttatatagatgaattattactgtaacatcatgaagtatcttaaaattatatgacttttggcctctcaaatgtcttacatgataataccccaatttccagtctttaattgattgtatacctcacgtaagtgtctgtcatcacttgatacctgtatctggcactaaaacaaatgtagccggctctaatgaaatttgaagtttggataggagacattgtaaaactcaagaatgggaaaaaaaaattttaacagaagtatgtatgaaggaaatattttaagtataatctacccaaagaaaataactgctacagccaacattaaaggttttattccctgttttgttaagtaacttcactccaaattgtgacattctttagagaaaatattttccttaagagtagttatttacgtgttttattgggggagcatattttcaggggggcaacatcttgctaagaacatttgattagcctcacttctgtcctcaccttctatattgcttacttttcaagatatttcttctgagcccttttctttgtatgcccagctccctgttatgtaattaagtagttgattaccattccaaatgcttcccctacacaaggctgttgtccaccctgtttcatgaatttgtgaattaagtaggtgcctaatattttcctactattagggtgaaaaggaataagaaactaaagtggcttccaaatgtttgtgtcttggtttcttcaccctagtgcaaaataggaaatgtttattggcagtcatttcttttccattactccttttaaccacattacaaaaagctaggattttgtgtctagaaggagacttgtattaaaagacaagattcttagtagttattcatcaggcttaagtttcctggtgtatttcttgtgggagaggtagaaggacattttgtagtagtattctaactattaatataatgctgcttgggttatcagaaagtattgaatacttcagataagtcaagttagtatttagtatagcagctgttcttcagagcacaggaaactgggatagtatgtagtattatgctgtttccattattgtttctcattgcataacacttttaatttatatgttggtatacaatttgcccctttactaaaaaaaaaaatctagtttcattcttgttccttgccacattaagcagttttttcatttacgttttaaattttcttaatattagaagaaaaagaaaacagaacaaaagagaaatgtcatgacttagaaaaggaaattttaagttttatggaatactgtagctttattttctgacatttctgcttatagatagattagaaaatccttgtttcttttgtttgctttgttttaaaatccagtaaggttgaggaacttgacattttaaaactgcagttttatttttaactacataagaggctggtcatgtgaaatgtgcactgctatgttggaatggatatgtatgtgacaattaacctcattaaagctctgttgctgtggtaggcattcagttattcctaatagtttattttaggtactatactgctatcctatttgctgaaattataaatactagcaatgtacaataattctcattctttggctgaataaaaacagaaatttaaaggtgctgtgtcacataaacagttaatgcctcagtactaaagttttgaaaaatattcctaaaaacttcacaggcatgaatttttgaaaagaagaagaaaccacatatacacatagaggaatttttaaagactggcattttaaagtatagctggtaaaaatggtatgtatccttatgtgtagaatttaaacttcttgaaaataatctaagctgcaacaatctatgtaactgctcttccacagttttacataaagataagaatttgtcttactaaaaggtaaatggaagattaaaaaagatgaaaaacattgtttttcctctattctatgtggacaattaaaagtatagccaagcctcagctcaaatgagttgcctttgtgtgagacagggtctcactctgtcaccctggccggagtgcagtggcgtgatcacagctcactgcaacctccacctcctgggctcaagcaatccttgtacctcagcctcctaagcagctgactaagtagactacaggcatgagccaccatgcccagctaatttttttttaatagctacaaggtatcagtatggtgcccaggctagtctcaaactcctggcttcaagcaatcctcccgcctcagcctcccagctttgcccagccgtgagttgctttgtgagttgtcttccttaactgcatcagttcatcccatactccgtacatgcactttttctcgtatttttctgcttttctatggtgtgtccacactcatttgtgtatttctacactggtatttcactacttattaagatatctgcatgtggacctacatttataaattgtaattccgttcagagaaataagaacttgattgggacagagctgggaaatgtttgtgatgaaaattattaggaataaggaaataatgatgctgtgtgagaaagcaagtagacttaaattctgagatagaaacatctgcaatcaacatagagaaggctactttacaaaaatgttatttcagtgcccgtatggacaaatctctttaaaaggctttgtctactgtgtacataaaggaacttataagcttcataaagtgcttatttttctctaggaagcccatgtgatagctctctcctctgttttcccactccttccccagcttttcctgctgcccactgctccaaacactgacatccagtggccagagaccagtccaaatggagcactaaaactacatatagatagtgatcatattgtttaaaatgttattgcaacatggtgtgtaaagtgcacaggtctgaaatatacagctcaataaatgtttacatatatatgcgcccatataaccatcattcagatcaagatgaggctcccagtcagtcctcatacataaccaccactctgacctctgtcactgttgttgacattcctatacatggaattatccagtctataggtttttgtgtctggtttaatttgatcagcattatgtctgtgaaatgcatctatgttgttgcatgtagcaataacagtagtttgttctttttcgttgctctgtagtattccatcagataaatacatcacaatttatccattctcccactgatagacattttggttgtttgtaatttttagcttttgtgtttaaagcagccataagcattcttgtgcatatattttaatggacacgtacactcatttctcttgtgtgtccacttaaaagtgaaacagctggctgcagtgagccttgatcgcaccactacattccatcctgggcgatagagtgagaccctgtctcaaaaaaacagacaaaaaaaaggagtgaaactactgagtcataagatgaatatatatttagctgtagaagatattaccaaatggttttcaacaatggttgtaccaatttacatacccaccaataatgtgtaagtgttctagttcttccacatcctcatcagtgcttggtaccatcagccctagtagtttagccactctgacaaatgtgtatatttgattgtggttttaaccattctggtgattttgtatttcactgagattttaaggtgtattttcctgataagtagtgatgtgtggaacacctttttatatttttattagtcatttggctatcctcaattaagtgcctgttcaagtcatttgttcatatttattgggttgtctttttttcttactgacttgcaggagtcttttatattttatggatatgagggtttttgtctgatattttaccataaatgtcttctctttagtttgcttttctactttctaagtgctttcctttgatgaccaaaaattttatgaagtccaatataccagtcttttatttaattgctaatacttttgcgtcgtatttaataaatgttcacaccaaggttatgaagatattcttatattcttctaaaagctttattggccgggtgaggtggctcatgcctgtaatcctagtgctttgggaggccaagccaggtggatcactggaggtcaggagttggagaccagcctggccaacatggtgaaaccccatctctactaaaagtataaaaattagccaggcatggtggtgcatgcctgtaatcccagctacgtgggaggctgaggcaggagaatcgcttgaacccaggaggcagaggttgcagtgagccaaggtcatgccactacactctagcctaggcaacagagcgagactctgtctcaaaaaataaaactaaaagctttattgttttaccatccacattaggtttacagtccatctactgctgatatttgtatatgatgtgaaatagtagccaaagtttatgtatttccatatgagtattaacttgacccagcacaatgtattgaaaagctgagttgtaatttttatgaagtcttcatatctggtagtgtaagacctctaacttttatctaatagttctaatagttttggctattcttaatcctttgcatttccatatacattttagaatcaccttgttagttttgggggcagaggatgttagggtttaattggtattgcattgaatgtataaatcaatttcaggagaaattatatcttaccaattttgagttttccaatgcatggacatggtatatccctctatttacttaggtatttaatttgtctcaccagtgttttatagatttacatgtagaggttagatttatatctaggtttttgacagttttactttattatcaaattgtttttaattagtttatagaaatatagtttttttggtatattaccctttcacttagaaaccttgttaaattcactttttaattctaatctgtatattattttagatttctttaagtctacagttatatcgtctgtaaataatgacagtttcatttctgccttttcaatttttatttttcttgccttattgagctgatcaggacctccaataacatgctaaatgaagtaatgacaatggactccttaaacttcttcaactcagaataagaattcaatatttttctattctatatatatatatttttttcttttcttttcttttttttttttttttttttttttttttgagacggagtctcgctctgccacccaggctggagtgcagtggctcaatctcagctcactgcaacctccacctcccaggttcaagtgattcttctgcctcagtctcccgggtggctgggaccacaggcatgcaccaccaccctcagctaatttttgtattattagtagagatggggtttcaccatattggccagactggcctcgaattcctgacctcgtgatccacccgcctcagcctcccaaagtgctgagattacaggcatgagccacctcacccagcccaatattatgttttatttaatttttttatagatatcatatagcagattgttttatttctaattttcagagagtttttactaaatgctttttctgcctctgttgagataatcttgtatttttcttctttattcttcaattttcaaatgctgaaaatagaataaattccattttcatgatgtattgcccttttcatatatcaatggatatagtttgctaatattttgcctaagatttttggatcataaggaggatagacctagactgggtgtggtatctcacacctgtaatcccaacactttgggaggccaagaggaaggattgctttagcccaggagttggagaccagcctgggcaacatagagagacctcatctctacaaaagattaattagccaaggatggtggtgcacacctgtagtaccaaatacctgggaggctgaggtgggagaatcacttgagtccaggaagcagaagttgcagtgaaccaagattgtaccactgtactcccacctgggcaacagagcaggagcctagcattaaaaaaagaagaagaagaagaagaagaaggaggaggaggaggaggaggaggaagaagaaggacagacctgtaatttttctgtctttaatatttttgtcaagttttggtatcaagattattctggcctcataaaaaaaaagttggagatgtgttccctttttttctacactctggaagagtttgcacctgatattattcctcctgtttaaaataattcaccattgaagccacttgaatgagaagttttctttgtgggaaagttgtcattaattggaatatatcttgtctacttacagttaatgtaattattattggttttaagtctaccatcttacaatttcttttacatttttgtcctatatcctcttggttcctgtattgtgtcttcttttgataaaccaaatattttcttttgtccattgtttcctcctatgttagttcgttagtaatttttagaaattcatttagtaccttaaagattacagcttgtatctttgacttgctgccttaaattggtacattaccacttcccaacaatgcaggaattttatgacagtttaaatctgttttccccttttttttttttttttttgagatggagtctttgtcgccaggctgcagtgcagtggcacgatcttggctcactgcaacctctgattccctggttcaagcgattctcctgcctcagcctcccgagtagctgggattacagacacaagccagcacacccagctaatttttgtatttttagtagagacggggtttcaccatgttggccaggatggtctagatctcctgacctcgtgatctgcccacctcagcctcccaaagtgctgggattacaggtattcccccttcttccttttatgttattgttgtcatgtattttacttctacattctatgtatgttttatctctatatatgtgttttagacttcataagacattatttttttttttttgagacagagtctcgctctgtcgcccaggctggagtgcagtggcgggatctcggctcactgcaagctccgcctcccgggttcatgccattctcctgcctcagcctcccaagtagctggggctacaggcgcctgccactacgcccggctaattttttgtatttttagtagagatggggtttcaccgttttagccgggatggtctcgatctcctgacctcgtgatccgcccgcctcggcctcccaaagtgctgggattacaggcgtgagccaccgcgcccggccgacattatttttattagtagtactactactatatattttaaagactctggctgggcactgtggctcacgcctgtaatcccagcactttgcgaggccaaggcaggtggatcacctgaggtcaggagttcgagaccagcctggctaacatggtgaaaccccgtttctactaaaaatacaaaaaatgagccaggagtggtagtgcatgcctgtaatcctagctacttgggaggctgaggcaggagaaacgcttgaacccggaagagggaggttgcagtgagccaaggtcgcaccattgcactccagattgggcaacaagagcgaaactccatctcaaaaaaaaaaaaaaaaaaatagactctatattgtttgtttgctcacatatttatgttttctggtgtttttctttccatcctgccttttttacttccatctgggattacttttcttcatctggagaattctctttagtatttattttagtgccagtcttctgacaatgaattctctcagcttttgttttttgaaaccttctttcttttgcctttatttttctgtatttttatttttttaagataaaattcatgtatcatgtaatatacccatctaatcattccattcagatacaattcaatgttacctttatttttgaaggatatttttgccttgtatgaaatactaggttcaccattttattttattttatttttgagaccaagtctcactctgtcacccaggctggagtgcagtggcacaatcttggctcactgcaacctccacctcctaggttcaagtgattcttgtgtctcagcctcccaggtagctgggattacaggcatgcaccaccacgcctggctaatttttgtgtttttagtagagatggggcttcaccacattagcgaggctggtctcaaactcctgacctcaagtgatctgcccacctcggcctcccaaagtgctgggattacaggtgtgagctactggcgcccagcctaggttcaccattttcaagatatcattccaatccttaagttctgtggaaaaagccattagttatatttcctttgaaggtaatgtgtcttttttctgtggtcacttttaagattttctcttcgtctttgtttttattttttattatacttttaagttctgggttacatgtgcagaacgtgcaggtttgttacataggtatacacgtgccctggtggtttgctgcacccatcaacctgtcaccaaattaggtatttctcctaatgttatccctcccctagcccccaaccccccgacaggccccagcgtgtgatgttcccctccctgtttccatgtgttctcattgttcaactcccacttatgagtgagaacatgcggtgtttagttttctgatcttttgatagtttgctgagaatgatggtttccagcttcatccatcctaagattggtaaacttcctgaatctgttggttgatgtccttccttattagaattcttaaccagtcattcttcaaatagttttttccaatccgttttctctctcccgttttctaggattgtgtgttatactatgttccatatgtctgttatagtcctttgtttgccatcttaatttctccctgtacttcaatctgtatagtttttactgacctaattaacttatcctgttctgctgagcctaatcaattttaaatttagttgtatatcttatattttggattctaaaatatccatgacacttttttgtaggtgccaagtctctgatcatatcttgtcttttcctctatattcttgaacacattaatcaaagtaattttaaaactcttgtctgagaaatccagtgtctgattactactactagttgtttgtttccattgtctgttgtcagtcatttggtgctgttttttagcatgccttataagtttggtgaaatgtcatacattgtgtgttaaatactgtaggggctttgaacgatgttatcttcctctaagatggttatgttttcttcttgcagtctgataaaatacaggcatatcactgtaatcctattgaaggttggttttagactttgttgggcttgtacatttcagttttgctcttactcctagcatatggcctctttgggctctcatctgaaaatctagggtgtttatcagggccacttcacctcggtgaccttgaattccaacctttccctcctcagtactaagagctgctcagctcgttagcctctcatctgctgctttttgctggatttcttgaagtctcaccttgttgcacaggagtctgcaattggcagacacctcaaggagatactgtaccagtatttcaggctcacttccctgaggtttcttcgctctgggattttgccccttaagtcctagctactttcccaagctccaacttttgtctcttcaaccaagtgggattactgcttgctgctaggtatttatttccctgtgttgtgaatttgcagtgccttgaagaagtaatcaaaatgaacacagagctcaccaaagtgtgcttcccttttttccctcctttcagctattttattgcagctcgtcaagttctccctgcattggtttgctccctgttgcctataaaagatgttctacttaacccttttcctgtttgccccaagaatacttgccagcagcacttgctgctgcagtatttaccccaagataactttgccacgaactctcgcttttattattactttcgtttagctctagtatattgacttcagaaaaaaaggacatcgttctctttatagcattctgttcttagtagtggtatttccatttacaaagtataataattctcgatcgctgaaaatgtcgaatcctagaaaatgtagcattcctacacgtgatgttaacatcattctcgaacagttcttggacagagatttatttaatgaattcgatttttctgaaatagatgattttgatgattcagatgcttctgatactagatctgtttagaaataacatcaagaacagtttttatattttattttcacattgaaaatcagtcagatttgctttagcctcaaagaatgtgtttacgtaaaattaaatgaatgctggcagtgagctgtactttttttttctaaaccggaaaagggttaatatagctttcatcgttgttttcagtaggagggctagtccaatcacaagctactctattgtggccaaaagcaaaaatctggtggtaatcatttttaatcgccattgttgatttctccgcagtggcttctggcattgataacttggttgtcacatggtcatatgtgaaggcacccggtttattcatttgttcctttgtccattaaatagtttttgagcacttctttcaggccaggtattactctagacacaagcaatataacaatatttaagataagatctgtgtcactttggcacttgcagcctgtttttatagaaaggctactaaatggttgccgagtcggacttgtggtaattaaaatagacttttcttgtgtgggggttgggagtgagaaaaaagagactggaatcttttagatgattacatcttctttatataaatatttttagccttttgaaaaaactctgtagagcttaatgcagttcacagttcacccacactacatcaatatttggcctaccttttgcaagcccaattccctaactatgagtttctgtgttacataaaaatctcaccgggagcacaattatttgacaatttgagttgaaactccaggaactgatttatggagaacaaacttagctctgaaattatgtctctttatgaatatcgacatgaaatctgatgaagaatcatcctactgtggtttcccattttaacttctgtttttgaaaaacatttcagatgcaactaagcacttattaaatgcttcgtgataccaaaaaatggcttggtggtctttgtcttccagaatagcataaatttcagtgttaccaagataaaaatataatctgggcacatgtcactgttaaaatattatagtcagatcaaggattctattcctgtctttgttattctttcccacttttgaaactttatccagtggatttttttttattacaaagacgtattccagagataacagtttgtacttctgattatgatccatgttcatgtgatcaaaaggcagcaataataggacactgtcatatatggtagctccatagaaactaggctgcactgggaggacagattcgccatcttgagcacctgtggcttggtattctcgaaattgtagcccctttggaatggctgaagaactaccagttaaaggtaaagaaaccagacacacaaggccacgtattgtatgattccacttacatgaaatgtccagaatgggcaaatccatagagacagaaagattagtgtttttcaggggctggtgggagggggaaatagggagtgacaatgtatacaggtgatggggttttggggtgatcaaaatgttctggaattaggtagtggtaatggttgcaagacattgtaaatgtagtaaaaaacaatgaatggtacacttaaaatgaattttatcttatattttaaaaaatcacacacaggccgtgcacagtggctcacgcctgtgatcccagcactttgggaggccgagacgggtggatcacctgaggtcaggagttggagaacagcctgaccaaaagggagaaactccatctctaataaaatacaaaaattagccgggcgtggtagcgcatgcctgtaatcccagctacttgagaggctgaggcaggagaatcactttaacccgggaggcagaggttgcagtgagcctagatcgcaccattgcactccagcctgggcaacaagagtgaaactccgtctcaaaaaaaaaaaaaaaaaaaatcacgcatagctagaaaggctgtagctagtttgaggaagtcagtactaacacctggctattcagagaatgccatcctgcccccctttctttggcatcaactctgaagcatagttatgttatggttggaaaatcttttctaactagagattaagctcttggggacaaagtaaacttgcctcttacaggaaacaccaaagttccagcttaacagagaaagggaacctccttgggaatcatacttttcccattattgggtagtgctcggacagatgtcaaagtgctgtatgtttccatggtgatcatatccagcttatcattacttgtatctttgccctaaagtttaatttcttactttgggactcattataataatgggagcaccggccttttgggaggccaaggcgggtggatcacgtgaggtcaggagtttgagagcagcctggccaacatggcgaaacgctgtctctactcacgcctgtaatcccagcactttgggaggctgaggcgggcggatcacgaggtcaggagatcgagaccatcctggctaacacggtgaaaccccgtctttactaaaaatacaaaaaattagccgggcgtggtggcggatgactgtagtcccagctgctcgggaggctgaggcagaagaatggcgtgaacctaggaggcagagcttgcagtgagccgagatcgcgccactgcactccagcctgggcaacagagcaagactctgtctcaaaaaaaaaaaaatacaaaaattagctgggcgtggtggtgggtgcctgtgggcccagctacttgggaggctgaggcaggatactctcttgaacccaggaagcagaggttgcagtgagccgagatcacgccattgcactccagcctaagcgacagagtgaaactccgtctcaaaaaaataaaaaataaaaaataatgtaagtaccaggcctttgtttgagttcagtttttctttggtgagcacttttctaaaatctctctcatcttacctatgttaactttgtctcagaagcaggctcatttgtgcagttagctgaaatatttattcagaaagtcatttatagcagttgtcttttcatcaaacataatacctttaaaatagcagaaaattaatgccattcatgattttgccattttactaagtagtcagaagctatgtctcccttagccccatcatatacatttgaaatatctttatcctagataatctgtattcatttgaatgcaaaagttttatcaatatgagtgaacttatacatctttttattcgctgatggagatatcacttgaaactttgttcctggcaaagcaaagagatgaaatgtattgaaaaaaatcgattagacttttaaaacttcaaaatacttttatagaaaatgtaaataagattgtttctaactgcagagtgttttacataaaatctttatgtgaagaatttatattgcagtacaataaagtcagtgctttttatatgttttgaatggtaaacattttgaaggtattttttgaagtaactaggtattgacattttttaataatatattttgaataaagcacacctaaaatgcatgaacttgtgtaagtatttggcatcattagtctagttgtacatatttttaaaaataagaatgggcttagaagataatgtatttgtagtaagtatagtatattttttactgagtgagtctgatacgtcttttagatatttgagtaaagtctactgttaaagtattccagatttttaaattccagtgtccttgctgtggaatctagtgttggctttctgatgtcagaataatcaaaccctgctcatatacacatccagaaaactttttctaatgatgatacatttagcaaaatcgcaagtctttaaaaattctagttaaatagacttacttgagacaagtgtacattgtgaaatctaaaataaaaatttgtgactatataatacataatcttcattatgtaggctatttctaaaaacttagtttctgtgctgatttcatgttaagtttttcaaacgttagcagattataatggctacagtaagttttgttctaaatctggtagccatttattattaaatgattaatgattaaacattaatcatttaataattacttaggaattataaattacaatgtcaaatcttcatacatcaggctccttgcactataattacttaaaattagtttgcatcaatagtctatataaacagatatcttagtttagaggaaaaaatattctattttctaggtactttaatagtttggtcttgtgaaaattacataggtgtgtgtttatgtatgtgtatacacacatgtattgggggcttacaataccaaattaataagactgcccctcactccttaaatcgactatctgccctgccagtaatcccccacctgtactggtatatacagagttttctctggtacaaatgattaatcaagaaaaagggtgtgaaatatttgtgttcgtttctttttaaatgaataatgggatacacataaactagtaacaccacattgatttcctaaagacctaatacagctttaagagggaataacattccagagctccaggattattttaatttagctttcaagatggttacgattttgatttaatatagagacttcatagtgttaaattttagggtttttttttttttttttgtatttttagtagagatggggtttcaccatgttggtcaggctggtctcgaactcctgccctgatgatctgcctgcctcggcctcccaaagtgctgggattacaggcgtgagccactgtgcccaacctaaattttaggtatttaaaacatccattgatgctttgttttgtttttgggttttttttttattgttgttacttaagggatgcatcttatttatttggttgacttttatctagacatcataaatgtgatgcttacttttttattagccacttcattgttgatgtcttaatgggagatcttagtttgatgaatctactctttgaaattttagtttgattagtcatttgtttctgctaggttttggcttttgttttgttttttgagtgataacctaagaagtttctacagtggaaaatatcattatgacatcttcatcccttataaagttgtttcatttagaggaatttttcaaagcctatgttgagaaatgggcaaattaagtaaagcatcataacaattttttttatagtgaactcattttatttatagaacggcaaacacattcactctttttgctaacatccggggcttttttcattgtgactgctttgcacacttaaaaatgtttctcccaggccgggcacggtggttcatgcctgtaatcccagcactttgggaggccgaggcgggcggatcacaaggtcaggagattgagaccatcctggctaacatggtgaaaccctgtctctactaaaaatacaacaaaaattagccgggcgtggtggcaggcgcctgtagtcccagctactggggaggctgagacaggagaatggcatgaacccgggaggcggagcttgtagtgagccgagatcgcgccactgcactccagcctgggcgacagagcaagactctgtctcaaaaaaaaaaaaaaaaaaaaagtttctcccagcaaaggctaactggaatttatttttgtttaaagacaaatacttttaatgtggataaaataaaagttggaagtatgcctttcatgtggcaaactggaaattagtggttagtactccattgcagcattaaataccaattctttacaatagggtgcacatatcagatgctgtttttcccttaacctttgcacttttcattgaaaatgttttcaaatcaaatcttgttttattgggtttcacatgattggactaatacttacatatatgcttctttttaaggtatttagacattgacaattagttatttccttatgagccatagctttgaaaaaccattttagaagaaatttccattttttaaacaaaagtgttgggaggccgaggcgggcagatcacgaggtcgagaccatcctggctaacatggtgaaaccccgtctctaataaaaatacaaaaaattagccaggcatggtggtgggcacctgtagtcccaggtacttgggaggctgaggcaggagaatggcgtgaacccgggaagcagaacttgcagtgagccaagatcgcaccacaccactgcactccagcctgggcgacagagcgagactccgtcttaaaaaaaaaaaaaaaaaaaaaaaagtgattttttaaagaaaagataccgataatttgtctttgctgtagatgaatgccacgtttttatatactaggactattactgaataatactgtttatttctttagatcaacgaatatattaaattctgtcttttttgttcaaataaacgctgtgagatgattgggaaggctgtgtgttgaagttagatgcaaagttggaccttgtacagtgagcctcttgtgagaactgagccatgaaagataaagcctgtcattcatgtctgccttggcctgtgcccagctttattagtaaaaaccattcagtttttactaatgatatctaccagtatctaaagagaaataccttcatcctctagaagaaaacaaggttacccaaagagctcacttaattccttcctttttccctgaacccttggttttaagtgaagagtaaaatgtactagatatgacactctctctgagtattactgaggattttgtggaaaaggcagtttggtactttatttccagcttagctgcagacttggtgaccctgagcaaatcactcagcctccctttgcctccatttcttcatctgtaaaatggggttaacctgtgcctccctgtctcaccagcatactgagggatcgattaaagaggattaaaaaaatccataaggtacactgattccaaagatgggtagaatgatatttaataatgaagactttctgttatatagcaatttaattttaaaagtatctttaccaggccaggtgcggtggctcactcctgtaatcccagcactttgggaggctgaggagggtggatcacgaggtcaggagatcaagaccatcctggctaacacggtgaaaccccgtctctactaaaagtacaaaaaaattagccaggcatggtgatgagcgcctgtagtcccagctactcacgaggctgaggcaggagaatggcatgaacccgggaggcggagcttgcagtgagccgagatcacgccactgcactccagcctggggggcagagtgagactctgtctcaaaaaaaaaataaaataaaagtatctttacccacttctctgtagtgaatattgactagcattttgaagtaggaactaacaaagtataaaattaagtagattttttatatttatgggtattgttctagtacaaatttatggtgtacactgtcggtctgagtgtgggtttaaaatatatcattgtgcttggctaatttgtagaatgtcttatttgaattgacttcatttatttcagaggaatgcatagatgatcagatcaaactgtcgtcatagcagtgttttcagcacatacgagaatcttagagtttaggagccttagagctcacccagtgcaatttcctgccggaagcagattccttcctggtgacctcaccaacaggtgcttgtgcagccttttcctgaaaactttttgggaaagtgggggctgctacctcactactttgatgtgtaccttttgttcaagaactttctaaaacttggagctaatcatgggttatttcagaagatgtaagcattttaagttttttattgaattccatccttatttaaaaggcctggttatgtaatattttctgttttttttttttttttttgtatggtttcccacattgattaggttgttttcttcattttcttaatagattaaaaatactttcttctctttctatttgtgtcttcttccatttagtatttatgggagggagcaagaagggaaaggatgtctatttttaaaattgactacaatcatgactgttcttcttgtcattctgtagcagctggatttattaccatctcttatttaaaggtccttcagaacacgttgaagcagttcatttcaggtcaatggctggtaagcaatgtcaggacctctggggaaggagaagctgacgggatcccagaggaaagaattgaggttgtttgctcccttgtagaaagcccacagatcccttcccagactagaaaaaaagtgccagagtgtcctgaaactttccttctaaggcacatacttcaaagagactggggattcctttgttttaaatataggtggggtctcacagtgttgcccaggctgggctcaagcgatcctgccacctgggcctcccaaagtgatgggattacaggcatgagccaccatgcacggccatggagattctaatgtggtgccagctgccaggtaagaaagctgtgagacaatgtgttgattttcctttactacgtcaggtttgaggacatcatctagcatcaacgggtaacgtcaccctttgttccatctttgggaaataatagtagtagcttgttactgttagctgacccctacattagcatcaataaagtaaatccctttaactttccttttggcctttcctttctctctctctgcctccccaccagccccgactctctcctgtgtgcgtacacatccacacacacctccatggtattccttctttctcccacctaagggaagctgtgcccgatcttgctgcagtccaggtcaccgtactgagatgagtcagccacagactctaaacactagcagcgattagccgtatgtagccaccaagtgcactgttttagacaggtttacacagctctttgctgtccactcatatcagctgtgtagtagcccaaggcagcctgtcaggcagaagaattaccaaccaaagtggatctattcataagataaaagatccggagtccgtgccctcttaaaaaacttttgtcttcagacatatgggtgcgtgttcatctctggccaaaactttgtttccagtttcaaagggctggttgcgaaggtggccttgtaacctttctgttgccggctctgttagttgcctgataagcagtagctaattcatcctcctcagaatttgagagtggcatctattagattcagaccaccaaggtgcctgcgcgggctctcctggttacgactgagtccccttttctcatctgtggggtgaacgcttctatttgcagaaatttgcttgcatctttttccttttatttattattactttttagagatgcggccttgctctgttgcccaggctggagtgcggtggactcttttcttttgttgatctttgccatcctctgcctggcttaatgaggttctttccctgcgtatttatgtcccaggagctcaccttccccctaggtttttaagaaggaagcagaaaatgttacaaagtataagggattctatgaagtccatagataggatttgctttgggagtagatgatttcttcttattttggtgtaaacatcaatttggatggcaattagaatgtctttagcctctttaaaaagcccttctggggcaaacctttgcaagtcactcagctggcatgtaatgagatttttatttgcatggctttttttttctaagtctctctagaagaacataaggacattctgaacatgcaaggaatacagttattctcacatcaaggatcaattttattttgtatcttcattttatgtcattttcctttattttattcacattaatctagcattaattccccccagagggaatgatatttttggttgctgccacctgtgttattaagtgacagcttttctttatctgcttttctgaatttcatatttatatactttattgtagttttttaaaatctattctagctgggctagaatcttccaagtattaattcataatgaacttccctcttctggaattgtttaggagggctaatgttccatgttcccttcgttgctatagatatgaagttatttcgatgttctttgagtgctttattatagcgataactggtactgcctttgattaaaggtgagctatatggagttaagcatttttatactagtaactatttattgagaattttcagaattctatagctacttgtctttaacagttataagaggcatgtatttttttttccttcatggtctggaagttagttttctctttgtttgggtagatcggaatgagttgttgagctgtgttgaaaacacacatgaatcaaaaaagcagatgtattgtagaaatgtgatgttttcatgtttcgggaatttgaccggaaagctttatgtatgggttttatttttaacaaagcagtaagggcttactttttaccaacttgtgtgtgtgtaaagatgtatttgttcaagctttaagaataaacctgtcaatgtacaaatgcctg

SEQ ID NO: 18129 - DNA, 2993 bp, Homo sapiens
  source 1..2993: mol_type = unassigned DNA
agttttccccagcccgggaatgagcggcgggcaccaggcatcggggccagcgcagccgccgaccgctgcccgtggcacgcacctccgaggatgtcgctgctcccccttcccgcacagctaatttgacaggacatgctgagaaggtgggaatagaaaattttgagctcctgaaggtcctaggaactggagcttatggaaaagtatttctagttcgtaaaataagtggccatgatactggaaagctgtatgccatgaaagttttgaaaaaggcaacaatcgttcaaaaggccaaaaccacagagcatacaaggacagaacgacaagtcctggaacacattaggcagtcgccatttttggtaacattacattatgctttccagacagaaaccaaacttcatctcattttagattatataaatggtggtgaactttttactcatctttctcaaagagagcgtttcacagagcatgaggtgcagatttatgttggagagattgtgcttgccctcgaacatctccacaagttggggattatatatcgtgatattaagcttgagaatattctacttgattctaatggccatgtggtgctgacagattttggtctgagtaaggagtttgtggctgatgaaactgaaagagcatattccttttgtggaactattgaatacatggcaccagatattgtcagagggggagattcaggacatgacaaggcagttgactggtggagtttgggtgttctaatgtatgaattactaactggagcatctcctttcactgttgatggagaaaaaaattcccaagctgagatatctaggagaatattaaaaagtgagcctccatatccccaagaaatgagtgctttagcgaaagacctaattcagcgtcttttgatgaaagatcccaagaagagattgggatgtggtccacgtgatgcagatgaaatcaaagaacatctcttctttcagaaaataaattgggatgatttagccgccaaaaaagtgcctgcaccatttaagccagtcattcgagatgaattagatgtgagtaactttgcagaagagttcacagaaatggatcccacttattctcccgcagccctgccccagagttctgagaagctgtttcagggctattcctttgttgctccttccatcctattcaagcgtaatgcagctgtcatagaccctcttcagtttcacatgggagttgaacgtcctggagtgacaaatgttgccaggagtgcaatgatgaaggactctccattctatcaacactatgacctagatttgaaggacaaacccctgggagaaggtagtttttcaatttgtcgaaagtgtgtgcataaaaaaagtaaccaagcttttgcagtcaaaataatcagcaaaaggatggaagccaatactcaaaaggaaataacagctctgaaactctgtgaaggacaccccaatattgtgaagttgcatgaagtttttcatgatcagcttcacacgtttctagtgatggaacttctgaatggaggagaactgtttgagcgcattaagaaaaagaagcacttcagtgagacggaagccagctacatcatgaggaagcttgtttcagctgtaagccacatgcatgatgttggagtggtgcacagggatctgaaacctgagaatttattgttcaccgatgaaaatgacaatttggaaattaaaataattgattttggatttgcacggctaaagccaccggataatcagcccctgaagactccatgcttcacccttcattatgccgccccagagctcttgaatcagaacggctacgatgagtcctgtgacctgtggagcttgggcgtcattttgtacacaatgttgtcaggacaggttcccttccaatctcatgaccgaagtttgacgtgtaccagcgcggtggaaatcatgaagaaaattaaaaagggagatttctcctttgaaggagaagcctggaagaatgtatcccaagaggctaaagatttgatccaaggacttctcacagtagatccaaacaaaaggcttaaaatgtctggcttgaggtacaatgaatggctacaagatggaagtcagctgtcctccaatcctctgatgactccggatattctaggatcttccggagctgccgtgcatacctgtgtgaaagcaaccttccacgcctttaacaaatacaagagagaggggttttgccttcagaatgttgataaggcccctttggctaagagaagaaaaatgaaaaagactagcaccagtaccgagacgcgcagcagttccagtgagagttcccattcttcttcctctcattctcacggtaaaactacacccaccaagacactgcagcccagcaatcctgccgacagcaataacccggagaccctcttccagttctcggactcagtagcttaggcatggtaggagtgtatcagtgatccattgcacctttattccctcagcatatgcctgaggcgatcttttatgcttttaaaaatgtttcccgttggtctcattggaatctgcctcctaatgatttttttcaggaaaacctgtttggttatcctcattcaaaagcactggacagagaatgttactgtgaatagagcacatattactctttttagcaacctagcatgatgccaacaagactattcttgaaagagcaaaggttcctgtaaatttaattagggctagatttgagctgcttgtaagtcacaggttttccagatgtctgccaacaagaaatgactcatactgtgatgataccttttgctttgccttgtggacaatgtgggtttttgaaatttgcacccttcaaacaatgatttatcagagaaaggggtctgttttcaaaaaagattctgtaatgaattttatgtgtggcatatacttatttcttgagagaagattttaacttattgtttttattttatggttacatatgatgataacctgctattattaaactttttctaaaaagtg

SEQ ID NO: 18130 - DNA, 2118 bp, Homo sapiens
  source 1..2118: mol_type = unassigned DNA
cttatggaaaagtatttctagttcgtaaaataagtggccatgatactggaaagctgtatgccatgaaagttttgaaaaaggcaacaatcgttcaaaaggccaaaaccacagagcatacaaggacagaacgacaagtcctggaacacattaggcagtcgccatttttggtaacattacattatgctttccagacagaaaccaaacttcatctcattttagttggggattatatatcgtgatattaagcttgagaatattctacttgattctaatggccatgtggtgctgacagattttggtctgagtaaggagtttgtggctgatgaaactgaaagagcatattccttttgtggaactattgaatacatggcaccagatattgtcagagggggagattcaggacatgacaaggcagttgactggtggagtttgggtgttctaatgtatgaattactaactggagcatctcctttcactgttgatggagaaaaaaattcccaagctgagatatctaggagaatattaaaaagtgagcctccatatccccaagaaatgagtgctttagcgaaagacctaattcagcgtcttttgatgaaagatcccaagaagagattgggatgtggtccacgtgatgcagatgaaatcaaagaacatctcttctttcagaaaataaattgggatgatttagccgccaaaaaagtgcctgcaccatttaagccagtcattcgagatgaattagatgtgagtaactttgcagaagagttcacagaaatggatcccacttattctcccgcagccctgccccagagttctgagaagctgtttcagggctattcctttgttgctccttccatcctattcaagcgtaatgcagctgtcatagaccctcttcagtttcacatgggagttgaacgtcctggagtgacaaatgttgccaggagtgcaatgatgaaggactctccattctatcaacactatgacctagatttgaaggacaaacccctgggagaaggtagtttttcaatttgtcgaaagtgtgtgcataaaaaaagtaaccaagcttttgcagtcaaaataatcagcaaaaggatggaagccaatactcaaaaggaaataacagctctgaaactctgtgaaggacaccccaatattgtgaagttgcatgaagtttttcatgatcagcttcacacgtttctagtgatggaacttctgaatggaggagaactgtttgagcgcattaagaaaaagaagcacttcagtgagacggaagccagctacatcatgaggaagcttgtttcagctgtaagccacatgcatgatgttggagtggtgcacagggatctgaaacctgagaatttattgttcaccgatgaaaatgacaatttggaaattaaaataattgattttggatttgcacggctaaagccaccggataatcagcccctgaagactccatgcttcacccttcattatgccgccccagagctcttgaatcagaacggctacgatgagtcctgtgacctgtggagcttgggcgtcattttgtacacaatgttgtcaggacaggttcccttccaatctcatgaccgaagtttgacgtgtaccagcgcggtggaaatcatgaagaaaattaaaaagggagatttctcctttgaaggagaagcctggaagaatgtatcccaagaggctaaagatttgatccaaggacttctcacagtagatccaaacaaaaggcttaaaatgtctggcttgaggtacaatgaatggctacaagatggaagtcagctgtcctccaatcctctgatgactccggatattctaggatcttccggagctgccgtgcatacctgtgtgaaagcaaccttccacgcctttaacaaatacaagagagaggggttttgccttcagaatgttgataaggcccctttggctaagagaagaaaaatgaaaaagactagcaccagtaccgagacgcgcagcagttccagtgagagttcccattcttcttcctctcattctcacggtaaaactacacccaccaagacactgcagcccagcaatcctgccgacagcaataacccggagaccctcttccagttctcggactcagtagcttag

SEQ ID NO: 18131 - DNA, 2249 bp, Homo sapiens
  source 1..2249: mol_type = unassigned DNA
gcgagccgtgcggccagagcgggaaagagactcgtctttgcgtccgagttctggagccgccgcaccccgactcctggggccgcggcagcggctgcgaggggacgggcgtccgctgtctcctgggttcccctcgtagcgacccgcgggatcggaaaaaaaggagaagatggaggaggagggtggcagcagcggcggcgccgcggggaccagcgcggacggcggcgacggaggagagcagctcctcactgtcaagcacgagctgcggactgctaatttgacaggacatgctgagaaggtgggaatagaaaattttgagctcctgaaggtcctaggaactggagcttatggaaaagtatttctagttcgtaaaataagtggccatgatactggaaagctgtatgccatgaaagttttgaaaaaggcaacaatcgttcaaaaggccaaaaccacagagcatacaaggacagaacgacaagtcctggaacacattaggcagtcgccatttttggtaacattacattatgctttccagacagaaaccaaacttcatctcattttagattatataaatggtggtgaactttttactcatctttctcaaagagagcgtttcacagagcatgaggtgcagatttatgttggagagattgtgcttgccctcgaacatctccacaagttggggattatatatcgtgatattaagcttgagaatattctacttgattctaatggccatgtggtgctgacagattttggtctgagtaaggagtttgtggctgatgaaactgaaagagcatattccttttgtggaactattgaatacatggcaccagatattgtcagagggggagattcaggacatgacaaggcagttgactggtggagtttgggtgttctaatgtatgaattactaactggagcatctcctttcactgttgatggagaaaaaaattcccaagctgagatatctaggagaatattaaaaagtgagcctccatatccccaagaaatgagtgctttagcgaaagacctaattcagcgtcttttgatgaaagatcccaagaagagattgggatgtggtccacgtgatgcagatgaaatcaaagaacatctcttctttcagaaaataaattgggatgatttagccgccaaaaaagtgcctgcaccatttaagccagtcattcgagatgaattagatgtgagtaactttgcagaagagttcacagaaatggatcccacttattctcccgcagccctgccccagagttctgagaagctgtttcagggctattcctttgttgctccttccatcctattcaagcgtaatgcagctgtcatagaccctcttcagtttcacatgggagttgaacgtcctggagtgacaaatgttgccaggagtgcaatgatgaaggactctccattctatcaacactatgacctagatttgaaggacaaacccctgggagaaggtagtttttcaatttgtcgaaagtgtgtgcataaaaaaagtaaccaagcttttgcagtcaaaataatcagcaaaaggatggaagccaatactcaaaaggaaataacagctctgaaactctgtgaaggacaccccaatattgtgaagttgcatgaagtttttcatgatcagcttcacacgtttctagtgatggaacttctgaatggaggagaactgtttgagcgcattaagaaaaagaagcacttcagtgagacggaagccagctacatcatgaggaagcttgtttcagctgtaagccacatgcatgatgttggagtggtgcacagggatctgaaacctgaggtataaaatcactggatctcttacgtaattcagtctagcaccattattaaagatctcccaaacatgggggaagtttctggggaggtttccttatttttttacttttcaaggctgttaaatagataattgaaaatacgtttctttgatgttttttcttttatatttcagtctaaaataaatttgtctttgtttattttttgccagctgatcatcttgaggttatatttgtaagtgtgagaaccttttatggaaaaaatactttatgcaacagttgtggactaaaaatagcaatggaaatttttatagcagaaaataatatctcttacatataattttagagggttttttttccaaatgatgtattttgaaaacttattttttacatttgtaatcaaattggttagctcatgaataaaaatgtatataattctattctaaa

SEQ ID NO: 18132 - DNA, 1420 bp, Homo sapiens
  source 1..1420: mol_type = unassigned DNA
actagcggtgcccgccgaagggggaggaggcgaggagcgagccgtgcggccagagcgggaaagagactcgtctttgcgtccgagttctggagccgccgcaccccgactcctggggccgcggcagcggctgcgaggggacgggcgtccgctgtctcctgggttcccctcgtagcgacccgcgggatcggaaaaaaaggagaagatggaggaggagggtggcagcagcggcggcgccgcggggaccagcgcggacggcggcgacggaggagagcagctcctcactgtcaagcacgagctgcggactgctaatttgacaggacatgctgagaaggtgggaatagaaaattttgagctcctgaaggtcctaggaactggagcttatggaaaagtatttctagttcgtaaaataagtggccatgatactggaaagctgtatgccatgaaagttttgaaaaaggcaacaatcgttcaaaaggccaaaaccacagagcatacaaggacagaacgacaagtcctggaacacattaggcagtcgccatttttggtaacattacattatgctttccagacagaaaccaaacttcatctcattttagattatataaatggtggtgaactttttactcatctttctcaaagagagcgtttcacagagcatgaggtgcagatttatgttggagagattgtgcttgccctcgaacatctccacaagttggggattatatatcgtgatattaagcttgagaatattctacttgattctaatggccatgtggtgctgacagattttggtctgagtaaggagtttgtggctgatgaacttgaaatcaaatcccttttttgtttgtttgttcaagactgaaagagcatattccttttgtggaactattgaatacatggcaccagatattgtcagagggggagattcaggacatgacaaggcagttgactggtggagtttgggtgttctaatgtatgaattactaactggagcatctcctttcactgttgatggagaaaaaaattcccaagctgagatatctaggagaatattaaaaagtgagcctccatatccccaagaaatgagtgctttagcgaaagacctaattcagcgtcttttgatgaaagatcccaagaagagattgggatgtggtccacgtgatgcagatgaaatcaaagaacatctcttctttcagaaaataaattgggatgatttagccgccaaaaaagtgcctgcaccatttaagccagtcattcgagatgaattagatgtgagtaactttgcagaagagttcacagaaatggatcccacttattctcccgcagccctgccccagagttctgagaagctgtttcagggctattcctttgttgctccttccatcctattcaagcgtaatgcagctgtcatagaccctct

SEQ ID NO: 18133 - DNA, 278 bp, Homo sapiens
  source 1..278: mol_type = unassigned DNA
aagaacgttaagtcatgaaatggaaaagattgtgaacttttaaatggaggacaaatagaaataaataaacaacccatgagaatgcatgccatctgcagaaaagcaaaagagctattgcaggcatctcactgaaactgtgaggaagaaaggtcctgagtgggcaagatacagagaatattaaaaagtgagcctccatatccccaagaaatgagtgctttagcgaaagacctaattcagcgtcttttgatgaaagatcccaagaagagattgggatgtgg

SEQ ID NO: 18134 - DNA, 596 bp, Homo sapiens
  source 1..596: mol_type = unassigned DNA
agagcgggaaagagactcgtctttgcgtccgagttctggagccgccgcaccccgactcctggggccgcggcagcggctgcgaggggacgggcgtccgctgtctcctgggttcccctcgtagcgacccgcgggatcggaaaaaaaggagaagatggaggaggagggtggcagcagcggcggcgccgcggggaccagcgcggacggcggcgacggaggagagcagctcctcactgtcaagcacgagctgcggactgagacgagtctactctgttgcccaggctggagtgtggtgctgatctcggctcactataacctccgcctcctgggttcaagtgattctcctgcctcagcctcccaagtggctgggattacaggcacccactaccatacccagctaatttgacaggacatgctgagaaggtgggaatagaaaattttgagctcctgaaggtcctaggaactggagcttatggaaaagtatttctagttcgtaaaataagtggccatgatactggaaagctgtatgccatgaaagttttgaaaaaggcaacaatcgttcaaaaggccaaaaccacagagcatacaaggacagaacg

SEQ ID NO: 18135 - DNA, 756 bp, Homo sapiens
  source 1..756: mol_type = unassigned DNA
gtgctgtcactgatgggatcccagctgcttctgaggggaagatccaggctgccctgaaactggaacacattgatggggtcaatctcacagttccagtgaaggccccatcccgaaaggacatcctggaaggtgtcaagaagactctcagtcactttcgtgtggtagccacaggctctggctgtgccctggtccagctgcagccactgacagtgttctccagtcaactacaggtgcacatggtactacagctctgccctgtgcttggggaccacatgtactctgcccgtgtgggcactgtcctgggccagcgatttctgctgccagctgagaacaacaagccccaaagacaggtactccagcccacctgcctgctgctttctgaggggtggagggagaggtcctggatgaagccctcctcagacgcctccacctgaccccctcccaggctgcccagctgcccttgcacctccacctacatcggctccttctcccaggcaccagggccagggacacccctgttgagctcctggcaccactgcccccttatttctccaggaccctacagtgcctggggctccgcttacaatagtcctccctctgttcctgaccccctcacacacactggaaagtgagggtgggggctctgcagtcagacaaacctaagatcacatcctggacaggccacttgcttgctgtgtggcattgggcaagtaactttacctctctggacttgtgataataaaagttcctacctca

SEQ ID NO: 18136 - DNA, 1178 bp, Homo sapiens
  source 1..1178: mol_type = unassigned DNA
atgcgcgctgtcctggctcgggagatggacggccgccgtgttttgggccggttctggagtggctggcggcggggcctgggtgtccgcccagtgcccgaggacgcaggctttggcaccgaagcccggcatcagaggcaaccccgcggctcctgccaacggtcggggcccctcggggaccagcccttcgcggggctgctgccaaaaaacctcagtcgggaggagctggttgatgcgctgcgggcagccgtggtggaccggaaaggaaaaccaggagagctgacgttgttctcagtgctgccagagctgagccagtccctagggctcagggagcaggagcttcaggttgtccgagcatctgggaaagaaagctctgggcttgtactcctctccagctgtccccagacagctagtcgcctccagaagtacttcacccatgcacggagagcccaaaggcccacagccacctactgtgctgtcactgatgggatcccagctgcttctgaggggaagatccaggctgccctgaaactggaacacattgatggggtcaatctcacagttccagtgaaggccccatcccgaaaggacatcctggaaggtgtcaagaagactctcagtcactttcgtgtggtagccacaggctctggctgtgccctggtccagctgcagccactgacagtgttctccagtcaactacaggtgcacatggtactacagctctgccctgtgcttggggaccacatgtactctgcccgtgtgggcactgtcctgggccagcgatttctgctgccagctgagaacaacaagccccaaagacaggtcctggatgaagccctcctcagacgcctccacctgaccccctcccaggctgcccagctgcccttgcacctccacctacatcggctccttctcccaggcaccagggccagggacacccctgttgagctcctggcaccactgcccccttatttctccaggaccctacagtgcctggggctccgcttacaatagtcctccctctgttcctgaccccctcacacacactggaaagtgagggtgggggctctgcagtcagacaaacctaagatcacatcctggacaggccacttgcttgctgtgtggcattgggcaagtaactttacctctctggacttgtgataataaaagttcctacctca

SEQ ID NO: 18137 - DNA, 1225 bp, Homo sapiens
  source 1..1225: mol_type = unassigned DNA
acatgcgcgctgtcctggctcgggagatggacggccgccgtgttttgggccggttctggagtggctggcggcggggcctgggtgtccgcccagtgcccgaggacgcaggctttggcaccgaagcccggcatcagaggcaaccccgcggctcctgccaacggtcggggcccctcggggaccagcccttcgcggggctgctgccaaaaaacctcagtcgggaggagctggttgatgcgctgcgggcagccgtggtggaccggaaaggacctctagtgacgttgaacaagccacagggtctaccagtgacaggaaaaccaggagagctgacgttgttctcagtgctgccagagctgagccagtccctagggctcagggagcaggagcttcaggttgtccgagcatctgggaaagaaagctctgggcttgtactcctctccagctgtccccagacagctagtcgcctccagaagtacttcacccatgcacggagagcccaaaggcccacagccacctactgtgctgtcactgatgggatcccagctgcttctgaggggaagatccaggctgccctgaaactggaacacattgatggggtcaatctcacagttccagtgaaggccccatcccgaaaggacatcctggaaggtgtcaagaagactctcagtcactttcgtgtggtagccacaggctctggctgtgccctggtccagctgcagccactgacagtgttctccagtcaactacaggtgcacatggtactacagctctgccctgtgcttggggaccacatgtactctgcccgtgtgggcactgtcctgggccagcgatttctgctgccagctgagaacaacaagccccaaagacaggtcctggatgaagccctcctcagacgcctccacctgaccccctcccaggctgcccagctgcccttgcacctccacctacatcggctccttctcccaggcaccagggccagggacacccctgttgagctcctggcaccactgcccccttatttctccaggaccctacagtgcctggggctccgcttacaatagtcctccctctgttcctgaccccctcacacacactggaaagtgagggtgggggctctgcagtcagacaaacctaagatcacatcctggacaggccacttgcttgctgtgtggcattgggcaagtaactttacctctctggacttgtgataataaaagttcctacctca

SEQ ID NO: 18138 - DNA, 1149 bp, Homo sapiens
  source 1..1149: mol_type = unassigned DNA
ttcctttttagtgggcgagttcaagggactttaacttgtgtgatttgtctgcttattccagagaaagctctgggcttgtactcctctccagctgtccccagacagctagtcgcctccagaagtacttcacccatgcacggagagcccaaaggcccacagccacctactggtgagaggtgctgggaggttcctagagtggtggggaggtcccagcaagccaccctgtgacctcctcctgcccctttctcagtgctgtcactgatgggatcccagctgcttctgaggggaagatccaggctgccctgaaactggaacacattgatggggtcaatctcgtgagtccgggtctgggaagaggaggggtgcttctagatatagtacccctacagagaggagtcaggggtatggatttgggatggctggctctcctgtcccctaaaacaggcaagtgaccactgcctatactgtggccctgcccggagtctattgggagcagggagggtctgggtatagctcccagacctgtgtaaggcttgttcactcttggctggcaccacagacagttccagtgaaggccccatcccgaaaggacatcctggaaggtgtcaagaagactctcagtcactttcgtgtggtagccacaggctctggctgtgccctggtccagctgcagccactgacagtgttctccagtcaactacaggtgcacatggtactacagctctgccctgtgcttggggaccacatgtactctgcccgtgtgggcactgtcctgggccagcgatttctgctgccagctgagaacaacaagccccaaagacaggtcctggatgaagccctcctcagacgcctccacctgaccccctcccaggctgcccagctgcccttgcacctccacctacatcggctccttctcccaggcaccagggccagggacacccctgttgagctcctggcaccactgcccccttatttctccaggaccctacagtgcctggggctccgcttacaatagtcctccctctgttcctgaccccctcacacacactggaaagtgagggtgggggctctgcagtcagacaaacctaagatcacatcctggacaggccacttgcttgctgtgtggcattgggcaagtaactttacctc

SEQ ID NO: 18139 - DNA, 996 bp, Homo sapiens
  source 1..996: mol_type = unassigned DNA
cctagctacttgggaggctgaggcgggagaatcgcttgaacctgggagacagaggttgcagtgagcgaagatcacaccattgcactccagcctgggagacagagtgaaacgctggctaaaaaaaaaaaaaactgcacttggcttagggaggcaaggagctggggagacagtggtatcagcagcagcctggggagcatttgatggcccccagaggtgtatgtgaccaggcccagctagaggaggcagcttcaggctagcaccccaacaggaaagaacagtccttaggcccggtggcttcagcaattaaatcagggttgcatctcatcatgagtggatcccacagccaggcagattgatagctgtgatcgtcctgacgtgttatgtgtccctctctggatgcaggggccatagtactgacctcactgaaacatatgatctgagaaagggggtggtgtttccccaaaggaaaaggggaggagtgatactgggtggcacagaacgagtagctgcccactgtctctcctggctttcctgttgcccagtgttctccagtcaactacaggtgcacatggtactacagctctgccctgtgcttggggaccacatgtactctgcccgtgtgggcactgtcctgggccagcgatttctgctgccagctgagaacaacaagccccaaagacaggtcctggatgaagccctcctcagacgcctccacctgaccccctcccaggctgcccagctgcccttgcacctccacctacatcggctccttctcccaggcaccagggccagggacacccctgttgagctcctggcaccactgcccccttatttctccaggaccctacagtgcctggggctccgcttacaatagtcctccctctgttcctgaccccctcacacacactggaaagtgagggtgggggctctgcagtcagacaaacctaagatcacatcctggacaggccacttgcttgctgtgtggcattgggcaag

SEQ ID NO: 18140 - DNA, 1005 bp, Homo sapiens
  source 1..1005: mol_type = unassigned DNA
ggcctgggtgtccgcccagtgcccgaggacgcaggctttggcaccgaagcccggtgattaagtaccccctctctcatgcgggacggaggctagggcagggggaaggcacgtgcgggatctggatcaggtagatgttacccgaaaacagccccgttggcctctctgagcctcggtgccctccgctgtagaatgggaccggtcgtacctgaattttcgaggcatcagaggcaaccccgcggctcctgccaacggtcggggcccctcggggaccagcccttcgcggggctgctgccaaaaaacctcagtcgggaggagctggttgatgcgctgcgggcagccgtggtggaccggaaaggacctctagtgacgttgaacaagccacagggtctaccagtgacaggaaaaccaggagagctgacgttgttctcagtgctgccagagctgagccagtccctagggctcagggagcaggagcttcaggttgtccgagcatctgggaaagaaagctctgggcttgtactcctctccagctgtccccagacagctagtcgcctccagaagtacttcacccatgcacggagagcccaaaggcccacagccacctactgtgctgtcactgatgggatcccagctgcttctgaggggaagatccaggctgccctgaaactggaacacattgatggggtcaatctcacagttccagtgaaggccccatcccgaaaggacatcctggaaggtgtcaagaagactctcagtcactttcgtgtggtagccacaggctctggctgtgccctggtccagctgcagccactgacaggtcctggatgaagccctcctcagacgcctccacctgaccccctcccaggctgcccagctgcccttgcacctccacctacatcggctccttctcccaggcaccagggccagggacacccctgttgagctcctggcaccactgcccccttatttctccaggaccctacagtgcctggggctccgcttaca

SEQ ID NO: 18141 - DNA, 907 bp, Homo sapiens
  source 1..907: mol_type = unassigned DNA
acggccgccgtgttttgggccggttctggagtggctggcggcggggcctgggtgtccgcccagtgcccgaggacgcaggctttggcaccgaagcccggcatcagaggcaaccccgcggctcctgccaacggtcggggcccctcggggaccagcccttcgcggggctgctgccaaaaaacctcagtcgggaggagctggttgatgcgctgcgggcagccgtggtggaccggaaaggacctctagtgacgttgaacaagccacagggtctaccagtgacaggaaaaccaggagagctgacgttgttctcagtgctgccagagctgagccagtccctagggctcagggagcaggagcttcaggttgtccgagcatctgggaaagaaagctctgggcttgtactcctctccagctgtccccagacagctagtcgcctccagaagtacttcacccatgcacggagagcccaaaggcccacagccacctactgtgctgtcactgatgggatcccagctgcttctgaggggaagatccaggctgccctgaaactggaacacattgatggggtcaatctcgcttgttcactcttggctggcaccacagacagttccagtgaaggccccatcccgaaaggacatcctggaaggtgtcaagaagactctcagtcactttcgtgtggtagccacaggctctggctgtgccctggtccagctgcagccactgacagtgttctccagtcaactacaggtgcacatggtactacagctctgccctgtgcttggggaccacatgtactctgcccgtgtgggcactgtcctgggccagcgatttctgctgccagctgagaacaacaagccccaaagacaggtcctggatgaagccctcctcagacgcctccacctgaccccct

SEQ ID NO: 18142 - DNA, 2413 bp, Homo sapiens
  source 1..2413: mol_type = unassigned DNA
acggtcggggcccctcggggaccagcccttcgcggggctgctgccaaaaaacctcagtcgggaggagctggttgatgcgctgcgggcagccgtggtggaccggaaaggtgaggggtgagaggcacggccgcacaaggaccgggaggggactgcctcggcgtgcagttgggctctccattgaagccacgggatcagccctgcttctgcctcccactagcagcatgagctgggacaagccacctaatttgcaccctctccccgcttttaaccctactgccatgatgcagtagggttaagagtggggagaagatgcaaataactaccgagccttgcacatagccggcgctcagttacgggagttgctatactagattattgtttattggccgcggtggctcacgcctgtaatcccggcactttagggtgctgacgcgggcggatcacctgaggtcaggagttcgagactagcctggccaacatggtgaaaccccgtctctactaaaaacacaaaaattagccaggtgtggcggcgtccgcctgtaatcccagctactcgggaggctgaggcaggagagtcacttgaacccggatagcagaggttgcagtgagccgacatcgtgctactgcgctccagcctgggatgacagagcaagactcagtctaaataaataaataaataaataatgattatttatcgacggacaaaacacaggctttggagtcagacatacctaggctctgtgatcagcttgctgtgcggctttaggaaaataactgaatttctctgaaccccactctctattcagtgatttattccttttctcaactatttcttgaacatatgctatgttccaggcactgttctaggcaggctatacagtgctgaaaaagatagatatggtttctgctctcaggggagaaatggatttctctctaacgggagaaatggatgtcagaaaataaatgaacaagttactagtggtaagtgctatgcataaactaaaacagggtgttatgatggtgaggaactgcaggaggaaggcagacattagattggagattcagacctctccgtgatgtgacatttgagccaagatgatagggagccagacctgggaaatttggggacaggaaacagcaagtgccgaggctctgaggtggcagaggaacagaaagaagttgaatttggtgtggggtagttaactcatgtctgagagtcatgatggggacatgtgctaagatgcgtgagaaagtgctctggaaactctttagtgctgcataaagggttaccgttgcttttgctgatgttcgtgtgatgtatgtttcaggacctctagtgacgttgaacaagccacagggtctaccagtgacaggtatgggccggggatgtgggaagggaatgcagcggaagggggtttcgtgactgagggagggaaaagtgaaggcatgaagctttggcctcttgtaatttttctttcttactttccaggaaaaccaggagagctgacgttgttctcagtgctgccagagctgagccagtccctagggctcagggagcaggagcttcaggttgtccgagcatctgggaaagaaagctctgggcttgtactcctctccagctgtccccagacagctagtcgcctccagaagtacttcacccatgcacggagagcccaaaggcccacagccacctactgtgctgtcactgatgggatcccagctgcttctgaggggaagatccaggctgccctgaaactggaacacattgatggggtcaatctcgtgagtccgggtctgggaagaggaggggtgcttctagatatagtacccctacagagaggagtcaggggtatggatttgggatggctggctctcctgtcccctaaaacaggcaagtgaccactgcctatactgtggccctgcccggagtctattgggagcagggagggtctgggtatagctcccagacctgtgtaaggcttgttcactcttggctggcaccacagacagttccagtgaaggccccatcccgaaaggacatcctggaaggtgtcaagaagactctcagtcactttcgtgtggtagccacaggctctggctgtgccctggtccagctgcagccactgacaggtaggtctggcaccctagccagcctttaaaactgcacttgatttgggaggctgaggcaggtggatcacgaggtcaggagttcaagaccagtctggccaagatggtgaaaccctgtttcaactaaaaactacaaaaattagctgggcacggtggcaggcgcctgtaaaaccagctactcgggaggctgaggcaggagaatcgcttgaacctgggaggcagaagttgcaatgagccaagatcatgccactgcactccagtctaggtgatagaggagacttcatct

SEQ ID NO: 18143 - DNA, 2491 bp, Homo sapiens
  source 1..2491: mol_type = unassigned DNA
acatgcgcgctgtcctggctcgggagatggacggccgccgtgttttgggccggttctggagtggctggcggcggggcctgggtgtccgcccagtgcccgaggacgcaggctttggcaccgaagcccggcatcagaggcaaccccgcggctcctgccaacggtcggggcccctcggggaccagcccttcgcggggctgctgccaaaaaacctcagtcgggaggagctggttgatgcgctgcgggcagccgtggtggaccggaaaggacctctagtgacgttgaacaagccacagggtctaccagtgacaggaaaaccaggagagctgacgttgttctcagtgctgccagagctgagccagtccctagggctcagggagcaggagcttcaggttgtccgagcatctgggaagtaagtggtaggggtgacaggaagctaggagtacaggcatccatctgtggtggggaaacagctgcttggggataagctgagacattttccatgggaaggtttgagatcatagaggtggatacaagtactgtgaagaagaggaagccgatggctctgggttcaaatcctcaagtacaaatggtgtgataccaggcaaagcatgacacctccctgacgctgggcacagtgactcacacctgtaatcccaacacttctggaggccaaggcaagaggatcacttgagcccaggagttcgagaccagcctgggcaaaatagaccccatctctggaaaaacaacaacaaaactttccgcgtggtggctcatgcctataatcaataggactttgggaggccgaggtgggaggattgcttgagtccagaagttcaagaccagcctgggcaacatggcaaaaccctatctttacttaaaaaacaaaataaaacacacacacacacacacacaaaaacctagctgggcagagcagcacatgcctgtagtgctcgggtggctgagatgggagaatcacctgagctcagaagatggcagctgcaataagctgagatcccgccactgtacgcaagcctaaacaacctgaatgagaccccgtctcaaaaaaacaaaacaaaacaaataccctccctgagcttcagttcccctaatggtaaaatagagaaaataatacctatgctcagtgtgcagtcatttctccatgacggtactcgtggcaggcattgctagtcgatccatgatactctttcctctaactgccatcaattaaagatggtacttgagatgaaatatttctgcagttccacaaactcatgagcttttttgtagagaacttatttaagagctaatatgtacagaatttctagtagaattctggcacatggtagacaatcgttacgacatttggctctgagttccctgggggccggggcaaaatgagaaacacattaagctacatagtcttgttatcaaagaaggggaaaccttacttgtttctcaggagttggtctaggttatagtcctggtgttagtgtttggcctgaagcaggtcagtgttcctaagagtttcctttttagtgggcgagttcaagggactttaacttgtgtgatttgtctgcttattccagagaaagctctgggcttgtactcctctccagctgtccccagacagctagtcgcctccagaagtacttcacccatgcacggagagcccaaaggcccacagccacctactggtgagaggtgctgggaggttcctagagtggtggggaggtcccagcaagccaccctgtgacctcctcctgcccctttctcagtgctgtcactgatgggatcccagctgcttctgaggggaagatccaggctgccctgaaactggaacacattgatggggtcaatctcgtgagtccgggtctgggaagaggaggggtgcttctagatatagtacccctacagagaggagtcaggggtatggatttgggatggctggctctcctgtcccctaaaacaggcaagtgaccactgcctatactgtggccctgcccggagtctattgggagcagggagggtctgggtatagctcccagacctgtgtaaggcttgttcactcttggctggcaccacagacagttccagtgaaggccccatcccgaaaggacatcctggaaggtgtcaagaagactctcagtcactttcgtgtggtagccacaggctctggctgtgccctggtccagctgcagccactgacaggtaggtctggcaccctagccagcctttaaaactgcacttgatttgggaggctgaggcaggtggatcacgaggtcaggagttcaagaccagtctggccaagatggtgaaaccctgtttcaactaaaaactacaaaaattagctgggcacggtggcaggcgcctgtaaaaccagctactcgggaggctgaggcaggagaatcgcttgaacctgggaggcagaagttgcaatgagccaagatcatgccactgcactccagtctaggtgatagaggagacttcatct

SEQ ID NO: 18144 - DNA, 955 bp, Homo sapiens
  source 1..955: mol_type = unassigned DNA
ctggctcgggagatggacggccgccgtgttttgggccggttctggagtggctggcggcggggcctgggtgtccgcccagtgcccgaggacgcaggctttggcaccgaagcccggcatcagaggcaaccccgcggctcctgccaacggtcggggcccctcggggaccagcccttcgcggggctgctgccaaaaaacctcagtcgggaggagctggttgatgcgctgcgggcagccgtggtggaccggaaaggacctctagtgacgttgaacaagccacagggtctaccagtgacaggaaaaccaggagagctgacgttgttctcagtgctgccagagctgagccagtccctagggctcagggagcaggagcttcaggttgtccgagcatctgggaaagaaagctctgggcttgtactcctctccagctgtccccagacagctagtcgcctccagaagtacttcacccatgcacggagagcccaaaggcccacagccacctactgtgctgtcactgatgggatcccagctgcttctgaggggaagatccaggctgccctgaaactggaacacattgatggggtcaatctcacagttccagtgaaggccccatcccgaaaggacatcctggaaggtgtcaagaagactctcagtcactttcgtgtggtagccacaggctctggctgtgccctggtccagctgcagccactgacaggtaggtctggcaccctagccagcctttaaaactgcacttgatttgggaggctgaggcaggtggatcacgaggtcaggagttcaagaccagtctggccaagatggtgaaaccctgtttcaactaaaaactacaaaaattagctgggcacggtggcaggcgcctgtaaaaccagctactcgggaggctgaggcaggagaatcgcttgaacctgggaggcagaagttgcaatgagccaagatcatg

SEQ ID NO: 18145 - DNA, 823 bp, Homo sapiens
  source 1..823: mol_type = unassigned DNA
gcacatgcgcgctgtcctggctcgggagatggacggccgccgtgttttgggccggttctggagtggctggcggcggggcctgggtgtccgcccagtgcccgaggacgcaggctttggcaccgaagcccggtgattaagtaccccctctctcatgcgggacggaggctagggcagggggaaggcacgtgcgggatctggatcaggtagatgttacccgaaaacagccccgttggcctctctgagcctcggtgccctccgctgtagaatgggaccggtcgtacctgaattttcgaggtcagcccagacattgtgaggcatttgtcagaggccgcaggatttgggaagaggcgtccggagataggaatgggtggcacctcgggatggaatgactcccattgcttctccctccttgtccaggcatcagaggcaaccccgcggctcctgccaacggtcggggcccctcggggaccagcccttcgcggggctgctgccaaaaaacctcagtcgggaggagctggttgatgcgctgcgggcagccgtggtggaccggaaaggacctctagtgacgttgaacaagccacagggtctaccagtgacaggaaaaccaggagagctgacgttgttctcagtgctgccagagctgagccagtccctagggctcagggagcaggagcttcaggttgtccgagcatctgggaaagaaagctctgggcttgtactcctctccagctgtccccagacagctagtcgcctccagaagtacttcacccatgcacggagagcccaaaggcccacagccacctactggtgagaggtgctggga

SEQ ID NO: 18146 - DNA, 1178 bp, Homo sapiens
  source 1..1178: mol_type = unassigned DNA
aatcagcgcgctggctggagcgcgggtctgcccctctggacgcacatgcgcgctgtcctggctcgggagatggacggccgccgtgttttgggccggttctggagtggctggcggcggggcctgggtgtccgcccagtgcccgaggacgcaggctttggcaccgaagcccggcatcagaggcaaccccgcggctcctgccaacggtcggggcccctcggggaccagcccttcgcggggctgctgccaaaaaacctcagtcgggaggagctggttgatgcgctgcgggcagccgtggtggaccggaaaggacctctagtgacgttgaacaagccacagggtctaccagtgacaggaaaaccaggagagctgacgttgttctcagtgctgccagagctgagccagtccctagggctcagggagcaggagcttcaggttgtccgagcatctgggaagtaagtggtaggggtgacaggaagctaggagtacaggcatccatctgtggtggggaaacagctgcttggggataagctgagacattttccatgggaaggtttgagatcatagaggtggatacaagtactgtgaagaagaggaagccgatggctctgggttcaaatcctcaagtacaaatggtgtgataccaggcaaagcatgacacctccctgacgctgggcacagtgactcacacctgtaatcccaacacttctggaggccaaggcaagaggatcacttgagcccaggagttcgagaccagcctgggcaaaatagaccccatctctggaaaaacaacaacaaaactttccgcgtggtggctcatgcctataatcaataggactttgggaggccgaggtgggaggattgcttgagtccagaagttcaagaccagcctgggcaacatggcaaaaccctatctttacttaaaaaacaaaataaaacacacacacacacacacacaaaaacctagctgggcagagcagcacatgcctgtagtgctcgggtggctgagatgggagaatcacctgagctcagaagatggcagctgcaataagctgagatcccgccactgtacgcaagcctaaacaacctgaatgagaccccgtctcaaaaaaacaaaacaaaacaaataccctccctgagcttcagttcccctaatggtaaaatagagaaaataataccta

SEQ ID NO: 18147 - DNA, 807 bp, Homo sapiens
  source 1..807: mol_type = unassigned DNA
tgttttgggccggttctggagtggctggcggcggggcctgggtgtccgcccagtgcccgaggacgcaggctttggcaccgaagcccggacctctagtgacgttgaacaagccacagggtctaccagtgacaggaaaaccaggagagctgacgttgttctcagtgctgccagagctgagccagtccctagggctcagggagcaggagcttcaggttgtccgagcatctgggaagtaagtggtaggggtgacaggaagctaggagtacaggcatccatctgtggtggggaaacagctgcttggggataagctgagacattttccatgggaaggtttgagatcatagaggtggatacaagtactgtgaagaagaggaagccgatggctctgggttcaaatcctcaagtacaaatggtgtgataccaggcaaagcatgacacctccctgacgctgggcacagtgactcacacctgtaatcccaacacttctggaggccaaggcaagaggatcacttgagcccaggagttcgagaccagcctgggcaaaatagaccccatctctggaaaaacaacaacaaaactttccgcgtggtggctcatgcctataatcaataggactttgggaggccgaggtgggaggattgcttgagtccagaagttcaagaccagcctgggcaacatggcaaaaccctatctttacttaaaaaacaaaataaaacacacacacacacacacacaaaaacctagctgggcagagcagcacatgcctgtagtgctcgggtggctgagatgggagaatcacctgagctc

SEQ ID NO: 18148 - DNA, 817 bp, Homo sapiens
  source 1..817: mol_type = unassigned DNA
gggagatggacggccgccgtgttttgggccggttctggagtggctggcggcggggcctgggtgtccgcccagtgcccgaggacgcaggctttggcaccgaagcccggtgattaagtaccccctctctcatgcgggacggaggctagggcagggggaaggcacgtgcgggatctggatcaggtagatgttacccgaaaacagccccgttggcctctctgagcctcggtgccctccgctgtagaatgggaccggtcgtacctgaattttcgaggacctctagtgacgttgaacaagccacagggtctaccagtgacaggtatgggccggggatgtgggaagggaatgcagcggaagggggtttcgtgactgagggagggaaaagtgaaggcatgaagctttggcctcttgtaatttttctttcttactttccaggaaaaccaggagagctgacgttgttctcagtgctgccagagctgagccagtccctagggctcagggagcaggagcttcaggttgtccgagcatctgggaagtaagtggtaggggtgacaggaagctaggagtacaggcatccatctgtggtggggaaacagctgcttggggataagctgagacattttccatgggaaggtttgagatcatagaggtggatacaagtactgtgaagaagaggaagccgatggctctgggttcaaatcctcaagtacaaatggtgtgataccaggcaaagcatgacacctccctgacgctgggcacagtgactcacacctgtaatcccaacacttctggaggccaaggcaagaggatcacttgagcc

SEQ ID NO: 18149 - DNA, 630 bp, Homo sapiens
  source 1..630: mol_type = unassigned DNA
aaatgcaaaagcctggaaagacatctccaaaggccaatctcaggttggacaatcgtgagctggggaagctgcaaacactgtgacctccggaataaccgctggcatcagaggcaaccccgcggctcctgccaacggtcggggcccctcggggaccagcccttcgcggggctgctgccaaaaaacctcagtcgggaggagctggttgatgcgctgcgggcagccgtggtggaccggaaaggacctctagtgacgttgaacaagccacagggtctaccagtgacaggaaaaccaggagagctgacgttgttctcagtgctgccagagctgagccagtccctagggctcagggagcaggagcttcaggttgtccgagcatctgggaagtaagtggtaggggtgacaggaagctaggagtacaggcatccatctgtggtggggaaacagctgcttggggataagctgagacattttccatgggaaggtttgagatcatagaggtggatacaagtactgtgaagaagaggaagccgatggctctgggttcaaatcctcaagtacaaatggtgtgataccaggcaaagcatgacacctccctgacgctgggcacagtgactcacacctgtaatccca

SEQ ID NO: 18150 - DNA, 547 bp, Homo sapiens
  source 1..547: mol_type = unassigned DNA
ctgaattttcgaggtcagcccagacattgtgaggcatttgtcagaggccgcaggatttgggaagaggcgtccggagataggaatgggtggcacctcgggatggaatgactcccattgcttctccctccttgtccaggcatcagaggcaaccccgcggctcctgccaacggtcggggcccctcggggaccagcccttcgcggggctgctgccaaaaaacctcagtcgggaggagctggttgatgcgctgcgggcagccgtggtggaccggaaaggacctctagtgacgttgaacaagccacagggtctaccagtgacaggaaaaccaggagagctgacgttgttctcagtgctgccagagctgagccagtccctagggctcagggagcaggagcttcaggttgtccgagcatctgggaagtaagtggtaggggtgacaggaagctaggagtacaggcatccatctgtggtggggaaacagctgcttggggataagctgagacattttccatgggaaggtttgagatcatagaggtggatacaagtact

SEQ ID NO: 18151 - DNA, 578 bp, Homo sapiens
  source 1..578: mol_type = unassigned DNA
acatgcgcgctgtcctggctcgggagatggacggccgccgtgttttgggccggttctggagtggctggcggcggggcctgggtgtccgcccagtgcccgaggacgcaggctttggcaccgaagcccggcatcagaggcaaccccgcggctcctgccaacggtcggggcccctcggggaccagcccttcgcggggctgctgccaaaaaacctcagtcgggaggagctggttgatgcgctgcgggcagccgtggtggaccggaaaggtgaggggtgagaggcacggccgcacaaggaccgggaggggactgcctcggcgtgcagttgggctctccattgaagccacgggatcagccctgcttctgcctcccactagcagcatgagctgggacaagccacctaatttgcaccctctccccgcttttaaccctactgccatgatgcagtagggttaagagtggggagaagatgcaaataactaccgagccttgcacatagccggcgctcagttacgggagttgctatactagattattgtttattggccgcggtggctcacgcctgtaatcccggcacttta

SEQ ID NO: 18152 - DNA, 1802 bp, Homo sapiens
  source 1..1802: mol_type = unassigned DNA
aagcgtccggagccggatgcggaaatcggtgcgcgccgacgaagcccgggaaggcaggcgcgcgggttagaacgcgccagaggtcggcgcgcgcacacccgcaccgccccgaccccaggtagtgaggccagtgattccgagtgtgtgaggagcggcagtggcggcggaggagggggcggcgtgggtgggggcgggggcgggatgcgctccccggcccctctagccccgtggtggtacaacgcgaaggtgtgggaaggccgcgataaaccggaactgcagcccgccggacacctccggcttcacttccgtaagaggagaggagtgtacggcaaggggcgggaactggaacttggcccgcctcgttgtgagctgagctcagcggcacgcttttgtggcgtcactgcactgttaccccgccctacgtgtctctgacgctgacaccttctcactgtgaaacgtcgcgacctgtgacgtctggggggcgcctcaaatcttccactccagcatcggatcccggaaaggcagcgtcggagactggacccaaaactcttcctgttctgcctgcagagttgagccccgtccgggtcctggacccgcgtagtactgaccctggatccctgttcactgcgttctcgctccccgcgctccctgctggaccccgggatgccgggcatctccgcccgaggcctctctcatgaggggaggaagcagctagctgttaacctcacccgtgtcctggcactctaccgttccatcttggatgcctacatcatcgaatttttcacagacaacctatgggacacactcccttgctcatggcaggaagcattggatggactgaaaccaccacagctggccacaatgctgctggggatgcctggggaaggggaggtcgtcaggtacaggtcagtgtggccactcaccctgctggccctgaagtccacggcgtgtgccctggcctttacccggatgcctggctttcagaccccctcagaattcctggagaaccccagccagagctcccgactaacagctccattccggaaacatgtcaggcccaagaagcagcatgagatccggaggctgggagagttggtgaagaagctgagtgatttcacaggctgcacccaggttgtagacgtgggctcaggccagggccatctctcccgcttcatggctcttggcctggggttgatggtgaagagcatcgaaggggatcagagactggtggagagagcccagcgcctggaccaggagcttctgcaggctctggagaaagaggagaagaggaacccgcagatatgtgcagcgggggctacagcgagtggggctagatccccagctgccactgaatctggctgcccttcaggcccacgtggcccaggagaaccgtgtggtggccttcttcagcctggctctactgcttgccccactggtggagacgcttattctactggaccggctgctgtaccttcaggaacagggtttccatgctgagctcctgcccatcttcagtcctgaactctctcccagaaacctggttctggtggccaccaagatgcccctgggtcaggctctttctgttctggagactgaagacagctgatgcagcctgaggaaacatctcagaccccatcatctgaaagtgcccagagagcacagtggcagagtacatctcatccagagaaacagcatcctgcatcctccagagtcctggttccttcagtttcatcccctttctctccttccatggattatgtaatacattgtaaagttttaattaattaaaaattggatatctg

SEQ ID NO: 18153 - DNA, 2254 bp, Homo sapiens
  source 1..2254: mol_type = unassigned DNA
cgccgacgaagcccgggaaggcaggcgcgcgggttagaacgcgccagaggtcggcgcgcgcacacccgcaccgccccgaccccaggtagtgaggccagtgattccgagtgtgtgaggagcggcagtggcggcggaggagggggcggcgtgggtgggggcgggggcgggatgcgctccccggcccctctagccccgtggtggtacaacgcgaaggtgtgggaaggccgcgataaaccggaactgcagcccgccggacacctccggcttcacttccgtaagaggagaggagtgtacggcaaggggcgggaactggaacttggcccgcctcgttgtgagctgagctcagcggcacgcttttgtggcgtcactgcactgttaccccgccctacgtgtctctgacgctgacaccttctcactgtgaaacgtcgcgacctgtgacgtctggggggcgcctcaaatcttccactccagcatcggatcccggaaaggcagcgtcggagactggacccaaaactcttcctgttctgcctgcagagttgagccccgtccgggtcctggacccgcgtagtactgaccctggatccctgttcactgcgttctcgctccccgcgctccctgctggaccccgggatgccgggcatctccgcccgaggcctctctcatgaggggaggaagcagctagctgttaacctcacccgtgtcctggcactctaccgttccatcttggatgcctacatcatcgaatttttcacagacaacctatgggacacactcccttgctcatggcaggaagcattggatggactgaaaccaccacagctggccacaatgctgctggggatgcctggggaaggggaggtcgtcaggtacaggtcagtgtggccactcaccctgctggccctgaagtccacggcgtgtgccctggcctttacccggatgcctggctttcagaccccctcagaattcctggagaaccccagccagagctcccgactaacagctccattccggaaacatgtcaggcccaagaagcagcatgagatccggaggctgggagagttggtgaagaagctgagtgatttcacaggctgcacccaggttgtagacgtgggctcaggccagggccatctctcccgcttcatggctcttggcctggggttgatggtgaagagcatcgaaggggatcagagactggtggagagagcccagcgcctggaccaggagcttctgcaggctctggagaaagaggagaagaggaacccgcaggtggtccaaaccagccctcgtcactccccacaccacgtggttaggtgggtagaccccacagccctgtgtgaggagcttctgcttccactggagaacccgtgtcagggcagggcccgcttgctgctcacaggcctccacgcctgtggggatctgagtgttgccttgctgagacacttctcctgctgtcctgaggtggtggccctggcctcagtgggctgctgctacatgaagctgagtgaccctggcggctacccactgagtcagtgggtggctgggctgcctggctatgaactgccctaccggcttcgggagggggcctgccatgccctggaggaatatgctgagcggctacagaaagctggccctggccttcgaactcactgctaccgtgcagcactggagacagtcatccgacgggcccggcccgagctccgtcggccaggcgtgcagggtatccccagggtccacgagctcaagattgaagaatatgtgcagcgggggctacagcgagtggggctagatccccagctgccactgaatctggctgcccttcaggcccacgtggcccaggagaaccgtgtggtggccttcttcagcctggctctactgcttgccccactggtggagacgcttattctactggaccggctgctgtaccttcaggaacagggtttccatgctgagctcctgcccatcttcagtcctgaactctctcccagaaacctggttctggtggccaccaagatgcccctgggtcaggctctttctgttctggagactgaagacagctgatgcagcctgaggaaacatctcagaccccatcatctgaaagtgcccagagagcacagtggcagagtacatctcatccagagaaacagcatcctgcatcctccagagtcctggttccttcagtttcatcccctttctctccttccatggattatgtaatacattgtaaagttttaattaattaaaaattggatatctg

SEQ ID NO: 18154 - DNA, 1191 bp, Homo sapiens
  source 1..1191: mol_type = unassigned DNA
cggatcccggaaaggcagcgtcggagactggacccaaaactcttcctgttctgcctgcagagttgagccccgtccgggtcctggacccgcgtagtactgaccctggatccctgttcactgcgttctcgctccccgcgctccctgctggaccccgggatgccgggcatctccgcccgaggcctctctcatgaggggaggaagcagctagctgttaacctcacccgtgtcctggcactctaccgttccatcttggatgcctacatcatcgaatttttcacagacaacctatgggacacactcccttgctcatggcaggaagcattggatggactgaaaccaccacagctggccacaatgctgctggggatgcctggggaaggggaggtcgtcaggtacaggtcagtgtggccactcaccctgctggccctgaagtccacggcgtgtgccctggcctttacccggatgcctggctttcagaccccctcagaattcctggagaaccccagccagagctcccgactaacagctccattccggaaacatgtcaggcccaagaagcagcatgagatccggaggctgggagagggccatctctcccgcttcatggctcttggcctggggttgatggtgaagagcatcgaaggggatcagagactggtggagagagcccagcgcctggaccaggagcttctgcaggctctggagaaagaggagaagaggaacccgcaggtggtccaaaccagccctcgtcactccccacaccacgtggttaggtgggtagaccccacagccctgtgtgaggagcttctgcttccactggagaacccgtgtcagggcagggcccgcttgctgctcacaggcctccacgcctgtggggatctgagtgttgccttgctgagacacttctcctgctgtcctgaggtggtggccctggcctcagtgggctgctgctacatgaagctgagtgaccctggcggctacccactgagtcagtgggtggctgggctgcctggctatgaactgccctaccggcttcgggagggggcctgccatgccctggaggaatatgctgagcggctacagaaagctggccctggccttcgaactcactgctaccgtgcagcactggagacagtcatccgacgggcccggcccgagctccgtcggccaggcgtgcagggtatccccagg

SEQ ID NO: 18155 - DNA, 459 bp, Homo sapiens
  source 1..459: mol_type = unassigned DNA
aaggcagcgtcggagactggacccaaaactcttcctgttctgcctgcagagttgagccccgtccgggtcctggacccgcgtagtactgaccctggatccctgttcactgcgttctcgctccccgcgctccctgctggaccccgggatgccgggcatctccgcccgaggcctctctcatgaggggaggaagcagctagctgttaacctcacccgtgtcctggcactctaccgttccatcttggatgcctacatcatcgtacaggtcagtgtggccactcaccctgctggccctgaagtccacggcgtgtgccctggcctttacccggatgcctggctttcagaccccctcagaattcctggagaaccccagccagagctcccgactaacagctccattccggaaacatgtcaggcccaagaagcagcatgagatccggaggctgggagagttggtgaaga

SEQ ID NO: 18156 - DNA, 709 bp, Homo sapiens
  source 1..709: mol_type = unassigned DNA
tttctagtacctacctagattgtttttgtaatcttcccagatccaaggaatttttcacagacaacctatgggacacactcccttgctcatggcaggaagcattggatggactgaaaccaccacagctggccacaatgctgctggggatgcctggggaaggggaggtcgtcaggtatgggctagaaggtccctgtgctggggaactcaaggctttaagccctgcagtgagcatattgctcagagagtctcataaggtcttcctgggcctcgggttgtaaactgctgcactcagatgtgatgggactattcactggaggcctcggctggactatctcaggtacaggtcagtgtggccactcaccctgctggccctgaagtccacggcgtgtgccctggcctttacccggatgcctggctttcagaccccctcagaattcctggagaaccccagccagagctcccgactaacagctccattccggaaacatgtcaggcccaagaagcagcatgagatccggaggctgggagagttggtgaagaagctgagtgatttcacaggctgcacccaggttgtagacgtgggctcaggccagggccatctctcccgcttcatggctcttggcctggggttgatggtgaagagcatcgaaggggatcagagactggtggagagagcccagcgcctggaccaggagcttctgcaggctct

SEQ ID NO: 18157 - DNA, 1096 bp, Homo sapiens
  source 1..1096: mol_type = unassigned DNA
cttgctcatggcaggaagcattggatggactgaaaccaccacagctggccacaatgctgctggggatgcctggggaaggggaggtcgtcaggtatgggctagaaggtccctgtgctggggaactcaaggctttaagccctgcagtgagcatattgctcagagagtctcataaggtcttcctgggcctcgggttgtaaactgctgcactcagatgtgatgggactattcactggaggcctcggctggactatctcaggtacaggtcagtgtggccactcaccctgctggccctgaagtccacggcgtgtgccctggcctttacccggatgcctggctttcagaccccctcagaattcctggagaaccccagccagagctcccgactaacagctccattccggaaacatgtcaggcccaagaagcagcatgagatccggaggctgggagagggccatctctcccgcttcatggctcttggcctggggttgatggtgaagagcatcgaaggggatcagagactggtggagagagcccagcgcctggaccaggagcttctgcaggctctggagaaagaggagaagaggaacccgcagatatgtgcagcgggggctacagcgagtggggctagatccccagctgccactgaatctggctgcccttcaggcccacgtggcccaggagaaccgtgtggtggccttcttcagcctggctctactgcttgccccactggtggagacgcttattctactggaccggctgctgtaccttcaggaacagggtttccatgctgagctcctgcccatcttcagtcctgaactctctcccagaaacctggttctggtggccaccaagatgcccctgggtcaggctctttctgttctggagactgaagacagctgatgcagcctgaggaaacatctcagaccccatcatctgaaagtgcccagagagcacagtggcagagtacatctcatccagagaaacagcatcctgcatcctccagagtcctggttccttcagtttcatcccctttctctccttccatggattatgtaatacattgtaaagttttaattaattaaaaattggatatctg

SEQ ID NO: 18158 - DNA, 479 bp, Homo sapiens
  source 1..479: mol_type = unassigned DNA
cactggaggcctcggctggactatctcaggtacagaccccctcagaattcctggagaaccccagccagagctcccgactaacagctccattccggaaacatgtcaggcccaagaagcagcatgagatccggaggctgggagagttggtgaagaagctgagtgatttcacaggctgcacccaggttgtagacgtgggctcaggccagggccatctctcccgcttcatggctcttggcctggggttgatggtgaagagcatcgaaggggatcagagactggtggagagagcccagcgcctggaccaggagcttctgcaggctctggagaaagaggagaagaggaacccgcaggtaggccaacccttcctgcgacctggactgcaggagcaggggctgcttggctggaattgagcacagaggctggattacatctttcaagtttctcagcttgaactggtgtggtccctaatttctattacc

SEQ ID NO: 18159 - DNA, 416 bp, Homo sapiens
  source 1..416: mol_type = unassigned DNA
agaaccccagccagagctcccgactaacagctccattccggaaacatgtcaggcccaagaagcagcatgagatccggaggctgggagagttggtgaagaagctgagtgatttcacaggctgcacccaggttgtagacgtgggctcaggccagggccatctctcccgcttcatggctcttggcctggggttgatggtgaagagcatcgaaggggatcagagactggtggagagagcccagcgcctggaccaggagcttctgcaggctctggagaaagaggagaagaggaacccgcaggtggtccaaaccagccctcgtcactccccacaccacgtggttagatatgtgcagcgggggctacagcgagtggggctagatccccagctgccactgaatctggctgcccttcaggcccac

SEQ ID NO: 18160 - DNA, 287 bp, Homo sapiens
  source 1..287: mol_type = unassigned DNA
ccaggagcttctgcaggctctggagaaagaggagaagaggaacccgcaggtaggccaacccttcctgcgacctggactgcaggagcaggggctgcttggctggaattgagcacagaggctggattacatctttcaagtttctcagcttgaactggtggtccaaaccagccctcgtcactccccacaccacgtggttaggtgggtagaccccacagccctgtgtgaggagcttctgcttccactggagaacccgtgtcagggcagggcccgcttgctgctcacaggcc

SEQ ID NO: 18161 - DNA, 617 bp, Homo sapiens
  source 1..617: mol_type = unassigned DNA
aaaataaagcaaagttggaactgaattaggaacaagcaaagtttaagtgagaggtgacagttcttaaaaccaaactgagtgctgaatgtgactgatcccacagatatgtgcagcgggggctacagcgagtggggctagatccccagctgccactgaatctggctgcccttcaggcccacgtggcccaggagaaccgtgtggtggccttcttcagcctggctctactgcttgccccactggtggagacgcttattctactggaccggctgctgtaccttcaggaacagggtttccatgctgagctcctgcccatcttcagtcctgaactctctcccagaaacctggttctggtggccaccaagatgcccctgggtcaggctctttctgttctggagactgaagacagctgatgcagcctgaggaaacatctcagaccccatcatctgaaagtgcccagagagcacagtggcagagtacatctcatccagagaaacagcatcctgcatcctccagagtcctggttccttcagtttcatcccctttctctccttccatggattatgtaatacattgtaaagttttaattaattaaaaattggatatctgtttccttccca

SEQ ID NO: 18162 - DNA, 649 bp, Homo sapiens
  source 1..649: mol_type = unassigned DNA
aggagttcaagaccagcgatggtgaaaccccatctctagtaaaaatacaaaaagtagccgggtatggtggcgcacacctgtagtctcagctatttgggtggttgaggcaaaagaattgcttgaacccaggaggcggaggttgcagtgagccgagactgcaccactgcactccagcctgggcaacagagactccatctcaaaaaaaatattaagattcctaccaaatcagcctctggtgaacctctctaaggtgcatgttaagcaagcttcccaggcatcgagaacctacaatgcaagaggactgcctcccaagtcagtgccttgggaacccgtgttccttatggagaacggggtctccttagccccgctggatcctcccccatggggaaaagggactatgcctacaggcctgggcagaagaggctgaaaacctggttctggtggccaccaagatgcccctgggtcaggctctttctgttctggagactgaagacagctgatgcagcctgaggaaacatctcagaccccatcatctgaaagtgcccagagagcacagtggcagagtacatctcatccagagaaacagcatcctgcatcctccagagtcctggttccttcagtttcatcccctttctctccttccatggat

SEQ ID NO: 18163 - DNA, 2331 bp, Homo sapiens
  source 1..2331: mol_type = unassigned DNA
aggcgagccgggcgcccaggacagtcccgcagcgggcgggtgagcgggccgcgccctcgcccctcccgggcctgcccccgtcgcgactggcagcacgaagctgagattgtggtttcctggtgattcaggtgggagtgggccagaagatcaccgctggcaaggactgggttggtttttggagtagtccctgctgacgtgacaaaaagatctctcatatgatattccgagtcagtgccgaggggagccaggcctgtgccaaaggctgtgagctctgctctgaagtcaacggctgcctcaagtgctcacccaagctgttcatcctgctggagaggaacgacatccgccaggtgggcgtctgcttgccgtcctgcccacctggatacttcgacgcccgcaaccccgacatgaacaagtgcatcaaatgcaagatcgagcactgtgaggcctgcttcagccataacttctgcaccaagtgtaaggagggcttgtacctgcacaagggccgctgctatccagcttgtcccgagggctcctcagctgccaatggcaccatggagtgcagtagtcctgcgcaatgtgaaatgagcgagtggtctccgtgggggccctgctccaagaagcagcagctctgtggtttccggaggggctccgaggagcggacacgcagggtgctacatgcccctgtgggggaccatgctgcctgctctgacaccaaggagacccggaggtgcacagtgaggagagtgccgtgtcctgaggggcagaagaggaggaagggaggccagggccggcgggagaatgccaacaggaacctggccaggaaggagagcaaggaggcgggtgctggctctcgaagacgcaaggggcagcaacagcagcagcagcaagggacagtggggccactcacatctgcagggcctgcctagggacactgtccagcctccaggcccatgcagaaagagttcagtgctactctgcgtgattcaagctttcctgaactggaacgtcgggggcaaagcatacacacacactccaatccatccatgcatacatagacacaagacacacacgctcaaacccctgtccacatatacaaccatacatacttgcacatgtgtgttcatgtacacacgcagacacagacaccacacacacacatacacacacacacacacacacacctgaggccaccagaagacacttccatccctcgggcccagcagtacacacttggtttccagagctcccagtggacatgtcagagacaacacttcccagcatctgagaccaaactgcagaggggagccttctggagaagctgctgggatcggaccagccactgtggcagatgggagccaagcttgaggactgctggtgacctgggaagaaaccttcttcccatcctgttcagcactcccagctgtgtgactttatcgttggagagtattgttacccttccaggatacatatcagggttaacctgactttgaaaactgcttaaaggtttatttcaaattaaaacaaaaaaatcaacgacagcagtagacacaggcaccacattcctttgcagggtgtgagggtttggcgaggtatgcgtaggagcaagaagggacagggaatttcaagagaccccaaatagcctgctcagtagagggtcatgcagacaaggaagaaaacttaggggctgctctgacggtggtaaacaggctgtctatatccttgttactcagagcatggcccggcagcagtgttgtcacagggcagcttgttaggaatgagaatctcaggtctcattccagacctggtgagccagagtctaaattttaagattcctgatgattggcatgttacccaaatttgagaagtgctgctgtaattccccttaaaggacgggagaaagggccccggccatcttgcagcaggagggattctggtcagctataaaggaggactttccatctgggagaggcagaatctatatactgaagggctagtggcactgccaggggaagggagtgcgtaggcttccagtgatggttggggacaatcctgcccaaaggcagggcagtggatggaataactccttgtggcattctgaagtgtgtgccaggctctggactaggtgctaggtttccagggaggagccaaacacgggccttgctcttgtggagcttagaggttggtggggaagaaaataggcatgcaccaaggaattgtacaaacacatatataactacaaaaggatggtgccaagggcaggtgaccactggcatctatgcttagctatgaaagtgaataaagcagaataaaaataaaatactttctctcagg

SEQ ID NO: 18164 - DNA, 2463 bp, Homo sapiens
  source 1..2463: mol_type = unassigned DNA
aggcgagccgggcgcccaggacagtcccgcagcgggcgggtgagcgggccgcgccctcgcccctcccgggcctgcccccgtcgcgactggcagcacgaagctgagattgtggtttcctggtgattcaggtgggagtgggccagaagatcaccgctggcaaggactgggttggtttttggagtagtccctgctgacgtgacaaaaagatctctcatatgatattccgaggtatctttgaggaagtctctctttgaggacctccctttgagctgatggagaactgggctccccacaccctctctgtccccagctgagattatggtggatttgggctacggcccaggcctgggcctcctgctgctgacccagccccagaggtgttagcaagagccgtgtgctatccaccctccccgagaccacccctccgaccaggggcctggagctggcgcgtgactatgcggcttgggctgtgtgtggtggccctggttctgagctggacgcacctcaccatcagcagccgggggatcaaggggaaaaggcagaggcggatcagtgccgaggggagccaggcctgtgccaaaggctgtgagctctgctctgaagtcaacggctgcctcaagtgctcacccaagctgttcatcctgctggagaggaacgacatccgccaggtgggcgtctgcttgccgtcctgcccacctggatacttcgacgcccgcaaccccgacatgaacaagtgcatcaaatgcaagatcgagcactgtgaggcctgcttcagccataacttctgcaccaagtgtaaggagggcttgtacctgcacaagggccgctgctatccagcttgtcccgagggctcctcagctgccaatggcaccatggagtgcagtagtcctgggcagaagaggaggaagggaggccagggccggcgggagaatgccaacaggaacctggccaggaaggagagcaaggaggcgggtgctggctctcgaagacgcaaggggcagcaacagcagcagcagcaagggacagtggggccactcacatctgcagggcctgcctagggacactgtccagcctccaggcccatgcagaaagagttcagtgctactctgcgtgattcaagctttcctgaactggaacgtcgggggcaaagcatacacacacactccaatccatccatgcatacatagacacaagacacacacgctcaaacccctgtccacatatacaaccatacatacttgcacatgtgtgttcatgtacacacgcagacacagacaccacacacacacatacacacacacacacacacacacctgaggccaccagaagacacttccatccctcgggcccagcagtacacacttggtttccagagctcccagtggacatgtcagagacaacacttcccagcatctgagaccaaactgcagaggggagccttctggagaagctgctgggatcggaccagccactgtggcagatgggagccaagcttgaggactgctggtgacctgggaagaaaccttcttcccatcctgttcagcactcccagctgtgtgactttatcgttggagagtattgttacccttccaggatacatatcagggttaacctgactttgaaaactgcttaaaggtttatttcaaattaaaacaaaaaaatcaacgacagcagtagacacaggcaccacattcctttgcagggtgtgagggtttggcgaggtatgcgtaggagcaagaagggacagggaatttcaagagaccccaaatagcctgctcagtagagggtcatgcagacaaggaagaaaacttaggggctgctctgacggtggtaaacaggctgtctatatccttgttactcagagcatggcccggcagcagtgttgtcacagggcagcttgttaggaatgagaatctcaggtctcattccagacctggtgagccagagtctaaattttaagattcctgatgattggcatgttacccaaatttgagaagtgctgctgtaattccccttaaaggacgggagaaagggccccggccatcttgcagcaggagggattctggtcagctataaaggaggactttccatctgggagaggcagaatctatatactgaagggctagtggcactgccaggggaagggagtgcgtaggcttccagtgatggttggggacaatcctgcccaaaggcagggcagtggatggaataactccttgtggcattctgaagtgtgtgccaggctctggactaggtgctaggtttccagggaggagccaaacacgggccttgctcttgtggagcttagaggttggtggggaagaaaataggcatgcaccaaggaattgtacaaacacatatataactacaaaaggatggtgccaagggcaggtgaccactggcatctatgcttagctatgaaagtgaataaagcagaataaaaataaaatactttctctcagg

SEQ ID NO: 18165 - DNA, 2621 bp, Homo sapiens
  source 1..2621: mol_type = unassigned DNA
attccctccctggtgctcgcagaggactggcccctctccgggctgggagctccggccgagcggaggcgcgacggagagcaccagcgcagggcagagagcccggagcgaccggccagagtagggcatccgctcgggtgctgcggagaacgagggcagctccgagccgccccggaggaccgatgcgccgggtggggcgctggccccgagggcgtgagccgtccgcagattgagcaacttgggaacgggcgggcggagcgcaggcgagccgggcgcccaggacagtcccgcagcgggcgggtgagcgggccgcgccctcgcccctcccgggcctgcccccgtcgcgactggcagcacgaagctgagattgtggtttcctggtgattcaggtgggagtgggccagaagatcaccgctggcaaggactgggttggtttttggagtagtccctgctgacgtgacaaaaagatctctcatatgatattccgaggtatctttgaggaagtctctctttgaggacctccctttgagctgatggagaactgggctccccacaccctctctgtccccagctgagattatggtggatttgggctacggcccaggcctgggcctcctgctgctgacccagccccagaggtgttagcaagagccgtgtgctatccaccctccccgagaccacccctccgaccaggggcctggagctggcgcgtgactatgcggcttgggctgtgtgtggtggccctggttctgagctggacgcacctcaccatcagcagccgggggatcaaggggaaaaggcagaggcggatcagtgccgaggggagccaggcctgtgccaaaggctgtgagctctgctctgaagtcaacggctgcctcaagtgctcacccaagctgttcatcctgctggagaggaacgacatccgccaggtgggcgtctgcttgccgtcctgcccacctggatacttcgacgcccgcaaccccgacatgaacaagtgcatcaaatgcaagatcgagcactgtgaggcctgcttcagccataacttctgcaccaagtgtaaggagggcttgtacctgcacaagggccgctgctatccagcttgtcccgagggctcctcagctgccaatggcaccatggagtgcagtagtcctgcgcaatgtgaaatgagcgagtggtctccgtgggggccctgctccaagaagcagcagctctgtggtttccggaggggctccgaggagcggacacgcagggtgctacatgcccctgtgggggaccatgctgcctgctctgacaccaaggagacccggaggtgcacagtgaggagagtgccgtgtcctgaggggcagaagaggaggaagggaggccagggccggcgggagaatgccaacaggaacctggccaggaaggagagcaaggaggcgggtgctggctctcgaagacgcaaggggcagcaacagcagcagcagcaagggacagtggggccactcacatctgcagggcctgcctagggacactgtccagcctccaggcccatgcagaaagagttcagtgctactctgcgtgattcaagctttcctgaactggaacgtcgggggcaaagcatacacacacactccaatccatccatgcatacatagacacaagacacacacgctcaaacccctgtccacatatacaaccatacatacttgcacatgtgtgttcatgtacacacgcagacacagacaccacacacacacatacacacacacacacacacacacctgaggccaccagaagacacttccatccctcgggcccagcagtacacacttggtttccagagctcccagtggacatgtcagagacaacacttcccagcatctgagaccaaactgcagaggggagccttctggagaagctgctgggatcggaccagccactgtggcagatgggagccaagcttgaggactgctggtgacctgggaagaaaccttcttcccatcctgttcagcactcccagctgtgtgactttatcgttggagagtattgttacccttccaggatacatatcagggttaacctgactttgaaaactgcttaaaggtttatttcaaattaaaacaaaaaaatcaacgacagcagtagacacaggcaccacattcctttgcagggtgtgagggtttggcgaggtatgcgtaggagcaagaagggacagggaatttcaagagaccccaaatagcctgctcagtagagggtcatgcagacaaggaagaaaacttaggggctgctctgacggtggtaaacaggctgtctatatccttgttactcagagcatggcccggcagcagtgttgtcacagggcagcttgttaggaatgagaatctcaggtctcattccagacctggtgagccagagtctaaattttaagattcctgatgattggcatgttacccaaatttgagaagtgctgctgtaattccccttaaaggacgggagaaagggccccggccatcttgcagcaggagggattctggtcagctataaaggaggactttccatctgggagaggcagaatctatatactgaagggctagtggcactgccaggggaagggagtgcgtaggcttccagtgatggttggg

SEQ ID NO: 18166 - DNA, 2320 bp, Homo sapiens
  source 1..2320: mol_type = unassigned DNA
cgcgccctcgcccctcccgggcctgcccccgtcgcgactggcagcacgaagctgagattgtggtttcctggtgattcaggtgggagtgggccagaagatcaccgctggcaaggactggtgtttgtcaactgtaaggactcatggaacagatctaccagggattctcagaccttagtttgagaaatgctgcaattaaaggcaaatcctatcactctgagtgatcgctttggtgtcgaggcaatcaaccataaagataaatgcaaatatggaaattgcataacagtactcagtattaaggttggtttttggagtagtccctgctgacgtgacaaaaagatctctcatatgatattccgaggtatctttgaggaagtctctctttgaggacctccctttgagctgatggagaactgggctccccacaccctctctgtccccagctgagattatggtggatttgggctacggcccaggcctgggcctcctgctgctgacccagccccagaggtgttagcaagagccgtgtgctatccaccctccccgagaccacccctccgaccaggggcctggagctggcgcgtgactatgcggcttgggctgtgtgtggtggccctggttctgagctggacgcacctcaccatcagcagccgggggatcaaggggaaaaggcagaggcggatcagtgccgaggggagccaggcctgtgccaaaggctgtgagctctgctctgaagtcaacggctgcctcaagtgctcacccaagctgttcatcctgctggagaggaacgacatccgccaggtgggcgtctgcttgccgtcctgcccacctggatacttcgacgcccgcaaccccgacatgaacaagtgcatcaaatgcaagatcgagcactgtgaggcctgcttcagccataacttctgcaccaagtgtaaggagggcttgtacctgcacaagggccgctgctatccagcttgtcccgagggctcctcagctgccaatggcaccatggagtgcagtagtcctgcgcaatgtgaaatgagcgagtggtctccgtgggggccctgctccaagaagcagcagctctgtggtttccggaggggctccgaggagcggacacgcagggtgctacatgcccctgtgggggaccatgctgcctgctctgacaccaaggagacccggaggtgcacagtgaggagagtgccgtgtcctgaggggcagaagaggaggaagggaggccagggccggcgggagaatgccaacaggaacctggccaggaaggagagcaaggaggcgggtgctggctctcgaagacgcaaggggcagcaacagcagcagcagcaagggacagtggggccactcacatctgcagggcctgcctagggacactgtccagcctccaggcccatgcagaaagagttcagtgctactctgcgtgattcaagctttcctgaactggaacgtcgggggcaaagcatacacacacactccaatccatccatgcatacatagacacaagacacacacgctcaaacccctgtccacatatacaaccatacatacttgcacatgtgtgttcatgtacacacgcagacacagacaccacacacacacatacacacacacacacacacacacctgaggccaccagaagacacttccatccctcgggcccagcagtacacacttggtttccagagctcccagtggacatgtcagagacaacacttcccagcatctgagaccaaactgcagaggggagccttctggagaagctgctgggatcggaccagccactgtggcagatgggagccaagcttgaggactgctggtgacctgggaagaaaccttcttcccatcctgttcagcactcccagctgtgtgactttatcgttggagagtattgttacccttccaggatacatatcagggttaacctgactttgaaaactgcttaaaggtttatttcaaattaaaacaaaaaaatcaacgacagcagtagacacaggcaccacattcctttgcagggtgtgagggtttggcgaggtatgcgtaggagcaagaagggacagggaatttcaagagaccccaaatagcctgctcagtagagggtcatgcagacaaggaagaaaacttaggggctgctctgacggtggtaaacaggctgtctatatccttgttactcagagcatggcccggcagcagtgttgtcacagggcagcttgttaggaatgagaatctcaggtctcattccagacctggtgagccagagtctaaattttaagattcctgatgattggcatgttacccaaatttgagaagtgct

SEQ ID NO: 18167 - DNA, 2487 bp, Homo sapiens
  source 1..2487: mol_type = unassigned DNA
cttttttctggaaactgcgacgagatgggaactttctgaattaagcagcaattcccgcgctggttttctggggagtcctcgcctccagagctagttatgtatcaaatcccatttgcaagggttgtttgtcttgttcaaaggacaatgggtgtagccgatgtcaacagaagttgttcttcttccttcgaagagaagggatgcgccagtatggagagtgcctgcattcctgcccatccgggtactatggacaccgagccccagatatgaacagatgtgcaagatgcagaatagaaaactgtgattcttgctttagcaaagacttttgtaccaagtgcaaagtaggcttttatttgcatagaggccgttgctttgatgaatgtccagatggttttgcaccattagaagaaaccatggaatgtgtggaaggatgtgaagttggtcattggagcgaatggggaacttgtagcagaaataatcgcacatgtggatttaaatggggtctggaaaccagaacacggcaaattgttaaaaagccagtgaaagacacaatactgtgtccaaccattgctgaatccaggagatgcaagatgacaatgaggcattgtccaggagggaagagaacaccaaaggcgaaggagaagaggaacaagaaaaagaaaaggaagctgatagaaagggcccaggagcaacacagcgtcttcctagctacagacagagctaaccaataaaacaagagatccggtagatttttaggggtttttgtttttgcaaatgtgcacaaagctactctccactcctgcacactggtgtgcagcctttgtgctgctctgcccagtatctgttcccagtaacatggtgaaaggaagcaccaccagcatggcccctgtgttatttatgctttgatttgaatctggagactgtgaaggcaggagtaagtgcacagcccgtgacttggctcagtgtgtgctgagagaatccgtccccggcaccatggacatgctagaggtgtgaggctgcagaacaccgctggaggacggacttgtgcctatttatgtgaaagaagatgcttggcaggcaatgcgctactcactcgtgacctttatttctcacattgtgcattttcaaggatatgtttgtgtggatatctgcttagtgttaccacatggtattctcagcatgttaccttcacactgttgtgcgatgaaactgcttttagctgaggatatgctctggaaattcctgctcagtttcactgcagccctaatatgtacatatactgcaggagctacatataaagctcttatttactgtatatttatgctttcttgtgggtaacaagtcatacctgattaatatgatgccactttgtttctagtggttcctaacccattgtctgataaatgacttttctagtttggggaattgacacttgttttgttgcctcttgaaactttttttttttcccctcattgtgggcttatttctcattgtaagggtaggataaactagtttttgtatatagagtcaaatgaccagtgtcaaagagtttgcatattgggtagaccttctccactccacatgtcccacacatatagataaagcagcaggcggcatctggcaatcagaagcccaaactgcctttgagtctaagatgtgatgactttgatgaaacacaactgaaaacatgagggactatatccagtcacttgtagccagtttcacaggccagctacagaattgtccaaacaaacattatttctgactgcaatttttttcccccaaatttaaagcaatccctggctttaaatgacaaggcacctaccaatgttcttgggtcactgaagaagctactaccatgagcctgggcatagaattttaggagataaaaggatgaatttctgtgactgccagtcagatcttaacaggtttctgttgagccagaatctgtttcagatccaagatggagaggaacactatggaaacttcccaggtgactttcagagcagttgtttcaaacacatcattgtccttttaggggaaccagtttttagaaggttgtgaattggctttttcacaaagcatgattatcttcctggctgatccaggagaaaattagaacagaaaaataatggttgtggattttgaaacaaagcaaggtaaagccttttttttttcaccttgcattggcaaaactacctcttcagtgtttttaacttttgattcaaaagcatcttaccaataaggataaatatcatatacatcgttatgaaaatattgctatgagataataagccacatatgaatgttgtatacaactttagggtttacatttaatcctgaagtgttacctcctttcatgtctatttacactattttcccatttactaagtggggagggggtctccttatatagtgcttcatcgttaataagtcaatacctgttgttcctgggatgttcttttttgtgcattaaaaacttcaaaatta

SEQ ID NO: 18168 - DNA, 2748 bp, Homo sapiens
  source 1..2748: mol_type = unassigned DNA
gcgcacggtaggcaacccacaccaaggcagccgcagctgcggcgcttgggtacaccgccgtggactccaaatggcctaagagcgttcttttagccctgcgctctcagtgcctttagagttctttcctttccccggagcgccggcacaacgcattatgccgctgggtcggagcttagggctcggcagaggttgctaattcactgattataatcaccttcctctccaactcgtccgcagctgcccgctctggattaagccgctccgcggctcgtgctaggcagttcgtggcggagagatgctgatcgcgctgaactgaccggtgcggcccgggggtgagtggcgagtctccctctgagtcctccccagcagcgcggccggcgccggctctttgggcgaaccctccagttcctagactttgagaggcgtctctcccccgcccgaccgcccagatgcagtttcgccttttctcctttgccctcatcattctgaactgcatggattacagccactgccaaggcaaccgatggagacgcagtaagcgaggatgcagaatagaaaactgtgattcttgctttagcaaagacttttgtaccaagtgcaaagtaggcttttatttgcatagaggccgttgctttgatgaatgtccagatggttttgcaccattagaagaaaccatggaatgtgtgggatgtgaagttggtcattggagcgaatggggaacttgtagcagaaataatcgcacatgtggatttaaatggggtctggaaaccagaacacggcaaattgttaaaaagccagtgaaagacacaatactgtgtccaaccattgctgaatccaggagatgcaagatgacaatgaggcattgtccaggagggaagagaacaccaaaggcgaaggagaagaggaacaagaaaaagaaaaggaagctgatagaaagggcccaggagcaacacagcgtcttcctagctacagacagagctaaccaataaaacaagagatccggtagatttttaggggtttttgtttttgcaaatgtgcacaaagctactctccactcctgcacactggtgtgcagcctttgtgctgctctgcccagtatctgttcccagtaacatggtgaaaggaagcaccaccagcatggcccctgtgttatttatgctttgatttgaatctggagactgtgaaggcaggagtaagtgcacagcccgtgacttggctcagtgtgtgctgagagaatccgtccccggcaccatggacatgctagaggtgtgaggctgcagaacaccgctggaggacggacttgtgcctatttatgtgaaagaagatgcttggcaggcaatgcgctactcactcgtgacctttatttctcacattgtgcattttcaaggatatgtttgtgtggatatctgcttagtgttaccacatggtattctcagcatgttaccttcacactgttgtgcgatgaaactgcttttagctgaggatatgctctggaaattcctgctcagtttcactgcagccctaatatgtacatatactgcaggagctacatataaagctcttatttactgtatatttatgctttcttgtgggtaacaagtcatacctgattaatatgatgccactttgtttctagtggttcctaacccattgtctgataaatgacttttctagtttggggaattgacacttgttttgttgcctcttgaaactttttttttttcccctcattgtgggcttatttctcattgtaagggtaggataaactagtttttgtatatagagtcaaatgaccagtgtcaaagagtttgcatattgggtagaccttctccactccacatgtcccacacatatagataaagcagcaggcggcatctggcaatcagaagcccaaactgcctttgagtctaagatgtgatgactttgatgaaacacaactgaaaacatgagggactatatccagtcacttgtagccagtttcacaggccagctacagaattgtccaaacaaacattatttctgactgcaatttttttcccccaaatttaaagcaatccctggctttaaatgacaaggcacctaccaatgttcttgggtcactgaagaagctactaccatgagcctgggcatagaattttaggagataaaaggatgaatttctgtgactgccagtcagatcttaacaggtttctgttgagccagaatctgtttcagatccaagatggagaggaacactatggaaacttcccaggtgactttcagagcagttgtttcaaacacatcattgtccttttaggggaaccagtttttagaaggttgtgaattggctttttcacaaagcatgattatcttcctggctgatccaggagaaaattagaacagaaaaataatggttgtggattttgaaacaaagcaaggtaaagccttttttttttcaccttgcattggcaaaactacctcttcagtgtttttaacttttgattcaaaagcatcttaccaataaggataaatatcatatacatcgttatgaaaatattgctatgagataataagccacatatgaatgttgtatacaactttagggtttacatttaatcctgaagtgttacctcctttcatgtctatttacactattttcccatttactaagtggggagggggtctccttatatagtgcttcatcgttaataagtcaatacctgttgttcctgggatgttcttttttgtgcattaaaaacttcaaaatta

SEQ ID NO: 18169 - DNA, 3111 bp, Homo sapiens
  source 1..3111: mol_type = unassigned DNA
acttatagaagcatcccaagcctcagccggtctgcatctccatcggaaagtgcgcttgccacatcccttcggatcacttcgtcctcccgagagcgttctgccttctacagctcggaaagaaagaaatcttagctgtgaagtgaccgtggagaaagcgcaggaagcgacacaattggttagggaggcagagagtgtgagcgggcgcaccccttgcctggggaccgcgctcgcgggcggggacggagcatcccagtggctgcacccgccgctccgcgctcctgcctggcgtcgccaaccccgcggcggccgctggaattccagagctgccaggcgctcccagccggtctcggcaaacttttccccagcccacgtgctaaccaagcggctcgcttcccgagcccgggatggagcaccgcgcctagggaggccgcgccgcccgagacgtgcgcacggttcgtggcggagagatgctgatcgcgctgaactgaccggtgcggcccgggggtgagtggcgagtctccctctgagtcctccccagcagcgcggccggcgccggctctttgggcgaaccctccagttcctagactttgagaggcgtctctcccccgcccgaccgcccagatgcagtttcgccttttctcctttgccctcatcattctgaactgcatggattacagccactgccaaggcaaccgatggagacgcagtaagcgagctagttatgtatcaaatcccatttgcaagggttgtttgtcttgttcaaaggacaatgggtgtagccgatgtcaacagaagttgttcttcttccttcgaagagaagggatgcgccagtatggagagtgcctgcattcctgcccatccgggtactatggacaccgagccccagatatgaacagatgtgcaagatgcagaatagaaaactgtgattcttgctttagcaaagacttttgtaccaagtgcaaagtaggcttttatttgcatagaggccgttgctttgatgaatgtccagatggttttgcaccattagaagaaaccatggaatgtgtggaaggatgtgaagttggtcattggagcgaatggggaacttgtagcagaaataatcgcacatgtggatttaaatggggtctggaaaccagaacacggcaaattgttaaaaagccagtgaaagacacaatactgtgtccaaccattgctgaatccaggagatgcaagatgacaatgaggcattgtccaggagggaagagaacaccaaaggcgaaggagaagaggaacaagaaaaagaaaaggaagctgatagaaagggcccaggagcaacacagcgtcttcctagctacagacagagctaaccaataaaacaagagatccggtagatttttaggggtttttgtttttgcaaatgtgcacaaagctactctccactcctgcacactggtgtgcagcctttgtgctgctctgcccagtatctgttcccagtaacatggtgaaaggaagcaccaccagcatggcccctgtgttatttatgctttgatttgaatctggagactgtgaaggcaggagtaagtgcacagcccgtgacttggctcagtgtgtgctgagagaatccgtccccggcaccatggacatgctagaggtgtgaggctgcagaacaccgctggaggacggacttgtgcctatttatgtgaaagaagatgcttggcaggcaatgcgctactcactcgtgacctttatttctcacattgtgcattttcaaggatatgtttgtgtggatatctgcttagtgttaccacatggtattctcagcatgttaccttcacactgttgtgcgatgaaactgcttttagctgaggatatgctctggaaattcctgctcagtttcactgcagccctaatatgtacatatactgcaggagctacatataaagctcttatttactgtatatttatgctttcttgtgggtaacaagtcatacctgattaatatgatgccactttgtttctagtggttcctaacccattgtctgataaatgacttttctagtttggggaattgacacttgttttgttgcctcttgaaactttttttttttcccctcattgtgggcttatttctcattgtaagggtaggataaactagtttttgtatatagagtcaaatgaccagtgtcaaagagtttgcatattgggtagaccttctccactccacatgtcccacacatatagataaagcagcaggcggcatctggcaatcagaagcccaaactgcctttgagtctaagatgtgatgactttgatgaaacacaactgaaaacatgagggactatatccagtcacttgtagccagtttcacaggccagctacagaattgtccaaacaaacattatttctgactgcaatttttttcccccaaatttaaagcaatccctggctttaaatgacaaggcacctaccaatgttcttgggtcactgaagaagctactaccatgagcctgggcatagaattttaggagataaaaggatgaatttctgtgactgccagtcagatcttaacaggtttctgttgagccagaatctgtttcagatccaagatggagaggaacactatggaaacttcccaggtgactttcagagcagttgtttcaaacacatcattgtccttttaggggaaccagtttttagaaggttgtgaattggctttttcacaaagcatgattatcttcctggctgatccaggagaaaattagaacagaaaaataatggttgtggattttgaaacaaagcaaggtaaagccttttttttttcaccttgcattggcaaaactacctcttcagtgtttttaacttttgattcaaaagcatcttaccaataaggataaatatcatatacatcgttatgaaaatattgctatgagataataagccacatatgaatgttgtatacaactttagggtttacatttaatcctgaagtgttacctcctttcatgtctatttacactattttcccatttactaagtggggagggggtctccttatatagtgcttcatcgttaataagtcaatacctgttgttcctgggatgttcttttttgtgcattaaaaacttcaaaatt

SEQ ID NO: 18170 - DNA, 674 bp, Homo sapiens
  source 1..674: mol_type = unassigned DNA
acctcactgttttagtatctgtgagacacagatgtgaaagctacagatttaattaacatgcagctagttatgtatcaaatcccatttgcaagggttgtttgtcttgttcaaaggacaatgggtgtagccgatgtcaacagaagttgttcttcttccttcgaagagaagggatgcgccagtatggagagtgcctgcattcctgcccatccgggtactatggacaccgagccccagatatgaacagatgtgcaagatgcagaatagaaaactgtgattcttgctttagcaaagacttttgtaccaagtgcaaagtaggcttttatttgcatagaggccgttgctttgatgaatgtccagatggttttgcaccattagaagaaaccatggaatgtgtggaaggatgtgaagttggtcattggagcgaatggggaacttgtagcagaaataatcgcacatgtggatttaaatggggtctggaaaccagaacacggcaaattgttaaaaagccagtgaaagacacaatactgtgtccaaccattgctgaatccaggagatgcaagatgacaatgaggcattgtccaggagggaagagaacaccaaaggcgaaggagaagaggaacaagaaaaagaaaaggaagctgatagaaagggcccaggagcaacacagcgtcttc

SEQ ID NO: 18171 - DNA, 579 bp, Homo sapiens
  source 1..579: mol_type = unassigned DNA
atttcttggcctgggttgaggaccttgccctaagttctacctctgtctggtctgacatccccatgagccattcagctttagcttctggcctcaactctgcctctgagtttcctctttgtttctaagtttggttgtgtattaacaactttttgggtggaggaggtagagggaagaaggggagggatattttatttagtatttctatctagttatgtatcaaatcccatttgcaagggttgtttgtcttgttcaaaggacaatgggtgtagccgatgtcaacagaagttgttcttcttccttcgaagagaagggatgcgccagtatggagagtgcctgcattcctgcccatccgggtactatggacaccgagccccagatatgaacagatgtgcaagatgcagaatagaaaactgtgattcttgctttagcaaagacttttgtaccaagtgcaaagtaggcttttatttgcatagaggccgttgctttgatgaatgtccagatggttttgcaccattagaagaaaccatggaatgtgtggaaggatgtgaagttggtcattggagcgaatggggaacttgt

SEQ ID NO: 18172 - DNA, 562 bp, Homo sapiens
  source 1..562: mol_type = unassigned DNA
acaccctgttttcgcttcttgtctctcaggttcgtggcggagagatgctgatcgcgctgaactgaccggtgcggcccgggggtgagtggcgagtctccctctgagtcctccccagcagcgcggccggcgccggctctttgggcgaaccctccagttcctagactttgagaggcgtctctcccccgcccgaccgcccagatgcagtttcgccttttctcctttgccctcatcattctgaactgcatggattacagccactgccaaggcaaccgatggagacgcagtaagcgagctagttatgtatcaaatcccatttgcaagggttgtttgtcttgttcaaaggacaatgggtgtagccgatgtcaacagaagttgttcttcttccttcgaagagaagggatgcgccagtatggagagtgcctgcattcctgcccatccgggtactatggacaccgagccccagatatgaacagatgtgcaagatgcagaatagaaaactgtgattcttgctttagcaaagacttttgtaccaagtgcaaagtaggcttttatttgcatagag

SEQ ID NO: 18173 - DNA, 602 bp, Homo sapiens
  source 1..602: mol_type = unassigned DNA
attttttgcctgtgtttagacacagaggttggtgtagtgaccatgtggtagatggagaagttcttgtggaattactaagctattgatttacaacagggagaatgccactaaaatagtggacaatggtgaattaaatggaaaagtctgtttgaggtttggggcaagaagcttcaaattgtaaaaatcacatgggctcttgtccttcagcactgagcagcatcatgattgaagattggagaaagtggggagagagtactcaggttaggtgtggttcacatcacttttgctttaagggaattcctcgtgtgtagggttataaagataacctaagatatggacttggctagttatgtatcaaatcccatttgcaagggttgtttgtcttgttcaaaggacaatgggtgtagccgatgtcaacagaagttgttcttcttccttcgaagagaagggatgcgccagtatggagagtgcctgcattcctgcccatccgggtactatggacaccgagccccagatatgaacagatgtgcaagatgcagaatagaaaactgtgattcttgctttagcaaagacttttgtaccaagtgcaaagtaggctttta

SEQ ID NO: 18174 - DNA, 568 bp, Homo sapiens
  source 1..568: mol_type = unassigned DNA
agaagcatcccaagcctcagccggtctgcatctccatcggaaagtgcgcttgccacatcccttcggatcacttcgtcctcccgagagcgttctgccttctacagctcggaaagaaagaaatcttagctgtgaagtgaccgtggagaaagcgcaggaagcgacacaattggttcgtggcggagagatgctgatcgcgctgaactgaccggtgcggcccgggggtgagtggcgagtctccctctgagtcctccccagcagcgcggccggcgccggctctttgggcgaaccctccagttcctagactttgagaggcgtctctcccccgcccgaccgcccagatgcagtttcgccttttctcctttgccctcatcattctgaactgcatggattacagccactgccaaggcaaccgatggagacgcagtaagcgagctagttatgtatcaaatcccatttgcaagggttgtttgtcttgttcaaaggacaatgggtgtagccgatgtcaacagaagttgttcttcttccttcgaagagaagggatgcgccagtatggagagtgcctgcattc

SEQ ID NO: 18175 - DNA, 2707 bp, Homo sapiens
  source 1..2707: mol_type = unassigned DNA
cacagcagcccccgcgcccgccgtgccgccgccgggacgtggggcccttgggccgtcgggccgcctggggagcgccagcccggatccggctgcccagatgcgggcgccactctgcctgctcctgctcgtcgcccacgccgtggacatgctcgccctgaaccgaaggaagaagcaagtgggcactggcctggggggcaactgcacaggctgtatcatctgctcagaggagaacggctgttccacctgccagcagaggctcttcctgttcatccgccgggaaggcatccgccagtacggcaagtgcctgcacgactgtccccctgggtacttcggcatccgcggccaggaggtcaacaggtgcaaaaaatgtggggccacttgtgagagctgcttcagccaggacttctgcatccggtgcaagaggcagttttacttgtacaaggggaagtgtctgcccacctgcccgccgggcactttggcccaccagaacacacgggagtgccagggggagtgtgaactgggtccctggggcggctggagcccctgcacacacaatggaaagacctgcggctcggcttggggcctggagagccgggtacgagaggctggccgggctgggcatgaggaggcagccacctgccaggtgctttctgagtcaaggaaatgtcccatccagaggccctgcccaggagagaggagccccggccagaagaagggcaggaaggaccggcgcccacgcaaggacaggaagctggaccgcaggctggacgtgaggccgcgccagcccggcctgcagccctgaccgccggctctcccgactctctggtcctagtcctcggcccctgcacacctcctcctgctccttctcctcctctcctcttactctttctcctctgtcttctccatttgtcctctctttctttccacccttctatcatttttctgtcagtctaccttccctttctttttcttttttatttcctttatttcttccacctccattctcctctcctttctccctccctccttcccttccttcctcttctttctcacttatcttttatctttccttttctttcttcctgtgtttcttcctgtccttcaccgcatccttctctctctccctcctcttgtctccctctcacacacactttaagagggaccatgagcctgtgccctcccctgcagctttctctatctacaacttaaagaaagcaaacatcttttcccaggcctttccctgaccccatctttgcagagaaagggtttccagagggcaaagctgggacacagcacaggtgaatcctgaaggccctgcttctgctctgggggaggctccaggaccctgagctgtgagcacctggttctctggacagtccccagaggccatttccacagccttcagccaccagccaccccgaggagctggctggacaaggctccagggcttccagaggcctggcttggacacctcccccagctggccgtggagggtcacaacctggcctctgggtgggcagccagccctggagggcatcctctgcaagctgcctgccaccctcatcggcactcccccacaggcctccctctcatgggttccatgcccctttttcccaagccggatcaggtgagctgtcactgctgggggatccacctgcccagcccagaagaggccactgaaacggaaaggaaagctgagattatccagcagctctgttccccacctcagcgcttcctgcccatgtggggaaacaggtctgagaaggaaggggcttgcccagggtcacacaggaagccttcaggctctgcttctgcctgatggctctgctcagcacattcacggtggagaggagaatttgggggtcacttgaggggggaaatgtagggaattgtgggtggggagcaagggaagatccgtgcactcgtccacacccaccaccacactcgctgacacccacccccacacgctgacacccacccccacacttgcccacacccatcaccgcactcgcccacacccaccaccacactgccccacacccaccaccacactcccccacacccaccaccacactcgcccacacccaccaccagtgacttgagcatctgtgcttcgctgtgacgcccctcgccctaggcaggaacgacgctgggaggagtctccaggtcagacccagcttggaagcaagtctgtcctcactgcctatccttctgccatcataacacccccttcctgctctgctccccggaatcctcagaaacgggatttgtatttgccgtgactggttggcctgaacacgtagggctccgtgactgggacaggaatgggcaggagaagcaagagtcggagctccaaggggcccaggggtggcctggggaaggaagatggtcagcaggctgggggagaggctctaggtgatgaaatattacattcccgaccccaagagagcacccaccctcagacctgccctccacctggcagctggggagccctggcctgaacccccccctcccagcaggcccaccctctctctgacttccctgctctcacctccccgagaacagctagagccccctcctccgcctggccaggccaccagcttctcttctgcaaacgtttgtgcctctgaaatgctccgttgttattgtttcaagaccctaacttttttttaaaactttcttaataaagggaaaagaaacttgtaaa

SEQ ID NO: 18176 - DNA, 722 bp, Homo sapiens
  source 1..722: mol_type = unassigned DNA
gcccacagcagcccccgcgcccgccgtgccgccgccgggacgtggggcccttgggccgtcgggccgcctggggagcgccagcccggatccggctgcccagatgcgggcgccactctgcctgctcctgctcgtcgcccacgccgtggacatgctcgccctgaaccgaaggaagaagcaagtgggcactggcctggggggcaactgcacaggctgtatcatctgctcagaggagaacggctgttccacctgccagcagaggctcttcctgttcatccgccgggaaggcatccgccagtacggcaagtgcctgcacgactgtccccctgggtacttcggcatccgcggccaggaggtcaacaggtgcaaaaaatgtggggccacttgtgagagctgcttcagccaggacttctgcatccggtgcaagaggcagttttacttgtacaaggggaagtgtctgcccacctgcccgccgggcactttggcccaccagaacacacgggagtgccaggagaggagccccggccagaagaagggcaggaaggaccggcgcccacgcaaggacaggaagctggaccgcaggctggacgtgaggccgcgccagcccggcctgcagccctgaccgccggctctcccgactctctggtcctagtcctcggcccctgcacacctcctcctgctccttctcctcctctcctcttactctttctcctctgtcttctcca

SEQ ID NO: 18177 - DNA, 3169 bp, Homo sapiens
  source 1..3169: mol_type = unassigned DNA
atgtttttcccacccaagaattaaatttaaccatttgaactaatgaaaaatgtcattattaaaaataccactcagtagaacccataagtattttaatatggcccaggtcacttgagttttcaatgctctttctataaacctggaagtaaattctagaatttaaacatgaattcttagagatctgatgaggaacagttggcagctaggattttgagctatctcaactacttaaaaaaagataatttatctccatgaagtcatgtgtggagaattcagcaaatgagctgatttggcactaattttttttctctggtcccagctggtttctctgaattttcagcccacccatgctgtgtcttaggtagccagaaacagtcacaatgctccactgagaaccatgctttctgtgttctcagtgcatggaagcaggtgtgtacggtgccctgtggccctcactggctggcataaccccccagagatgactcctgctctcaccctcagagtgagagtaggaacgcttagctgttactggggttcggcagcctgtctcatgattccctctgacggaattttctgtgggaatggtttgttgacagggcctacttggagcttgagatcaccctttctcaggagcagattcagaagtacacggactgcctgcagttctacgtgaacagcacacttaaggaactgaggaggctcttccttgtccaggacctggtggattccttaaaagtatagttgcttaagctgttcacttcacagtcttgactgttattttccctaaaggtgtaatactgtaaactgctacatcaagaagaataaaaagcaagtgctaattatattctagagtcagaagacctccagttgtatggcaccatgaaccagtctaatcccttcattgtaccaatgatgaaaatgtggctgagacatttgtccagggttgcccagtgagtcactggcagagctggaatcaaacccaggtcacatagcttctagctctatagtctttacaacacaccagattgtctccttaaaccatttttagttcctccgacaatttcccaaaattaatattaagataaaaaatctagatagggaatgtgaaaaccatatatacttttgcattgaaggaaactctagattctactaatattaatagtaagccctccaagtgtgcttatgtagttacagctctgaggctagaggtatgcccagcctctcacttgatgaggatcaggggcacctggggctctcactgaatttgctgggttcctttgaataagttgctttggcctcctggtgacttacacgtggaatcaaagttagtcaatcgtgattcggcatggtcataagcagagctggggaagcccagacaaggtagttgtgaagtttctgtgctctcacagcactttatacacaccctggcaggggcttgtactgggagctgtctggtaactgttcaaagaagggcagaaggaaaagtgaaaaatgtggtcttgaccctcaaaatgctttactggaataatgacttgccatataatgactgaagagagataccagggcaattataattacttaccttagtgcttttaaggccatggttgtatttgtaatgtaaaaattgtgggccagaacaggggtcagcaaaccttgtccgtaaagagacagatggtagatactttaggctttgcaagccacaccatctgtggcaccttttcaactttgccattgtagcacaaaagcagaaaaagacagtacaaaaaggaagggcttgactgtgtgcccataagacttctgaacactaaaaatttgattcaatatcatttcatatattagaaaatattaatcttgttttgattttatttgaacatttaaaaatgtaaaaacctttattaactcgtgggcctatgcaaaaaccggtcaagggccacagcttcgtagattattatttccttgagtccctcaaaccttataacaaagtgatccaaatagttccaagagaactaaggactggatcctctttcattgattctgtgatgagctttcaacgcctttcattgactatcgaaatcatgatgtattctgactcaaattcaaatctaggtaaaagtcaatgatatgagactctaacttgtcaggaagggttttaggagctctaataatgctttcgttcttcagtttgcagtcctgatgtggctcctgacctacgttggcgctctcttcaatggcctgaccctgctgctcatggctgtggtttcaatgtttactctacctgtagtgtatgttaagcaccaggcacagattgaccaatatctgggacttgtgaggactcacataaatgctgttgtggcaaagattcaggctaaaatcccaggcgctaagaggcatgctgagtaaactgatttcccaccggggactggacacaaacaggaatgtctggagtggtaacagctctcttcttactcattactgcaaattgattgtctttcccccctccctccagtaccataatcttagagacaaaccttaaaacagctgtttttaggctgttccttgtactcttaggatatttgagtcacttgtgtcaaccactaaagtatagagaaaagtgtattagatgtggtttttaattttgtgttgctaaaaaaagtgcatgatggtgagagcccaagttatctttccctcttcggtgttcttcttctcttctctgcaatgcttctgtagcttctaatgttccccgtggctaggcctttcctgccgagtgctctgatgcaatagtggaaatcgcttatatgtccttgggttgctggttggattaatctttaataacaatatatagaattgtagactgatgttttagcatttttccaacacacacaacgtaaaaataaaagcagtcgaccgcacttatggtaatcagttttgtataacttaaaataattaaataaatgaataaatccaaaacaaacatgcagtacttttgttgtatgggattggtgggctgatttacatgtatggttactaaaaagtaccagcatgttaactttattacaatttgtattactttctctgtagttcctaatggattcaattacggactctggatatttgcacttatgtacttgatactgaatgcataaataaatgttactaaatgtagaatgtt

SEQ ID NO: 18178 - DNA, 1609 bp, Homo sapiens
  source 1..1609: mol_type = unassigned DNA
cgcgcggccactgcgagcccagccgcagcagccgggcaccaacgcttgagtgcacgctcggcgcccccgaggagagccacggcgagcccccaaagcccgcacgatgcaggccactgccgattccaccaagatggactgtgtgtggagcaactggaaaagtcaggtttcttcaaggaaagtccatgaagtgcctgccattcacagacttcttgagcaggtggcctcctggttggagatttaggaggcttccctagagggcatgccatttctaccagctattgacctgttgtattggcgggacatcaagcagacgggcatcgtgtttgggagtttcctgctgctgctcttctccctgacccagttcagcgtggtgagcgtcgtggcctacctggccctggccgcactctcagccaccatcagtttccgcatctacaagtctgttttacaagcagtgcagaaaaccgacgaaggccaccctttcaaggcctacttggagcttgagatcaccctttctcaggagcagattcagaagtacacggactgcctgcagttctacgtgaacagcacacttaaggaactgaggaggctcttccttgtccaggacctggtggattccttaaaatttgcagtcctgatgtggctcctgacctacgttggcgctctcttcaatggcctgaccctgctgctcatggctgtggtttcaatgtttactctacctgtagtgtatgttaagcaccaggcacagattgaccaatatctgggacttgtgaggactcacataaatgctgttgtggcaaagattcaggctaaaatcccaggcgctaagaggcatgctgagtaaactgatttcccaccggggactggacacaaacaggaatgtctggagtggtaacagctctcttcttactcattactgcaaattgattgtctttcccccctccctccagtaccataatcttagagacaaaccttaaaacagctgtttttaggctgttccttgtactcttaggatatttgagtcacttgtgtcaaccactaaagtatagagaaaagtgtattagatgtggtttttaattttgtgttgctaaaaaaagtgcatgatggtgagagcccaagttatctttccctcttcggtgttcttcttctcttctctgcaatgcttctgtagcttctaatgttccccgtggctaggcctttcctgccgagtgctctgatgcaatagtggaaatcgcttatatgtccttgggttgctggttggattaatctttaataacaatatatagaattgtagactgatgttttagcatttttccaacacacacaacgtaaaaataaaagcagtcgaccgcacttatggtaatcagttttgtataacttaaaataattaaataaatgaataaatccaaaacaaacatgcagtacttttgttgtatgggattggtgggctgatttacatgtatggttactaaaaagtaccagcatgttaactttattacaatttgtattactttctctgtagttcctaatggattcaattacggactctggatatttgcacttatgtacttgatactgaatgcataaataaatgttactaaatgtagaatgt

SEQ ID NO: 18179 - DNA, 1703 bp, Homo sapiens
  source 1..1703: mol_type = unassigned DNA
agaaccgctttacccgtctccagggtagcacccttgggcagcccagccaacgctgtcgcgtggagcggcgcccgcatccccatgcgcgcaggcggctccggggccgcgccgcgctgattcgctgccggccgcgcagactgcggcgccagcgacgctcccgcccctcaccgcgcgccgcctggtgcagcctcagtctctccgcagccgcgcggccactgcgagcccagccgcagcagccgggcaccaacgcttgagtgcacgctcggcgcccccgaggagagccacggcgagcccccaaagcccgcacgatgcaggccactgccgattccaccaagatggactgtgtgtggagcaactggaaaagtcaggctattgacctgttgtattggcgggacatcaagcagacgggcatcgtgtttgggagtttcctgctgctgctcttctccctgacccagttcagcgtggtgagcgtcgtggcctacctggccctggccgcactctcagccaccatcagtttccgcatctacaagtctgttttacaagcagtgcagaaaaccgacgaaggccaccctttcaaggcctacttggagcttgagatcaccctttctcaggagcagattcagaagtacacggactgcctgcagttctacgtgaacagcacacttaaggaactgaggaggctcttccttgtccaggacctggtggattccttaaaatttgcagtcctgatgtggctcctgacctacgttggcgctctcttcaatggcctgaccctgctgctcatggctgtggtttcaatgtttactctacctgtagtgtatgttaagcaccaggcacagattgaccaatatctgggacttgtgaggactcacataaatgctgttgtggcaaagattcaggctaaaatcccaggcgctaagaggcatgctgagtaaactgatttcccaccggggactggacacaaacaggaatgtctggagtggtaacagctctcttcttactcattactgcaaattgattgtctttcccccctccctccagtaccataatcttagagacaaaccttaaaacagctgtttttaggctgttccttgtactcttaggatatttgagtcacttgtgtcaaccactaaagtatagagaaaagtgtattagatgtggtttttaattttgtgttgctaaaaaaagtgcatgatggtgagagcccaagttatctttccctcttcggtgttcttcttctcttctctgcaatgcttctgtagcttctaatgttccccgtggctaggcctttcctgccgagtgctctgatgcaatagtggaaatcgcttatatgtccttgggttgctggttggattaatctttaataacaatatatagaattgtagactgatgttttagcatttttccaacacacacaacgtaaaaataaaagcagtcgaccgcacttatggtaatcagttttgtataacttaaaataattaaataaatgaataaatccaaaacaaacatgcagtacttttgttgtatgggattggtgggctgatttacatgtatggttactaaaaagtaccagcatgttaactttattacaatttgtattactttctctgtagttcctaatggattcaattacggactctggatatttgcacttatgtacttgatactgaatgcataaataaatgttactaaatgtagaatgt

SEQ ID NO: 18180 - DNA, 3435 bp, Homo sapiens
  source 1..3435: mol_type = unassigned DNA
aggaggacccggaccaagcaggccattttcacctgcgtaataacaggattgggaatagcgaagcagcggcggcagcagcgagtggagtaggaggaggagcgcaggcagcggccgcggcggggccggaggaagaggaggggggagaaggaggagctgaagcgggaagagcggcaggcagcggctcggcggagttgcagcagaggcggcggcgacgctgagacaccgcagcttccctgagcgccgagtccctccggggacagcagcagggagcgcccgcgcagccaccgagcctctgcccagccaagccgccgtcgccgcgccgggggaccgccagccatggccgcgccgggggatccgcaggacgagctgctgccgctggccggccccgggtcccagtggctcaggcaccggggggagggggagaacgaagcggtgacgccgaaaggggccacgccggcgccgcaggctggggagcccagcccggggttgggcgccagggcccgggaagcggcgtcgcgggaagccggctcgggccccgcccggcagtcgcccgttgccatggaaactgcatccacaggtgtggcaggtgtttccagtgccatggaccacaccttctcaacaacatcaaaagatggggaaggatcgtgttacacatctctcatttctgacatctgctatccacctcaggaggattctacatattttactggaattcttcagaaggaaaatggccacgtcaccatttcagagagccctgaggagctgggtacacccggcccctccttaccagatgtgcctgggatagagtctcgtggcttatttagttctgattctggaatagagatgactcctgcagagtccacggaagtgaacaagatcttagcagaccctctggaccagatgaaagcagaggcctataaatacattgacataaccagacccgaggaggtgaagcaccaagaacaacatcaccccgagctggaagataaagacttggactttaagaataaagacactgacatctcaattaaacctgaaggagtccgtgaacctgacaaaccagctcctgtggagggaaaaatcatcaaggaccatttattggaagaatccacatttgctccatacatagatgatctctctgaagaacagcgcagggctcctcagatcaccacccctgtcaaaatcacactgacggaaatagaaccttctgttgaaaccactacccaagagaagacccctgagaagcaagatatatgtctaaagccaagtcctgacacagtccccactgtcactgtctcggagcctgaagacgacagcccaggatctatcacccctccatcttctggaacagaaccatctgctgcagaatcccaggggaaaggcagcatctccgaggatgagctgatcaccgccatcaaagaagcaaagggattatcgtatgaaaccgccgagaacccacggccggtgggccagctggccgacaggcccgaggtcaaggccaggtccggaccgccaaccatccccagccccctggaccacgaggccagcagcgcggagtcgggggactcagagatcgagctggtgtccgaggaccccatggccgcggaggacgcgctgccctcaggctatgtgagctttggccacgtgggcggcccgccgccctcgcccgcctcgccatccatccagtacagcatcctgagggaggagcgcgaggccgagctggacagcgagctcatcatcgagtcgtgcgacgcctcctcggcctcggaggagagccccaagcgggagcaggactcacccccgatgaagcccagcgccctggatgccatccgggaggagactggcgtccgggccgaggagcgtgcgccaagccggcggggcctggccgagccgggttccttcctcgactacccctcaactgagccccagcctggccccgagctgccccctggagacggagccctggagcctgagacgcccatgttgccacggaagcctgaagaagactcgagttccaaccaaagtcctgcggccacaaagggccctgggcctctaggtcctggcgccccgcccccactgctgtttctcaataagcaaaaagctattgacctgttgtattggcgggacatcaagcagacgggcatcgtgtttgggagtttcctgctgctgctcttctccctgacccagttcagcgtggtgagcgtcgtggcctacctggccctggccgcactctcagccaccatcagtttccgcatctacaagtctgttttacaagcagtgcagaaaaccgacgaaggccaccctttcaaggcctacttggagcttgagatcaccctttctcaggagcagattcagaagtacacggactgcctgcagttctacgtgaacagcacacttaaggaactgaggaggctcttccttgtccaggacctggtggattccttaaaatttgcagtcctgatgtggctcctgacctacgttggcgctctcttcaatggcctgaccctgctgctcatggctgtggtttcaatgtttactctacctgtagtgtatgttaagcaccaggcacagattgaccaatatctgggacttgtgaggactcacataaatgctgttgtggcaaagattcaggctaaaatcccaggcgctaagaggcatgctgagtaaactgatttcccaccggggactggacacaaacaggaatgtctggagtggtaacagctctcttcttactcattactgcaaattgattgtctttcccccctccctccagtaccataatcttagagacaaaccttaaaacagctgtttttaggctgttccttgtactcttaggatatttgagtcacttgtgtcaaccactaaagtatagagaaaagtgtattagatgtggtttttaattttgtgttgctaaaaaaagtgcatgatggtgagagcccaagttatctttccctcttcggtgttcttcttctcttctctgcaatgcttctgtagcttctaatgttccccgtggctaggcctttcctgccgagtgctctgatgcaatagtggaaatcgcttatatgtccttgggttgctggttggattaatctttaataacaatatatagaattgtagactgatgttttagcatttttccaacacacacaacgtaaaaataaaagcagtcgaccgcacttatggtaatcagttttgtataacttaaaataattaaataaatgaataaatccaaaacaaacatgcagtacttttgttgtatgggattggtgggctgatttacatgtatggttactaaaaagtaccagcatgttaactttattacaatttgtattactttctctgtagttcctaatggattcaattacggactctggatatttgcacttatgtacttgatactgaatgcataaataaatgttactaaatgtagaatgt

SEQ ID NO: 18181 - DNA, 2101 bp, Homo sapiens
  source 1..2101: mol_type = unassigned DNA
cgtgtgtgtgcctccgtggctctccttcgctctgtgggacgacagaaccatctgctgcagaatcccaggggaaaggcagcatctccgaggatgagctgatcaccgccatcaaagaagcaaagggattatcgtatgaaaccgccgagaacccacggccggtgggccagctggccgacaggcccgaggtcaaggccaggtccggaccgccaaccatccccagccccctggaccacgaggccagcagcgcggagtcgggggactcagagatcgagctggtgtccgaggaccccatggccgcggaggacgcgctgccctcaggctatgtgagctttggccacgtgggcggcccgccgccctcgcccgcctcgccatccatccagtacagcatcctgagggaggagcgcgaggccgagctggacagcgagctcatcatcgagtcgtgcgacgcctcctcggcctcggaggagagccccaagcgggagcaggactcacccccgatgaagcccagcgccctggatgccatccgggaggagactggcgtccgggccgaggagcgtgcgccaagccggcggggcctggccgagccgggttccttcctcgactacccctcaactgagccccagcctggccccgagctgccccctggagacggagccctggagcctgagacgcccatgttgccacggaagcctgaagaagactcgagttccaaccaaagtcctgcggccacaaagggccctgggcctctaggtcctggcgccccgcccccactgctgtttctcaataagcaaaaagctattgacctgttgtattggcgggacatcaagcagacgggcatcgtgtttgggagtttcctgctgctgctcttctccctgacccagttcagcgtggtgagcgtcgtggcctacctggccctggccgcactctcagccaccatcagtttccgcatctacaagtctgttttacaagcagtgcagaaaaccgacgaaggccaccctttcaaggcctacttggagcttgagatcaccctttctcaggagcagattcagaagtacacggactgcctgcagttctacgtgaacagcacacttaaggaactgaggaggctcttccttgtccaggacctggtggattccttaaaatttgcagtcctgatgtggctcctgacctacgttggcgctctcttcaatggcctgaccctgctgctcatggctgtggtttcaatgtttactctacctgtagtgtatgttaagcaccaggcacagattgaccaatatctgggacttgtgaggactcacataaatgctgttgtggcaaagattcaggctaaaatcccaggcgctaagaggcatgctgagtaaactgatttcccaccggggactggacacaaacaggaatgtctggagtggtaacagctctcttcttactcattactgcaaattgattgtctttcccccctccctccagtaccataatcttagagacaaaccttaaaacagctgtttttaggctgttccttgtactcttaggatatttgagtcacttgtgtcaaccactaaagtatagagaaaagtgtattagatgtggtttttaattttgtgttgctaaaaaaagtgcatgatggtgagagcccaagttatctttccctcttcggtgttcttcttctcttctctgcaatgcttctgtagcttctaatgttccccgtggctaggcctttcctgccgagtgctctgatgcaatagtggaaatcgcttatatgtccttgggttgctggttggattaatctttaataacaatatatagaattgtagactgatgttttagcatttttccaacacacacaacgtaaaaataaaagcagtcgaccgcacttatggtaatcagttttgtataacttaaaataattaaataaatgaataaatccaaaacaaacatgcagtacttttgttgtatgggattggtgggctgatttacatgtatggttactaaaaagtaccagcatgttaactttattacaatttgtattactttctctgtagttcctaatggattcaattacggactctggatatttgcacttatgtacttgatactgaatgca

SEQ ID NO: 18182 - DNA, 1412 bp, Homo sapiens
  source 1..1412: mol_type = unassigned DNA
gaatccagatgccaggtgagaacccacagcaaccacagcttggtggagtgagccacagcggctcatgtggcggcactgcgggagctcagctgggtgtgtttggtgtctcctgcagctattgacctgttgtattggcgggacatcaagcagacgggcatcgtgtttgggagtttcctgctgctgctcttctccctgacccagttcagcgtggtgagcgtcgtggcctacctggccctggccgcactctcagccaccatcagtttccgcatctacaagtctgttttacaagcagtgcagaaaaccgacgaaggccaccctttcaaggcctacttggagcttgagatcaccctttctcaggagcagattcagaagtacacggactgcctgcagttctacgtgaacagcacacttaaggaactgaggaggctcttccttgtccaggacctggtggattccttaaaatttgcagtcctgatgtggctcctgacctacgttggcgctctcttcaatggcctgaccctgctgctcatggctgtggtttcaatgtttactctacctgtagtgtatgttaagcaccaggcacagattgaccaatatctgggacttgtgaggactcacataaatgctgttgtggcaaagattcaggctaaaatcccaggcgctaagaggcatgctgagtaaactgatttcccaccggggactggacacaaacaggaatgtctggagtggtaacagctctcttcttactcattactgcaaattgattgtctttcccccctccctccagtaccataatcttagagacaaaccttaaaacagctgtttttaggctgttccttgtactcttaggatatttgagtcacttgtgtcaaccactaaagtatagagaaaagtgtattagatgtggtttttaattttgtgttgctaaaaaaagtgcatgatggtgagagcccaagttatctttccctcttcggtgttcttcttctcttctctgcaatgcttctgtagcttctaatgttccccgtggctaggcctttcctgccgagtgctctgatgcaatagtggaaatcgcttatatgtccttgggttgctggttggattaatctttaataacaatatatagaattgtagactgatgttttagcatttttccaacacacacaacgtaaaaataaaagcagtcgaccgcacttatggtaatcagttttgtataacttaaaataattaaataaatgaataaatccaaaacaaacatgcagtacttttgttgtatgggattggtgggctgatttacatgtatggttactaaaaagtaccagcatgttaactttattacaatttgtattactttctctgtagttcctaatggattcaattacggactctggatatttgcacttatgtacttgata

SEQ ID NO: 18183 - DNA, 582 bp, Homo sapiens
  source 1..582: mol_type = unassigned DNA
agccgcgcggccactgcgagcccagccgcagcagccgggcaccaacgcttgagtgcacgctcggcgcccccgaggagagccacggcgagcccccaaagcccgcacgatgcaggccactgccgattccaccaagatggactgtgtgtggagcaactggaaaagtcaggctattgacctgttgtattggcgggacatcaagcagacgggcatcgtgtttgggagtttcctgctgctgctcttctccctgacccagttcagcgtggtgagcgtcgtggcctacctggccctggccgcactctcagccaccatcagtttccgcatctacaagtctgttttacaagcagtgcagaaaaccgacgaaggccaccctttcaatttgcagtcctgatgtggctcctgacctacgttggcgctctcttcaatggcctgaccctgctgctcatggctgtggtttcaatgtttactctacctgtagtgtatgttaagcaccaggcacagattgaccaatatctgggacttgtgaggactcacataaatgctgttgtggcaaagattcaggctaaaatcccaggcgctaagagg

SEQ ID NO: 18184 - DNA, 303 bp, Homo sapiens
  source 1..303: mol_type = unassigned DNA
cagggcctacttggagcttgagatcaccctttctcaggagcagattcagaagtacacggactgcctgcagttctacgtgaacagcacacttaaggaactgaggaggctcttccttgtccaggacctggtggattccttaaaatttgcagtcctgatgtggctcctgacctacgttggcgctctcttcaatggcctgaccctgctgctcatgggtaagagcagataagactgtatacgtcttccttcaccccctctgtgaaaacgctgcttcctaggctgtaagctttttgtttgtttaaagag

SEQ ID NO: 18185 - DNA, 2647 bp, Homo sapiens
  source 1..2647: mol_type = unassigned DNA
ctgagacaccgcagcttccctgagcgccgagtccctccggggacagcagcagggagcgcccgcgcagccaccgagcctctgcccagccaagccgccgtcgccgcgccggtcgcccgttgccatggaaactgcatccacaggtgtggcaggtgtttccagtgccatggaccacaccttctcaacaacatcaaaagatggggaaggatcgtgttacacatctctcatttctgacatctgctatccacctcaggaggattctacatattttactggaattcttcagaaggaaaatggccacgtcaccatttcagagagccctgaggagctgggtacacccggcccctccttaccagatgtgcctgggatagagtctcgtggcttatttagttctgattctggaatagagatgactcctgcagagtccacggaagtgaacaagatcttagcagaccctctggaccagatgaaagcagaggcctataaatacattgacataaccagacccgaggaggtgaagcaccaagaacaacatcaccccgagctggaagataaagacttggactttaagaataaagacactgacatctcaattaaacctgaaggagtccgtgaacctgacaaaccagctcctgtggagggaaaaatcatcaaggaccatttattggaagaatccacatttgctccatacatagatgatctctctgaagaacagcgcagggctcctcagatcaccacccctgtcaaaatcacactgacggaaatagaaccttctgttgaaaccactacccaagagaagacccctgagaagcaagatatatgtctaaagccaagtcctgacacagtccccactgtcactgtctcggagcctgaagacgacagcccaggatctatcacccctccatcttctggaacagaaccatctgctgcagaatcccaggggaaaggcagcatctccgaggatgagctgatcaccgccatcaaagaagcaaagggattatcgtatgaaaccgccgagaacccacggccggtgggccagctggccgacaggcccgaggtcaaggccaggtccggaccgccaaccatccccagccccctggaccacgaggccagcagcgcggagtcgggggactcagagatcgagctggtgtccgaggaccccatggccgcggaggacgcgctgccctcaggctatgtgagctttggccacgtgggcggcccgccgccctcgcccgcctcgccatccatccagtacagcatcctgagggaggagcgcgaggccgagctggacagcgagctcatcatcgagtcgtgcgacgcctcctcggcctcggaggagagccccaagcgggagcaggactcacccccgatgaagcccagcgccctggatgccatccgggaggagactggcgtccgggccgaggagcgtgcgccaagccggcggggcctggccgagccgggttccttcctcgactacccctcaactgagccccagcctggccccgagctgccccctggagacggagccctggagcctgagacgcccatgttgccacggaagcctgaagaagactcgagttccaaccaaagtcctgcggccacaaagggccctgggcctctaggtcctggcgccccgcccccactgctgtttctcaataagcaaaaagctattgacctgttgtattggcgggacatcaagcagacgggcatcgtgtttgggagtttcctgctgctgctcttctccctgacccagttcagcgtggtgagcgtcgtggcctacctggccctggccgcactctcagccaccatcagtttccgcatctacaagtctgttttacaagcagtgcagaaaaccgacgaaggccaccctttcaaggcctacttggagcttgagatcaccctttctcaggagcagattcagaagtacacggactgcctgcagttctacgtgaacagcacacttaaggaactgaggaggctcttccttgtccaggacctggtggattccttaaaatttgcagtcctgatgtggctcctgacctacgttggcgctctcttcaatggcctgaccctgctgctcatggctgtggtttcaatgtttactctacctgtagtgtatgttaagcaccaggcacagattgaccaatatctgggacttgtgaggactcacataaatgctgttgtggcaaagattcaggctaaaatcccaggcgctaagaggcatgctgagtaaactgatttcccaccggggactggacacaaacaggaatgtctggagtggtaacagctctcttcttactcattactgcaaattgattgtctttcccccctccctccagtaccataatcttagagacaaaccttaaaacagctgtttttaggctgttccttgtactcttaggatatttgagtcacttgtgtcaaccactaaagtatagagaaaagtgtattagatgtggtttttaattttgtgttgctaaaaaaagtgcatgatggtgagagcccaagttatctttccctcttcggtgttcttcttctcttctctgcaatgcttctgtagcttctaatgttccccgtggctaggcctttcctgccgagtgctctgatgcaatagtggaaatcgcttatatgtccttgggttgctggttgg

SEQ ID NO: 18186 - DNA, 3169 bp, Homo sapiens; identical to SEQ ID NO: 18177
  source 1..3169: mol_type = unassigned DNA

SEQ ID NO: 18187 - DNA, 1609 bp, Homo sapiens; identical to SEQ ID NO: 18178
  source 1..1609: mol_type = unassigned DNA

SEQ ID NO: 18188 - DNA, 1703 bp, Homo sapiens; identical to SEQ ID NO: 18179
  source 1..1703: mol_type = unassigned DNA

SEQ ID NO: 18189 - DNA, 3435 bp, Homo sapiens; identical to SEQ ID NO: 18180
  source 1..3435: mol_type = unassigned DNA

SEQ ID NO: 18190 - DNA, 2101 bp, Homo sapiens; identical to SEQ ID NO: 18181
  source 1..2101: mol_type = unassigned DNA

SEQ ID NO: 18191 - DNA, 1412 bp, Homo sapiens; identical to SEQ ID NO: 18182
  source 1..1412: mol_type = unassigned DNA

SEQ ID NO: 18192 - DNA, 582 bp, Homo sapiens; identical to SEQ ID NO: 18183
  source 1..582: mol_type = unassigned DNA

SEQ ID NO: 18193 - DNA, 303 bp, Homo sapiens; identical to SEQ ID NO: 18184
  source 1..303: mol_type = unassigned DNA

SEQ ID NO: 18194 - DNA, 2647 bp, Homo sapiens; identical to SEQ ID NO: 18185
  source 1..2647: mol_type = unassigned DNA

SEQ ID NO: 18195 - DNA, 1777 bp, Homo sapiens
  source 1..1777: mol_type = unassigned DNA
ggtaccgagggtgggtgggggtgtcgggccgcctccaccccagcctcacggtctgggctcagaacctcccgtttctccgagggagccggctgctggcatgggtgctgtggctgcaggcctggcaggtggcagccccatgcccaggtgcctgcgtatgctacaatgagcccaaggtgacgacaagctgcccccagcagggcctgcaggctgtgcccgtgggcatccctgctgccagccagcgcatcttcctgcacggcaaccgcatctcgcatgtgccagctgccagcttccgtgcctgccgcaacctcaccatcctgtggctgcactcgaatgtgctggcccgaattgatgcggctgccttcactggcctggccctcctggagcagctggacctcagcgataatgcacagctccggtctgtggaccctgccacattccacggcctgggccgcctacacacgctgcacctggaccgctgcggcctgcaggagctgggcccggggctgttccgcggcctggctgccctgcagtacctctacctgcaggacaacgcgctgcaggcactgcctgatgacaccttccgcgacctgggcaacctcacacacctcttcctgcacggcaaccgcatctccagcgtgcccgagcgcgccttccgtgggctgcacagcctcgaccgtctcctactgcaccagaaccgcgtggcccatgtgcacccgcatgccttccgtgaccttggccgcctcatgacactctatctgtttgccaacaatctatcagcgctgcccactgaggccctggcccccctgcgtgccctgcagtacctgaggctcaacgacaacccctgggtgtgtgactgccgggcacgcccactctgggcctggctgcagaagttccgcggctcctcctccgaggtgccctgcagcctcccgcaacgcctggctggccgtgacctcaaacgcctagctgccaatgacctgcagggctgcgctgtggccaccggcccttaccatcccatctggaccggcagggccaccgatgaggagccgctggggcttcccaagtgctgccagccagatgccgctgacaaggcctcagtactggagcctggaagaccagcttcggcaggcaatgcgctgaagggacgcgtgccgcccggtgacagcccgccgggcaacggctctggcccacggcacatcaatgactcaccctttgggactctgcctggctctgctgagcccccgctcactgcagtgcggcccgagggctccgagccaccagggttccccacctcgggccctcgccggaggccaggctgttcacgcaagaaccgcacccgcagccactgccgtctgggccaggcaggcagcgggggtggcgggactggtgactcagaaggctcaggtgccctacccagcctcacctgcagcctcacccccctgggcctggcgctggtgctgtggacagtgcttgggccctgctgacccccagcggacacaagagcgtgctcagcagccaggtgtgtgtacatacggggtctctctccacgccgccaagccagccgggcggccgacccgtggggcaggccaggccaggtcctccctgatggacgcctgccgcccgccacccccatctccaccccatcatgtttacagggttcggcggcagcgtttgttccagaacgccgcctcccacccagatcgcggtatatagagatatgcattttattttacttgtgtaaaaatatcggacgacgtggaataaagagctcttttcttaa

SEQ ID NO: 18196 - DNA, 2157 bp, Homo sapiens
  source 1..2157: mol_type = unassigned DNA
ccgggccagcctaggccgccacaccctcgggcccgcgtccccggccggctccggcccgggccgccatcccctccgccgcctgcaggggccgccgcctcttcaggaatgcgccgcctttgtctgggaccgcgcggcgccggtgcaccgggcgggctgagcgcctcctgcggcccggcctgcgcgccccggcccgccgcgccgcccacgccccaacccccgcgccgccgccgccctcgccctgtgcgccctgcgcgccctgcgcacccgcggcccgagcccagccagagccgggcggagcggagcgcgccgagcctcgtcccgcggccgggccggggccgggccgtagcggcggcgcctggatgcggacccggccgcggggagacgggcgcccgccccgaaacgactttcagtccccgacgcgccccgcccaacccctacgatgaagagggcgtccgctggagggagccggctgctggcatgggtgctgtggctgcaggcctggcaggtggcagccccatgcccaggtgcctgcgtatgctacaatgagcccaaggtgacgacaagctgcccccagcagggcctgcaggctgtgcccgtgggcatccctgctgccagccagcgcatcttcctgcacggcaaccgcatctcgcatgtgccagctgccagcttccgtgcctgccgcaacctcaccatcctgtggctgcactcgaatgtgctggcccgaattgatgcggctgccttcactggcctggccctcctggagcagctggacctcagcgataatgcacagctccggtctgtggaccctgccacattccacggcctgggccgcctacacacgctgcacctggaccgctgcggcctgcaggagctgggcccggggctgttccgcggcctggctgccctgcagtacctctacctgcaggacaacgcgctgcaggcactgcctgatgacaccttccgcgacctgggcaacctcacacacctcttcctgcacggcaaccgcatctccagcgtgcccgagcgcgccttccgtgggctgcacagcctcgaccgtctcctactgcaccagaaccgcgtggcccatgtgcacccgcatgccttccgtgaccttggccgcctcatgacactctatctgtttgccaacaatctatcagcgctgcccactgaggccctggcccccctgcgtgccctgcagtacctgaggctcaacgacaacccctgggtgtgtgactgccgggcacgcccactctgggcctggctgcagaagttccgcggctcctcctccgaggtgccctgcagcctcccgcaacgcctggctggccgtgacctcaaacgcctagctgccaatgacctgcagggctgcgctgtggccaccggcccttaccatcccatctggaccggcagggccaccgatgaggagccgctggggcttcccaagtgctgccagccagatgccgctgacaaggcctcagtactggagcctggaagaccagcttcggcaggcaatgcgctgaagggacgcgtgccgcccggtgacagcccgccgggcaacggctctggcccacggcacatcaatgactcaccctttgggactctgcctggctctgctgagcccccgctcactgcagtgcggcccgagggctccgagccaccagggttccccacctcgggccctcgccggaggccaggctgttcacgcaagaaccgcacccgcagccactgccgtctgggccaggcaggcagcgggggtggcgggactggtgactcagaaggctcaggtgccctacccagcctcacctgcagcctcacccccctgggcctggcgctggtgctgtggacagtgcttgggccctgctgacccccagcggacacaagagcgtgctcagcagccaggtgtgtgtacatacggggtctctctccacgccgccaagccagccgggcggccgacccgtggggcaggccaggccaggtcctccctgatggacgcctgccgcccgccacccccatctccaccccatcatgtttacagggttcggcggcagcgtttgttccagaacgccgcctcccacccagatcgcggtatatagagatatgcattttattttacttgtgtaaaaatatcggacgacgtggaataaagagctcttttcttaa

SEQ ID NO: 18197 - DNA, 1973 bp, Homo sapiens
  source 1..1973: mol_type = unassigned DNA
gtgtggaggagggagcaggctgcctgggtggttgtgggacgcgactcctcctaagccctggacacacttgccctccacccccgccctcgggcatccaggcgcccgtttttgagatagacgtgcccagagggaccccagccccattgcagtgtttcctaggccctgtgggtggaacccccactgggaccccccggggactcctgcaatgcgggctctgtgttcactggagtcctgaggaggtacctgcagtcaccagtgtccattccaggaggccttcaaggagccggctgctggcatgggtgctgtggctgcaggcctggcaggtggcagccccatgcccaggtgcctgcgtatgctacaatgagcccaaggtgacgacaagctgcccccagcagggcctgcaggctgtgcccgtgggcatccctgctgccagccagcgcatcttcctgcacggcaaccgcatctcgcatgtgccagctgccagcttccgtgcctgccgcaacctcaccatcctgtggctgcactcgaatgtgctggcccgaattgatgcggctgccttcactggcctggccctcctggagcagctggacctcagcgataatgcacagctccggtctgtggaccctgccacattccacggcctgggccgcctacacacgctgcacctggaccgctgcggcctgcaggagctgggcccggggctgttccgcggcctggctgccctgcagtacctctacctgcaggacaacgcgctgcaggcactgcctgatgacaccttccgcgacctgggcaacctcacacacctcttcctgcacggcaaccgcatctccagcgtgcccgagcgcgccttccgtgggctgcacagcctcgaccgtctcctactgcaccagaaccgcgtggcccatgtgcacccgcatgccttccgtgaccttggccgcctcatgacactctatctgtttgccaacaatctatcagcgctgcccactgaggccctggcccccctgcgtgccctgcagtacctgaggctcaacgacaacccctgggtgtgtgactgccgggcacgcccactctgggcctggctgcagaagttccgcggctcctcctccgaggtgccctgcagcctcccgcaacgcctggctggccgtgacctcaaacgcctagctgccaatgacctgcagggctgcgctgtggccaccggcccttaccatcccatctggaccggcagggccaccgatgaggagccgctggggcttcccaagtgctgccagccagatgccgctgacaaggcctcagtactggagcctggaagaccagcttcggcaggcaatgcgctgaagggacgcgtgccgcccggtgacagcccgccgggcaacggctctggcccacggcacatcaatgactcaccctttgggactctgcctggctctgctgagcccccgctcactgcagtgcggcccgagggctccgagccaccagggttccccacctcgggccctcgccggaggccaggctgttcacgcaagaaccgcacccgcagccactgccgtctgggccaggcaggcagcgggggtggcgggactggtgactcagaaggctcaggtgccctacccagcctcacctgcagcctcacccccctgggcctggcgctggtgctgtggacagtgcttgggccctgctgacccccagcggacacaagagcgtgctcagcagccaggtgtgtgtacatacggggtctctctccacgccgccaagccagccgggcggccgacccgtggggcaggccaggccaggtcctccctgatggacgcctgccgcccgccacccccatctccaccccatcatgtttacagggttcggcggcagcgtttgttccagaacgccgcctcccacccagatcgcggtatatagagatatgcattttattttacttgtgtaaaaatatcggacgacgtggaataaagagctcttttctt

SEQ ID NO: 18198 - DNA, 672 bp, Homo sapiens
  source 1..672: mol_type = unassigned DNA
acacttgggcagcaggcatgtgcttgccacatgaccttctagcttccttcttggtctctccttgcattggcctggagtggcccagaatgtgtggagcaaagacccagtttccttgctgccccatccctccccaggagacactgagggcctggatgtccggagccggctgctggcatgggtgctgtggctgcaggcctggcaggtggcagccccatgcccaggtgcctgcgtatgctacaatgagcccaaggtgacgacaagctgcccccagcagggcctgcaggctgtgcccgtgggcatccctgctgccagccagcgcatcttcctgcacggcaaccgcatctcgcatgtgccagctgccagcttccgtgcctgccgcaacctcaccatcctgtggctgcactcgaatgtgctggcccgaattgatgcggctgccttcactggcctggccctcctggagcagctggacctcagcgataatgcacagctccggtctgtggaccctgccacattccacggcctgggccgcctacacacgctgcacctggaccgctgcggcctgcaggagctgggcccggggctgttccgcggcctggctgccctgcagtacctctacctgcaggacaacgcgctgcaggcactgcctgatgacaccttccgcgacctgggcaa

SEQ ID NO: 18199 - DNA, 559 bp, Homo sapiens
  source 1..559: mol_type = unassigned DNA
atgcacaaaagggccccttcgccaagcgcctgtctagcaaatgacagcccaactcagcaaatgcccacacctccccaagggtccccaggacatgggctgcctggtcctgctgactgaaggccccagcacctgcatgacggtgggactgtctgattctggcacgtgccccaggagcagcccctgcggatgagggctgctggccagaacagttttatctttgctgaaaaattgagaagacagtacagagagatcgcatctaccacacaccagtttcaccgttgtgagcatctggcattgggagccggctgctggcatgggtgctgtggctgcaggcctggcaggtggcagccccatgcccaggtgcctgcgtatgctacaatgagcccaaggtgacgacaagctgcccccagcagggcctgcaggctgtgcccgtgggcatccctgctgccagccagcgcatcttcctgcacggcaaccgcatctcgcatgtgccagctgccagcttccgtgcctgccgcaacctcaccatcctgtggctgcactcgaatgtgctggcccg

SEQ ID NO: 18200 - DNA, 458 bp, Homo sapiens
  source 1..458: mol_type = unassigned DNA
aaggcaggcaggtcaccggccctgcgccctgctcatctccctcagggccacctccatggccaggggcaggcagagggcacaggggtgcccagtcaccaggtctctctgcttcatatcagtggacctgggctctgaggggggccatcaaggcatcaggctggcccactccgtccttgagtcagggtcctacagactgacaccaggtgggcctgcaagaccctcatctgcatggtcctctcatgcagggtgggcctggggaggacccagcccggctgagctgactcccagcacttctccaggtgcaggggcagcctggcagttgtctgaagaccccgggatgcacttaggagctcatcggtgaggcccgggagccggctgctggcatgggtgctgtggctgcaggcctggcaggtggcagccccatgcccaggtgcctgcgtatgctacaatgagcccaa

SEQ ID NO: 18201 - DNA, 3625 bp, Homo sapiens
  source 1..3625: mol_type = unassigned DNA
cccgctccgccgatcgctcggtcctgcaaacgcgcgccgggcgctttccccggagctcggcggtgcgtgcgagcgcccttttgctgcagccgcggcggcggtggtccgagggggcggagaggagggggctgcggccggccggccagggggcggcgtcccccctcaaaaccgcctgcgaagtgctccgggtggcagaagcaggccgccggctccgcggagcaagccgctcgccccggggctgagcaagcgcgcggggctgccgggcagcaccacggttgcttgcgggcgccggtgccctcggcgcggggctggagctcaccatgcccctgcggggccgggccaccgggcacgagcggatccccggcttgcccccgcctcgacgcgctcggattagctgcagctggcgcccagggatttgaatctggaccccgggagggagtgcgcctaggccgacctcggagcggcggccccgtggccaacatgcttcgcaaagggtgctgtgtggagttgctgctgctgttggtagctgcggagctgcccctgggtggtggctgcccacgggactgtgtgtgctacccggcgcccatgacggtcagctgccaggcgcacaactttgcagccatcccggagggcatccccgtggacagcgagcgcgtcttcctgcagaacaaccgcatcggcctcctccagcccggccacttcagccccgccatggtcaccctgtggatctactcgaacaacatcacctacatccaccccagcaccttcgagggcttcgtgcacctggaggagctggacctcggcgacaaccggcagctgcggacgctggcacccgagaccttccagggcctggtgaagcttcacgccctctacctctacaagtgtgggctcagcgccttgccggccggcgtctttggcggcctgcacagcctgcagtacctctacctgcaggacaaccacatcgagtacctccaggacgacatcttcgtggacctggtcaacctcagccacctgtttctccacggcaacaagctgtggagtctgggcccgggcaccttccggggcctggtgaacctggaccgtcttttgctgcacgagaaccagctgcagtgggtccaccacaaggcgttccacgacctccgcaggctgaccaccctcttcctcttcaacaacagcctctcggagctgcagggtgagtgcctggccccgctgggggccctggagttcctccgcctcaacggcaacccctgggactgtggttgtcgcgcgcgctccctgtgggaatggctgcagaggttccggggctccagctccgctgtcccctgtgtgtcccctgggctgcggcacggccaggacctgaagctgctgagggccgaggacttccggaactgcacgggaccagcgtccccgcaccagatcaagtcacacacgctcaccaccaccgacagggccgcccgcaaggaacaccactcaccccacggccccaccaggagcaagggccacccgcacggcccccggcccggccacaggaagccggggaagaactgcaccaaccccaggaaccgcaatcagatctctaaggcgggcgccgggaaacaggcccccgagctgccagactatgccccagactaccagcacaagttcagttttgacatcatgcctacggcccggcccaagaggaagggcaagtgtgcccgcaggacccccatccgtgcccccagcggggtgcagcaggcctcctcggccagttccctgggggcctccctcctggcctggacactggggctggcggtcactctccgctgaggacccagggcgtcagcacccagcactgccacatgtccaccaaggaacagaatttattttcttctttttttaacaagtggaagatctgctgggtttcaggaaaaggctggtagagccttcggctgctgtctggacgtctggaccctgccatgtggattataaacccaaagtgtacagccctaggcgggagggggtggcgcttctcagccggctgtcccagccagccccgcagagcgcccacggacagtgtccactctggcaaggtgggaaaaggcactccaagtgcatcctccactggcaacagtgggacaattgcccccgacggcggcaccggggctctgtggaatcccgatcgttccgagaggtctggagggccccgtggttcctggagaaagcaggacgcagagaagaacaaatgaggctcacccacgaggctgggtggccagcagtctgggcacacacgagcaggtggcatcttggctcttgcctgaggccagtcaccctgccctgaattctatcctactccaccttcagcccctccctcgggggtagcgcctctcattcctgatgtctcaggcaaccctggcagacccaggtccaactgctggggtccaagaaccaattaccaaaggaaagatcatcagaggctgaaatctagaacttcatcccgggcaatgaggttctcacagaaggtgcagttttataactaactacgtccacttatatatattcacactctacatatatatatatatatatatatatatatatatatatatatatacacaaatgcacagtccccctcccactccgttacctaactgtacgtcttttcatgtttataaactatacagaaaactgtatttgctgaactaaggattgtattggtgatttctagcaaaaacaaagtgatagaatttttgtctagaatcccaaactggcaacgatagtctccaagggacctggccttgccaagggcctggggcaaggtgtcggcgggacggtgaggaagggggaggcagcaagagtcactttgggggaccaatattcttagatatttagagcatcaccttgtttttatatgcaacacaagcctgtctgccaccctggagcgccctgtcacccctgctgtcgtagctgttggcttcagggtgagaagtgagaagcagcttattgtatatgagggagccaggccccgagggtgagcgagatggagaaggggaaggaaggggctttgggatctggaaaccagcaggccaggcagcatccacagtgttagtccaaagggtcggaccgtgtcgtcagcctagcgtttggtcagtgacggcctggacgggccaaggagactccgggcttgagcccaggcctcccgcacggctcagctgctgaatttttccttgaggctgtttggtgtgtgacccagcaagggccctgtgtgggacagcaggagggaggcgtcgggggccttagcagaaggggaacaatgagggcatttcatgaaccatctcaggcacttctgcatcacggaagacctggccctcccagccgtcctggggatgctcagggtgcaggcagaggctcgggaggccggactcaggggtcagaagcagggactggggcaggcgagcccggacagggaagaggggctccgatcaaagccggccgtgctgctggccgggggcccaggtgggtacaagctcctttgtgctttgcacaaacctgaatcccccaccagagaggatgtgtgtgaggagccagaaacgctgaatccaattaagagagaaaaataataataacaataaatgatcttggacaagaa

SEQ ID NO: 18202 - DNA, 2203 bp, Homo sapiens
  source 1..2203: mol_type = unassigned DNA
tgggcacacggacagacggactgacggactctcgagcggacagcgcagctagcggggcgcgggcgctgggcgtcgacggccagccccagccttccccgccccgtcgcgccccgccccgtcccgtcggggccgatggctcctcccgaggcccgcagcccgggcggcgcagggtagagcgccgcggcccggccacgcagcccggggactcccgggccctcccggagccccgcggggtccccgccgtgcatccggcgggctcagggagcgagtgggagcgccctccccccgctgccccctcccccgagcatcgagacaagatgctgcccgggctcaggcgcctgctgcaagctcccgcctcggcctgcctcctgctgatgctcctggccctgcccctggcggcccccagctgccccatgctctgcacctgctactcatccccgcccaccgtgagctgccaggccaacaacttctcctctgtgccgctgtccctgccacccagcactcagcgactcttcctgcagaacaacctcatccgcacgctgcggccaggcacctttgggtccaacctgctcaccctgtggctcttctccaacaacctctccaccatctacccgggcactttccgccacttgcaagccctggaggagctggacctcggtgacaaccggcacctgcgctcgctggagcccgacaccttccagggcctggagcggctgcagtcgctgcatttgtaccgctgccagctcagcagcctgcccggcaacatcttccgaggcctggtcagcctgcagtacctctacctccaggagaacagcctgctccacctacaggatgacttgttcgcggacctggccaacctgagccacctcttcctccacgggaaccgcctgcggctgctcacagagcacgtgtttcgcggcctgggcagcctggaccggctgctgctgcacgggaaccggctgcagggcgtgcaccgcgcggccttccgcggcctcagccgcctcaccatcctctacctgttcaacaacagcctggcctcgctgcccggcgaggcgctcgccgacctgccctcgctcgagttcctgcggctcaacgctaacccctgggcgtgcgactgccgcgcgcggccgctctgggcctggttccagcgcgcgcgcgtgtccagctccgacgtgacctgcgccacccccccggagcgccagggccgagacctgcgcgcgctccgcgaggccgacttccaggcgtgtccgcccgcggcacccacgcggccgggcagccgcgcccgcggcaacagctcctccaaccacctgtacggggtggccgaggccggggcgcccccagccgatccctccaccctctaccgagatctgcctgccgaagactcgcgggggcgccagggcggggacgcgcctactgaggacgactactgggggggctacgggggtgaggaccagcgaggggagcagatgtgccccggcgctgcctgccaggcgcccccggactcccgaggccctgcgctctcggccgggctccccagccctctgctttgcctcctgctcctggtgccccaccacctctgactgcggtgctgagatcgaagaggccagtgtccgatccccgcttcccgtccacccggggctgcggctccggccccagtcgccccaccttccctggccttgctgcctccctttcccctcccagctcctctcctccccggggagcaggccgcctctccttgcctgccccctgggctgtcctgacttgtggcagccccaagagggcgtgtgtggtggctcagccctgccctccccagttctggccattaactcttccccatcccaaggctggggtggggccccccaggcagccgctgacccgcactcctaagggcccacagcggacaccagaggggcttttgtctgcagagcgtcttccaccagcagagcctttggaagctcccccagggagccccacccaggaccctttgggggatgcctcagtcagggccaggctgaccctgacccctgcttaccctagtcccctcaacctcctgacactggaggaatacttttctcctaagtctaccctggacactttttagggcacctggagagaactttcctctccactgtggcccctgcgtggtgaagatcaaaagaagttgtttgggaaaaaaaatttattaaaaaattctattatttta

SEQ ID NO: 18203 - DNA, 637 bp, Homo sapiens
  source 1..637: mol_type = unassigned DNA
cgagacaagatgctgcccgggctcaggcgcctgctgcaagctcccgcctcggcctgcctcctgctgatgctcctggccctgcccctggcggcccccagctgccccatgctctgcacctgctactcatccccgcccaccgtgagctgccaggccaacaacttctcctctgtgccgctgtccctgccacccagcactcagcgactcttcctgcagaacaacctcatccgcacgctgcggccaggcacctttgggtccaacctgctcaccctgtggctcttctccaacaacctctccaccatctacccgggcactttccgccacttgcaagccctggaggagctggacctcggtgacaaccggcacctgcgctcgctggagcccgacaccttccagggcctggagcggctgcagtcgctgcatttgtaccgctgccagctcagcagcctgcccggcaacatcttccgaggcctggtcagcctgcagtacctctacctccaggagaacagcctgctccacctacaggggaagaaagaaaagggtaaatctctgttatgcagctggagaatggatgctctgaaaatggaaggaataccagtaattgttattcattgttattattattgatctaattattgtt

SEQ ID NO: 18204 - DNA, 582 bp, Homo sapiens
  source 1..582: mol_type = unassigned DNA
atgctgcccgggctcaggcgcctgctgcaagctcccgcctcggcctgcctcctgctgatgctcctggccctgcccctggcggcccccagctgccccatgctctgcacctgctactcatccccgcccaccgtgagctgccaggccaacaacttctcctctgtgccgctgtccctgccacccagcactcagcgactcttcctgcagaacaacctcatccgcacgctgcggccaggcacctttgggtccaacctgctcaccctgtggctcttctccaacaacctctccaccatctacccgggcactttccgccacttgcaagccctggaggagctggacctcggtgacaaccggcacctgcgctcgctggagcccgacaccttccagggcctggagcggctgcagtcgctgcatttgtaccgctgccagctcagcagcctgcccggcaacatcttccgaggcctggtcagcctgcagtacctctacctccaggagaacagcctgctccacctacagggtcccctgcccaaaggcctttgcagctgtttttctcacccaccctcaagtctgcccacatcacggtga

SEQ ID NO: 18205 - DNA, 3956 bp, Homo sapiens
  source 1..3956: mol_type = unassigned DNA
agctgacacagtgagttgtccctgacactcatgactttcaagccctgtgtcttggagggcactgtgatctggaagttcaccttccccatgaaaaaacccaaaccagcctctccttttcctgcatggtgatccgtctgtaatgatcagtgacattctcagaattaaccaatcaggaaattcttggaaagtccacgcctcagcatttagtgcttgggaaattctacttccagatcccagaggggacagagcagatttccagttctcctagcaccaccatgatctcaggactaaccactgcacacccgtgatgggattccaaaccttcgctgcaagaggacaaggtgacgagttgctgacagtgaaggctaaactaacgcggacagtgaagtgctacatgagtcggactcagactccaggtgaagcagccagcagaggtcagagagagacagctcacgttccggaatagctctccagacccccagctggccatgtggtgagttcagggcccaaatcaagtagtaccagcaatcagggaactcctatctgttttgaatggattcacaccagccacaagcctggaaagatggtgtcacaatctacagtcaggcaggattctcctgtggagccctgggaagggatcagcgatcactctggcattattgatggttcgcccagactcctgaacactgaccatcctccttgccaattagacatcaggctcatgaggcacaaagctgtctggattaacccccaggatgtgcagcaacagccgcaggacttgcaatctcaggtgccagcagcagggaacagtgggacccattttgtgacagatgctgcctctccctcaggcccttcaccttcgtgcctcggggactccctggcagagacaacgttgtctgaggataccacagactccgttggcagcgcttctccccatggctcgagtgaaaagagtagcagcttctctctgtcctcaacagaggtacacatggtccgcccaggatactctcatcgggtgtctctgcccacaagccctgggattttggccacctccccatatcctgagactgacagtgctttttttgagccttcccatctgacatctgctgctgatgaaggtgctgttcaagtcagtagaagaaccatttcttcgaattccttctcaccagaggtatttgtgctgcctgttgatgtagaaaaggaaaatgcccacttttatgttgcagatatgattatatcagcaatggagaaaatgaagtgtaacattctgagtcaacagcagacagagagctggagtaaagaagtcagtgggttacttgggagtgatcagcctgactctgaaatgacttttgataccaacataaagcaagagtctgggtcttctacttcttcatacagtggctatgaaggttgtgctgtgttacaggtcagcccagtgactgaaacacgtacttaccatgatgtgaaagagatttgcaaatgcgatgttgatgaatttgttattttagagcttggagattttaatgatatcacagaaacctgtagctgttcctgcagctcctctaagagtgtcacttatgagccagacttcaattctgcagaactattagccaaagagctgtaccgcgtgttccagaagtgctggatactgtcagtagttaattctcagctggcaggttccctgagtgcagctggctcgatagtcgtaaatgaagagtgtgtccgaaaagactttgaatccagtatgaatgtagtacaggaaattaaatttaagtctaggatcagagggactgaagactgggctcctcctagatttcaaatcatatttaatattcatccaccactcaagagggaccttgtggtggcagcccagaattttttctgtgccggctgtggaactccagtagagcctaagtttgtgaagcggctccggtactgcgaatacctagggaagtatttctgtgactgctgccactcatatgcagagtcgtgcatccctgcccgaatcctgatgatgtgggacttcaagaagtactacgtcagcaatttctccaaacagctgctcgacagcatatggcaccagcccattttcaatttgctgagcatcggccaaagcctgtatgcgaaagccaaggagctggacagagtgaaggaaattcaggagcagctcttccatatcaagaagctgttgaagacctgtaggtttgctaacagtgcattaaaggagttcgagcaggtgccgggacacttgactgatgagctccacctgttctcccttgaggacctggtcaggatcaagaaagggctgctggcacccttactcaaggacattctgaaagcttcccttgcacatgtggctggctgtgagctgtgtcaaggaaagggctttatttgtgaattttgccagaatacgactgtcatcttcccatttcagacagcaacatgtagaagatgttcagcgtgcagggcttgctttcacaaacagtgcttccagtcctccgagtgcccccggtgtgcgaggatcacagcgaggagaaaacttctggaaagtgtggcctctgcagcaacatgatgcccctgagtactgtgaaaaagactgttcaacatgccttatgataacaccgatttgtgtctattattggtgacattgttttagatattgggtattgtatattaaggaaaaagatggtctatattctctttattgcatatacttaatgtttcaaaagaatgcagattctgtgtttaagcacagggctgatagttgtggttttgtttacaaatgttctgttttggctgctattggttttttaaagaggttttttatacttttgtatttgaatagttatgtttcactgatgctgagccagtttgtatgtgtgtgcatatatgtgaactgtaactgacaagatgaattactcagtttctctttctctaaagcttgtttgatgaaactggttggtcctttcagtgaacaaaaatatgaccccaaatctgtttgctctggcttttatttcttcaggaagcagacttccacttaaatgccattttgtgattgtgtcaatcatacacattttatttacttcagagtttgaatagagagtacacatttcttctgcagatttatttcatgatgagtttgagttgcttagcagggcgtgtgggtcccgttgaagtgcagtttgaagcaactgcttctagatggcactctttcaggtggcacaaattgaacctgtatttgtcatctctgttccacacactgcaatgtcaagggatgcagaagtgagtagaattccatccctgcccttgaggatcttgctttaacagatgtaaaactgaacataaggtatttgcagatttaaacgaactgggggaaataatgaacagtgtgattctagtaataacattaaaatcatagacattgactaataaggttaaatgaatcacaaaacctttatgaatttcttttttctaatagttcttatatgttttcctgaaacatgtgagcctattcttttttcttctactttctatatactttctcccacttgagaaaggggccttgaggctgggtcccttcatggtatacctttagactgaacggtttgcaacctagggcttgggcattacattccctgggattcacatgccctaactaaacctaccttgattttctcagacagcacaggcaggcaataaagcgtcacagattgtcccctaaccccatccagccatgtgtatgagtgtgttttattcaatgggatagtactgagcacatgaaagaaatgaatgacttctgtcaatctcttttcattcagtcttctcattctgtcaattgttttctcatccgcagtgcctctgccagaactgtgctcacatccattatttaagccagatcttttctaagtattatagaagtgtagaggcacatagaataaataaaaccagacttcaaa

SEQ ID NO: 18206 - DNA, 1736 bp, Homo sapiens
  source 1..1736: mol_type = unassigned DNA
tactggtacaagccactgtgctcagcctcacttttaaaatatgcatttttttgtttctgagattgtttttctctgttagttatctgcatttcttctttccgtgaattacctattcccatcctttgtgcatttttgtatttttttctcattgatttatcaaggtctttatgatgctgcttcctaacattgtatatatactgcttcacaatttataaagcacttttcctatgtgtaataacactcgatccagttctgagttgcattttgtggtctcagaatagttagcctaacctgccttcagtcttcctgctagtgagaggagtctggactcccacccagatttccagatcctaaaatgaatgttccttttgctacactgcagtttgcaatttccatcttccaaatccaggagtattttgggaaggttttgtttttctgacgtctgttccacaagagcagagctcatgaatggccatgatttaattccccaagtctctgctggagccttcccagctgtcatgaggttgagtatggctttatcatcatgaaacaagtcatcagagtctttgaatcttgcgtaggaattggaagtcggggtataccaggataggttttcagcaccaggtgtggcactcaccctccggtatgcttggcagagtttgtgaagcggctccggtactgcgaatacctagggaagtatttctgtgactgctgccactcatatgcagagtcgtgcatccctgcccgaatcctgatgatgtgggacttcaagaagtactacgtcagcaatttctccaaacagctgctcgacagcatatggcaccagcccattttcaatttgctgagcatcggccaaagcctgtatgcgaaagccaaggagctggacagagtgaaggaaattcaggagcagctcttccatatcaagaagctgttgaagacctgtaggtttgctaacagtgcattaaaggagttcgagcaggtgccgggacacttgactgatgagctccacctgttctcccttgaggacctggtcaggatcaagaaagggctgctggcacccttactcaaggacattctgaaagcttcccttgcacatgtggctggctgtgagctgtgtcaaggaaagggctttatttgtgaattttgccagaatacgactgtcatcttcccatttcagacagcaacatgtagaagatgttcagcgtgcagggcttgctttcacaaacagtgcttccagtcctccgagtgcccccggtgtgcgaggatcacagcgaggagaaaacttctggaaagtgtggcctctgcagcaacatgatgcccctgagtactgtgaaaaagactgttcaacatgccttatgataacaccgatttgtgtctattattggtgacattgttttagatattgggtattgtatattaaggaaaaagatggtctatattctctttattgcatatacttaatgtttcaaaagaatgcagattctgtgtttaagcacagggctgatagttgtggttttgtttacaaatgttctgttttggctgctattggttttttaaagaggttttttatacttttgtatttgaatagttatgtttcactgatgctgagccagtttgtatgtgtgtgcatatatgtgaactgtaactgacaagatgaattactcagtttctctttctctaaagcttgtttgatgaaactggttggtcctttcagtgaacaaaaatatgaccccaaa

SEQ ID NO: 18207 - DNA, 2361 bp, Homo sapiens
  source 1..2361: mol_type = unassigned DNA
ggagcgcggtggccacggaacgctgcccggagccgcgcgagggaggacccgacgcgcggcgtttacccagcgcagcgttccaccgctcgggtttggctggataaaataaaaaatggggatattgacctcctgtcactactgcatggactttgatggtttccaatcattactttctcctctgtgtcaatctgcctcttcgagaaattcatactcctggcccttcaccttcgtgcctcggggactccctggcagagacaacgttgtctgaggataccacagactccgttggcagcgcttctccccatggctcgagtgaaaagagtagcagcttctctctgtcctcaacagaggtacacatggtccgcccaggatactctcatcgggtgtctctgcccacaagccctgggattttggccacctccccatatcctgagactgacagtgctttttttgagccttcccatctgacatctgctgctgatgaaggtgctgttcaagtcagtagaagaaccatttcttcgaattccttctcaccagaggtatttgtgctgcctgttgatgtagaaaaggaaaatgcccacttttatgttgcagatatgattatatcagcaatggagaaaatgaagtgtaacattctgagtcaacagcagacagagagctggagtaaagaagtcagtgggttacttgggagtgatcagcctgactctgaaatgacttttgataccaacataaagcaagagtctgggtcttctacttcttcatacagtggctatgaaggttgtgctgtgttacaggtcagcccagtgactgaaacacgtacttaccatgatgtgaaagagatttgcaaatgcgatgttgatgaatttgttattttagagcttggagattttaatgatatcacagaaacctgtagctgttcctgcagctcctctaagagtgtcacttatgagccagacttcaattctgcagaactattagccaaagagctgtaccgcgtgttccagaagtgctggatactgtcagtagttaattctcagctggcaggttccctgagtgcagctggctcgatagtcgtaaatgaagagtgtgtccgaaaagactttgaatccagtatgaatgtagtacaggaaattaaatttaagtctaggatcagagggactgaagactgggctcctcctagatttcaaatcatatttaatattcatccaccactcaagagggaccttgtggtggcagcccagaattttttctgtgccggctgtggaactccagtagagcctaagtttgtgaagcggctccggtactgcgaatacctagggaagtatttctgtgactgctgccactcatatgcagagtcgtgcatccctgcccgaatcctgatgatgtgggacttcaagaagtactacgtcagcaatttctccaaacagctgctcgacagcatatggcaccagcccattttcaatttgctgagcatcggccaaagcctgtatgcgaaagccaaggagctggacagagtgaaggaaattcaggagcagctcttccatatcaagaagctgttgaagacctgtaggtttgctaacagtgcattaaaggagttcgagcaggtgccgggacacttgactgatgagctccacctgttctcccttgaggacctggtcaggatcaagaaagggctgctggcacccttactcaaggacattctgaaagcttcccttgcacatgtggctggctgtgagctgtgtcaaggaaagggctttatttgtgaattttgccagaatacgactgtcatcttcccatttcagacagcaacatgtagaagatgttcagcgtgcagggcttgctttcacaaacagtgcttccagtcctccgagtgcccccggtgtgcgaggatcacagcgaggagaaaacttctggaaagtgtggcctctgcagcaacatgatgcccctgagtactgtgaaaaagactgttcaacatgccttatgataacaccgatttgtgtctattattggtgacattgttttagatattgggtattgtatattaaggaaaaagatggtctatattctctttattgcatatacttaatgtttcaaaagaatgcagattctgtgtttaagcacagggctgatagttgtggttttgtttacaaatgttctgttttggctgctattggttttttaaagaggttttttatacttttgtatttgaatagttatgtttcactgatgctgagccagtttgtatgtgtgtgcatatatgtgaactgtaactgacaagatgaattactcagtttctctttctctaaagcttgtttgatgaaactggttggtcctttcagtgaacaaaaatatgaccccaaa

SEQ ID NO: 18208 - DNA, 2754 bp, Homo sapiens
  source 1..2754: mol_type = unassigned DNA
cgggagcgcggtggccacggaacgctgcccggagccgcgcgagggaggacccgacgcgcggcgtttacccagcgcagcgttccaccgctcgggtttggctggataaaataaaaaatggggatattgacctcctgtcactactgcatggactttgatggtttccaatcattactttctcctctgtgtcaatctgcctcttcgagaaattcatactcctgaatagctctccagacccccagctggccatgtggtgagttcagggcccaaatcaagtagtaccagcaatcagggaactcctatctgttttgaatggattcacaccagccacaagcctggaaagatggtgtcacaatctacagtcaggcaggattctcctgtggagccctgggaagggatcagcgatcactctggcattattgatggttcgcccagactcctgaacactgaccatcctccttgccaattagacatcaggctcatgaggcacaaagctgtctggattaacccccaggatgtgcagcaacagccgcaggacttgcaatctcaggtgccagcagcagggaacagtgggacccattttgtgacagatgctgcctctccctcaggcccttcaccttcgtgcctcggggactccctggcagagacaacgttgtctgaggataccacagactccgttggcagcgcttctccccatggctcgagtgaaaagagtagcagcttctctctgtcctcaacagaggtacacatggtccgcccaggatactctcatcgggtgtctctgcccacaagccctgggattttggccacctccccatatcctgagactgacagtgctttttttgagccttcccatctgacatctgctgctgatgaaggtgctgttcaagtcagtagaagaaccatttcttcgaattccttctcaccagaggtatttgtgctgcctgttgatgtagaaaaggaaaatgcccacttttatgttgcagatatgattatatcagcaatggagaaaatgaagtgtaacattctgagtcaacagcagacagagagctggagtaaagaagtcagtgggttacttgggagtgatcagcctgactctgaaatgacttttgataccaacataaagcaagagtctgggtcttctacttcttcatacagtggctatgaaggcaagttgtgctgtgttacaggtcagcccagtgactgaaacacgtacttaccatgatgtgaaagagatttgcaaatgcgatgttgatgaatttgttattttagagcttggagattttaatgatatcacagaaacctgtagctgttcctgcagctcctctaagagtgtcacttatgagccagacttcaattctgcagaactattagccaaagagctgtaccgcgtgttccagaagtgctggatactgtcagtagttaattctcagctggcaggttccctgagtgcagctggctcgatagtcgtaaatgaagagtgtgtccgaaaagactttgaatccagtatgaatgtagtacaggaaattaaatttaagtctaggatcagagggactgaagactgggctcctcctagatttcaaatcatatttaatattcatccaccactcaagagggaccttgtggtggcagcccagaattttttctgtgccggctgtggaactccagtagagcctaagtttgtgaagcggctccggtactgcgaatacctagggaagtatttctgtgactgctgccactcatatgcagagtcgtgcatccctgcccgaatcctgatgatgtgggacttcaagaagtactacgtcagcaatttctccaaacagctgctcgacagcatatggcaccagcccattttcaatttgctgagcatcggccaaagcctgtatgcgaaagccaaggagctggacagagtgaaggaaattcaggagcagctcttccatatcaagaagctgttgaagacctgtaggtttgctaacagtgcattaaaggagttcgagcaggtgccgggacacttgactgatgagctccacctgttctcccttgaggacctggtcaggatcaagaaagggctgctggcacccttactcaaggacattctgaaagcttcccttgcacatgtggctggctgtgagctgtgtcaaggaaagggctttatttgtgaattttgccagaatacgactgtcatcttcccatttcagacagcaacatgtagaagatgttcagcgtgcagggcttgctttcacaaacagtgcttccagtcctccgagtgcccccggtgtgcgaggatcacagcgaggagaaaacttctggaaagtgtggcctctgcagcaacatgatgcccctgagtactgtgaaaaagactgttcaacatgccttatgataacaccgatttgtgtctattattggtgacattgttttagatattgggtattgtatattaaggaaaaagatggtctatattctctttattgcatatacttaatgtttcaaaagaatgcagattctgtgtttaagcacagggctgatagttgtggttttgtttacaaatgttctgttttggctgctattggttttttaaagaggttttttatacttttgtatttgaatagttatgtttcactgatgctgagccagtttgtatgtgtgtgcatatatgtgaactgtaactgacaagatgaattactcagtttctctttctctaaagcttgtttgatgaaactggttggtcctttcagtgaacaaaaatatgaccccaaa

SEQ ID NO: 18209 - DNA, 2731 bp, Homo sapiens
  source 1..2731: mol_type = unassigned DNA
accggcagaggcgcgcataggtgcgtggtgctgggcccgggcgccgcggcaccggtgtaggagcgcgcatctccagagtttcttccatctgggcgacgtctcggtgcctgcggcgggaacggcgctttgcttccctgaggagcttctagagagctacggtggcccccgtgtgggaggcggggggcgtggcggcgtcggggcgtcgctgtcccctcctcggtagctctcctccctcccctttctgctgttaccgggagcgcggtggccacggaacgctgcccggagccgcgcgagggaggacccgacgcgcggcgtttacccagcgcagcgttccaccgctcgggtttggctggaatagctctccagacccccagctggccatgtggtgagttcagggcccaaatcaagtagtaccagcaatcagggaactcctatctgttttgaatggattcacaccagccacaagcctggaaagatggtgtcacaatctacagtcaggcaggattctcctgtggagccctgggaagggatcagcgatcactctggcattattgatggttcgcccagactcctgaacactgaccatcctccttgccaattagacatcaggctcatgaggcacaaagctgtctggattaacccccaggatgtgcagcaacagccgcaggacttgcaatctcaggtgccagcagcagggaacagtgggacccattttgtgacagatgctgcctctccctcaggcccttcaccttcgtgcctcggggactccctggcagagacaacgttgtctgaggataccacagactccgttggcagcgcttctccccatggctcgagtgaaaagagtagcagcttctctctgtcctcaacagaggtacacatggtccgcccaggatactctcatcgggtgtctctgcccacaagccctgggattttggccacctccccatatcctgagactgacagtgctttttttgagccttcccatctgacatctgctgctgatgaaggtgctgttcaagtcagtagaagaaccatttcttcgaattccttctcaccagaggtatttgtgctgcctgttgatgtagaaaaggaaaatgcccacttttatgttgcagatatgattatatcagcaatggagaaaatgaagtgtaacattctgagtcaacagcagacagagagctggagtaaagaagtcagtgggttacttgggagtgatcagcctgactctgaaatgacttttgataccaacataaagcaagagtctgggtcttctacttcttcatacagtggctatgaaggttgtgctgtgttacaggtcagcccagtgactgaaacacgtacttaccatgatgtgaaagagatttgcaaatgcgatgttgatgaatttgttattttagagcttggagattttaatgatatcacagaaacctgtagctgttcctgcagctcctctaagagtgtcacttatgagccagacttcaattctgcagaactattagccaaagagctgtaccgcgtgttccagaagtgctggatactgtcagtagttaattctcagctggcaggttccctgagtgcagctggctcgatagtcgtaaatgaagagtgtgtccgaaaagactttgaatccagtatgaatgtagtacaggaaattaaatttaagtctaggatcagagggactgaagactgggctcctcctagatttcaaatcatatttaatattcatccaccactcaagagggaccttgtggtggcagcccagaattttttctgtgccggctgtggaactccagtagagcctaagtttgtgaagcggctccggtactgcgaatacctagggaagtatttctgtgactgctgccactcatatgcagagtcgtgcatccctgcccgaatcctgatgatgtgggacttcaagaagtactacgtcagcaatttctccaaacagctgctcgacagcatatggcaccagcccattttcaatttgctgagcatcggccaaagcctgtatgcgaaagccaaggagctggacagagtgaaggaaattcaggagcagctcttccatatcaagaagctgttgaagacctgtaggtttgctaacagctgtgtcaaggaaagggctttatttgtgaattttgccagaatacgactgtcatcttcccatttcagacagcaacatgtagaagatgttcagcgtgcagggcttgctttcacaaacagtgcttccagtcctccgagtgcccccggtgtgcgaggatcacagcgaggagaaaacttctggaaagtgtggcctctgcagcaacatgatgcccctgagtactgtgaaaaagactgttcaacatgccttatgataacaccgatttgtgtctattattggtgacattgttttagatattgggtattgtatattaaggaaaaagatggtctatattctctttattgcatatacttaatgtttcaaaagaatgcagattctgtgtttaagcacagggctgatagttgtggttttgtttacaaatgttctgttttggctgctattggttttttaaagaggttttttatacttttgtatttgaatagttatgtttcactgatgctgagccagtttgtatgtgtgtgcatatatgtgaactgtaactgacaagatgaattactcagtttctctttctctaaagcttgtttgatgaaactggttggtcctttcagtgaacaaaaatatgaccccaaa

SEQ ID NO: 18210 - DNA, 2997 bp, Homo sapiens
  source 1..2997: mol_type = unassigned DNA
actccttcggcgttggctcttgcgccggggtcgttgtttcgtgacaaccactcaggtagccgtttctgagacggcagatgcggccgctttagccctgagcgggctccgcggctccctggacggtctctgccagtgcccgactcttctcttccggactccacgccaagcagcgaccctgagccaacagccagagcgcccagaaatggcggcctggactgcctcgcactggccagtcaaggggatcctgaagaacaagacctctacagcttcctctatggtggcctcggctgaacagcccagcgggagtgtcgaggaggagctgagcaaaaaatcccagaagtgggaagaaatgaacatcctggcgacatatcatccagcggacaaagactatggtttaatgaaaatagttgaaccaagcactccttcctgtcgtaagatgggtgatggtgaagatgcgtgtagtggtatagaaaccactgaagccgtggcaccagatatcttagctaagaaattagctgttgctgaaggcttgaacccaaagtatcgggttcaggaacaagaaagcagtggagaggaggctagtgacctctcacctgaagaacgagaaaaaaggcgacaatttcaaatgaaaaggaagcttcactacaatgagggactcaatatcaaactagctagagaattaatttgaaaagacctacatgatgacaaagatgaagaaatgttaaagactgcaggtggagaaagcatgaagacggaagaatcaaatcaaagctctacaacaagtgaccaacggcaaaacacattcagttctcctagcaccaccatgatctcaggactaaccactgcacacccgtgatgggattccaaaccttcgctgcaagaggacaaggtgacgagttgctgacagtgaaggctaaactaacgcggacagtgaagtgctacatgagtcggactcagactccaggtgaagcagccagcagaggtcagagagagacagctcacgttccggataaaataaaaaatggggatattgacctcctgtcactactgcatggactttgatggtttccaatcattactttctcctctgtgtcaatctgcctcttcgagaaattcatactcctggtgctgttcaagtcagtagaagaaccatttcttcgaattccttctcaccagaggtatttgtgctgcctgttgatgtagaaaaggaaaatgcccacttttatgttgcagatatgattatatcagcaatggagaaaatgaagtgtaacattctgagtcaacagcagacagagagctggagtaaagaagtcagtgggttacttgggagtgatcagcctgactctgaaatgacttttgataccaacataaagcaagagtctgggtcttctacttcttcatacagtggctatgaaggttgtgctgtgttacaggtcagcccagtgactgaaacacgtacttaccatgatgtgaaagagatttgcaaatgcgatgttgatgaatttgttattttagagcttggagattttaatgatatcacagaaacctgtagctgttcctgcagctcctctaagagtgtcacttatgagccagacttcaattctgcagaactattagccaaagagctgtaccgcgtgttccagaagtgctggatactgtcagtagttaattctcagctggcaggttccctgagtgcagctggctcgatagtcgtaaatgaagagtgtgtccgaaaagactttgaatccagtatgaatgtagtacaggaaattaaatttaagtctaggatcagagggactgaagactgggctcctcctagatttcaaatcatatttaatattcatccaccactcaagagggaccttgtggtggcagcccagaattttttctgtgccggctgtggaactccagtagagcctaagtttgtgaagcggctccggtactgcgaatacctagggaagtatttctgtgactgctgccactcatatgcagagtcgtgcatccctgcccgaatcctgatgatgtgggacttcaagaagtactacgtcagcaatttctccaaacagctgctcgacagcatatggcaccagcccattttcaatttgctgagcatcggccaaagcctgtatgcgaaagccaaggagctggacagagtgaaggaaattcaggagcagctcttccatatcaagaagctgttgaagacctgtaggtttgctaacagtgcattaaaggagttcgagcaggtgccgggacacttgactgatgagctccacctgttctcccttgaggacctggtcaggatcaagaaagggctgctggcacccttactcaaggacattctgaaagcttcccttgcacatgtggctggctgtgagctgtgtcaaggaaagggctttatttgtgaattttgccagaatacgactgtcatcttcccatttcagacagcaacatgtagaagatgttcagcgtgcagggcttgctttcacaaacagtgcttccagtcctccgagtgcccccggtgtgcgaggatcacagcgaggagaaaacttctggaaagtgtggcctctgcagcaacatgatgcccctgagtactgtgaaaaagactgttcaacatgccttatgataacaccgatttgtgtctattattggtgacattgttttagatattgggtattgtatattaaggaaaaagatggtctatattctctttattgcatatacttaatgtttcaaaagaatgcagattctgtgtttaagcacagggctgatagttgtggttttgtttacaaatgttctgttttggctgctattggttttttaaagaggttttttatacttttgtatttgaatagttatgtttcactgatgctgagccagtttgtatgtgtgtgcatatatgtgaactgtaactgacaagatgaattactcagtttctctttctctaaagcttgtttgatgaaactggttggtcctttcagtgaacaaaaatatgacccc

SEQ ID NO: 18211 - DNA, 1948 bp, Homo sapiens
  source 1..1948: mol_type = unassigned DNA
cccctttctgctgttaccgggagcgcggtggccacggaacgctgcccggagccgcgcgagggaggacccgacgcgcggcgtttacccagcgcagcgttccaccgctcgggtttggctgggcccttcaccttcgtgcctcggggactccctggcagagacaacgttgtctgaggataccacagactccgttggcagcgcttctccccatggctcgagtgaaaagagtagcagcttctctctgtcctcaacagaggtacacatggtccgcccaggatactctcatcgggtgtctctgcccacaagccctgggattttggccacctccccatatcctgagactgacagtgctttttttgagccttcccatctgacatctgctgctgatgaaggtgctgttcaagtcagtagaagaaccatttcttcgaattccttctcaccagaggtatttgtgctgcctgttgatgtagaaaaggaaaatgcccacttttatgttgcagatatgattatatcagcaatggagaaaatgaagtgtaacattctgagtcaacagcagacagagagctggagtaaagaagtcagtgggttacttgggagtgatcagcctgactctgaaatgacttttgataccaacataaagcaagagtctgggtcttctacttcttcatacagtggctatgaaggttgtgctgtgttacaggtcagcccagtgactgaaacacgtacttaccatgatgtgaaagagatttgcaaatgcgatgttgatgaatttgttattttagagcttggagattttaatgatatcacagaaacctgtagctgttcctgcagctcctctaagagtgtcacttatgagccagacttcaattctgcagaactattagccaaagagctgtaccgcgtgttccagaagtgctggatactgtcagtagttaattctcagctggcaggttccctgagtgcagctggctcgatagtcgtaaatgaagagtgtgtccgaaaagactttgaatccagtatgaatgtagtacaggaaattaaatttaagtctaggatcagagggactgaagactgggctcctcctagatttcaaatcatatttaatattcatccaccactcaagagggaccttgtggtggcagcccagaattttttctgtgccggctgtggaactccagtagagcctaagtttgtgaagcggctccggtactgcgaatacctagggaagtatttctgtgactgctgccactcatatgcagagtcgtgcatccctgcccgaatcctgatgatgtgggacttcaagaagtactacgtcagcaatttctccaaacagctgctcgacagcatatggcaccagcccattttcaatttgctgagcatcggccaaagcctgtatgcgaaagccaaggagctggacagagtgaaggaaattcaggagcagctcttccatatcaagaagctgttgaagacctgtaggtttgctaacagtgcattaaaggagttcgagcaggtgccgggacacttgactgatgagctccacctgttctcccttgaggacctggtcaggatcaagaaagggctgctggcacccttactcaaggacattctgaaagcttcccttgcacatgtggctggctgtgagctgtgtcaaggaaagggctttatttgtgaattttgccagaatacgactgtcatcttcccatttcagacagcaacatgtagaagatgttcagcgtgcagggcttgctttcacaaacagtgcttccagtcctccgagtgcccccggtgtgcgaggatcacagcgaggagaaaacttctggaaagtgtggcctctgcagcaacatgatgcccctgagtactgtgaaaaagactgttcaacatgccttatgataacaccgatttgtgtctattattggtgacattgttttagatattgggtattgtatattaa

SEQ ID NO: 18212 - DNA, 494 bp, Homo sapiens
  source 1..494: mol_type = unassigned DNA
gcgcggtggccacggaacgctgcccggagccgcgcgagggaggacccgacgcgcggcgtttacccagcgcagcgttccaccgctcgggtttggctggaggtacacatggtccgcccaggatactctcatcgggtgtctctgcccacaagccctgggattttggccacctccccatatcctgagactgacagtgctttttttgagccttcccatctgacatctgctgctgatgaaggtgctgttcaagtcagtagaagaaccatttcttcgaattccttctcaccagaggtatttgtgctgcctgttgatgtagaaaaggaaaatgcccacttttatgttgcagatatgattatatcagcaatggagaaaatgaagtgtaacattctgagtcaacagcagacagagagctggagtaaagaagtcagtgggttacttgggagtgatcagcctgactctgaaatgacttttgataccaacataaagcaagagtctgg

SEQ ID NO: 18213 - DNA, 972 bp, Homo sapiens
  source 1..972: mol_type = unassigned DNA
ttaatactgtgtctctggtggctctagtgatgcaatcattctcgatggggccactgactctgatgtcacaatgacttggctggaggtgtcctgaagtctcttgtttgtccagggcctttgctgcagcttatatgttcactagtaatctggcctgtgcctaccttttaatcccagctggaaaatctcagtaagaatgatgataaaataaaaaatggggatattgacctcctgtcactactgcatggactttgatggtttccaatcattactttctcctctgtgtcaatctgcctcttcgagaaattcatactcctgaatagctctccagacccccagctggccatgtggtgagttcagggcccaaatcaagtagtaccagcaatcagggaactcctatctgttttgaatggattcacaccagccacaagcctggaaagatggtgtcacaatctacagtcaggcaggattctcctgtggagccctgggaagggatcagcgatcactctggcattattgatggttcgcccagactcctgaacactgaccatcctccttgccaattagacatcaggctcatgaggcacaaagctgtctggattaacccccaggatgtgcagcaacagccgcaggacttgcaatctcaggtgccagcagcagggaacagtgggacccattttgtgacagatgctgcctctccctcaggcccttcaccttcgtgcctcggggactccctggcagagacaacgttgtctgaggataccacagactccgttggcagcgcttctccccatggctcgagtgaaaagagtagcagcttctctctgtcctcaacagaggtacacatggtccgcccaggatactctcatcgggtgtctctgcccacaagccctgggattttggccacctccccatatcctgagactgacagtgctttttttgagccttcccatctgacatctgctgctgatgaag

SEQ ID NO: 18214 - DNA, 3206 bp, Homo sapiens
  source 1..3206: mol_type = unassigned DNA
ggatttctaggaggaccggcagaggcgcgcataggtgcgtggtgctgggcccgggcgccgcggcaccggtgtaggagcgcgcatctccagagtttcttccatctgggcgacgtctcggtgcctgcggcgggaacggcgctttgcttccctgaggagcttctagagagctacggtggcccccgtgtgggaggcggggggcgtggcggcgtcggggcgtcgctgtcccctcctcggtagctctcctccctcccctttctgctgttaccgggagcgcggtggccacggaacgctgcccggagccgcgcgagggaggacccgacgcgcggcgtttacccagcgcagcgttccaccgctcgggtttggctgggtgctgttcaagtcagtagaagaaccatttcttcgaattccttctcaccagaggtatttgtgctgcctgttgatgtagaaaaggaaaatgcccacttttatgttgcagatatgattatatcagcaatggagaaaatgaagtgtaacattctgagtcaacagcagacagagagctggagtaaagaagtcagtgggttacttgggagtgatcagcctgactctgaaatgacttttgataccaacataaagcaagagtctgggtcttctacttcttcatacagtggctatgaaggttgtgctgtgttacaggtcagcccagtgactgaaacacgtacttaccatgatgtgaaagagatttgcaaatgcgatgttgatgaatttgttattttagagcttggagattttaatgatatcacagaaacctgtagctgttcctgcagctcctctaagagtgtcacttatgagccagacttcaattctgcagaactattagccaaagagctgtaccgcgtgttccagaagtgctggatactgtcagtagttaattctcagctggcaggttccctgagtgcagctggctcgatagtcgtaaatgaagagtgtgtccgaaaagactttgaatccagtatgaatgtagtacaggaaattaaatttaagtctaggatcagagggactgaagactgggctcctcctagatttcaaatcatatttaatattcatccaccactcaagagggaccttgtggtggcagcccagaattttttctgtgccggctgtggaactccagtagagcctaagtttgtgaagcggctccggtactgcgaatacctagggaagtatttctgtgactgctgccactcatatgcagagtcgtgcatccctgcccgaatcctgatgatgtgggacttcaagaagtactacgtcagcaatttctccaaacagctgctcgacagcatatggcaccagcccattttcaatttgctgagcatcggccaaagcctgtatgcgaaagccaaggagctggacagagtgaaggaaattcaggagcagctcttccatatcaagaagctgttgaagacctgtaggtttgctaacagtgcattaaaggagttcgagcaggtgccgggacacttgactgatgagctccacctgttctcccttgaggacctggtcaggatcaagaaagggctgctggcacccttactcaaggacattctgaaagcttcccttgcacatgtggctggctgtgagctgtgtcaaggaaagggctttatttgtgaattttgccagaatacgactgtcatcttcccatttcagacagcaacatgtagaagatgttcagcgtgcagggcttgctttcacaaacagtgcttccagtcctccgagtgcccccggtgtgcgaggatcacagcgaggagaaaacttctggaaagtgtggcctctgcagcaacatgatgcccctgagtactgtgaaaaagactgttcaacatgccttatgataacaccgatttgtgtctattattggtgacattgttttagatattgggtattgtatattaaggaaaaagatggtctatattctctttattgcatatacttaatgtttcaaaagaatgcagattctgtgtttaagcacagggctgatagttgtggttttgtttacaaatgttctgttttggctgctattggttttttaaagaggttttttatacttttgtatttgaatagttatgtttcactgatgctgagccagtttgtatgtgtgtgcatatatgtgaactgtaactgacaagatgaattactcagtttctctttctctaaagcttgtttgatgaaactggttggtcctttcagtgaacaaaaatatgaccccaaatctgtttgctctggcttttatttcttcaggaagcagacttccacttaaatgccattttgtgattgtgtcaatcatacacattttatttacttcagagtttgaatagagagtacacatttcttctgcagatttatttcatgatgagtttgagttgcttagcagggcgtgtgggtcccgttgaagtgcagtttgaagcaactgcttctagatggcactctttcaggtggcacaaattgaacctgtatttgtcatctctgttccacacactgcaatgtcaagggatgcagaagtgagtagaattccatccctgcccttgaggatcttgctttaacagatgtaaaactgaacataaggtatttgcagatttaaacgaactgggggaaataatgaacagtgtgattctagtaataacattaaaatcatagacattgactaataaggttaaatgaatcacaaaacctttatgaatttcttttttctaatagttcttatatgttttcctgaaacatgtgagcctattcttttttcttctactttctatatactttctcccacttgagaaaggggccttgaggctgggtcccttcatggtatacctttagactgaacggtttgcaacctagggcttgggcattacattccctgggattcacatgccctaactaaacctaccttgattttctcagacagcacaggcaggcaataaagcgtcacagattgtcccctaaccccatccagccatgtgtatgagtgtgttttattcaatgggatagtactgagcacatgaaagaaatgaatgacttctgtcaatctcttttcattcagtcttctcattctgtcaattgttttctcatccgcagtgcctctgccagaactgtgctcacatccattatttaagccagatcttttctaagtattatagaagtgtagaggcacatagaataaataaaaccagacttcaaac

SEQ ID NO: 18215 - DNA, 3322 bp, Homo sapiens
  source 1..3322: mol_type = unassigned DNA
ggatttctaggaggaccggcagaggcgcgcataggtgcgtggtgctgggcccgggcgccgcggcaccggtgtaggagcgcgcatctccagagtttcttccatctgggcgacgtctcggtgcctgcggcgggaacggcgctttgcttccctgaggagcttctagagagctacggtggcccccgtgtgggaggcggggggcgtggcggcgtcggggcgtcgctgtcccctcctcggtagctctcctccctcccctttctgctgttaccgggagcgcggtggccacggaacgctgcccggagccgcgcgagggaggacccgacgcgcggcgtttacccagcgcagcgttccaccgctcgggtttggctggataaaataaaaaatggggatattgacctcctgtcactactgcatggactttgatggtttccaatcattactttctcctctgtgtcaatctgcctcttcgagaaattcatactcctggtgctgttcaagtcagtagaagaaccatttcttcgaattccttctcaccagaggtatttgtgctgcctgttgatgtagaaaaggaaaatgcccacttttatgttgcagatatgattatatcagcaatggagaaaatgaagtgtaacattctgagtcaacagcagacagagagctggagtaaagaagtcagtgggttacttgggagtgatcagcctgactctgaaatgacttttgataccaacataaagcaagagtctgggtcttctacttcttcatacagtggctatgaaggttgtgctgtgttacaggtcagcccagtgactgaaacacgtacttaccatgatgtgaaagagatttgcaaatgcgatgttgatgaatttgttattttagagcttggagattttaatgatatcacagaaacctgtagctgttcctgcagctcctctaagagtgtcacttatgagccagacttcaattctgcagaactattagccaaagagctgtaccgcgtgttccagaagtgctggatactgtcagtagttaattctcagctggcaggttccctgagtgcagctggctcgatagtcgtaaatgaagagtgtgtccgaaaagactttgaatccagtatgaatgtagtacaggaaattaaatttaagtctaggatcagagggactgaagactgggctcctcctagatttcaaatcatatttaatattcatccaccactcaagagggaccttgtggtggcagcccagaattttttctgtgccggctgtggaactccagtagagcctaagtttgtgaagcggctccggtactgcgaatacctagggaagtatttctgtgactgctgccactcatatgcagagtcgtgcatccctgcccgaatcctgatgatgtgggacttcaagaagtactacgtcagcaatttctccaaacagctgctcgacagcatatggcaccagcccattttcaatttgctgagcatcggccaaagcctgtatgcgaaagccaaggagctggacagagtgaaggaaattcaggagcagctcttccatatcaagaagctgttgaagacctgtaggtttgctaacagtgcattaaaggagttcgagcaggtgccgggacacttgactgatgagctccacctgttctcccttgaggacctggtcaggatcaagaaagggctgctggcacccttactcaaggacattctgaaagcttcccttgcacatgtggctggctgtgagctgtgtcaaggaaagggctttatttgtgaattttgccagaatacgactgtcatcttcccatttcagacagcaacatgtagaagatgttcagcgtgcagggcttgctttcacaaacagtgcttccagtcctccgagtgcccccggtgtgcgaggatcacagcgaggagaaaacttctggaaagtgtggcctctgcagcaacatgatgcccctgagtactgtgaaaaagactgttcaacatgccttatgataacaccgatttgtgtctattattggtgacattgttttagatattgggtattgtatattaaggaaaaagatggtctatattctctttattgcatatacttaatgtttcaaaagaatgcagattctgtgtttaagcacagggctgatagttgtggttttgtttacaaatgttctgttttggctgctattggttttttaaagaggttttttatacttttgtatttgaatagttatgtttcactgatgctgagccagtttgtatgtgtgtgcatatatgtgaactgtaactgacaagatgaattactcagtttctctttctctaaagcttgtttgatgaaactggttggtcctttcagtgaacaaaaatatgaccccaaatctgtttgctctggcttttatttcttcaggaagcagacttccacttaaatgccattttgtgattgtgtcaatcatacacattttatttacttcagagtttgaatagagagtacacatttcttctgcagatttatttcatgatgagtttgagttgcttagcagggcgtgtgggtcccgttgaagtgcagtttgaagcaactgcttctagatggcactctttcaggtggcacaaattgaacctgtatttgtcatctctgttccacacactgcaatgtcaagggatgcagaagtgagtagaattccatccctgcccttgaggatcttgctttaacagatgtaaaactgaacataaggtatttgcagatttaaacgaactgggggaaataatgaacagtgtgattctagtaataacattaaaatcatagacattgactaataaggttaaatgaatcacaaaacctttatgaatttcttttttctaatagttcttatatgttttcctgaaacatgtgagcctattcttttttcttctactttctatatactttctcccacttgagaaaggggccttgaggctgggtcccttcatggtatacctttagactgaacggtttgcaacctagggcttgggcattacattccctgggattcacatgccctaactaaacctaccttgattttctcagacagcacaggcaggcaataaagcgtcacagattgtcccctaaccccatccagccatgtgtatgagtgtgttttattcaatgggatagtactgagcacatgaaagaaatgaatgacttctgtcaatctcttttcattcagtcttctcattctgtcaattgttttctcatccgcagtgcctctgccagaactgtgctcacatccattatttaagccagatcttttctaagtattatagaagtgtagaggcacatagaataaataaaaccagacttcaaac

SEQ ID NO: 18216 - DNA, 3979 bp, Homo sapiens
  source 1..3979: mol_type = unassigned DNA
ggatttctaggaggaccggcagaggcgcgcataggtgcgtggtgctgggcccgggcgccgcggcaccggtgtaggagcgcgcatctccagagtttcttccatctgggcgacgtctcggtgcctgcggcgggaacggcgctttgcttccctgaggagcttctagagagctacggtggcccccgtgtgggaggcggggggcgtggcggcgtcggggcgtcgctgtcccctcctcggtagctctcctccctcccctttctgctgttaccgggagcgcggtggccacggaacgctgcccggagccgcgcgagggaggacccgacgcgcggcgtttacccagcgcagcgttccaccgctcgggtttggctggataaaataaaaaatggggatattgacctcctgtcactactgcatggactttgatggtttccaatcattactttctcctctgtgtcaatctgcctcttcgagaaattcatactcctgaatagctctccagacccccagctggccatgtggtgagttcagggcccaaatcaagtagtaccagcaatcagggaactcctatctgttttgaatggattcacaccagccacaagcctggaaagatggtgtcacaatctacagtcaggcaggattctcctgtggagccctgggaagggatcagcgatcactctggcattattgatggttcgcccagactcctgaacactgaccatcctccttgccaattagacatcaggctcatgaggcacaaagctgtctggattaacccccaggatgtgcagcaacagccgcaggacttgcaatctcaggtgccagcagcagggaacagtgggacccattttgtgacagatgctgcctctccctcaggcccttcaccttcgtgcctcggggactccctggcagagacaacgttgtctgaggataccacagactccgttggcagcgcttctccccatggctcgagtgaaaagagtagcagcttctctctgtcctcaacagaggtacacatggtccgcccaggatactctcatcgggtgtctctgcccacaagccctgggattttggccacctccccatatcctgagactgacagtgctttttttgagccttcccatctgacatctgctgctgatgaaggtgctgttcaagtcagtagaagaaccatttcttcgaattccttctcaccagaggtatttgtgctgcctgttgatgtagaaaaggaaaatgcccacttttatgttgcagatatgattatatcagcaatggagaaaatgaagtgtaacattctgagtcaacagcagacagagagctggagtaaagaagtcagtgggttacttgggagtgatcagcctgactctgaaatgacttttgataccaacataaagcaagagtctgggtcttctacttcttcatacagtggctatgaaggttgtgctgtgttacaggtcagcccagtgactgaaacacgtacttaccatgatgtgaaagagatttgcaaatgcgatgttgatgaatttgttattttagagcttggagattttaatgatatcacagaaacctgtagctgttcctgcagctcctctaagagtgtcacttatgagccagacttcaattctgcagaactattagccaaagagctgtaccgcgtgttccagaagtgctggatactgtcagtagttaattctcagctggcaggttccctgagtgcagctggctcgatagtcgtaaatgaagagtgtgtccgaaaagactttgaatccagtatgaatgtagtacaggaaattaaatttaagtctaggatcagagggactgaagactgggctcctcctagatttcaaatcatatttaatattcatccaccactcaagagggaccttgtggtggcagcccagaattttttctgtgccggctgtggaactccagtagagcctaagtttgtgaagcggctccggtactgcgaatacctagggaagtatttctgtgactgctgccactcatatgcagagtcgtgcatccctgcccgaatcctgatgatgtgggacttcaagaagtactacgtcagcaatttctccaaacagctgctcgacagcatatggcaccagcccattttcaatttgctgagcatcggccaaagcctgtatgcgaaagccaaggagctggacagagtgaaggaaattcaggagcagctcttccatatcaagaagctgttgaagacctgtaggtttgctaacagtgcattaaaggagttcgagcaggtgccgggacacttgactgatgagctccacctgttctcccttgaggacctggtcaggatcaagaaagggctgctggcacccttactcaaggacattctgaaagcttcccttgcacatgtggctggctgtgagctgtgtcaaggaaagggctttatttgtgaattttgccagaatacgactgtcatcttcccatttcagacagcaacatgtagaagatgttcagcgtgcagggcttgctttcacaaacagtgcttccagtcctccgagtgcccccggtgtgcgaggatcacagcgaggagaaaacttctggaaagtgtggcctctgcagcaacatgatgcccctgagtactgtgaaaaagactgttcaacatgccttatgataacaccgatttgtgtctattattggtgacattgttttagatattgggtattgtatattaaggaaaaagatggtctatattctctttattgcatatacttaatgtttcaaaagaatgcagattctgtgtttaagcacagggctgatagttgtggttttgtttacaaatgttctgttttggctgctattggttttttaaagaggttttttatacttttgtatttgaatagttatgtttcactgatgctgagccagtttgtatgtgtgtgcatatatgtgaactgtaactgacaagatgaattactcagtttctctttctctaaagcttgtttgatgaaactggttggtcctttcagtgaacaaaaatatgaccccaaatctgtttgctctggcttttatttcttcaggaagcagacttccacttaaatgccattttgtgattgtgtcaatcatacacattttatttacttcagagtttgaatagagagtacacatttcttctgcagatttatttcatgatgagtttgagttgcttagcagggcgtgtgggtcccgttgaagtgcagtttgaagcaactgcttctagatggcactctttcaggtggcacaaattgaacctgtatttgtcatctctgttccacacactgcaatgtcaagggatgcagaagtgagtagaattccatccctgcccttgaggatcttgctttaacagatgtaaaactgaacataaggtatttgcagatttaaacgaactgggggaaataatgaacagtgtgattctagtaataacattaaaatcatagacattgactaataaggttaaatgaatcacaaaacctttatgaatttcttttttctaatagttcttatatgttttcctgaaacatgtgagcctattcttttttcttctactttctatatactttctcccacttgagaaaggggccttgaggctgggtcccttcatggtatacctttagactgaacggtttgcaacctagggcttgggcattacattccctgggattcacatgccctaactaaacctaccttgattttctcagacagcacaggcaggcaataaagcgtcacagattgtcccctaaccccatccagccatgtgtatgagtgtgttttattcaatgggatagtactgagcacatgaaagaaatgaatgacttctgtcaatctcttttcattcagtcttctcattctgtcaattgttttctcatccgcagtgcctctgccagaactgtgctcacatccattatttaagccagatcttttctaagtattatagaagtgtagaggcacatagaataaataaaaccagacttcaaac

SEQ ID NO: 18217 - DNA, 7537 bp, Homo sapiens
  source 1..7537: mol_type = unassigned DNA
atcacatttgtctgccacagcagcaacaacagaaaagcggagggagggagggaggcgggaggaggggagcagagctccgcaagtcttgggctctgcgtggaggttgcgtttggctggcgtccccgaccccgggctttttgcacggcagctctctctgcgcagcgccgggcggccgtagtcgctccgcggcgcgactccgcggtctcgtggcgagcgcgcgtgggcgagtggccgcggacactctggcctcgcgagggaagccgcgccgcgtcctcgccccgtcgccccgcgggccggccgagacgacgggaagttttatttgcagctcggagcctgtggcggatggtgggactctccggccctgtgcagtaaaagattgatctctgggctggtgaacataatctctgtcccagtcagaaaaggagagaggaaattagcagagcgattggtggagaatgatatctgtcaaaagaaacacttggagagcactgagtttagtaataggtgactgccggaaaaaagggaactttgaatattgtcaagatcgtactgagaagcactccacaatgccagactcacctgtggatgtgaagacgcaatctaggctgactcctccaacaatgccacctcccccaactactcaaggagctccaagaaccagttcatttacaccgacaacgttaactaatggcacgagccattctcctacagccttgaatggcgccccctcaccacccaatggcttcagcaatgggccttcctcttcttcctcctcctctctggctaatcaacagctgcccccagcctgtggtgccaggcaactcagcaagctgaaaaggttccttactaccctgcagcagtttggcaatgacatttcacccgagataggagaaagagttcgcaccctcgttctgggactagtgaactccactttgacaattgaagaatttcattccaaactgcaagaagctactaacttcccactgagaccttttgtcatcccatttttgaaggccaacttgcccctgctgcagcgtgagctcctccactgcgcaagactggccaaacagaaccctgcccagtacctcgcccagcatgaacagctgcttctggatgccagcaccacctcacctgttgactcctcagagctgcttctcgatgtgaacgaaaacgggaagaggcgaactccagacagaaccaaagaaaatggctttgacagagagcctttgcactcagaacatccaagcaagcgaccatgcactattagcccaggccagcggtacagtccaaataacggcttatcctaccagcccaatggcctgcctcaccctaccccacctccacctcagcattaccgtttggatgatatggccattgcccaccactacagggactcctatcgacaccccagccacagggacctcagggacagaaacagacctatggggttgcatggcacacgtcaagaagaaatgattgatcacagactaacagacagagaatgggcagaagagtggaaacatcttgaccatctgttaaactgcataatggacatggtagaaaaaacaaggcgatctctcaccgtactaaggcggtgtcaagaagcagaccgggaagaattgaattactggatccggcggtacagtgacgccgaggacttaaaaaaaggtggcggcagtagcagcagccactctaggcagcagagtcccgtcaacccagacccagttgcactagacgcgcatcgggaattccttcacaggcctgcgtctggatacgtgccagaggagatctggaagaaagctgaggaggccgtcaatgaggtgaagcgccaggcgatgacggagctgcagaaggccgtgtctgaggcggagcggaaagcccacgacatgatcacaacagagagggccaagatggagcgcacggtcgccgaggccaaacggcaggcggcggaggacgcactggcagttatcaatcagcaggaggattcaagcgagagttgctggaattgtggccgtaaagcgagtgaaacctgcagtggctgtaacacagcccgatactgtggctcattttgccagcacaaagactgggagaagcaccatcacatctgtggacagaccctgcaggcccagcagcagggagacacacctgcagtcagctcctctgtcacgcccaacagcggggctgggagcccgatggacacaccaccagcagccactccgaggtcaaccaccccgggaaccccttccaccatagagacaacccctcgctagacgtgaactcagaactgtcggaggaaagacaacacaaccaacgcgaaaccaattcctcatcctcagatgctcaaagttgttttttttgtttgtttgtttattagatgaattatcctatttcagtacttcagcaagagagaacctaactgtatcttgaggtggtagtaaaacacagagggccagtaacgggtcgtaatgacttattgtggataacaaagatatcttttctttagagaactgaaaagagagcagagaatataacatgaaatgatagatttgacctcctccctgttattttcaagtagctgggattttaaactagatgacctcattaaccgatgctttaccaaacagcaaaccaagagattgctaattgctgttgaaagcaaaaatgctaatattaaaagtcacaatgttctttatatacaataatggaaaaaaaaaaaagaggaaaaccctcaagggcatgagcattggatacagcagtagacattttaacaagaagatgaatggcgtccgtgggttgctaactgaactttgaagacccgctacaaaacgcgcagatgtgcagcagattggaaggagacacagatgttcggtttttttcctgtttctgaaaagaaataataatatccaggtcaacagaatgaaaaatgaaagatgatttgcaatgggatgtatgaatacagcagcaagaaaaaaaaatgccataatacaaaaggctccatatatatatatatatatatatatatacacacacacacacgcacatatacacacacacacacacacacacacacacacacacacacacacacacacacacacaagtaagagactcagcctgcagttaattagcattctggcagttttgacatcagccagctgccctaaataacccttcaacgtttcttcacttttgcaaggttccacagagtaagacattgggtctattccagctcattcattttatattgaaaaaaataattttaaaaatggtggcttcagctccagcccctttccaaaatttttcaaccccaccctgtttggatttttaattaaaaactagtagttctcttggtgttaaaacacttctgtcctgtgaggtttcccaatggtgtttttcttgtaaatgtgttggacaaatgtgaagatgcattgtagtttaaccatatgcccacatttagtctctttattcctagttggtgagaaacctgtatctttctatgctgcttttatatctgtatgtattagtgatatttctctagtagttaaaaaaaaaaaaaggaaaaaaagactctttttggttgtcctcaagaaaagaaaagaagaaaagctatctttcggagctgctatttcactctcttataggatttttttttttcctgaaaaccagcatgcttcacggaatgctaacatattggtgtttttgtaagagggatgtacataaatgtattttgcactgtcacaatgactccctaggcatgctttttgtttttttttttttttttttgagcaaattctttttaaatatgctagagccatttcatcaagtttagctgtagcatagagtagtcgtggaatttttcttttttttttttttaaatcattattagggacttttttaaaaaaataaaataacaagatatcctactttaaaaaaaaaggacagtgcatgcatattgctgtaaggtcgtttaagtatttctaattttacaaaagtaaaaatcattagagctccaaatgctgaggtgtagattgacagctttaacactgctgaatgccaggttatacagtattcttacaaaaagggaagtcagccaaagactgatctgatggaccaaaatcggaattttgaaaagcaccagtactactttccaaatgatcagcaggttaaacatgttcagcaaggtatagtatgaatccattaacccttcgttgtccagggtccagaccagaactacttgttagttttgaaaacagtagcccaggatgtggttgtgtgctttaggaaagtcagcagtgctgcaggctgtgtagacaaccaaagtttacaaggctgggaagacacttctccaaatacatatacaccaggcatttctttaaaatcaaaaacaatccattagctttggggcggggggtggggggagggttaaatgtaggccttggaaacagttttaagtggcttttaagtatctgcatagaggcaatcctaaggtttgctttaagtctcttaaatctaacatttttaaaagcatttcttccctgtattttcatatacaagttggttttaattttgtttgggtggtgttattttttttaaatgactttttagtttagaaagttctgatgagcaaataaatacatctatctacatgttggaagtccatctgccagcacacctgcttaaagtgaaatgaaagcacataaccaggctctgaatgggttatattttatcatggtgctcccagaatcctttgacctcactctgctttctagtctgcttgtgacactggacagtcctttcttacagagctattatatgttctaggctacgaagggttaaataatcccaaaaatgaggtatgtcatacccacacgtctttatctctagaagctgtgatgtatgtgaaacagcactgttattcttaacactagtgtgtaaaataaggattagtacagtacgtctcattactttttaattcagggcaccctgagtgaaaacaaatacaaaaaaaaatccctaactctgagctctatctctgattcctcttcctccttcccctcttcctcctcttcctctcctcctgttttgctacattctcctcagtggcaaaaagtttcactctacctctgacagcatgtatattgcaccagtagctaacaaaaactggtctagtcaaaccaaatgggcacaaaagaaccaggataccaaaagttaagctcatacagctgcaaaccatatcacttcttggtaacaatgcagacctcataaacctaaagaagagaaagaaaagaaaacttttgttactttccttttttgcttgtcacttatatacaggctatgtgagaatataatttgtaggtataacacattaagaaaaagttatcttcattggatagaattgaatggtggtcgctgataggaatagggcgtcctctagctcttatctctgtctcttactcttttctctttctctttttctctgtcatgagactgtgtgtgacagggccacctgtcttttttttttcttaaattttttttttttttatgtgtaggtgcatgtcttggggatttaaaaatttcaaggctggtttacttatgcaaagcatgcctacgtctggaatacttagggaaagaaagcgactccatgttgtccgaattcctcaagggacagaaaaaaaattggagactgttgaaatgcagatttgaagtaatttttttaaaatattattttgggttctgcgacattgtgaaaaattaaagttgttgtgcaatacttaattcagacatgtaccacaagttaatggtagactaacactggggggtggggtctaggcatcatgcttttgtcagcatactcttgagcttttaagtctactatgtctgaactgtggtttcttgtttatccttttttccttagttggactgtaatgtatggtctgtcaacctgtgaatctttaaagtatgattcaggtattgttgtattctttactgtgtaataaaaaagttgaaaaaaatctggatcctctgtctccctcgtccccggtgtgccatggttgcccaccagtgaccccagcctgaggagtccatcctccatggtgctgaatcaaatctgtagagtttattcagctacaaagcgtggctctgtaacaggagttggcttatccatgcgtgttgagtagggaatgatgtcagaactttgcaaaagtcgagctcattcataaggggatgtttctcaggcaggaggagtaggaagagtgggaggagaattactaccttccataggaaaggagagcttggcttgcctagattagctgctgcatagatagcagaggcccttttggctgtgttttgataaaattagaaatgagtacctaaatctggatcactctgctcagagaggttcgtgccaacctcatgaggctctgactcttgtcaggttgcttggctgccttgtgcatacccgaatggcagatcagctgacatgacatggaactgctctatctgccttgtcccctctcctctaattaaaagtcgctaccattgtcactcttggttatgtagttaatatccactgtggctatctccaacttgctgggacatccagttatctcctctgacacatattttttcattctctagttacaaagtttgttagagtttgaaaaacaaacccttctcccctaccctgtgaatgctgttagtttttatgtgtagttttcaaaacacagattatcttatatactgtgttgtagcagaaattcctgtttcctctgaatgttctgactttatagaccaaaataatcgttgcaaaaaatcaaggatggcacagcaggtgcatgagcccgtgtctggagaaaggttatgaaggtgaatgctggttacatgggagggtgacttggagccctctagtttccttcttgtgccagctgggttcctgtttcaaggccaggcttctctaacttgtcttcctgggaaatgtagcttttccaagaatttggtagtgcacaccaggaaaaactaggtatcagaacagatttttttttaaatagtggaaacaccctcactcccacactttggacagttagggttggatatttaatttcatagttactctttttttccacagaagaaaggccagcctgacccaagttgcctatttttaatgtgttactgcatcttattttctcttcaaagtgaaaaaggccagaaactagcagatagaaatggaacccgttgacttagttcccttataagaagttcttgcaaacacctctgtgacgttttcattcaagtggatatgttggacaaataggaaacagttttagtttacgcgaacagtatgagacttccaggtggtggacgccatttttttagaagtgttgatgatgtatttgataacattataaaagtatgtgtctcccgtgaaagaacattgagctatttccctggaatggatggggaagaaatgagcaaaggagtgctgttctgtatgggtgtctatacccttattccaaggtgaataaataaagttgtgtttgcc

SEQ ID NO: 18218 - DNA, 3463 bp, Homo sapiens
  source 1..3463: mol_type = unassigned DNA
tgaataaattattcggcatttagcttatcattctgaatttcactttttgctttttggtgctctgaaacttgcagagagaggtggagtgctaaggggagggtaggggttgtgatactttgcacacacatccctgtcattgttctgcctaaagagacagggctgggttcaaggccacatgtgctcctgtcatcctccacatttctgctccaagtgcaatccggagtgtcagctctccatctgtctctgcctggcaggcgcacgcgcccagcaccctgcctccggcgatgccgccccagcccctctgatggccctcctctctgctgccactcattccagaacaggaggcatgagcccggaacgcgcttgcttttaggagacagccactttctgtgtggtacgctggattcaaggatgcctgatcgtactgagaagcactccacaatgccagactcacctgtggatgtgaagacgcaatctaggctgactcctccaacaatgccacctcccccaactactcaaggagctccaagaaccagttcatttacaccgacaacgttaactaatggcacgagccattctcctacagccttgaatggcgccccctcaccacccaatggcttcagcaatgggccttcctcttcttcctcctcctctctggctaatcaacagctgcccccagcctgtggtgccaggcaactcagcaagctgaaaaggttccttactaccctgcagcagtttggcaatgacatttcacccgagataggagaaagagttcgcaccctcgttctgggactagtgaactccactttgacaattgaagaatttcattccaaactgcaagaagctactaacttcccactgagaccttttgtcatcccatttttgaaggccaacttgcccctgctgcagcgtgagctcctccactgcgcaagactggccaaacagaaccctgcccagtacctcgcccagcatgaacagctgcttctggatgccagcaccacctcacctgttgactcctcagagctgcttctcgatgtgaacgaaaacgggaagaggcgaactccagacagaaccaaagaaaatggctttgacagagagcctttgcactcagaacatccaagcaagcgaccatgcactattagcccaggccagcggtacagtccaaataacggcttatcctaccagcccaatggcctgcctcaccctaccccacctccacctcagcattaccgtttggatgatatggccattgcccaccactacagggactcctatcgacaccccagccacagggacctcagggacagaaacagacctatggggttgcatggcacacgtcaagaagaaatgattgatcacagactaacagacagagaatgggcagaagagtggaaacatcttgaccatctgttaaactgcataatggacatggtagaaaaaacaaggcgatctctcaccgtactaaggcggtgtcaagaagcagaccgggaagaattgaattactggatccggcggtacagtgacgccgaggacttaaaaaaaggtggcggcagtagcagcagccactctaggcagcagagtcccgtcaacccagacccagttgcactagacgcgcatcgggaattccttcacaggcctgcgtctggatacgtgccagaggagatctggaagaaagctgaggaggccgtcaatgaggtgaagcgccaggcgatgacggagctgcagaaggccgtgtctgaggcggagcggaaagcccacgacatgatcacaacagagagggccaagatggagcgcacggtcgccgaggccaaacggcaggcggcggaggacgcactggcagttatcaatcagcaggaggattcaagcgagagttgctggaattgtggccgtaaagcgagtgaaacctgcagtggctgtaacacagcccgatactgtggctcattttgccagcacaaagactgggagaagcaccatcacatctgtggacagaccctgcaggcccagcagcagggagacacacctgcagtcagctcctctgtcacgcccaacagcggggctgggagcccgatggacacaccaccagcagccactccgaggtcaaccaccccgggaaccccttccaccatagagacaacccctcgctagacgtgaactcagaactgtcggaggaaagacaacacaaccaacgcgaaaccaattcctcatcctcagatgctcaaagttgttttttttgtttgtttgtttattagatgaattatcctatttcagtacttcagcaagagagaacctaactgtatcttgaggtggtagtaaaacacagagggccagtaacgggtcgtaatgacttattgtggataacaaagatatcttttctttagagaactgaaaagagagcagagaatataacatgaaatgatagatttgacctcctccctgttattttcaagtagctgggattttaaactagatgacctcattaaccgatgctttaccaaacagcaaaccaagagattgctaattgctgttgaaagcaaaaatgctaatattaaaagtcacaatgttctttatatacaataatggaaaaaaaaaaaagaggaaaaccctcaagggcatgagcattggatacagcagtagacattttaacaagaagatgaatggcgtccgtgggttgctaactgaactttgaagacccgctacaaaacgcgcagatgtgcagcagattggaaggagacacagatgttcggtttttttcctgtttctgaaaagaaataataatatccaggtcaacagaatgaaaaatgaaagatgatttgcaatgggatgtatgaatacagcagcaagaaaaaaaaatgccataatacaaaaggctccatatatatatatatatatatatatatacacacacacacacgcacatatacacacacacacacacacacacacacacacacacacacacacacacacacacacaagtaagagactcagcctgcagttaattagcattctggcagttttgacatcagccagctgccctaaataacccttcaacgtttcttcacttttgcaaggttccacagagtaagacattgggtctattccagctcattcattttatattgaaaaaaataattttaaaaatggtggcttcagctccagcccctttccaaaatttttcaaccccaccctgtttggatttttaattaaaaactagtagttctcttggtgttaaaacacttctgtcctgtgaggtttcccaatggtgtttttcttgtaaatgtgttggacaaatgtgaagatgcattgtagtttaaccatatgcccacatttagtctctttattcctagttggtgagaaacctgtatctttctatgctgcttttatatctgtatgtattagtgatatttctctagtagttaaaaaaaaaaaaaggaaaaaaagactctttttggttgtcctcaag

SEQ ID NO: 18219 - DNA, 2370 bp, Homo sapiens
  source 1..2370: mol_type = unassigned DNA
caggagaagtgaagatgtaacatgttatctgtcgctcctcttagctggcggagagaatttacatttaaagattagcagagtgagaaagagaaatctgccttttgttgtgtggggtgaggaggaggcatctacccctggccttgacgctatctcccatcacctctgctatccagacaggactcaccgagatcgtactgagaagcactccacaatgccagactcacctgtggatgtgaagacgcaatctaggctgactcctccaacaatgccacctcccccaactactcaaggagctccaagaaccagttcatttacaccgacaacgttaactaatggcacgagccattctcctacagccttgaatggcgccccctcaccacccaatggcttcagcaatgggccttcctcttcttcctcctcctctctggctaatcaacagctgcccccagcctgtggtgccaggcaactcagcaagctgaaaaggttccttactaccctgcagcagtttggcaatgacatttcacccgagataggagaaagagttcgcaccctcgttctgggactagtgaactccactttgacaattgaagaatttcattccaaactgcaagaagctactaacttcccactgagaccttttgtcatcccatttttgaaggccaacttgcccctgctgcagcgtgagctcctccactgcgcaagactggccaaacagaaccctgcccagtacctcgcccagcatgaacagctgcttctggatgccagcaccacctcacctgttgactcctcagagctgcttctcgatgtgaacgaaaacgggaagaggcgaactccagacagaaccaaagaaaatggctttgacagagagcctttgcactcagaacatccaagcaagcgaccatgcactattagcccaggccagcggtacagtccaaataacggcttatcctaccagcccaatggcctgcctcaccctaccccacctccacctcagcattaccgtttggatgatatggccattgcccaccactacagggactcctatcgacaccccagccacagggacctcagggacagaaacagacctatggggttgcatggcacacgtcaagaagaaatgattgatcacagactaacagacagagaatgggcagaagagtggaaacatcttgaccatctgttaaactgcataatggacatggtagaaaaaacaaggcgatctctcaccgtactaaggcggtgtcaagaagcagaccgggaagaattgaattactggatccggcggtacagtgacgccgaggacttaaaaaaaggtggcggcagtagcagcagccactctaggcagcagagtcccgtcaacccagacccagttgcactagacgcgcatcgggaattccttcacaggcctgcgtctggatacgtgccagaggagatctggaagaaagctgaggaggccgtcaatgaggtgaagcgccaggcgatgacggagctgcagaaggccgtgtctgaggcggagcggaaagcccacgacatgatcacaacagagagggccaagatggagcgcacggtcgccgaggccaaacggcaggcggcggaggacgcactggcagttatcaatcagcaggaggattcaagcgagagttgctggaattgtggccgtaaagcgagtgaaacctgcagtggctgtaacacagcccgatactgtggctcattttgccagcacaaagactgggagaagcaccatcacatctgtggacagaccctgcaggcccagcagcagggagacacacctgcagtcagctcctctgtcacgcccaacagcggggctgggagcccgatggacacaccaccagcagccactccgaggtcaaccaccccgggaaccccttccaccatagagacaacccctcgctagacgtgaactcagaactgtcggaggaaagacaacacaaccaacgcgaaaccaattcctcatcctcagatgctcaaagttgttttttttgtttgtttgtttattagatgaattatcctatttcagtacttcagcaagagagaacctaactgtatcttgaggtggtagtaaaacacagagggccagtaacgggtcgtaatgacttattgtggataacaaagatatcttttctttagagaactgaaaagagagcagagaatataacatgaaatgatagatttgacctcctccctgttattttcaagtagctgggattttaaactagatgacctcattaaccgatgctttaccaaacagcaaaccaagagattgctaattgctgttgaaagcaaaaatgctaatattaaaagtcacaatgttctttatatacaataatggaaaaaaaaaaaagaggaaaa

SEQ ID NO: 18220 - DNA, 2450 bp, Homo sapiens
  source 1..2450: mol_type = unassigned DNA
tataacactaccaaggtagcatctgcctaagccagaaataacaataggatataatataacctagttacaaatgaggtcctgccatctgtgctataccttcttaagtggggtttggatgataaaatcctgatttaaacgtcagtagataagtgtattttattgatagaagatgttgaatttcttctgttcacttgcttttaaaaaagataaaccccacttgaaaaactgaggtgcttaaggagtaaaataatatgttcctggtggcatcctccagatcgtactgagaagcactccacaatgccagactcacctgtggatgtgaagacgcaatctaggctgactcctccaacaatgccacctcccccaactactcaaggagctccaagaaccagttcatttacaccgacaacgttaactaatggcacgagccattctcctacagccttgaatggcgccccctcaccacccaatggcttcagcaatgggccttcctcttcttcctcctcctctctggctaatcaacagctgcccccagcctgtggtgccaggcaactcagcaagctgaaaaggttccttactaccctgcagcagtttggcaatgacatttcacccgagataggagaaagagttcgcaccctcgttctgggactagtgaactccactttgacaattgaagaatttcattccaaactgcaagaagctactaacttcccactgagaccttttgtcatcccatttttgaaggccaacttgcccctgctgcagcgtgagctcctccactgcgcaagactggccaaacagaaccctgcccagtacctcgcccagcatgaacagctgcttctggatgccagcaccacctcacctgttgactcctcagagctgcttctcgatgtgaacgaaaacgggaagaggcgaactccagacagaaccaaagaaaatggctttgacagagagcctttgcactcagaacatccaagcaagcgaccatgcactattagcccaggccagcggtacagtccaaataacggcttatcctaccagcccaatggcctgcctcaccctaccccacctccacctcagcattaccgtttggatgatatggccattgcccaccactacagggactcctatcgacaccccagccacagggacctcagggacagaaacagacctatggggttgcatggcacacgtcaagaagaaatgattgatcacagactaacagacagagaatgggcagaagagtggaaacatcttgaccatctgttaaactgcataatggacatggtagaaaaaacaaggcgatctctcaccgtactaaggcggtgtcaagaagcagaccgggaagaattgaattactggatccggcggtacagtgacgccgaggacttaaaaaaaggtggcggcagtagcagcagccactctaggcagcagagtcccgtcaacccagacccagttgcactagacgcgcatcgggaattccttcacaggcctgcgtctggatacgtgccagaggagatctggaagaaagctgaggaggccgtcaatgaggtgaagcgccaggcgatgacggagctgcagaaggccgtgtctgaggcggagcggaaagcccacgacatgatcacaacagagagggccaagatggagcgcacggtcgccgaggccaaacggcaggcggcggaggacgcactggcagttatcaatcagcaggaggattcaagcgagagttgctggaattgtggccgtaaagcgagtgaaacctgcagtggctgtaacacagcccgatactgtggctcattttgccagcacaaagactgggagaagcaccatcacatctgtggacagaccctgcaggcccagcagcagggagacacacctgcagtcagctcctctgtcacgcccaacagcggggctgggagcccgatggacacaccaccagcagccactccgaggtcaaccaccccgggaaccccttccaccatagagacaacccctcgctagacgtgaactcagaactgtcggaggaaagacaacacaaccaacgcgaaaccaattcctcatcctcagatgctcaaagttgttttttttgtttgtttgtttattagatgaattatcctatttcagtacttcagcaagagagaacctaactgtatcttgaggtggtagtaaaacacagagggccagtaacgggtcgtaatgacttattgtggataacaaagatatcttttctttagagaactgaaaagagagcagagaatataacatgaaatgatagatttgacctcctccctgttattttcaagtagctgggattttaaactagatgacctcattaaccgatgctttaccaaacagcaaaccaagagattgctaattgctgttgaaagcaaaaatgctaatattaaaagtcacaatgttctttatatacaataatggaaaaaaaaaaaaga

SEQ ID NO: 18221 - DNA, 2103 bp, Homo sapiens
  source 1..2103: mol_type = unassigned DNA
ttttcctccctctcccgctccgtctcacacgcaccctctgtttattttcctgcctccatctgggccctgctgatattgtaatcaccctgatgcacgttggcttctctcctctccctcctgcgctcacacactcactcacacacaatgtgccatcctgacaaggcttttacttctgataagctccaatgtgtgtttaatgaatacaaagccgcggtctgggtgccgcctcggccgcggccgctctcccgcgctcctttgccagaagatcgtactgagaagcactccacaatgccagactcacctgtggatgtgaagacgcaatctaggctgactcctccaacaatgccacctcccccaactactcaaggagctccaagaaccagttcatttacaccgacaacgttaactaatggcacgagccattctcctacagccttgaatggcgccccctcaccacccaatggcttcagcaatgggccttcctcttcttcctcctcctctctggctaatcaacagctgcccccagcctgtggtgccaggcaactcagcaagctgaaaaggttccttactaccctgcagcagtttggcaatgacatttcacccgagataggagaaagagttcgcaccctcgttctgggactagtgaactccactttgacaattgaagaatttcattccaaactgcaagaagctactaacttcccactgagaccttttgtcatcccatttttgaaggccaacttgcccctgctgcagcgtgagctcctccactgcgcaagactggccaaacagaaccctgcccagtacctcgcccagcatgaacagctgcttctggatgccagcaccacctcacctgttgactcctcagagctgcttctcgatgtgaacgaaaacgggaagaggcgaactccagacagaaccaaagaaaatggctttgacagagagcctttgcactcagaacatccaagcaagcgaccatgcactattagcccaggccagcggtacagtccaaataacggcttatcctaccagcccaatggcctgcctcaccctaccccacctccacctcagcattaccgtttggatgatatggccattgcccaccactacagggactcctatcgacaccccagccacagggacctcagggacagaaacagacctatggggttgcatggcacacgtcaagaagaaatgattgatcacagactaacagacagagaatgggcagaagagtggaaacatcttgaccatctgttaaactgcataatggacatggtagaaaaaacaaggcgatctctcaccgtactaaggcggtgtcaagaagcagaccgggaagaattgaattactggatccggcggtacagtgacgccgaggacttaaaaaaaggtggcggcagtagcagcagccactctaggcagcagagtcccgtcaacccagacccagttgcactagacgcgcatcgggaattccttcacaggcctgcgtctggatacgtgccagaggagatctggaagaaagctgaggaggccgtcaatgaggtgaagcgccaggcgatgacggagctgcagaaggccgtgtctgaggcggagcggaaagcccacgacatgatcacaacagagagggccaagatggagcgcacggtcgccgaggccaaacggcaggcggcggaggacgcactggcagttatcaatcagcaggaggattcaagcgagagttgctggaattgtggccgtaaagcgagtgaaacctgcagtggctgtaacacagcccgatactgtggctcattttgccagcacaaagactgggagaagcaccatcacatctgtggacagaccctgcaggcccagcagcagggagacacacctgcagtcagctcctctgtcacgcccaacagcggggctgggagcccgatggacacaccaccagcagccactccgaggtcaaccaccccgggaaccccttccaccatagagacaacccctcgctagacgtgaactcagaactgtcggaggaaagacaacacaaccaacgcgaaaccaattcctcatcctcagatgctcaaagttgttttttttgtttgtttgtttattagatgaatt

SEQ ID NO: 18222 - DNA, 781 bp, Homo sapiens
  source 1..781: mol_type = unassigned DNA
ctttgttttcctaaatgtatgtcaaaagatctgctagtttttagactgctggaactgcccaataatttggatgagagtcatgcttcttctatagaattctacaaaaaagtaatcagatagtgggcatggtggctggaaggctcctgtaattccagctgctaggggaaattgatgcagaggataacttgagcccaggggttcgagaccagcctcggaaagaaaaaaaaaattaaaagaaaagtaatccgtatccaatgacttcggctaactgagaggtgttttcttgtctggtttggcctgactggcacacagaggaggccgtcaatgaggtgaagcgccaggcgatgacggagctgcagaaggccgtgtctgaggcggagcggaaagcccacgacatgatcacaacagagagggccaagatggagcgcacggtcgccgaggccaaacggcaggcggcggaggacgcactggcagttatcaatcagcaggaggattcaagcgagagttgctggaattgtggccgtaaagcgagtgaaacctgcagtggctgtaacacagcccgatactgtggctcattttgccagcacaaagactgggagaagcaccatcacatctgtggacagaccctgcaggcccagcagcagggagacacacctgcagtcagctcctctgtcacgcccaacagcggggctgggagcccgatggacacaccaccagcagccactccgaggtcaaccaccccgggaaccccttccaccatagagacaacccctcgctagac

SEQ ID NO: 18223 - DNA, 2453 bp, Homo sapiens
  source 1..2453: mol_type = unassigned DNA
acttttcctccctctcccgctccgtctcacacgcaccctctgtttattttcctgcctccatctgggccctgctgatattgtaatcaccctgatgcacgttggcttctctcctctccctcctgcgctcacacactcactcacacacaatgtgccatcctgacaaggcttttacttctgataagctccaatgtgtgtttaatgaatacaaagccgcggtctgggtgccgcctcggccgcggccgctctcccgcgctcctttgccagaagctggcggagagaatttacatttaaagattagcagagtgagaaagagaaatctgccttttgttgtgtggggtgaggaggaggcatctacccctggccttgacgctatctcccatcacctctgctatccagacaggactcaccgagtatcaaatgataagaactgagcacactggatgaaataatacttgcactgggagcactaagaaaagattgatctctgggctggtgaacataatctctgtcccagtcagaaaaggagagaggaaattagcagagcgattggtggagaatgatatctgtcaaaagaaacacttggagagcactgagtttagtaataggtgactgccggaaaaaagggaactttgaatattgtcaagaacaggaggcatgagcccggaacgcgcttgcttttaggagacagccactttctgtgtggtacgctggattcaaggatgcctgatcgtactgagaagcactccacaatgccagactcacctgtggatgtgaagacgcaatctaggctgactcctccaacaatgccacctcccccaactactcaaggagctccaagaaccagttcatttacaccgacaacgttaactaatggcacgagccattctcctacagccttgaatggcgccccctcaccacccaatggcttcagcaatgggccttcctcttcttcctcctcctctctggctaatcaacagctgcccccagcctgtggtgccaggcaactcagcaagctgaaaaggttccttactaccctgcagcagtttggcaatgacatttcacccgagataggagaaagagttcgcaccctcgttctgggactagtgaactccactttgacaattgaagaatttcattccaaactgcaagaagctactaacttcccactgagaccttttgtcatcccatttttgaaggccaacttgcccctgctgcagcgtgagctcctccactgcgcaagactggccaaacagaaccctgcccagtacctcgcccagcatgaacagctgcttctggatgccagcaccacctcacctgttgactcctcagagctgcttctcgatgtgaacgaaaacgggaagaggcgaactccagacagaaccaaagaaaatggctttgacagagagcctttgcactcagaacatccaagcaagcgaccatgcactattagcccaggccagcggtacagtccaaataacggcttatcctaccagcccaatggcctgcctcaccctaccccacctccacctcagcattaccgtttggatgatatggccattgcccaccactacagggactcctatcgacaccccagccacagggacctcagggacagaaacagacctatggggttgcatggcacacgtcaagaagaaatgattgatcacagactaacagacagagaatgggcagaagagtggaaacatcttgaccatctgttaaactgcataatggacatggtagaaaaaacaaggcgatctctcaccgtactaaggcggtgtcaagaagcagaccgggaagaattgaattactggatccggcggtacagtgacgccgaggacttaaaaaaaggtggcggcagtagcagcagccactctaggcagcagagtcccgtcaacccagacccagttgcactagacgcgcatcgggaattccttcacaggcctgcgtctggatacgtgccagaggagatctggaagaaagctgaggaggccgtcaatgaggtgaagcgccaggcgatgacggagctgcagaaggccgtgtctgaggcggagcggaaagcccacgacatgatcacaacagagagggccaagatggagcgcacggtcgccgaggccaaacggcaggcggcggaggacgcactggcagttatcaatcagcaggaggattcaagcgagagttgctggaattgtggccgtaaagcgagtgaaacctgcagtggctgtaacacagcccgatactgtggctcattttgccagcacaaagactgggagaagcaccatcacatctgtggacagaccctgcaggcccagcagcagggagacacacctgcagtcagctcctctgtcacgcccaacagcggggctgggagcccgatggacacaccaccagcagccactccgaggtcaaccaccccgggaaccccttccaccatagagacaacccctcgctag

SEQ ID NO: 18224 - DNA, 870 bp, Homo sapiens
  source 1..870: mol_type = unassigned DNA
gtttggatgatatggccattgcccaccactacagggactcctatcgacaccccagccacagggacctcagggacagaaacagacctatggggttgcatggcacacgtcaagaagaaatgattgatcacagactaacagacagagaatgggcagaagagtggaaacatcttgaccatctgttaaactgcataatggacatggtagaaaaaacaaggcgatctctcaccgtactaaggcggtgtcaagaagcagaccgggaagaattgaattactggatccggcggtacagtgacgccgaggacttaaaaaaaggtggcggcagtagcagcagccactctaggcagcagagtcccgtcaacccagacccagttgcactaggatgaaggccatacctaggtgctgcccagctttgagcattgctgtcctgggtcatatgaggtcacattgcttctccaaaggctatcagctcatcccttcatgtatattgatggcggcccttgcagtatctagtatccaatggtctccatcctgtcacgcgcatcgggaattccttcacaggcctgcgtctggatacgtgccagaggagatctggaagaaagctgaggaggccgtcaatgaggtgaagcgccaggcgatgacggagctgcagaaggccgtgtctgaggcggagcggaaagcccacgacatgatcacaacagagagggccaagatggagcgcacggtcgccgaggccaaacggcaggcggcggaggacgcactggcagttatcaatcagcaggaggattcaagcgagagttgctggaattgtggccgtaaagcgagtgaaacctgcagtggctgtaacacagcccgatactgtggctcattttg

SEQ ID NO: 18225 - DNA, 882 bp, Homo sapiens
  source 1..882: mol_type = unassigned DNA
gactcctcagagctgcttctcgatgtgaacgaaaacgggaagaggcgaactccagacagatgaataaactgaggtccagagaggttaagtgacttgaccaaggtcacacagctagtcatggaagagccaggactagatctcaggtctcttgattcccagtccagtgctctttccactacaccacaatgccagtaagaaccaaagaaaatggctttgacagagagcctttgcactcagaacatccaagcaagcgaccatgcactattagcccaggccagcggtacagtccaaataacggcttatcctaccagcccaatggcctgcctcaccctaccccacctccacctcagcattaccgtttggatgatatggccattgcccaccactacagggactcctatcgacaccccagccacagggacctcagggacagaaacagacctatggggttgcatggcacacgtcaagaagaaatgattgatcacagactaacagacagagaatgggcagaagagtggaaacatcttgaccatctgttaaactgcataatggacatggtagaaaaaacaaggcgatctctcaccgtactaaggcggtgtcaagaagcagaccgggaagaattgaattactggatccggcggtacagtgacgccgaggacttaaaaaaaggtggcggcagtagcagcagccactctaggcagcagagtcccgtcaacccagacccagttgcactagacgcgcatcgggaattccttcacaggcctgcgtctggatacgtgccagaggagatctggaagaaagctgaggaggccgtcaatgaggtgaagcgccaggcgatgacggagctgcagaaggccgtgtctgaggcggagcggaaagccc

SEQ ID NO: 18226 - DNA, 431 bp, Homo sapiens
  source 1..431: mol_type = unassigned DNA
gcttctcgatgtgaacgaaaacgggaagaggcgaactccagacagctattttcccaccagctctttcccagtatttcatatttgaatgtattgtgacttttgactatccttgcacagtcttaagaaccaaagaaaatggctttgacagagagcctttgcactcagaacatccaagcaagcgaccatgcactattagcccaggccagcggtacagtccaaataacggcttatcctaccagcccaatggcctgcctcaccctaccccacctccacctcagcattaccgtttggatgatatggccattgcccaccactacagggactcctatcgacaccccagccacagggacctcagggacagaaacagacctatggggttgcatggcacacgtcaagaagaaatgattgatcacagactaacagacagagaa

SEQ ID NO: 18227 - DNA, 1872 bp, Homo sapiens
  source 1..1872: mol_type = unassigned DNA
gggttgataggtgcaacaaacgaccatggcacacatctacttatgtaacaaacctccacactctgcacctgtatcctggaactcaaaaaaaaaaaaaaagttaaaaggagttcttcagagtaaaggaaaatgatataggccagaaacttggctctacataaagaaataaagagcactgaaggaaaaaaaaaatgaatttgaggtacaagtagccagccgtagttcctgtccatgattctctagaaggctattttttaaggctgttgggcccaaaaattgaggcagctgggacctctcctgtattcagaaatgcttttctacctgatgggttaatcggtgtacatggcacctggttcctacaaatgaaatcttcaagttgcaaagagatttatgtgattgatctttcctggaattaagtgtgattggggatgagtgctgttcactcttcccagtatcttctcctttcctctcccttactgcccctccccaaacaataataaaaataagagaaagagaaagcaatgacaatctggatttataatgtcaaagtaagttcagagtaaaatgccttcttaggttttcattttaatgcctttactatgtgtgaaattgcctctttctctcttattacatttgaaattgccagaattaccgatcagcctatcaaccagcccgttctttattcaaggtgctgacctagctgaggaggaagagtgaccagtatacaggatttcttctaacattagaagaaatatgtgtgtgtgtgtgtgtgtgtgtgtgtgtattcattccttagaataagactgatacaaagaaggcagtttacttttgtagactactagaatatactgctttatgcattaattccatctgggatatgtgactgtacccaggccattacttaactattgtctgaacttgatgactatggaaaataatctctatgttcatgtctatatttttaagtgtattttcattaagttagtacttgacaaaagatattttctgggattagcctgcttgacctttgtgagtcaccagatacaaaattgagtgtgtcagggaaactattctgaaattaattggactgtgtatatattttttataccctctatcttccctgtggagaacaaaagttcttatgattggagctaggttctcacataccgtagaacatacattcaagtataaagggaccctaaaaataatgtgccacttgcaatgttatcagtgaagaaataaaagagaggtaaagtgatgtacaagggtcagtcacctcacacttagggcaatctgcgcacatggtagcccagtgctgagaattgtgcctgtggttccagcccatggcatgcatttgacctttgatgtagctgcattgcatactcttctccagtgttcgaaaagcagagtaagtcaacaggacagaagaaaactttcagtccgtcctctcattcctgtcattcccttgcaggccaacttgcccctgctgcagcgtgagctcctccactgcgcaagactggccaaacagaaccctgcccagtacctcgcccagcatgaacagctgcttctggatgccagcaccacctcacctgttgactcctcagagctgcttctcgatgtgaacgaaaacgggaagaggcgaactccagacagaaccaaagaaaatggctttgacagagagcctttgcactcagaacatccaagcaagcgaccatgcactattagcccaggccagcggtacagtccaaataacggcttatcctaccagcccaatggcctgcctcaccctaccccacctccacctcagcattaccgtttggatgatatggccattgcccaccactacagggactcctatcgacaccccagcca

SEQ ID NO: 18228 - DNA, 1346 bp, Homo sapiens
  source 1..1346: mol_type = unassigned DNA
atcgtactgagaagcactccacaatgccagactcacctgtggatgtgaagacgcaatctaggctgactcctccaacaatgccacctcccccaactactcaaggagctccaagaaccagttcatttacaccgacaacgttaactaatggcacgagccattctcctacagccttgaatggcgccccctcaccacccaatggcttcagcaatgggccttcctcttcttcctcctcctctctggctaatcaacagctgcccccagcctgtggtgccaggcaactcagcaagctgaaaaggttccttactaccctgcagcagtttggcaatgacatttcacccgagataggagaaagagttcgcaccctcgttctgggactagtgaactccactttgacaattgaagaatttcattccaaactgcaagaagctactaacttcccactgagaccttttgtcatcccatttttgaaggccaacttgcccctgctgcagcgtgagctcctccactgcgcaagactggccaaacagaaccctgcccagtacctcgcccagcatgaacagctgcttctggatgccagcaccacctcacctgttgactcctcagagctgcttctcgatgtgaacgaaaacgggaagaggcgaactccagacaggtgagagggaggaggagcctggatgaaccatgacctttttcccatacctgtggcatgaggaaacatttcatgtcacaattaaaccgctggcctatgtcattcttgcacaatagcaataagccattgtggccatcttgagaatctggctctggcctgggattttacagagttttgaatctctggcctgggacagtttggcttttgtgtaggttaatcttttctgcttgtagtattaaagcgaaatggtgaagacgaatgatttttctgatttgccaagtaccactgatggctcttagatgcacatcaatattaaaattctcattcattatgtaatttaacccaaccacatattttacttcaatattctgaaattggctgttcctagtttccttaaaatgtgatggtttggaagcttgtctgtatgtatttcttaacacagtacagtagttatttgttttggtttgtatatgaactaagagaaaacttctgggacactagatgaactgagtgaagataagagttatacagtagagacaatagatggtatttttgctgaaaattttacttgttagatactgttctatcagatactgtgctctcataactaagaattctaagaaatgtaaaataaaaccacttctccattaaaccctacagagtaattgttgaataaagcatacacatgaaatttccc

SEQ ID NO: 18229 - DNA, 504 bp, Homo sapiens
  source 1..504: mol_type = unassigned DNA
acatcacatttgtctgccacagcagcaacaacagaaaagcggagggagggagggaggcgggaggaggggagcagagctccgcaagtcttgggctctgcgtggaggttgcgtttggctggcgtccccgaccccgggctttttgcacggcagctctctctgcgcagcgccgggcggccgtagtcgctccgcggcgcgactccgcggtctcgtggcgagcgcgcgtgggcgagtggccgcggacactctggcctcgcgagggaagccgcgccgcgtcctcgccccgtcgccccgcgggccggccgagacgacgggaagttttatttgcagctcggagcctgtggcggatggtgggactctccggccctgtgcagtgccaacttgcccctgctgcagcgtgagctcctccactgcgcaagactggccaaacagaaccctgcccagtacctcgcccagcatgaacagctgcttctggatgccagcaccacctcacctgttgactcctca

SEQ ID NO: 18230 - DNA, 976 bp, Homo sapiens
  source 1..976: mol_type = unassigned DNA
agaagtcgataagaccaggagaagtgaagatgtaacatgttatctgtcgctcctcttagctggcggagagaatttacatttaaagattagcagagtgagaaagagaaatctgccttttgttgtgtggggtgaggaggaggcatctacccctggccttgacgctatctcccatcacctctgctatccagacaggactcaccgagaaaagattgatctctgggctggtgaacataatctctgtcccagtcagaaaaggagagaggaaattagcagagcgattggtggagaatgatatctgtcaaaagaaacacttggagagcactgagtttagtaataggtgactgccggaaaaaagggaactttgaatattgtcaagatcgtactgagaagcactccacaatgccagactcacctgtggatgtgaagacgcaatctaggctgactcctccaacaatgccacctcccccaactactcaaggagctccaagaaccagttcatttacaccgacaacgttaactaatggcacgagccattctcctacagccttgaatggcgccccctcaccacccaatggcttcagcaatgggccttcctcttcttcctcctcctctctggctaatcaacagctgcccccagcctgtggtgccaggcaactcagcaagctgaaaaggttccttactaccctgcagcagtttggcaatgacatttcacccgagataggagaaagagttcgcaccctcgttctgggactagtgaactccactttgacaattgaagaatttcattccaaactgcaagaagctactaacttcccactgagaccttttgtcatcccatttttgaaggccaacttgcccctgctgcagcgtgagctcctccactgcgcaagactggccaaacagaaccctgcccagtacctcgcccagcatgaacagctgcttctggatgccagcaccacctcacctgttgactcct

SEQ ID NO: 18231 - DNA, 585 bp, Homo sapiens
  source 1..585: mol_type = unassigned DNA
aacataagtgggaagctatttattcccttgttgctgaggttggttgagatcgtactgagaagcactccacaatgccagactcacctgtggatgtgaagacgcaatctaggctgactcctccaacaatgccacctcccccaactactcaaggagctccaagaaccagttcatttacaccgacaacgttaactaatggcacgagccattctcctacagccttgaatggcgccccctcaccacccaatggcttcagcaatgggccttcctcttcttcctcctcctctctggctaatcaacagctgcccccagcctgtggtgccaggcaactcagcaagctgaaaaggttccttactaccctgcagcagtttggcaatgacatttcacccgagataggagaaagagttcgcaccctcgttctgggactagtgaactccactttgacaattgaagaatttcattccaaactgcaagaagctactaacttcccactgagaccttttgtcatcccatttttgaaggccaacttgcccctgctgcagcgtgagctcctccactgcgcaagactggccaaacagaaccctgccc

SEQ ID NO: 18232 - DNA, 2061 bp, Homo sapiens
  source 1..2061: mol_type = unassigned DNA
tctctctccctctctccctttccaaatgattcagaagtcgataagaccaggagaagtgaagatgtaacatgttatctgtcgctcctcttagctggcggagagaatttacatttaaagattagcagagtgagaaagagaaatctgccttttgttgtgtggggtgaggaggaggcatctacccctggccttgacgctatctcccatcacctctgctatccagacaggactcaccgagatcgtactgagaagcactccacaatgccagactcacctgtggatgtgaagacgcaatctaggctgactcctccaacaatgccacctcccccaactactcaaggagctccaagaaccagttcatttacaccgacaacgttaactaatggcacgagccattctcctacagccttgaatggcgccccctcaccacccaatggcttcagcaatgggccttcctcttcttcctcctcctctctggctaatcaacagctgcccccagcctgtggtgccaggcaactcagcaagctgaaaaggttccttactaccctgcagcagtttggcaatgacatttcacccgagataggagaaagagttcgcaccctcgttctgggactagtgaactccactttgacaattgaagaatttcattccaaactgcaagaagctactaacttcccactgagaccttttgtcatcccatttttgaaggtattgcacagttcactggtctgtaaagtattttaaaccatattgttgctaggtcataactgtgtgcttttttagtacatttaggggctctttgatttaatttaatggatgaaaactatctgaatcgattgtatttatgaccatttcctaagtagtctgaaaattacaaggagtgttttaaataattacctgaaaagaagtaaagtttgaagaagagtttagaagtctctttgaataaaggttttgttcatttttttggtcatatgagatatgttattttacattttgcttgtctttagagtgaacagaagattggttgagctttgtagttgttcaggatttttttatcctcctaattttatctttgtaacaacttaacgggaagatcagaccgtcatccttttgtgccagtgaagaagttgggagtaagtgacatgtccaaggtgtgcctggctgaggactgattgaggtgtgggattcgaaatggtttttaagtctctgctgtgagctttctgtctcctccaactgctgccgcttcagtaaagcaactggaaaacaaacaaacacaaagttcacaagagaaagaaggaacatttttattcagcatagcgggtagttaattcactgatggatactaaaataactggtagttttggtagaaaagcagattactaagatcccttttacttgggtaagcatattgcttgggcatagtggattctcaataagtttatactaacagtgggcttagcagattgataaatgtgaaagtttcatttgcactcccctttgaaggtcactttcaaaatgagcactcaaggaagcctctgatttaattatttgccaaggaggatttacctttctgtctggttcctagaactttgtttgggagacaccagaaatataactgatcagatcctgtgtgaaatttcatctatttttaaaactgtatcagacacataaggttcaagtaagtatccagaagcctagaaaggtttgtctgaaatgagccccaattctgaactttctggatattagtctttcctgttgttattattaaggtgaaatgaaatattctgctttgtgagtacctacaaaccagaaattagatctgtttgtgtggaaacccagattacaattatattcttttcgttcttttctaagttgtacatttaaggttaaaggtataatgtgttagtgttttctcccaaaatggcttatactataatactatattcttatttaaaagcaaattgtttgttgaacaatttgaacaagtttgttgagactagaatctttgcctttctcagaaagcgttgttttctgtaaagatttcatcatatgaatgccatttcc

SEQ ID NO: 18233 - DNA, 1044 bp, Homo sapiens
  source 1..1044: mol_type = unassigned DNA
ccctcctgcctgtccctttctgtcttctctctctctctcccacttttcctccctctcccgctccgtctcacacgcaccctctgtttattttcctgcctccatctgggccctgctgatattgtaatcaccctgatgcacgttggcttctctcctctccctcctgcgctcacacactcactcacacacaatgtgccatcctgacaaggcttttacttctgataagctccaatgtgtgtttaatgaatacaaagccgcggtctgggtgccgcctcggccgcggccgctctcccgcgctcctttgccagaagctggcggagagaatttacatttaaagattagcagagtgagaaagagaaatctgccttttgttgtgtggggtgaggaggaggcatctacccctggccttgacgctatctcccatcacctctgctatccagacaggactcaccgagaaaagattgatctctgggctggtgaacataatctctgtcccagtcagaaaaggagagaggaaattagcagagcgattggtggagaatgatatctgtcaaaagaaacacttggagagcactgagtttagtaataggtgactgccggaaaaaagggaactttgaatattgtcaagatcgtactgagaagcactccacaatgccagactcacctgtggatgtgaagacgcaatctaggctgactcctccaacaatgccacctcccccaactactcaaggagctccaagaaccagttcatttacaccgacaacgttaactaatggcacgagccattctcctacagccttgaatggcgccccctcaccacccaatggcttcagcaatgggccttcctcttcttcctcctcctctctggctaatcaacagctgcccccagcctgtggtgccaggcaactcagcaagctgaaaaggttccttactaccctgcagcagtttggcaatgacatttcacccgagataggagaaagagttcgcaccctcgttctgggactagtgaactccactttgacaattgaagaatttcattccaaactg

SEQ ID NO: 18234 - DNA, 548 bp, Homo sapiens
  source 1..548: mol_type = unassigned DNA
attttctgagttcccattatatagtgtcctatgtgtgttgctcttttccagtcagactcattagtagtctggtgtggagctagtagctcagagattgcttttatgaggcggttttggaatcttcatctgcccatgaaaatagaatagtccacttttaaaaaaagatcgtactgagaagcactccacaatgccagactcacctgtggatgtgaagacgcaatctaggctgactcctccaacaatgccacctcccccaactactcaaggagctccaagaaccagttcatttacaccgacaacgttaactaatggcacgagccattctcctacagccttgaatggcgccccctcaccacccaatggcttcagcaatgggccttcctcttcttcctcctcctctctggctaatcaacagctgcccccagcctgtggtgccaggcaactcagcaagctgaaaaggttccttactaccctgcagcagtttggcaatgacatttcacccgagataggagaaagagttcgcaccctcgttctgggactagtgaact

SEQ ID NO: 18235 - DNA, 690 bp, Homo sapiens
  source 1..690: mol_type = unassigned DNA
agtctgaaaaattggcacctgcaggatttgcatgtgaaaaaaacggagtcagttgcattttgccggagtctattacttatcaaatgataagaactgagcacactggatgaaataatacttgcactgggagcactaagaaaagattgatctctgggctggtgaacataatctctgtcccagtcagaaaaggagagaggaaattagcagagcgattggtggagaatgatatctgtcaaaagaaacacttggagagcactgagtttagtaataggtgactgccggaaaaaagggaactttgaatattgtcaagatcgtactgagaagcactccacaatgccagactcacctgtggatgtgaagacgcaatctaggctgactcctccaacaatgccacctcccccaactactcaaggagctccaagaaccagttcatttacaccgacaacgttaactaatggcacgagccattctcctacagccttgaatggcgccccctcaccacccaatggcttcagcaatgggccttcctcttcttcctcctcctctctggctaatcaacagctgcccccagcctgtggtgccaggcaactcagcaagctgaaaaggttccttactaccctgcagcagtttggcaatgacatttcacccgagataggagaaagagttcgcaccctcgttctgggactagtg

SEQ ID NO: 18236 - DNA, 782 bp, Homo sapiens
  source 1..782: mol_type = unassigned DNA
ttctgtcttctctctctctctcccacttttcctccctctcccgctccgtctcacacgcaccctctgtttattttcctgcctccatctgggccctgctgatattgtaatcaccctgatgcacgttggcttctctcctctccctcctgcgctcacacactcactcacacacaatgtgccatcctgacaaggcttttacttctgataagctccaatgtgtgtttaatgaatacaaagccgcggtctgggtgccgcctcggccgcggccgctctcccgcgctcctttgccagaagaaaagattgatctctgggctggtgaacataatctctgtcccagtcagaaaaggagagaggaaattagcagagcgattggtggagaatgatatctgtcaaaagaaacacttggagagcactgagtttagtaataggtgactgccggaaaaaagggaactttgaatattgtcaagatcgtactgagaagcactccacaatgccagactcacctgtggatgtgaagacgcaatctaggctgactcctccaacaatgccacctcccccaactactcaaggagctccaagaaccagttcatttacaccgacaacgttaactaatggcacgagccattctcctacagccttgaatggcgccccctcaccacccaatggcttcagcaatgggccttcctcttcttcctcctcctctctggctaatcaacagctgcccccagcctgtggtgccaggcaactcagcaagctgaaaaggttccttactaccctgcagcagt

SEQ ID NO: 18237 - DNA, 572 bp, Homo sapiens
  source 1..572: mol_type = unassigned DNA
gagaagaaaatagccagctttagataaagcactataacaaaggcttctagttttatatatcatggtgtccattaaagcttaatagggaagagtccattgaacctggctgggcgcacgcgcccagcaccctgcctccggcgatgccgccccagcccctctgatggccctcctctctgctgccactcattccagaacaggaggcatgagcccggaacgcgcttgcttttaggagacagccactttctgtgtggtacgctggattcaaggatgcctgatcgtactgagaagcactccacaatgccagactcacctgtggatgtgaagacgcaatctaggctgactcctccaacaatgccacctcccccaactactcaaggagctccaagaaccagttcatttacaccgacaacgttaactaatggcacgagccattctcctacagccttgaatggcgccccctcaccacccaatggcttcagcaatgggccttcctcttcttcctcctcctctctggctaatcaacagctgcccccagcctgtggtgccaggcaactcagcaagctgaaaaggtt

SEQ ID NO: 18238 - DNA, 574 bp, Homo sapiens
  source 1..574: mol_type = unassigned DNA
gattcagaagtcgataagaccaggagaagtgaagatgtaacatgttatctgtcgctcctcttagctggcggagagaatttacatttaaagattagcagagtgagaaagagaaatctgccttttgttgtgtggggtgaggaggaggcatctacccctggccttgacgctatctcccatcacctctgctatccagacaggactcaccgagataaaccccacttgaaaaactgaggtgcttaaggagtaaaataatatgttcctggtggcatcctccagatcgtactgagaagcactccacaatgccagactcacctgtggatgtgaagacgcaatctaggctgactcctccaacaatgccacctcccccaactactcaaggagctccaagaaccagttcatttacaccgacaacgttaactaatggcacgagccattctcctacagccttgaatggcgccccctcaccacccaatggcttcagcaatgggccttcctcttcttcctcctcctctctggctaatcaacagctgcccccagcctgtggtgccaggcaactcagcaagctgaaaaggtt

SEQ ID NO: 18239 - DNA, 730 bp, Homo sapiens
  source 1..730: mol_type = unassigned DNA
tgattcagaagtcgataagaccaggagaagtgaagatgtaacatgttatctgtcgctcctcttagctggcggagagaatttacatttaaagattagcagagtgagaaagagaaatctgccttttgttgtgtggggtgaggaggaggcatctacccctggccttgacgctatctcccatcacctctgctatccagacaggactcaccgaggcgcacgcgcccagcaccctgcctccggcgatgccgccccagcccctctgatggccctcctctctgctgccactcattccagaacaggaggcatgagcccggaacgcgcttgcttttaggagacagccactttctgtgtggtacgctggattcaaggatgcctgataaaccccacttgaaaaactgaggtgcttaaggagtaaaataatatgttcctggtggcatcctccagatcgtactgagaagcactccacaatgccagactcacctgtggatgtgaagacgcaatctaggctgactcctccaacaatgccacctcccccaactactcaaggagctccaagaaccagttcatttacaccgacaacgttaactaatggcacgagccattctcctacagccttgaatggcgccccctcaccacccaatggcttcagcaatgggccttcctcttcttcctcctcctctctggctaatcaacagctgcccccagcctgtggtgccaggcaactcagcaagct

SEQ ID NO: 18240 - DNA, 573 bp, Homo sapiens
  source 1..573: mol_type = unassigned DNA
actcacacacaatgtgccatcctgacaaggcttttacttctgataagctccaatgtgtgtttaatgaatacaaagccgcggtctgggtgccgcctcggccgcggccgctctcccgcgctcctttgccagaagattgatctctgggctggtgaacataatctctgtcccagtcagaaaaggagagaggaaattagcagagcgattggtggagaatgatatctgtcaaaagaaacacttggagagcactgagtttagtaataggtgactgccggaaaaaagggaactttgaatattgtcaagatcgtactgagaagcactccacaatgccagactcacctgtggatgtgaagacgcaatctaggctgactcctccaacaatgccacctcccccaactactcaaggagctccaagaaccagttcatttacaccgacaacgttaactaatggcacgagccattctcctacagccttgaatggcgccccctcaccacccaatggcttcagcaatgggccttcctcttcttcctcctcctctctggctaatcaacagctgcccccagcctgtggtgcca

SEQ ID NO: 18241 - DNA, 553 bp, Homo sapiens
  source 1..553: mol_type = unassigned DNA
tatgcaggcaacatagcccttcatagcaaagcagtctgaaaaattggcacctgcaggatttgcatgtgaaaaaaacggagtcagttgcattttgccggagtctattactaaaagattgatctctgggctggtgaacataatctctgtcccagtcagaaaaggagagaggaaattagcagagcgattggtggagaatgatatctgtcaaaagaaacacttggagagcactgagtttagtaataggtgactgccggaaaaaagggaactttgaatattgtcaagatcgtactgagaagcactccacaatgccagactcacctgtggatgtgaagacgcaatctaggctgactcctccaacaatgccacctcccccaactactcaaggagctccaagaaccagttcatttacaccgacaacgttaactaatggcacgagccattctcctacagccttgaatggcgccccctcaccacccaatggcttcagcaatgggccttcctcttcttcctcctcctctctggctaatcaacagctgcccccagcctgtggtgc

SEQ ID NO: 18242 - DNA, 586 bp, Homo sapiens
  source 1..586: mol_type = unassigned DNA
ttgcagctcggagcctgtggcggatggtgggactctccggccctgtgcagttatcaaatgataagaactgagcacactggatgaaataatacttgcactgggagcactaagaaaagattgatctctgggctggtgaacataatctctgtcccagtcagaaaaggagagaggaaattagcagagcgattggtggagaatgatatctgtcaaaagaaacacttggagagcactgagtttagtaataggtgactgccggaaaaaagggaactttgaatattgtcaagataaaccccacttgaaaaactgaggtgcttaaggagtaaaataatatgttcctggtggcatcctccagatcgtactgagaagcactccacaatgccagactcacctgtggatgtgaagacgcaatctaggctgactcctccaacaatgccacctcccccaactactcaaggagctccaagaaccagttcatttacaccgacaacgttaactaatggcacgagccattctcctacagccttgaatggcgccccctcaccacccaatggcttcagcaatgggccttcctcttcttcctcctcct

SEQ ID NO: 18243 - DNA, 556 bp, Homo sapiens
  source 1..556: mol_type = unassigned DNA
aatgaatacaaagccgcggtctgggtgccgcctcggccgcggccgctctcccgcgctcctttgccagaagaaaagattgatctctgggctggtgaacataatctctgtcccagtcagaaaaggagagaggaaattagcagagcgattggtggagaatgatatctgtcaaaagaaacacttggagagcactgagtttagtaataggtgactgccggaaaaaagggaactttgaatattgtcaagaacaggaggcatgagcccggaacgcgcttgcttttaggagacagccactttctgtgtggtacgctggattcaaggatgcctgatcgtactgagaagcactccacaatgccagactcacctgtggatgtgaagacgcaatctaggctgactcctccaacaatgccacctcccccaactactcaaggagctccaagaaccagttcatttacaccgacaacgttaactaatggcacgagccattctcctacagccttgaatggcgccccctcaccacccaatggcttcagcaatgggccttcctcttcttcctcct

SEQ ID NO: 18244 - DNA, 557 bp, Homo sapiens
  source 1..557: mol_type = unassigned DNA
ggcttttacttctgataagctccaatgtgtgtttaatgaatacaaagccgcggtctgggtgccgcctcggccgcggccgctctcccgcgctcctttgccagaagaaaagattgatctctgggctggtgaacataatctctgtcccagtcagaaaaggagagaggaaattagcagagcgattggtggagaatgatatctgtcaaaagaaacacttggagagcactgagtttagtaataggtgactgccggaaaaaagggaactttgaatattgtcaagataaaccccacttgaaaaactgaggtgcttaaggagtaaaataatatgttcctggtggcatcctccagatcgtactgagaagcactccacaatgccagactcacctgtggatgtgaagacgcaatctaggctgactcctccaacaatgccacctcccccaactactcaaggagctccaagaaccagttcatttacaccgacaacgttaactaatggcacgagccattctcctacagccttgaatggcgccccctcaccacccaatggcttcagcaatggg

SEQ ID NO: 18245 - DNA, 574 bp, Homo sapiens
  source 1..574: mol_type = unassigned DNA
gattcagaagtcgataagaccaggagaagtgaagatgtaacatgttatctgtcgctcctcttagctggcggagagaatttacatttaaagattagcagagtgagaaagagaaatctgccttttgttgtgtggggtgaggaggaggcatctacccctggccttgacgctatctcccatcacctctgctatccagacaggactcaccgaggcgcacgcgcccagcaccctgcctccggcgatgccgccccagcccctctgatggccctcctctctgctgccactcattccagaacaggaggcatgagcccggaacgcgcttgcttttaggagacagccactttctgtgtggtacgctggattcaaggatgcctgatcgtactgagaagcactccacaatgccagactcacctgtggatgtgaagacgcaatctaggctgactcctccaacaatgccacctcccccaactactcaaggagctccaagaaccagttcatttacaccgacaacgttaactaatggcacgagccattctcctacagccttgaatggcgccccctcaccacccaatggctt

SEQ ID NO: 18246 - DNA, 596 bp, Homo sapiens
  source 1..596: mol_type = unassigned DNA
ctccctctctccctttccaaatgattcagaagtcgataagaccaggagaagtgaagatgtaacatgttatctgtcgctcctcttagctggcggagagaatttacatttaaagattagcagagtgagaaagagaaatctgccttttgttgtgtggggtgaggaggaggcatctacccctggccttgacgctatctcccatcacctctgctatccagacaggactcaccgagaaaagattgatctctgggctggtgaacataatctctgtcccagtcagaaaaggagagaggaaattagcagagcgattggtggagaatgatatctgtcaaaagaaacacttggagagcactgagtttagtaataggtgactgccggaaaaaagggaactttgaatattgtcaagatcgtactgagaagcactccacaatgccagactcacctgtggatgtgaagacgcaatctaggctgactcctccaacaatgccacctcccccaactactcaaggagctccaagaaccagttcatttacaccgacaacgttaactaatggcacgagccattctcctacagccttgaatggcgccccctcaccacc

SEQ ID NO: 18247 - DNA, 630 bp, Homo sapiens
  source 1..630: mol_type = unassigned DNA
actcactcacacacaatgtgccatcctgacaaggcttttacttctgataagctccaatgtgtgtttaatgaatacaaagccgcggtctgggtgccgcctcggccgcggccgctctcccgcgctcctttgccagaagtatcaaatgataagaactgagcacactggatgaaataatacttgcactgggagcactaagaaaagattgatctctgggctggtgaacataatctctgtcccagtcagaaaaggagagaggaaattagcagagcgattggtggagaatgatatctgtcaaaagaaacacttggagagcactgagtttagtaataggtgactgccggaaaaaagggaactttgaatattgtcaagataaaccccacttgaaaaactgaggtgcttaaggagtaaaataatatgttcctggtggcatcctccagatcgtactgagaagcactccacaatgccagactcacctgtggatgtgaagacgcaatctaggctgactcctccaacaatgccacctcccccaactactcaaggagctccaagaaccagttcatttacaccgacaacgttaactaatggcacgagccattctcctacagccttgaatggcgccccctcaccacc

SEQ ID NO: 18248 - DNA, 565 bp, Homo sapiens
  source 1..565: mol_type = unassigned DNA
ttttatttgcagctcggagcctgtggcggatggtgggactctccggccctgtgcagtaaaagattgatctctgggctggtgaacataatctctgtcccagtcagaaaaggagagaggaaattagcagagcgattggtggagaatgatatctgtcaaaagaaacacttggagagcactgagtttagtaataggtgactgccggaaaaaagggaactttgaatattgtcaaggcgcacgcgcccagcaccctgcctccggcgatgccgccccagcccctctgatggccctcctctctgctgccactcattccagaacaggaggcatgagcccggaacgcgcttgcttttaggagacagccactttctgtgtggtacgctggattcaaggatgcctgatcgtactgagaagcactccacaatgccagactcacctgtggatgtgaagacgcaatctaggctgactcctccaacaatgccacctcccccaactactcaaggagctccaagaaccagttcatttacaccgacaacgttaactaatggcacgagccattctcctacagcct

SEQ ID NO: 18249 - DNA, 564 bp, Homo sapiens
  source 1..564: mol_type = unassigned DNA
ttctctcctctccctcctgcgctcacacactcactcacacacaatgtgccatcctgacaaggcttttacttctgataagctccaatgtgtgtttaatgaatacaaagccgcggtctgggtgccgcctcggccgcggccgctctcccgcgctcctttgccagaagtatcaaatgataagaactgagcacactggatgaaataatacttgcactgggagcactaagaaaagattgatctctgggctggtgaacataatctctgtcccagtcagaaaaggagagaggaaattagcagagcgattggtggagaatgatatctgtcaaaagaaacacttggagagcactgagtttagtaataggtgactgccggaaaaaagggaactttgaatattgtcaagatcgtactgagaagcactccacaatgccagactcacctgtggatgtgaagacgcaatctaggctgactcctccaacaatgccacctcccccaactactcaaggagctccaagaaccagttcatttacaccgacaacgttaactaatggcacgagccattctcctaca

SEQ ID NO: 18250 - DNA, 591 bp, Homo sapiens
  source 1..591: mol_type = unassigned DNA
gagggcgggcgagggagacgcagacgccgcctgtgacagtggcaattccctgcgccccacatcacatttgtctgccacagcagcaacaacagaaaagcggagggagggagggaggcgggaggaggggagcagagctccgcaagtcttgggctctgcgtggaggttgcgtttggctggcgtccccgaccccgggctttttgcacggcagctctctctgcgcagcgccgggcggccgtagtcgctccgcggcgcgactccgcggtctcgtggcgagcgcgcgtgggcgagtggccgcggacactctggcctcgcgagggaagccgcgccgcgtcctcgccccgtcgccccgcgggccggccgagacgacgggaagttttatttgcagctcggagcctgtggcggatggtgggactctccggccctgtgcagtatcgtactgagaagcactccacaatgccagactcacctgtggatgtgaagacgcaatctaggctgactcctccaacaatgccacctcccccaactactcaaggagctccaagaaccagttcatttacaccgacaacgttaactaatggcacgagccattct

SEQ ID NO: 18251 - DNA, 569 bp, Homo sapiens
  source 1..569: mol_type = unassigned DNA
agaagtcgataagaccaggagaagtgaagatgtaacatgttatctgtcgctcctcttagctggcggagagaatttacatttaaagattagcagagtgagaaagagaaatctgccttttgttgtgtggggtgaggaggaggcatctacccctggccttgacgctatctcccatcacctctgctatccagacaggactcaccgagaaaagattgatctctgggctggtgaacataatctctgtcccagtcagaaaaggagagaggaaattagcagagcgattggtggagaatgatatctgtcaaaagaaacacttggagagcactgagtttagtaataggtgactgccggaaaaaagggaactttgaatattgtcaaggaggcatgagcccggaacgcgcttgcttttaggagacagccactttctgtgtggtacgctggattcaaggatgcctgatcgtactgagaagcactccacaatgccagactcacctgtggatgtgaagacgcaatctaggctgactcctccaacaatgccacctcccccaactactcaaggagctccaagaacc

SEQ ID NO: 18252 - DNA, 708 bp, Homo sapiens
  source 1..708: mol_type = unassigned DNA
acacaatgtgccatcctgacaaggcttttacttctgataagctccaatgtgtgtttaatgaatacaaagccgcggtctgggtgccgcctcggccgcggccgctctcccgcgctcctttgccagaagctggcggagagaatttacatttaaagattagcagagtgagaaagagaaatctgccttttgttgtgtggggtgaggaggaggcatctacccctggccttgacgctatctcccatcacctctgctatccagacaggactcaccgagaaaagattgatctctgggctggtgaacataatctctgtcccagtcagaaaaggagagaggaaattagcagagcgattggtggagaatgatatctgtcaaaagaaacacttggagagcactgagtttagtaataggtgactgccggaaaaaagggaactttgaatattgtcaaggcgcacgcgcccagcaccctgcctccggcgatgccgccccagcccctctgatggccctcctctctgctgccactcattccagaacaggaggcatgagcccggaacgcgcttgcttttaggagacagccactttctgtgtggtacgctggattcaaggatgcctgatcgtactgagaagcactccacaatgccagactcacctgtggatgtgaagacgcaatctaggctgactcctccaacaatgccacctcccccaactactcaa

SEQ ID NO: 18253 - DNA, 542 bp, Homo sapiens
  source 1..542: mol_type = unassigned DNA
agaagtcgataagaccaggagaagtgaagatgtaacatgttatctgtcgctcctcttagctggcggagagaatttacatttaaagattagcagagtgagaaagagaaatctgccttttgttgtgtggggtgaggaggaggcatctacccctggccttgacgctatctcccatcacctctgctatccagacaggactcaccgagaaaagattgatctctgggctggtgaacataatctctgtcccagtcagaaaaggagagaggaaattagcagagcgattggtggagaatgatatctgtcaaaagaaacacttggagagcactgagtttagtaataggtgactgccggaaaaaagggaactttgaatattgtcaagataaaccccacttgaaaaactgaggtgcttaaggagtaaaataatatgttcctggtggcatcctccagatcgtactgagaagcactccacaatgccagactcacctgtggatgtgaagacgcaatctaggctgactcctccaacaatgccacctcccccaactact

SEQ ID NO: 18254 - DNA, 548 bp, Homo sapiens
  source 1..548: mol_type = unassigned DNA
acttctgataagctccaatgtgtgtttaatgaatacaaagccgcggtctgggtgccgcctcggccgcggccgctctcccgcgctcctttgccagaagctggcggagagaatttacatttaaagattagcagagtgagaaagagaaatctgccttttgttgtgtggggtgaggaggaggcatctacccctggccttgacgctatctcccatcacctctgctatccagacaggactcaccgagtatcaaatgataagaactgagcacactggatgaaataatacttgcactgggagcactaagaaaagattgatctctgggctggtgaacataatctctgtcccagtcagaaaaggagagaggaaattagcagagcgattggtggagaatgatatctgtcaaaagaaacacttggagagcactgagtttagtaataggtgactgccggaaaaaagggaactttgaatattgtcaagatcgtactgagaagcactccacaatgccagactcacctgtggatgtgaagacgcaatctaggctgactcctcca

SEQ ID NO: 18255 - DNA, 544 bp, Homo sapiens
  source 1..544: mol_type = unassigned DNA
actcactcacacacaatgtgccatcctgacaaggcttttacttctgataagctccaatgtgtgtttaatgaatacaaagccgcggtctgggtgccgcctcggccgcggccgctctcccgcgctcctttgccagaagaaaagattgatctctgggctggtgaacataatctctgtcccagtcagaaaaggagagaggaaattagcagagcgattggtggagaatgatatctgtcaaaagaaacacttggagagcactgagtttagtaataggtgactgccggaaaaaagggaactttgaatattgtcaaggcgcacgcgcccagcaccctgcctccggcgatgccgccccagcccctctgatggccctcctctctgctgccactcattccagaacaggaggcatgagcccggaacgcgcttgcttttaggagacagccactttctgtgtggtacgctggattcaaggatgcctgatcgtactgagaagcactccacaatgccagactcacctgtggatgtgaagacgcaatctaggctgactcct

SEQ ID NO: 18256 - DNA, 563 bp, Homo sapiens
  source 1..563: mol_type = unassigned DNA
gaagtcgataagaccaggagaagtgaagatgtaacatgttatctgtcgctcctcttagctggcggagagaatttacatttaaagattagcagagtgagaaagagaaatctgccttttgttgtgtggggtgaggaggaggcatctacccctggccttgacgctatctcccatcacctctgctatccagacaggactcaccgagtatcaaatgataagaactgagcacactggatgaaataatacttgcactgggagcactaagaaaagattgatctctgggctggtgaacataatctctgtcccagtcagaaaaggagagaggaaattagcagagcgattggtggagaatgatatctgtcaaaagaaacacttggagagcactgagtttagtaataggtgactgccggaaaaaagggaactttgaatattgtcaagataaaccccacttgaaaaactgaggtgcttaaggagtaaaataatatgttcctggtggcatcctccagatcgtactgagaagcactccacaatgccagactcacctgtggatgtgaagacgcaatcta

SEQ ID NO: 18257 - DNA, 491 bp, Homo sapiens
  source 1..491: mol_type = unassigned DNA
aagtcgataagaccaggagaagtgaagatgtaacatgttatctgtcgctcctcttagctggcggagagaatttacatttaaagattagcagagtgagaaagagaaatctgccttttgttgtgtggggtgaggaggaggcatctacccctggccttgacgctatctcccatcacctctgctatccagacaggactcaccgagtatcaaatgataagaactgagcacactggatgaaataatacttgcactgggagcactaagaaaagattgatctctgggctggtgaacataatctctgtcccagtcagaaaaggagagaggaaattagcagagcgattggtggagaatgatatctgtcaaaagaaacacttggagagcactgagtttagtaataggtgactgccggaaaaaagggaactttgaatattgtcaagatcgtactgagaagcactccacaatgccagactcacctgtggatgtgaagacgcaat

SEQ ID NO: 18258 - DNA, 631 bp, Homo sapiens
  source 1..631: mol_type = unassigned DNA
gattcagaagtcgataagaccaggagaagtgaagatgtaacatgttatctgtcgctcctcttagctggcggagagaatttacatttaaagattagcagagtgagaaagagaaatctgccttttgttgtgtggggtgaggaggaggcatctacccctggccttgacgctatctcccatcacctctgctatccagacaggactcaccgagaaaagattgatctctgggctggtgaacataatctctgtcccagtcagaaaaggagagaggaaattagcagagcgattggtggagaatgatatctgtcaaaagaaacacttggagagcactgagtttagtaataggtgactgccggaaaaaagggaactttgaatattgtcaaggcgcacgcgcccagcaccctgcctccggcgatgccgccccagcccctctgatggccctcctctctgctgccactcattccagaacaggaggcatgagcccggaacgcgcttgcttttaggagacagccactttctgtgtggtacgctggattcaaggatgcctgataaaccccacttgaaaaactgaggtgcttaaggagtaaaataatatgttcctggtggcatcctccagatcgtactgagaagcact

SEQ ID NO: 18259 - DNA, 535 bp, Homo sapiens
  source 1..535: mol_type = unassigned DNA
actcacacacaatgtgccatcctgacaaggcttttacttctgataagctccaatgtgtgtttaatgaatacaaagccgcggtctgggtgccgcctcggccgcggccgctctcccgcgctcctttgccagaagctggcggagagaatttacatttaaagattagcagagtgagaaagagaaatctgccttttgttgtgtggggtgaggaggaggcatctacccctggccttgacgctatctcccatcacctctgctatccagacaggactcaccgagaaaagattgatctctgggctggtgaacataatctctgtcccagtcagaaaaggagagaggaaattagcagagcgattggtggagaatgatatctgtcaaaagaaacacttggagagcactgagtttagtaataggtgactgccggaaaaaagggaactttgaatattgtcaagataaaccccacttgaaaaactgaggtgcttaaggagtaaaataatatgttcctggtggcatcctccagatcgtactgagaagcact

SEQ ID NO: 18260 - DNA, 547 bp, Homo sapiens
  source 1..547: mol_type = unassigned DNA
acactcactcacacacaatgtgccatcctgacaaggcttttacttctgataagctccaatgtgtgtttaatgaatacaaagccgcggtctgggtgccgcctcggccgcggccgctctcccgcgctcctttgccagaagctggcggagagaatttacatttaaagattagcagagtgagaaagagaaatctgccttttgttgtgtggggtgaggaggaggcatctacccctggccttgacgctatctcccatcacctctgctatccagacaggactcaccgagtatcaaatgataagaactgagcacactggatgaaataatacttgcactgggagcactaagaaaagattgatctctgggctggtgaacataatctctgtcccagtcagaaaaggagagaggaaattagcagagcgattggtggagaatgatatctgtcaaaagaaacacttggagagcactgagtttagtaataggtgactgccggaaaaaagggaactttgaatattgtcaagataaaccccacttgaaaaactgaggtgcttaa

SEQ ID NO: 18261 - DNA, 553 bp, Homo sapiens
  source 1..553: mol_type = unassigned DNA
ctctctccctctctccctttccaaatgattcagaagtcgataagaccaggagaagtgaagatgtaacatgttatctgtcgctcctcttagctggcggagagaatttacatttaaagattagcagagtgagaaagagaaatctgccttttgttgtgtggggtgaggaggaggcatctacccctggccttgacgctatctcccatcacctctgctatccagacaggactcaccgagtatcaaatgataagaactgagcacactggatgaaataatacttgcactgggagcactaagaaaagattgatctctgggctggtgaacataatctctgtcccagtcagaaaaggagagaggaaattagcagagcgattggtggagaatgatatctgtcaaaagaaacacttggagagcactgagtttagtaataggtgactgccggaaaaaagggaactttgaatattgtcaaggcgcacgcgcccagcaccctgcctccggcgatgccgccccagcccctctgatggccctcctctctgctgccactcattccagaaca

SEQ ID NO: 18262 - DNA, 7401 bp, Homo sapiens
  source 1..7401: mol_type = unassigned DNA
tctctctccctctctccctttccaaatgattcagaagtcgataagaccaggagaagtgaagatgtaacatgttatctgtcgctcctcttagctggcggagagaatttacatttaaagattagcagagtgagaaagagaaatctgccttttgttgtgtggggtgaggaggaggcatctacccctggccttgacgctatctcccatcacctctgctatccagacaggactcaccgaggcgcacgcgcccagcaccctgcctccggcgatgccgccccagcccctctgatggccctcctctctgctgccactcattccagaacaggaggcatgagcccggaacgcgcttgcttttaggagacagccactttctgtgtggtacgctggattcaaggatgcctgatcgtactgagaagcactccacaatgccagactcacctgtggatgtgaagacgcaatctaggctgactcctccaacaatgccacctcccccaactactcaaggagctccaagaaccagttcatttacaccgacaacgttaactaatggcacgagccattctcctacagccttgaatggcgccccctcaccacccaatggcttcagcaatgggccttcctcttcttcctcctcctctctggctaatcaacagctgcccccagcctgtggtgccaggcaactcagcaagctgaaaaggttccttactaccctgcagcagtttggcaatgacatttcacccgagataggagaaagagttcgcaccctcgttctgggactagtgaactccactttgacaattgaagaatttcattccaaactgcaagaagctactaacttcccactgagaccttttgtcatcccatttttgaaggccaacttgcccctgctgcagcgtgagctcctccactgcgcaagactggccaaacagaaccctgcccagtacctcgcccagcatgaacagctgcttctggatgccagcaccacctcacctgttgactcctcagagctgcttctcgatgtgaacgaaaacgggaagaggcgaactccagacagaaccaaagaaaatggctttgacagagagcctttgcactcagaacatccaagcaagcgaccatgcactattagcccaggccagcggtacagtccaaataacggcttatcctaccagcccaatggcctgcctcaccctaccccacctccacctcagcattaccgtttggatgatatggccattgcccaccactacagggactcctatcgacaccccagccacagggacctcagggacagaaacagacctatggggttgcatggcacacgtcaagaagaaatgattgatcacagactaacagacagagaatgggcagaagagtggaaacatcttgaccatctgttaaactgcataatggacatggtagaaaaaacaaggcgatctctcaccgtactaaggcggtgtcaagaagcagaccgggaagaattgaattactggatccggcggtacagtgacgccgaggacttaaaaaaaggtggcggcagtagcagcagccactctaggcagcagagtcccgtcaacccagacccagttgcactagacgcgcatcgggaattccttcacaggcctgcgtctggatacgtgccagaggagatctggaagaaagctgaggaggccgtcaatgaggtgaagcgccaggcgatgacggagctgcagaaggccgtgtctgaggcggagcggaaagcccacgacatgatcacaacagagagggccaagatggagcgcacggtcgccgaggccaaacggcaggcggcggaggacgcactggcagttatcaatcagcaggaggattcaagcgagagttgctggaattgtggccgtaaagcgagtgaaacctgcagtggctgtaacacagcccgatactgtggctcattttgccagcacaaagactgggagaagcaccatcacatctgtggacagaccctgcaggcccagcagcagggagacacacctgcagtcagctcctctgtcacgcccaacagcggggctgggagcccgatggacacaccaccagcagccactccgaggtcaaccaccccgggaaccccttccaccatagagacaacccctcgctagacgtgaactcagaactgtcggaggaaagacaacacaaccaacgcgaaaccaattcctcatcctcagatgctcaaagttgttttttttgtttgtttgtttattagatgaattatcctatttcagtacttcagcaagagagaacctaactgtatcttgaggtggtagtaaaacacagagggccagtaacgggtcgtaatgacttattgtggataacaaagatatcttttctttagagaactgaaaagagagcagagaatataacatgaaatgatagatttgacctcctccctgttattttcaagtagctgggattttaaactagatgacctcattaaccgatgctttaccaaacagcaaaccaagagattgctaattgctgttgaaagcaaaaatgctaatattaaaagtcacaatgttctttatatacaataatggaaaaaaaaaaaagaggaaaaccctcaagggcatgagcattggatacagcagtagacattttaacaagaagatgaatggcgtccgtgggttgctaactgaactttgaagacccgctacaaaacgcgcagatgtgcagcagattggaaggagacacagatgttcggtttttttcctgtttctgaaaagaaataataatatccaggtcaacagaatgaaaaatgaaagatgatttgcaatgggatgtatgaatacagcagcaagaaaaaaaaatgccataatacaaaaggctccatatatatatatatatatatatatatacacacacacacacgcacatatacacacacacacacacacacacacacacacacacacacacacacacacacacacaagtaagagactcagcctgcagttaattagcattctggcagttttgacatcagccagctgccctaaataacccttcaacgtttcttcacttttgcaaggttccacagagtaagacattgggtctattccagctcattcattttatattgaaaaaaataattttaaaaatggtggcttcagctccagcccctttccaaaatttttcaaccccaccctgtttggatttttaattaaaaactagtagttctcttggtgttaaaacacttctgtcctgtgaggtttcccaatggtgtttttcttgtaaatgtgttggacaaatgtgaagatgcattgtagtttaaccatatgcccacatttagtctctttattcctagttggtgagaaacctgtatctttctatgctgcttttatatctgtatgtattagtgatatttctctagtagttaaaaaaaaaaaaaggaaaaaaagactctttttggttgtcctcaagaaaagaaaagaagaaaagctatctttcggagctgctatttcactctcttataggatttttttttttcctgaaaaccagcatgcttcacggaatgctaacatattggtgtttttgtaagagggatgtacataaatgtattttgcactgtcacaatgactccctaggcatgctttttgtttttttttttttttttttgagcaaattctttttaaatatgctagagccatttcatcaagtttagctgtagcatagagtagtcgtggaatttttcttttttttttttttaaatcattattagggacttttttaaaaaaataaaataacaagatatcctactttaaaaaaaaaggacagtgcatgcatattgctgtaaggtcgtttaagtatttctaattttacaaaagtaaaaatcattagagctccaaatgctgaggtgtagattgacagctttaacactgctgaatgccaggttatacagtattcttacaaaaagggaagtcagccaaagactgatctgatggaccaaaatcggaattttgaaaagcaccagtactactttccaaatgatcagcaggttaaacatgttcagcaaggtatagtatgaatccattaacccttcgttgtccagggtccagaccagaactacttgttagttttgaaaacagtagcccaggatgtggttgtgtgctttaggaaagtcagcagtgctgcaggctgtgtagacaaccaaagtttacaaggctgggaagacacttctccaaatacatatacaccaggcatttctttaaaatcaaaaacaatccattagctttggggcggggggtggggggagggttaaatgtaggccttggaaacagttttaagtggcttttaagtatctgcatagaggcaatcctaaggtttgctttaagtctcttaaatctaacatttttaaaagcatttcttccctgtattttcatatacaagttggttttaattttgtttgggtggtgttattttttttaaatgactttttagtttagaaagttctgatgagcaaataaatacatctatctacatgttggaagtccatctgccagcacacctgcttaaagtgaaatgaaagcacataaccaggctctgaatgggttatattttatcatggtgctcccagaatcctttgacctcactctgctttctagtctgcttgtgacactggacagtcctttcttacagagctattatatgttctaggctacgaagggttaaataatcccaaaaatgaggtatgtcatacccacacgtctttatctctagaagctgtgatgtatgtgaaacagcactgttattcttaacactagtgtgtaaaataaggattagtacagtacgtctcattactttttaattcagggcaccctgagtgaaaacaaatacaaaaaaaaatccctaactctgagctctatctctgattcctcttcctccttcccctcttcctcctcttcctctcctcctgttttgctacattctcctcagtggcaaaaagtttcactctacctctgacagcatgtatattgcaccagtagctaacaaaaactggtctagtcaaaccaaatgggcacaaaagaaccaggataccaaaagttaagctcatacagctgcaaaccatatcacttcttggtaacaatgcagacctcataaacctaaagaagagaaagaaaagaaaacttttgttactttccttttttgcttgtcacttatatacaggctatgtgagaatataatttgtaggtataacacattaagaaaaagttatcttcattggatagaattgaatggtggtcgctgataggaatagggcgtcctctagctcttatctctgtctcttactcttttctctttctctttttctctgtcatgagactgtgtgtgacagggccacctgtcttttttttttcttaaattttttttttttttatgtgtaggtgcatgtcttggggatttaaaaatttcaaggctggtttacttatgcaaagcatgcctacgtctggaatacttagggaaagaaagcgactccatgttgtccgaattcctcaagggacagaaaaaaaattggagactgttgaaatgcagatttgaagtaatttttttaaaatattattttgggttctgcgacattgtgaaaaattaaagttgttgtgcaatacttaattcagacatgtaccacaagttaatggtagactaacactggggggtggggtctaggcatcatgcttttgtcagcatactcttgagcttttaagtctactatgtctgaactgtggtttcttgtttatccttttttccttagttggactgtaatgtatggtctgtcaacctgtgaatctttaaagtatgattcaggtattgttgtattctttactgtgtaataaaaaagttgaaaaaaatctggatcctctgtctccctcgtccccggtgtgccatggttgcccaccagtgaccccagcctgaggagtccatcctccatggtgctgaatcaaatctgtagagtttattcagctacaaagcgtggctctgtaacaggagttggcttatccatgcgtgttgagtagggaatgatgtcagaactttgcaaaagtcgagctcattcataaggggatgtttctcaggcaggaggagtaggaagagtgggaggagaattactaccttccataggaaaggagagcttggcttgcctagattagctgctgcatagatagcagaggcccttttggctgtgttttgataaaattagaaatgagtacctaaatctggatcactctgctcagagaggttcgtgccaacctcatgaggctctgactcttgtcaggttgcttggctgccttgtgcatacccgaatggcagatcagctgacatgacatggaactgctctatctgccttgtcccctctcctctaattaaaagtcgctaccattgtcactcttggttatgtagttaatatccactgtggctatctccaacttgctgggacatccagttatctcctctgacacatattttttcattctctagttacaaagtttgttagagtttgaaaaacaaacccttctcccctaccctgtgaatgctgttagtttttatgtgtagttttcaaaacacagattatcttatatactgtgttgtagcagaaattcctgtttcctctgaatgttctgactttatagaccaaaataatcgttgcaaaaaatcaaggatggcacagcaggtgcatgagcccgtgtctggagaaaggttatgaaggtgaatgctggttacatgggagggtgacttggagccctctagtttccttcttgtgccagctgggttcctgtttcaaggccaggcttctctaacttgtcttcctgggaaatgtagcttttccaagaatttggtagtgcacaccaggaaaaactaggtatcagaacagatttttttttaaatagtggaaacaccctcactcccacactttggacagttagggttggatatttaatttcatagttactctttttttccacagaagaaaggccagcctgacccaagttgcctatttttaatgtgttactgcatcttattttctcttcaaagtgaaaaaggccagaaactagcagatagaaatggaacccgttgacttagttcccttataagaagttcttgcaaacacctctgtgacgttttcattcaagtggatatgttggacaaataggaaacagttttagtttacgcgaacagtatgagacttccaggtggtggacgccatttttttagaagtgttgatgatgtatttgataacattataaaagtatgtgtctcccgtgaaagaacattgagctatttccctggaatggatggggaagaaatgagcaaaggagtgctgttctgtatgggtgtctatacccttattccaaggtgaataaataaagttgtgtttgcctaatcatg

SEQ ID NO: 18263 - DNA, 7627 bp, Homo sapiens
  source 1..7627: mol_type = unassigned DNA
ccctcctgcctgtccctttctgtcttctctctctctctcccacttttcctccctctcccgctccgtctcacacgcaccctctgtttattttcctgcctccatctgggccctgctgatattgtaatcaccctgatgcacgttggcttctctcctctccctcctgcgctcacacactcactcacacacaatgtgccatcctgacaaggcttttacttctgataagctccaatgtgtgtttaatgaatacaaagccgcggtctgggtgccgcctcggccgcggccgctctcccgcgctcctttgccagaagctggcggagagaatttacatttaaagattagcagagtgagaaagagaaatctgccttttgttgtgtggggtgaggaggaggcatctacccctggccttgacgctatctcccatcacctctgctatccagacaggactcaccgagaaaagattgatctctgggctggtgaacataatctctgtcccagtcagaaaaggagagaggaaattagcagagcgattggtggagaatgatatctgtcaaaagaaacacttggagagcactgagtttagtaataggtgactgccggaaaaaagggaactttgaatattgtcaagatcgtactgagaagcactccacaatgccagactcacctgtggatgtgaagacgcaatctaggctgactcctccaacaatgccacctcccccaactactcaaggagctccaagaaccagttcatttacaccgacaacgttaactaatggcacgagccattctcctacagccttgaatggcgccccctcaccacccaatggcttcagcaatgggccttcctcttcttcctcctcctctctggctaatcaacagctgcccccagcctgtggtgccaggcaactcagcaagctgaaaaggttccttactaccctgcagcagtttggcaatgacatttcacccgagataggagaaagagttcgcaccctcgttctgggactagtgaactccactttgacaattgaagaatttcattccaaactgcaagaagctactaacttcccactgagaccttttgtcatcccatttttgaaggccaacttgcccctgctgcagcgtgagctcctccactgcgcaagactggccaaacagaaccctgcccagtacctcgcccagcatgaacagctgcttctggatgccagcaccacctcacctgttgactcctcagagctgcttctcgatgtgaacgaaaacgggaagaggcgaactccagacagaaccaaagaaaatggctttgacagagagcctttgcactcagaacatccaagcaagcgaccatgcactattagcccaggccagcggtacagtccaaataacggcttatcctaccagcccaatggcctgcctcaccctaccccacctccacctcagcattaccgtttggatgatatggccattgcccaccactacagggactcctatcgacaccccagccacagggacctcagggacagaaacagacctatggggttgcatggcacacgtcaagaagaaatgattgatcacagactaacagacagagaatgggcagaagagtggaaacatcttgaccatctgttaaactgcataatggacatggtagaaaaaacaaggcgatctctcaccgtactaaggcggtgtcaagaagcagaccgggaagaattgaattactggatccggcggtacagtgacgccgaggacttaaaaaaaggtggcggcagtagcagcagccactctaggcagcagagtcccgtcaacccagacccagttgcactagacgcgcatcgggaattccttcacaggcctgcgtctggatacgtgccagaggagatctggaagaaagctgaggaggccgtcaatgaggtgaagcgccaggcgatgacggagctgcagaaggccgtgtctgaggcggagcggaaagcccacgacatgatcacaacagagagggccaagatggagcgcacggtcgccgaggccaaacggcaggcggcggaggacgcactggcagttatcaatcagcaggaggattcaagcgagagttgctggaattgtggccgtaaagcgagtgaaacctgcagtggctgtaacacagcccgatactgtggctcattttgccagcacaaagactgggagaagcaccatcacatctgtggacagaccctgcaggcccagcagcagggagacacacctgcagtcagctcctctgtcacgcccaacagcggggctgggagcccgatggacacaccaccagcagccactccgaggtcaaccaccccgggaaccccttccaccatagagacaacccctcgctagacgtgaactcagaactgtcggaggaaagacaacacaaccaacgcgaaaccaattcctcatcctcagatgctcaaagttgttttttttgtttgtttgtttattagatgaattatcctatttcagtacttcagcaagagagaacctaactgtatcttgaggtggtagtaaaacacagagggccagtaacgggtcgtaatgacttattgtggataacaaagatatcttttctttagagaactgaaaagagagcagagaatataacatgaaatgatagatttgacctcctccctgttattttcaagtagctgggattttaaactagatgacctcattaaccgatgctttaccaaacagcaaaccaagagattgctaattgctgttgaaagcaaaaatgctaatattaaaagtcacaatgttctttatatacaataatggaaaaaaaaaaaagaggaaaaccctcaagggcatgagcattggatacagcagtagacattttaacaagaagatgaatggcgtccgtgggttgctaactgaactttgaagacccgctacaaaacgcgcagatgtgcagcagattggaaggagacacagatgttcggtttttttcctgtttctgaaaagaaataataatatccaggtcaacagaatgaaaaatgaaagatgatttgcaatgggatgtatgaatacagcagcaagaaaaaaaaatgccataatacaaaaggctccatatatatatatatatatatatatatacacacacacacacgcacatatacacacacacacacacacacacacacacacacacacacacacacacacacacacaagtaagagactcagcctgcagttaattagcattctggcagttttgacatcagccagctgccctaaataacccttcaacgtttcttcacttttgcaaggttccacagagtaagacattgggtctattccagctcattcattttatattgaaaaaaataattttaaaaatggtggcttcagctccagcccctttccaaaatttttcaaccccaccctgtttggatttttaattaaaaactagtagttctcttggtgttaaaacacttctgtcctgtgaggtttcccaatggtgtttttcttgtaaatgtgttggacaaatgtgaagatgcattgtagtttaaccatatgcccacatttagtctctttattcctagttggtgagaaacctgtatctttctatgctgcttttatatctgtatgtattagtgatatttctctagtagttaaaaaaaaaaaaaggaaaaaaagactctttttggttgtcctcaagaaaagaaaagaagaaaagctatctttcggagctgctatttcactctcttataggatttttttttttcctgaaaaccagcatgcttcacggaatgctaacatattggtgtttttgtaagagggatgtacataaatgtattttgcactgtcacaatgactccctaggcatgctttttgtttttttttttttttttttgagcaaattctttttaaatatgctagagccatttcatcaagtttagctgtagcatagagtagtcgtggaatttttcttttttttttttttaaatcattattagggacttttttaaaaaaataaaataacaagatatcctactttaaaaaaaaaggacagtgcatgcatattgctgtaaggtcgtttaagtatttctaattttacaaaagtaaaaatcattagagctccaaatgctgaggtgtagattgacagctttaacactgctgaatgccaggttatacagtattcttacaaaaagggaagtcagccaaagactgatctgatggaccaaaatcggaattttgaaaagcaccagtactactttccaaatgatcagcaggttaaacatgttcagcaaggtatagtatgaatccattaacccttcgttgtccagggtccagaccagaactacttgttagttttgaaaacagtagcccaggatgtggttgtgtgctttaggaaagtcagcagtgctgcaggctgtgtagacaaccaaagtttacaaggctgggaagacacttctccaaatacatatacaccaggcatttctttaaaatcaaaaacaatccattagctttggggcggggggtggggggagggttaaatgtaggccttggaaacagttttaagtggcttttaagtatctgcatagaggcaatcctaaggtttgctttaagtctcttaaatctaacatttttaaaagcatttcttccctgtattttcatatacaagttggttttaattttgtttgggtggtgttattttttttaaatgactttttagtttagaaagttctgatgagcaaataaatacatctatctacatgttggaagtccatctgccagcacacctgcttaaagtgaaatgaaagcacataaccaggctctgaatgggttatattttatcatggtgctcccagaatcctttgacctcactctgctttctagtctgcttgtgacactggacagtcctttcttacagagctattatatgttctaggctacgaagggttaaataatcccaaaaatgaggtatgtcatacccacacgtctttatctctagaagctgtgatgtatgtgaaacagcactgttattcttaacactagtgtgtaaaataaggattagtacagtacgtctcattactttttaattcagggcaccctgagtgaaaacaaatacaaaaaaaaatccctaactctgagctctatctctgattcctcttcctccttcccctcttcctcctcttcctctcctcctgttttgctacattctcctcagtggcaaaaagtttcactctacctctgacagcatgtatattgcaccagtagctaacaaaaactggtctagtcaaaccaaatgggcacaaaagaaccaggataccaaaagttaagctcatacagctgcaaaccatatcacttcttggtaacaatgcagacctcataaacctaaagaagagaaagaaaagaaaacttttgttactttccttttttgcttgtcacttatatacaggctatgtgagaatataatttgtaggtataacacattaagaaaaagttatcttcattggatagaattgaatggtggtcgctgataggaatagggcgtcctctagctcttatctctgtctcttactcttttctctttctctttttctctgtcatgagactgtgtgtgacagggccacctgtcttttttttttcttaaattttttttttttttatgtgtaggtgcatgtcttggggatttaaaaatttcaaggctggtttacttatgcaaagcatgcctacgtctggaatacttagggaaagaaagcgactccatgttgtccgaattcctcaagggacagaaaaaaaattggagactgttgaaatgcagatttgaagtaatttttttaaaatattattttgggttctgcgacattgtgaaaaattaaagttgttgtgcaatacttaattcagacatgtaccacaagttaatggtagactaacactggggggtggggtctaggcatcatgcttttgtcagcatactcttgagcttttaagtctactatgtctgaactgtggtttcttgtttatccttttttccttagttggactgtaatgtatggtctgtcaacctgtgaatctttaaagtatgattcaggtattgttgtattctttactgtgtaataaaaaagttgaaaaaaatctggatcctctgtctccctcgtccccggtgtgccatggttgcccaccagtgaccccagcctgaggagtccatcctccatggtgctgaatcaaatctgtagagtttattcagctacaaagcgtggctctgtaacaggagttggcttatccatgcgtgttgagtagggaatgatgtcagaactttgcaaaagtcgagctcattcataaggggatgtttctcaggcaggaggagtaggaagagtgggaggagaattactaccttccataggaaaggagagcttggcttgcctagattagctgctgcatagatagcagaggcccttttggctgtgttttgataaaattagaaatgagtacctaaatctggatcactctgctcagagaggttcgtgccaacctcatgaggctctgactcttgtcaggttgcttggctgccttgtgcatacccgaatggcagatcagctgacatgacatggaactgctctatctgccttgtcccctctcctctaattaaaagtcgctaccattgtcactcttggttatgtagttaatatccactgtggctatctccaacttgctgggacatccagttatctcctctgacacatattttttcattctctagttacaaagtttgttagagtttgaaaaacaaacccttctcccctaccctgtgaatgctgttagtttttatgtgtagttttcaaaacacagattatcttatatactgtgttgtagcagaaattcctgtttcctctgaatgttctgactttatagaccaaaataatcgttgcaaaaaatcaaggatggcacagcaggtgcatgagcccgtgtctggagaaaggttatgaaggtgaatgctggttacatgggagggtgacttggagccctctagtttccttcttgtgccagctgggttcctgtttcaaggccaggcttctctaacttgtcttcctgggaaatgtagcttttccaagaatttggtagtgcacaccaggaaaaactaggtatcagaacagatttttttttaaatagtggaaacaccctcactcccacactttggacagttagggttggatatttaatttcatagttactctttttttccacagaagaaaggccagcctgacccaagttgcctatttttaatgtgttactgcatcttattttctcttcaaagtgaaaaaggccagaaactagcagatagaaatggaacccgttgacttagttcccttataagaagttcttgcaaacacctctgtgacgttttcattcaagtggatatgttggacaaataggaaacagttttagtttacgcgaacagtatgagacttccaggtggtggacgccatttttttagaagtgttgatgatgtatttgataacattataaaagtatgtgtctcccgtgaaagaacattgagctatttccctggaatggatggggaagaaatgagcaaaggagtgctgttctgtatgggtgtctatacccttattccaaggtgaataaataaagttgtgtttgcctaatcatg

SEQ ID NO: 18264 - DNA, 7687 bp, Homo sapiens
  source 1..7687: mol_type = unassigned DNA
ccctcctgcctgtccctttctgtcttctctctctctctcccacttttcctccctctcccgctccgtctcacacgcaccctctgtttattttcctgcctccatctgggccctgctgatattgtaatcaccctgatgcacgttggcttctctcctctccctcctgcgctcacacactcactcacacacaatgtgccatcctgacaaggcttttacttctgataagctccaatgtgtgtttaatgaatacaaagccgcggtctgggtgccgcctcggccgcggccgctctcccgcgctcctttgccagaagctggcggagagaatttacatttaaagattagcagagtgagaaagagaaatctgccttttgttgtgtggggtgaggaggaggcatctacccctggccttgacgctatctcccatcacctctgctatccagacaggactcaccgagtatcaaatgataagaactgagcacactggatgaaataatacttgcactgggagcactaagaaaagattgatctctgggctggtgaacataatctctgtcccagtcagaaaaggagagaggaaattagcagagcgattggtggagaatgatatctgtcaaaagaaacacttggagagcactgagtttagtaataggtgactgccggaaaaaagggaactttgaatattgtcaagatcgtactgagaagcactccacaatgccagactcacctgtggatgtgaagacgcaatctaggctgactcctccaacaatgccacctcccccaactactcaaggagctccaagaaccagttcatttacaccgacaacgttaactaatggcacgagccattctcctacagccttgaatggcgccccctcaccacccaatggcttcagcaatgggccttcctcttcttcctcctcctctctggctaatcaacagctgcccccagcctgtggtgccaggcaactcagcaagctgaaaaggttccttactaccctgcagcagtttggcaatgacatttcacccgagataggagaaagagttcgcaccctcgttctgggactagtgaactccactttgacaattgaagaatttcattccaaactgcaagaagctactaacttcccactgagaccttttgtcatcccatttttgaaggccaacttgcccctgctgcagcgtgagctcctccactgcgcaagactggccaaacagaaccctgcccagtacctcgcccagcatgaacagctgcttctggatgccagcaccacctcacctgttgactcctcagagctgcttctcgatgtgaacgaaaacgggaagaggcgaactccagacagaaccaaagaaaatggctttgacagagagcctttgcactcagaacatccaagcaagcgaccatgcactattagcccaggccagcggtacagtccaaataacggcttatcctaccagcccaatggcctgcctcaccctaccccacctccacctcagcattaccgtttggatgatatggccattgcccaccactacagggactcctatcgacaccccagccacagggacctcagggacagaaacagacctatggggttgcatggcacacgtcaagaagaaatgattgatcacagactaacagacagagaatgggcagaagagtggaaacatcttgaccatctgttaaactgcataatggacatggtagaaaaaacaaggcgatctctcaccgtactaaggcggtgtcaagaagcagaccgggaagaattgaattactggatccggcggtacagtgacgccgaggacttaaaaaaaggtggcggcagtagcagcagccactctaggcagcagagtcccgtcaacccagacccagttgcactagacgcgcatcgggaattccttcacaggcctgcgtctggatacgtgccagaggagatctggaagaaagctgaggaggccgtcaatgaggtgaagcgccaggcgatgacggagctgcagaaggccgtgtctgaggcggagcggaaagcccacgacatgatcacaacagagagggccaagatggagcgcacggtcgccgaggccaaacggcaggcggcggaggacgcactggcagttatcaatcagcaggaggattcaagcgagagttgctggaattgtggccgtaaagcgagtgaaacctgcagtggctgtaacacagcccgatactgtggctcattttgccagcacaaagactgggagaagcaccatcacatctgtggacagaccctgcaggcccagcagcagggagacacacctgcagtcagctcctctgtcacgcccaacagcggggctgggagcccgatggacacaccaccagcagccactccgaggtcaaccaccccgggaaccccttccaccatagagacaacccctcgctagacgtgaactcagaactgtcggaggaaagacaacacaaccaacgcgaaaccaattcctcatcctcagatgctcaaagttgttttttttgtttgtttgtttattagatgaattatcctatttcagtacttcagcaagagagaacctaactgtatcttgaggtggtagtaaaacacagagggccagtaacgggtcgtaatgacttattgtggataacaaagatatcttttctttagagaactgaaaagagagcagagaatataacatgaaatgatagatttgacctcctccctgttattttcaagtagctgggattttaaactagatgacctcattaaccgatgctttaccaaacagcaaaccaagagattgctaattgctgttgaaagcaaaaatgctaatattaaaagtcacaatgttctttatatacaataatggaaaaaaaaaaaagaggaaaaccctcaagggcatgagcattggatacagcagtagacattttaacaagaagatgaatggcgtccgtgggttgctaactgaactttgaagacccgctacaaaacgcgcagatgtgcagcagattggaaggagacacagatgttcggtttttttcctgtttctgaaaagaaataataatatccaggtcaacagaatgaaaaatgaaagatgatttgcaatgggatgtatgaatacagcagcaagaaaaaaaaatgccataatacaaaaggctccatatatatatatatatatatatatatacacacacacacacgcacatatacacacacacacacacacacacacacacacacacacacacacacacacacacacaagtaagagactcagcctgcagttaattagcattctggcagttttgacatcagccagctgccctaaataacccttcaacgtttcttcacttttgcaaggttccacagagtaagacattgggtctattccagctcattcattttatattgaaaaaaataattttaaaaatggtggcttcagctccagcccctttccaaaatttttcaaccccaccctgtttggatttttaattaaaaactagtagttctcttggtgttaaaacacttctgtcctgtgaggtttcccaatggtgtttttcttgtaaatgtgttggacaaatgtgaagatgcattgtagtttaaccatatgcccacatttagtctctttattcctagttggtgagaaacctgtatctttctatgctgcttttatatctgtatgtattagtgatatttctctagtagttaaaaaaaaaaaaaggaaaaaaagactctttttggttgtcctcaagaaaagaaaagaagaaaagctatctttcggagctgctatttcactctcttataggatttttttttttcctgaaaaccagcatgcttcacggaatgctaacatattggtgtttttgtaagagggatgtacataaatgtattttgcactgtcacaatgactccctaggcatgctttttgtttttttttttttttttttgagcaaattctttttaaatatgctagagccatttcatcaagtttagctgtagcatagagtagtcgtggaatttttcttttttttttttttaaatcattattagggacttttttaaaaaaataaaataacaagatatcctactttaaaaaaaaaggacagtgcatgcatattgctgtaaggtcgtttaagtatttctaattttacaaaagtaaaaatcattagagctccaaatgctgaggtgtagattgacagctttaacactgctgaatgccaggttatacagtattcttacaaaaagggaagtcagccaaagactgatctgatggaccaaaatcggaattttgaaaagcaccagtactactttccaaatgatcagcaggttaaacatgttcagcaaggtatagtatgaatccattaacccttcgttgtccagggtccagaccagaactacttgttagttttgaaaacagtagcccaggatgtggttgtgtgctttaggaaagtcagcagtgctgcaggctgtgtagacaaccaaagtttacaaggctgggaagacacttctccaaatacatatacaccaggcatttctttaaaatcaaaaacaatccattagctttggggcggggggtggggggagggttaaatgtaggccttggaaacagttttaagtggcttttaagtatctgcatagaggcaatcctaaggtttgctttaagtctcttaaatctaacatttttaaaagcatttcttccctgtattttcatatacaagttggttttaattttgtttgggtggtgttattttttttaaatgactttttagtttagaaagttctgatgagcaaataaatacatctatctacatgttggaagtccatctgccagcacacctgcttaaagtgaaatgaaagcacataaccaggctctgaatgggttatattttatcatggtgctcccagaatcctttgacctcactctgctttctagtctgcttgtgacactggacagtcctttcttacagagctattatatgttctaggctacgaagggttaaataatcccaaaaatgaggtatgtcatacccacacgtctttatctctagaagctgtgatgtatgtgaaacagcactgttattcttaacactagtgtgtaaaataaggattagtacagtacgtctcattactttttaattcagggcaccctgagtgaaaacaaatacaaaaaaaaatccctaactctgagctctatctctgattcctcttcctccttcccctcttcctcctcttcctctcctcctgttttgctacattctcctcagtggcaaaaagtttcactctacctctgacagcatgtatattgcaccagtagctaacaaaaactggtctagtcaaaccaaatgggcacaaaagaaccaggataccaaaagttaagctcatacagctgcaaaccatatcacttcttggtaacaatgcagacctcataaacctaaagaagagaaagaaaagaaaacttttgttactttccttttttgcttgtcacttatatacaggctatgtgagaatataatttgtaggtataacacattaagaaaaagttatcttcattggatagaattgaatggtggtcgctgataggaatagggcgtcctctagctcttatctctgtctcttactcttttctctttctctttttctctgtcatgagactgtgtgtgacagggccacctgtcttttttttttcttaaattttttttttttttatgtgtaggtgcatgtcttggggatttaaaaatttcaaggctggtttacttatgcaaagcatgcctacgtctggaatacttagggaaagaaagcgactccatgttgtccgaattcctcaagggacagaaaaaaaattggagactgttgaaatgcagatttgaagtaatttttttaaaatattattttgggttctgcgacattgtgaaaaattaaagttgttgtgcaatacttaattcagacatgtaccacaagttaatggtagactaacactggggggtggggtctaggcatcatgcttttgtcagcatactcttgagcttttaagtctactatgtctgaactgtggtttcttgtttatccttttttccttagttggactgtaatgtatggtctgtcaacctgtgaatctttaaagtatgattcaggtattgttgtattctttactgtgtaataaaaaagttgaaaaaaatctggatcctctgtctccctcgtccccggtgtgccatggttgcccaccagtgaccccagcctgaggagtccatcctccatggtgctgaatcaaatctgtagagtttattcagctacaaagcgtggctctgtaacaggagttggcttatccatgcgtgttgagtagggaatgatgtcagaactttgcaaaagtcgagctcattcataaggggatgtttctcaggcaggaggagtaggaagagtgggaggagaattactaccttccataggaaaggagagcttggcttgcctagattagctgctgcatagatagcagaggcccttttggctgtgttttgataaaattagaaatgagtacctaaatctggatcactctgctcagagaggttcgtgccaacctcatgaggctctgactcttgtcaggttgcttggctgccttgtgcatacccgaatggcagatcagctgacatgacatggaactgctctatctgccttgtcccctctcctctaattaaaagtcgctaccattgtcactcttggttatgtagttaatatccactgtggctatctccaacttgctgggacatccagttatctcctctgacacatattttttcattctctagttacaaagtttgttagagtttgaaaaacaaacccttctcccctaccctgtgaatgctgttagtttttatgtgtagttttcaaaacacagattatcttatatactgtgttgtagcagaaattcctgtttcctctgaatgttctgactttatagaccaaaataatcgttgcaaaaaatcaaggatggcacagcaggtgcatgagcccgtgtctggagaaaggttatgaaggtgaatgctggttacatgggagggtgacttggagccctctagtttccttcttgtgccagctgggttcctgtttcaaggccaggcttctctaacttgtcttcctgggaaatgtagcttttccaagaatttggtagtgcacaccaggaaaaactaggtatcagaacagatttttttttaaatagtggaaacaccctcactcccacactttggacagttagggttggatatttaatttcatagttactctttttttccacagaagaaaggccagcctgacccaagttgcctatttttaatgtgttactgcatcttattttctcttcaaagtgaaaaaggccagaaactagcagatagaaatggaacccgttgacttagttcccttataagaagttcttgcaaacacctctgtgacgttttcattcaagtggatatgttggacaaataggaaacagttttagtttacgcgaacagtatgagacttccaggtggtggacgccatttttttagaagtgttgatgatgtatttgataacattataaaagtatgtgtctcccgtgaaagaacattgagctatttccctggaatggatggggaagaaatgagcaaaggagtgctgttctgtatgggtgtctatacccttattccaaggtgaataaataaagttgtgtttgcctaatcatg

SEQ ID NO: 18265 - DNA, 7372 bp, Homo sapiens
  source 1..7372: mol_type = unassigned DNA
atcacatttgtctgccacagcagcaacaacagaaaagcggagggagggagggaggcgggaggaggggagcagagctccgcaagtcttgggctctgcgtggaggttgcgtttggctggcgtccccgaccccgggctttttgcacggcagctctctctgcgcagcgccgggcggccgtagtcgctccgcggcgcgactccgcggtctcgtggcgagcgcgcgtgggcgagtggccgcggacactctggcctcgcgagggaagccgcgccgcgtcctcgccccgtcgccccgcgggccggccgagacgacgggaagttttatttgcagctcggagcctgtggcggatggtgggactctccggccctgtgcagtatcgtactgagaagcactccacaatgccagactcacctgtggatgtgaagacgcaatctaggctgactcctccaacaatgccacctcccccaactactcaaggagctccaagaaccagttcatttacaccgacaacgttaactaatggcacgagccattctcctacagccttgaatggcgccccctcaccacccaatggcttcagcaatgggccttcctcttcttcctcctcctctctggctaatcaacagctgcccccagcctgtggtgccaggcaactcagcaagctgaaaaggttccttactaccctgcagcagtttggcaatgacatttcacccgagataggagaaagagttcgcaccctcgttctgggactagtgaactccactttgacaattgaagaatttcattccaaactgcaagaagctactaacttcccactgagaccttttgtcatcccatttttgaaggccaacttgcccctgctgcagcgtgagctcctccactgcgcaagactggccaaacagaaccctgcccagtacctcgcccagcatgaacagctgcttctggatgccagcaccacctcacctgttgactcctcagagctgcttctcgatgtgaacgaaaacgggaagaggcgaactccagacagaaccaaagaaaatggctttgacagagagcctttgcactcagaacatccaagcaagcgaccatgcactattagcccaggccagcggtacagtccaaataacggcttatcctaccagcccaatggcctgcctcaccctaccccacctccacctcagcattaccgtttggatgatatggccattgcccaccactacagggactcctatcgacaccccagccacagggacctcagggacagaaacagacctatggggttgcatggcacacgtcaagaagaaatgattgatcacagactaacagacagagaatgggcagaagagtggaaacatcttgaccatctgttaaactgcataatggacatggtagaaaaaacaaggcgatctctcaccgtactaaggcggtgtcaagaagcagaccgggaagaattgaattactggatccggcggtacagtgacgccgaggacttaaaaaaaggtggcggcagtagcagcagccactctaggcagcagagtcccgtcaacccagacccagttgcactagacgcgcatcgggaattccttcacaggcctgcgtctggatacgtgccagaggagatctggaagaaagctgaggaggccgtcaatgaggtgaagcgccaggcgatgacggagctgcagaaggccgtgtctgaggcggagcggaaagcccacgacatgatcacaacagagagggccaagatggagcgcacggtcgccgaggccaaacggcaggcggcggaggacgcactggcagttatcaatcagcaggaggattcaagcgagagttgctggaattgtggccgtaaagcgagtgaaacctgcagtggctgtaacacagcccgatactgtggctcattttgccagcacaaagactgggagaagcaccatcacatctgtggacagaccctgcaggcccagcagcagggagacacacctgcagtcagctcctctgtcacgcccaacagcggggctgggagcccgatggacacaccaccagcagccactccgaggtcaaccaccccgggaaccccttccaccatagagacaacccctcgctagacgtgaactcagaactgtcggaggaaagacaacacaaccaacgcgaaaccaattcctcatcctcagatgctcaaagttgttttttttgtttgtttgtttattagatgaattatcctatttcagtacttcagcaagagagaacctaactgtatcttgaggtggtagtaaaacacagagggccagtaacgggtcgtaatgacttattgtggataacaaagatatcttttctttagagaactgaaaagagagcagagaatataacatgaaatgatagatttgacctcctccctgttattttcaagtagctgggattttaaactagatgacctcattaaccgatgctttaccaaacagcaaaccaagagattgctaattgctgttgaaagcaaaaatgctaatattaaaagtcacaatgttctttatatacaataatggaaaaaaaaaaaagaggaaaaccctcaagggcatgagcattggatacagcagtagacattttaacaagaagatgaatggcgtccgtgggttgctaactgaactttgaagacccgctacaaaacgcgcagatgtgcagcagattggaaggagacacagatgttcggtttttttcctgtttctgaaaagaaataataatatccaggtcaacagaatgaaaaatgaaagatgatttgcaatgggatgtatgaatacagcagcaagaaaaaaaaatgccataatacaaaaggctccatatatatatatatatatatatatatacacacacacacacgcacatatacacacacacacacacacacacacacacacacacacacacacacacacacacacaagtaagagactcagcctgcagttaattagcattctggcagttttgacatcagccagctgccctaaataacccttcaacgtttcttcacttttgcaaggttccacagagtaagacattgggtctattccagctcattcattttatattgaaaaaaataattttaaaaatggtggcttcagctccagcccctttccaaaatttttcaaccccaccctgtttggatttttaattaaaaactagtagttctcttggtgttaaaacacttctgtcctgtgaggtttcccaatggtgtttttcttgtaaatgtgttggacaaatgtgaagatgcattgtagtttaaccatatgcccacatttagtctctttattcctagttggtgagaaacctgtatctttctatgctgcttttatatctgtatgtattagtgatatttctctagtagttaaaaaaaaaaaaaggaaaaaaagactctttttggttgtcctcaagaaaagaaaagaagaaaagctatctttcggagctgctatttcactctcttataggatttttttttttcctgaaaaccagcatgcttcacggaatgctaacatattggtgtttttgtaagagggatgtacataaatgtattttgcactgtcacaatgactccctaggcatgctttttgtttttttttttttttttttgagcaaattctttttaaatatgctagagccatttcatcaagtttagctgtagcatagagtagtcgtggaatttttcttttttttttttttaaatcattattagggacttttttaaaaaaataaaataacaagatatcctactttaaaaaaaaaggacagtgcatgcatattgctgtaaggtcgtttaagtatttctaattttacaaaagtaaaaatcattagagctccaaatgctgaggtgtagattgacagctttaacactgctgaatgccaggttatacagtattcttacaaaaagggaagtcagccaaagactgatctgatggaccaaaatcggaattttgaaaagcaccagtactactttccaaatgatcagcaggttaaacatgttcagcaaggtatagtatgaatccattaacccttcgttgtccagggtccagaccagaactacttgttagttttgaaaacagtagcccaggatgtggttgtgtgctttaggaaagtcagcagtgctgcaggctgtgtagacaaccaaagtttacaaggctgggaagacacttctccaaatacatatacaccaggcatttctttaaaatcaaaaacaatccattagctttggggcggggggtggggggagggttaaatgtaggccttggaaacagttttaagtggcttttaagtatctgcatagaggcaatcctaaggtttgctttaagtctcttaaatctaacatttttaaaagcatttcttccctgtattttcatatacaagttggttttaattttgtttgggtggtgttattttttttaaatgactttttagtttagaaagttctgatgagcaaataaatacatctatctacatgttggaagtccatctgccagcacacctgcttaaagtgaaatgaaagcacataaccaggctctgaatgggttatattttatcatggtgctcccagaatcctttgacctcactctgctttctagtctgcttgtgacactggacagtcctttcttacagagctattatatgttctaggctacgaagggttaaataatcccaaaaatgaggtatgtcatacccacacgtctttatctctagaagctgtgatgtatgtgaaacagcactgttattcttaacactagtgtgtaaaataaggattagtacagtacgtctcattactttttaattcagggcaccctgagtgaaaacaaatacaaaaaaaaatccctaactctgagctctatctctgattcctcttcctccttcccctcttcctcctcttcctctcctcctgttttgctacattctcctcagtggcaaaaagtttcactctacctctgacagcatgtatattgcaccagtagctaacaaaaactggtctagtcaaaccaaatgggcacaaaagaaccaggataccaaaagttaagctcatacagctgcaaaccatatcacttcttggtaacaatgcagacctcataaacctaaagaagagaaagaaaagaaaacttttgttactttccttttttgcttgtcacttatatacaggctatgtgagaatataatttgtaggtataacacattaagaaaaagttatcttcattggatagaattgaatggtggtcgctgataggaatagggcgtcctctagctcttatctctgtctcttactcttttctctttctctttttctctgtcatgagactgtgtgtgacagggccacctgtcttttttttttcttaaattttttttttttttatgtgtaggtgcatgtcttggggatttaaaaatttcaaggctggtttacttatgcaaagcatgcctacgtctggaatacttagggaaagaaagcgactccatgttgtccgaattcctcaagggacagaaaaaaaattggagactgttgaaatgcagatttgaagtaatttttttaaaatattattttgggttctgcgacattgtgaaaaattaaagttgttgtgcaatacttaattcagacatgtaccacaagttaatggtagactaacactggggggtggggtctaggcatcatgcttttgtcagcatactcttgagcttttaagtctactatgtctgaactgtggtttcttgtttatccttttttccttagttggactgtaatgtatggtctgtcaacctgtgaatctttaaagtatgattcaggtattgttgtattctttactgtgtaataaaaaagttgaaaaaaatctggatcctctgtctccctcgtccccggtgtgccatggttgcccaccagtgaccccagcctgaggagtccatcctccatggtgctgaatcaaatctgtagagtttattcagctacaaagcgtggctctgtaacaggagttggcttatccatgcgtgttgagtagggaatgatgtcagaactttgcaaaagtcgagctcattcataaggggatgtttctcaggcaggaggagtaggaagagtgggaggagaattactaccttccataggaaaggagagcttggcttgcctagattagctgctgcatagatagcagaggcccttttggctgtgttttgataaaattagaaatgagtacctaaatctggatcactctgctcagagaggttcgtgccaacctcatgaggctctgactcttgtcaggttgcttggctgccttgtgcatacccgaatggcagatcagctgacatgacatggaactgctctatctgccttgtcccctctcctctaattaaaagtcgctaccattgtcactcttggttatgtagttaatatccactgtggctatctccaacttgctgggacatccagttatctcctctgacacatattttttcattctctagttacaaagtttgttagagtttgaaaaacaaacccttctcccctaccctgtgaatgctgttagtttttatgtgtagttttcaaaacacagattatcttatatactgtgttgtagcagaaattcctgtttcctctgaatgttctgactttatagaccaaaataatcgttgcaaaaaatcaaggatggcacagcaggtgcatgagcccgtgtctggagaaaggttatgaaggtgaatgctggttacatgggagggtgacttggagccctctagtttccttcttgtgccagctgggttcctgtttcaaggccaggcttctctaacttgtcttcctgggaaatgtagcttttccaagaatttggtagtgcacaccaggaaaaactaggtatcagaacagatttttttttaaatagtggaaacaccctcactcccacactttggacagttagggttggatatttaatttcatagttactctttttttccacagaagaaaggccagcctgacccaagttgcctatttttaatgtgttactgcatcttattttctcttcaaagtgaaaaaggccagaaactagcagatagaaatggaacccgttgacttagttcccttataagaagttcttgcaaacacctctgtgacgttttcattcaagtggatatgttggacaaataggaaacagttttagtttacgcgaacagtatgagacttccaggtggtggacgccatttttttagaagtgttgatgatgtatttgataacattataaaagtatgtgtctcccgtgaaagaacattgagctatttccctggaatggatggggaagaaatgagcaaaggagtgctgttctgtatgggtgtctatacccttattccaaggtgaataaataaagttgtgtttgcctaatcatg

SEQ ID NO: 18266 - DNA, 7454 bp, Homo sapiens
  source 1..7454: mol_type = unassigned DNA
ccctcctgcctgtccctttctgtcttctctctctctctcccacttttcctccctctcccgctccgtctcacacgcaccctctgtttattttcctgcctccatctgggccctgctgatattgtaatcaccctgatgcacgttggcttctctcctctccctcctgcgctcacacactcactcacacacaatgtgccatcctgacaaggcttttacttctgataagctccaatgtgtgtttaatgaatacaaagccgcggtctgggtgccgcctcggccgcggccgctctcccgcgctcctttgccagaagctggcggagagaatttacatttaaagattagcagagtgagaaagagaaatctgccttttgttgtgtggggtgaggaggaggcatctacccctggccttgacgctatctcccatcacctctgctatccagacaggactcaccgagatcgtactgagaagcactccacaatgccagactcacctgtggatgtgaagacgcaatctaggctgactcctccaacaatgccacctcccccaactactcaaggagctccaagaaccagttcatttacaccgacaacgttaactaatggcacgagccattctcctacagccttgaatggcgccccctcaccacccaatggcttcagcaatgggccttcctcttcttcctcctcctctctggctaatcaacagctgcccccagcctgtggtgccaggcaactcagcaagctgaaaaggttccttactaccctgcagcagtttggcaatgacatttcacccgagataggagaaagagttcgcaccctcgttctgggactagtgaactccactttgacaattgaagaatttcattccaaactgcaagaagctactaacttcccactgagaccttttgtcatcccatttttgaaggccaacttgcccctgctgcagcgtgagctcctccactgcgcaagactggccaaacagaaccctgcccagtacctcgcccagcatgaacagctgcttctggatgccagcaccacctcacctgttgactcctcagagctgcttctcgatgtgaacgaaaacgggaagaggcgaactccagacagaaccaaagaaaatggctttgacagagagcctttgcactcagaacatccaagcaagcgaccatgcactattagcccaggccagcggtacagtccaaataacggcttatcctaccagcccaatggcctgcctcaccctaccccacctccacctcagcattaccgtttggatgatatggccattgcccaccactacagggactcctatcgacaccccagccacagggacctcagggacagaaacagacctatggggttgcatggcacacgtcaagaagaaatgattgatcacagactaacagacagagaatgggcagaagagtggaaacatcttgaccatctgttaaactgcataatggacatggtagaaaaaacaaggcgatctctcaccgtactaaggcggtgtcaagaagcagaccgggaagaattgaattactggatccggcggtacagtgacgccgaggacttaaaaaaaggtggcggcagtagcagcagccactctaggcagcagagtcccgtcaacccagacccagttgcactagacgcgcatcgggaattccttcacaggcctgcgtctggatacgtgccagaggagatctggaagaaagctgaggaggccgtcaatgaggtgaagcgccaggcgatgacggagctgcagaaggccgtgtctgaggcggagcggaaagcccacgacatgatcacaacagagagggccaagatggagcgcacggtcgccgaggccaaacggcaggcggcggaggacgcactggcagttatcaatcagcaggaggattcaagcgagagttgctggaattgtggccgtaaagcgagtgaaacctgcagtggctgtaacacagcccgatactgtggctcattttgccagcacaaagactgggagaagcaccatcacatctgtggacagaccctgcaggcccagcagcagggagacacacctgcagtcagctcctctgtcacgcccaacagcggggctgggagcccgatggacacaccaccagcagccactccgaggtcaaccaccccgggaaccccttccaccatagagacaacccctcgctagacgtgaactcagaactgtcggaggaaagacaacacaaccaacgcgaaaccaattcctcatcctcagatgctcaaagttgttttttttgtttgtttgtttattagatgaattatcctatttcagtacttcagcaagagagaacctaactgtatcttgaggtggtagtaaaacacagagggccagtaacgggtcgtaatgacttattgtggataacaaagatatcttttctttagagaactgaaaagagagcagagaatataacatgaaatgatagatttgacctcctccctgttattttcaagtagctgggattttaaactagatgacctcattaaccgatgctttaccaaacagcaaaccaagagattgctaattgctgttgaaagcaaaaatgctaatattaaaagtcacaatgttctttatatacaataatggaaaaaaaaaaaagaggaaaaccctcaagggcatgagcattggatacagcagtagacattttaacaagaagatgaatggcgtccgtgggttgctaactgaactttgaagacccgctacaaaacgcgcagatgtgcagcagattggaaggagacacagatgttcggtttttttcctgtttctgaaaagaaataataatatccaggtcaacagaatgaaaaatgaaagatgatttgcaatgggatgtatgaatacagcagcaagaaaaaaaaatgccataatacaaaaggctccatatatatatatatatatatatatatacacacacacacacgcacatatacacacacacacacacacacacacacacacacacacacacacacacacacacacaagtaagagactcagcctgcagttaattagcattctggcagttttgacatcagccagctgccctaaataacccttcaacgtttcttcacttttgcaaggttccacagagtaagacattgggtctattccagctcattcattttatattgaaaaaaataattttaaaaatggtggcttcagctccagcccctttccaaaatttttcaaccccaccctgtttggatttttaattaaaaactagtagttctcttggtgttaaaacacttctgtcctgtgaggtttcccaatggtgtttttcttgtaaatgtgttggacaaatgtgaagatgcattgtagtttaaccatatgcccacatttagtctctttattcctagttggtgagaaacctgtatctttctatgctgcttttatatctgtatgtattagtgatatttctctagtagttaaaaaaaaaaaaaggaaaaaaagactctttttggttgtcctcaagaaaagaaaagaagaaaagctatctttcggagctgctatttcactctcttataggatttttttttttcctgaaaaccagcatgcttcacggaatgctaacatattggtgtttttgtaagagggatgtacataaatgtattttgcactgtcacaatgactccctaggcatgctttttgtttttttttttttttttttgagcaaattctttttaaatatgctagagccatttcatcaagtttagctgtagcatagagtagtcgtggaatttttcttttttttttttttaaatcattattagggacttttttaaaaaaataaaataacaagatatcctactttaaaaaaaaaggacagtgcatgcatattgctgtaaggtcgtttaagtatttctaattttacaaaagtaaaaatcattagagctccaaatgctgaggtgtagattgacagctttaacactgctgaatgccaggttatacagtattcttacaaaaagggaagtcagccaaagactgatctgatggaccaaaatcggaattttgaaaagcaccagtactactttccaaatgatcagcaggttaaacatgttcagcaaggtatagtatgaatccattaacccttcgttgtccagggtccagaccagaactacttgttagttttgaaaacagtagcccaggatgtggttgtgtgctttaggaaagtcagcagtgctgcaggctgtgtagacaaccaaagtttacaaggctgggaagacacttctccaaatacatatacaccaggcatttctttaaaatcaaaaacaatccattagctttggggcggggggtggggggagggttaaatgtaggccttggaaacagttttaagtggcttttaagtatctgcatagaggcaatcctaaggtttgctttaagtctcttaaatctaacatttttaaaagcatttcttccctgtattttcatatacaagttggttttaattttgtttgggtggtgttattttttttaaatgactttttagtttagaaagttctgatgagcaaataaatacatctatctacatgttggaagtccatctgccagcacacctgcttaaagtgaaatgaaagcacataaccaggctctgaatgggttatattttatcatggtgctcccagaatcctttgacctcactctgctttctagtctgcttgtgacactggacagtcctttcttacagagctattatatgttctaggctacgaagggttaaataatcccaaaaatgaggtatgtcatacccacacgtctttatctctagaagctgtgatgtatgtgaaacagcactgttattcttaacactagtgtgtaaaataaggattagtacagtacgtctcattactttttaattcagggcaccctgagtgaaaacaaatacaaaaaaaaatccctaactctgagctctatctctgattcctcttcctccttcccctcttcctcctcttcctctcctcctgttttgctacattctcctcagtggcaaaaagtttcactctacctctgacagcatgtatattgcaccagtagctaacaaaaactggtctagtcaaaccaaatgggcacaaaagaaccaggataccaaaagttaagctcatacagctgcaaaccatatcacttcttggtaacaatgcagacctcataaacctaaagaagagaaagaaaagaaaacttttgttactttccttttttgcttgtcacttatatacaggctatgtgagaatataatttgtaggtataacacattaagaaaaagttatcttcattggatagaattgaatggtggtcgctgataggaatagggcgtcctctagctcttatctctgtctcttactcttttctctttctctttttctctgtcatgagactgtgtgtgacagggccacctgtcttttttttttcttaaattttttttttttttatgtgtaggtgcatgtcttggggatttaaaaatttcaaggctggtttacttatgcaaagcatgcctacgtctggaatacttagggaaagaaagcgactccatgttgtccgaattcctcaagggacagaaaaaaaattggagactgttgaaatgcagatttgaagtaatttttttaaaatattattttgggttctgcgacattgtgaaaaattaaagttgttgtgcaatacttaattcagacatgtaccacaagttaatggtagactaacactggggggtggggtctaggcatcatgcttttgtcagcatactcttgagcttttaagtctactatgtctgaactgtggtttcttgtttatccttttttccttagttggactgtaatgtatggtctgtcaacctgtgaatctttaaagtatgattcaggtattgttgtattctttactgtgtaataaaaaagttgaaaaaaatctggatcctctgtctccctcgtccccggtgtgccatggttgcccaccagtgaccccagcctgaggagtccatcctccatggtgctgaatcaaatctgtagagtttattcagctacaaagcgtggctctgtaacaggagttggcttatccatgcgtgttgagtagggaatgatgtcagaactttgcaaaagtcgagctcattcataaggggatgtttctcaggcaggaggagtaggaagagtgggaggagaattactaccttccataggaaaggagagcttggcttgcctagattagctgctgcatagatagcagaggcccttttggctgtgttttgataaaattagaaatgagtacctaaatctggatcactctgctcagagaggttcgtgccaacctcatgaggctctgactcttgtcaggttgcttggctgccttgtgcatacccgaatggcagatcagctgacatgacatggaactgctctatctgccttgtcccctctcctctaattaaaagtcgctaccattgtcactcttggttatgtagttaatatccactgtggctatctccaacttgctgggacatccagttatctcctctgacacatattttttcattctctagttacaaagtttgttagagtttgaaaaacaaacccttctcccctaccctgtgaatgctgttagtttttatgtgtagttttcaaaacacagattatcttatatactgtgttgtagcagaaattcctgtttcctctgaatgttctgactttatagaccaaaataatcgttgcaaaaaatcaaggatggcacagcaggtgcatgagcccgtgtctggagaaaggttatgaaggtgaatgctggttacatgggagggtgacttggagccctctagtttccttcttgtgccagctgggttcctgtttcaaggccaggcttctctaacttgtcttcctgggaaatgtagcttttccaagaatttggtagtgcacaccaggaaaaactaggtatcagaacagatttttttttaaatagtggaaacaccctcactcccacactttggacagttagggttggatatttaatttcatagttactctttttttccacagaagaaaggccagcctgacccaagttgcctatttttaatgtgttactgcatcttattttctcttcaaagtgaaaaaggccagaaactagcagatagaaatggaacccgttgacttagttcccttataagaagttcttgcaaacacctctgtgacgttttcattcaagtggatatgttggacaaataggaaacagttttagtttacgcgaacagtatgagacttccaggtggtggacgccatttttttagaagtgttgatgatgtatttgataacattataaaagtatgtgtctcccgtgaaagaacattgagctatttccctggaatggatggggaagaaatgagcaaaggagtgctgttctgtatgggtgtctatacccttattccaaggtgaataaataaagttgtgtttgcctaatcatg

SEQ ID NO: 18267 - DNA, 7483 bp, Homo sapiens
  source 1..7483: mol_type = unassigned DNA
ccctcctgcctgtccctttctgtcttctctctctctctcccacttttcctccctctcccgctccgtctcacacgcaccctctgtttattttcctgcctccatctgggccctgctgatattgtaatcaccctgatgcacgttggcttctctcctctccctcctgcgctcacacactcactcacacacaatgtgccatcctgacaaggcttttacttctgataagctccaatgtgtgtttaatgaatacaaagccgcggtctgggtgccgcctcggccgcggccgctctcccgcgctcctttgccagaagaaaagattgatctctgggctggtgaacataatctctgtcccagtcagaaaaggagagaggaaattagcagagcgattggtggagaatgatatctgtcaaaagaaacacttggagagcactgagtttagtaataggtgactgccggaaaaaagggaactttgaatattgtcaagatcgtactgagaagcactccacaatgccagactcacctgtggatgtgaagacgcaatctaggctgactcctccaacaatgccacctcccccaactactcaaggagctccaagaaccagttcatttacaccgacaacgttaactaatggcacgagccattctcctacagccttgaatggcgccccctcaccacccaatggcttcagcaatgggccttcctcttcttcctcctcctctctggctaatcaacagctgcccccagcctgtggtgccaggcaactcagcaagctgaaaaggttccttactaccctgcagcagtttggcaatgacatttcacccgagataggagaaagagttcgcaccctcgttctgggactagtgaactccactttgacaattgaagaatttcattccaaactgcaagaagctactaacttcccactgagaccttttgtcatcccatttttgaaggccaacttgcccctgctgcagcgtgagctcctccactgcgcaagactggccaaacagaaccctgcccagtacctcgcccagcatgaacagctgcttctggatgccagcaccacctcacctgttgactcctcagagctgcttctcgatgtgaacgaaaacgggaagaggcgaactccagacagaaccaaagaaaatggctttgacagagagcctttgcactcagaacatccaagcaagcgaccatgcactattagcccaggccagcggtacagtccaaataacggcttatcctaccagcccaatggcctgcctcaccctaccccacctccacctcagcattaccgtttggatgatatggccattgcccaccactacagggactcctatcgacaccccagccacagggacctcagggacagaaacagacctatggggttgcatggcacacgtcaagaagaaatgattgatcacagactaacagacagagaatgggcagaagagtggaaacatcttgaccatctgttaaactgcataatggacatggtagaaaaaacaaggcgatctctcaccgtactaaggcggtgtcaagaagcagaccgggaagaattgaattactggatccggcggtacagtgacgccgaggacttaaaaaaaggtggcggcagtagcagcagccactctaggcagcagagtcccgtcaacccagacccagttgcactagacgcgcatcgggaattccttcacaggcctgcgtctggatacgtgccagaggagatctggaagaaagctgaggaggccgtcaatgaggtgaagcgccaggcgatgacggagctgcagaaggccgtgtctgaggcggagcggaaagcccacgacatgatcacaacagagagggccaagatggagcgcacggtcgccgaggccaaacggcaggcggcggaggacgcactggcagttatcaatcagcaggaggattcaagcgagagttgctggaattgtggccgtaaagcgagtgaaacctgcagtggctgtaacacagcccgatactgtggctcattttgccagcacaaagactgggagaagcaccatcacatctgtggacagaccctgcaggcccagcagcagggagacacacctgcagtcagctcctctgtcacgcccaacagcggggctgggagcccgatggacacaccaccagcagccactccgaggtcaaccaccccgggaaccccttccaccatagagacaacccctcgctagacgtgaactcagaactgtcggaggaaagacaacacaaccaacgcgaaaccaattcctcatcctcagatgctcaaagttgttttttttgtttgtttgtttattagatgaattatcctatttcagtacttcagcaagagagaacctaactgtatcttgaggtggtagtaaaacacagagggccagtaacgggtcgtaatgacttattgtggataacaaagatatcttttctttagagaactgaaaagagagcagagaatataacatgaaatgatagatttgacctcctccctgttattttcaagtagctgggattttaaactagatgacctcattaaccgatgctttaccaaacagcaaaccaagagattgctaattgctgttgaaagcaaaaatgctaatattaaaagtcacaatgttctttatatacaataatggaaaaaaaaaaaagaggaaaaccctcaagggcatgagcattggatacagcagtagacattttaacaagaagatgaatggcgtccgtgggttgctaactgaactttgaagacccgctacaaaacgcgcagatgtgcagcagattggaaggagacacagatgttcggtttttttcctgtttctgaaaagaaataataatatccaggtcaacagaatgaaaaatgaaagatgatttgcaatgggatgtatgaatacagcagcaagaaaaaaaaatgccataatacaaaaggctccatatatatatatatatatatatatatacacacacacacacgcacatatacacacacacacacacacacacacacacacacacacacacacacacacacacacaagtaagagactcagcctgcagttaattagcattctggcagttttgacatcagccagctgccctaaataacccttcaacgtttcttcacttttgcaaggttccacagagtaagacattgggtctattccagctcattcattttatattgaaaaaaataattttaaaaatggtggcttcagctccagcccctttccaaaatttttcaaccccaccctgtttggatttttaattaaaaactagtagttctcttggtgttaaaacacttctgtcctgtgaggtttcccaatggtgtttttcttgtaaatgtgttggacaaatgtgaagatgcattgtagtttaaccatatgcccacatttagtctctttattcctagttggtgagaaacctgtatctttctatgctgcttttatatctgtatgtattagtgatatttctctagtagttaaaaaaaaaaaaaggaaaaaaagactctttttggttgtcctcaagaaaagaaaagaagaaaagctatctttcggagctgctatttcactctcttataggatttttttttttcctgaaaaccagcatgcttcacggaatgctaacatattggtgtttttgtaagagggatgtacataaatgtattttgcactgtcacaatgactccctaggcatgctttttgtttttttttttttttttttgagcaaattctttttaaatatgctagagccatttcatcaagtttagctgtagcatagagtagtcgtggaatttttcttttttttttttttaaatcattattagggacttttttaaaaaaataaaataacaagatatcctactttaaaaaaaaaggacagtgcatgcatattgctgtaaggtcgtttaagtatttctaattttacaaaagtaaaaatcattagagctccaaatgctgaggtgtagattgacagctttaacactgctgaatgccaggttatacagtattcttacaaaaagggaagtcagccaaagactgatctgatggaccaaaatcggaattttgaaaagcaccagtactactttccaaatgatcagcaggttaaacatgttcagcaaggtatagtatgaatccattaacccttcgttgtccagggtccagaccagaactacttgttagttttgaaaacagtagcccaggatgtggttgtgtgctttaggaaagtcagcagtgctgcaggctgtgtagacaaccaaagtttacaaggctgggaagacacttctccaaatacatatacaccaggcatttctttaaaatcaaaaacaatccattagctttggggcggggggtggggggagggttaaatgtaggccttggaaacagttttaagtggcttttaagtatctgcatagaggcaatcctaaggtttgctttaagtctcttaaatctaacatttttaaaagcatttcttccctgtattttcatatacaagttggttttaattttgtttgggtggtgttattttttttaaatgactttttagtttagaaagttctgatgagcaaataaatacatctatctacatgttggaagtccatctgccagcacacctgcttaaagtgaaatgaaagcacataaccaggctctgaatgggttatattttatcatggtgctcccagaatcctttgacctcactctgctttctagtctgcttgtgacactggacagtcctttcttacagagctattatatgttctaggctacgaagggttaaataatcccaaaaatgaggtatgtcatacccacacgtctttatctctagaagctgtgatgtatgtgaaacagcactgttattcttaacactagtgtgtaaaataaggattagtacagtacgtctcattactttttaattcagggcaccctgagtgaaaacaaatacaaaaaaaaatccctaactctgagctctatctctgattcctcttcctccttcccctcttcctcctcttcctctcctcctgttttgctacattctcctcagtggcaaaaagtttcactctacctctgacagcatgtatattgcaccagtagctaacaaaaactggtctagtcaaaccaaatgggcacaaaagaaccaggataccaaaagttaagctcatacagctgcaaaccatatcacttcttggtaacaatgcagacctcataaacctaaagaagagaaagaaaagaaaacttttgttactttccttttttgcttgtcacttatatacaggctatgtgagaatataatttgtaggtataacacattaagaaaaagttatcttcattggatagaattgaatggtggtcgctgataggaatagggcgtcctctagctcttatctctgtctcttactcttttctctttctctttttctctgtcatgagactgtgtgtgacagggccacctgtcttttttttttcttaaattttttttttttttatgtgtaggtgcatgtcttggggatttaaaaatttcaaggctggtttacttatgcaaagcatgcctacgtctggaatacttagggaaagaaagcgactccatgttgtccgaattcctcaagggacagaaaaaaaattggagactgttgaaatgcagatttgaagtaatttttttaaaatattattttgggttctgcgacattgtgaaaaattaaagttgttgtgcaatacttaattcagacatgtaccacaagttaatggtagactaacactggggggtggggtctaggcatcatgcttttgtcagcatactcttgagcttttaagtctactatgtctgaactgtggtttcttgtttatccttttttccttagttggactgtaatgtatggtctgtcaacctgtgaatctttaaagtatgattcaggtattgttgtattctttactgtgtaataaaaaagttgaaaaaaatctggatcctctgtctccctcgtccccggtgtgccatggttgcccaccagtgaccccagcctgaggagtccatcctccatggtgctgaatcaaatctgtagagtttattcagctacaaagcgtggctctgtaacaggagttggcttatccatgcgtgttgagtagggaatgatgtcagaactttgcaaaagtcgagctcattcataaggggatgtttctcaggcaggaggagtaggaagagtgggaggagaattactaccttccataggaaaggagagcttggcttgcctagattagctgctgcatagatagcagaggcccttttggctgtgttttgataaaattagaaatgagtacctaaatctggatcactctgctcagagaggttcgtgccaacctcatgaggctctgactcttgtcaggttgcttggctgccttgtgcatacccgaatggcagatcagctgacatgacatggaactgctctatctgccttgtcccctctcctctaattaaaagtcgctaccattgtcactcttggttatgtagttaatatccactgtggctatctccaacttgctgggacatccagttatctcctctgacacatattttttcattctctagttacaaagtttgttagagtttgaaaaacaaacccttctcccctaccctgtgaatgctgttagtttttatgtgtagttttcaaaacacagattatcttatatactgtgttgtagcagaaattcctgtttcctctgaatgttctgactttatagaccaaaataatcgttgcaaaaaatcaaggatggcacagcaggtgcatgagcccgtgtctggagaaaggttatgaaggtgaatgctggttacatgggagggtgacttggagccctctagtttccttcttgtgccagctgggttcctgtttcaaggccaggcttctctaacttgtcttcctgggaaatgtagcttttccaagaatttggtagtgcacaccaggaaaaactaggtatcagaacagatttttttttaaatagtggaaacaccctcactcccacactttggacagttagggttggatatttaatttcatagttactctttttttccacagaagaaaggccagcctgacccaagttgcctatttttaatgtgttactgcatcttattttctcttcaaagtgaaaaaggccagaaactagcagatagaaatggaacccgttgacttagttcccttataagaagttcttgcaaacacctctgtgacgttttcattcaagtggatatgttggacaaataggaaacagttttagtttacgcgaacagtatgagacttccaggtggtggacgccatttttttagaagtgttgatgatgtatttgataacattataaaagtatgtgtctcccgtgaaagaacattgagctatttccctggaatggatggggaagaaatgagcaaaggagtgctgttctgtatgggtgtctatacccttattccaaggtgaataaataaagttgtgtttgcctaatcatg
